(19) United States
(12) Patent Application Publication
(10) Pub. No.: US 2007/0150978 A1
(43) Pub. Date: Jun. 28, 2007

(54) Nucleic acid molecules and other molecules associated with plants

(76) Inventor: Joseph R. Byrum, Des Moines, IA (US)

Correspondence Address: ARNOLD & PORTER, LLP, 555 TWELFTH STREET, N.W., ATTN: IP DOCKETING, WASHINGTON, DC, 20004, US

(21) Appl. No.: 11/486,299

(22) Filed: Jul. 14, 2006

Related U.S. Application Data
(63) Continuation of application No. 09/572,409, filed on May 16, 2000, now abandoned.
(60) Provisional application No. 60/134,429, filed on May 17, 1999.

(51) Int. Cl. A01H 1/00; C07H 21/04; C07K 14/415; C07K 16/18

(52) U.S. Cl. 800/278; 530/370; 530/388.1; 435/419; 435/468; 536/23.6

(57) ABSTRACT

The present invention is in the field of plant genetics. More specifically the invention relates to nucleic acid molecules and nucleic acid molecules that contain markers, in particular, single nucleotide polymorphism (SNP) and repetitive element markers. In addition, the present invention provides nucleic acid molecules having regulatory elements or encoding proteins or fragments thereof. The invention also relates to proteins and fragments of proteins so encoded and antibodies capable of binding the proteins. The invention also relates to methods of using the nucleic acid molecules, markers, repetitive elements and fragments of repetitive elements, regulatory elements, proteins and fragments of proteins.

### CROSS REFERENCE TO RELATED APPLICATIONS

[0001] This application is a continuation of U.S. application Ser. No. 09/572,409, filed May 16, 2000, which claims the benefit of provisional application No. 60/134,429, filed May 17, 1999, the entireties of which are incorporated herein by reference.

### INCORPORATION OF SEQUENCE LISTING

[0002] This application contains a sequence listing, which is contained on three identical CD-ROMs: two copies of a sequence listing (Copy 1 and Copy 2) and a sequence listing Computer Readable Form (CRF), all of which are herein incorporated by reference. All three CD-ROMs each contain one file called “Ricebe-Reg.txt” which is 50,233,902 bytes in size (as measured in MS-DOS) and was created on Jul. 14, 2006.

### FIELD OF THE INVENTION

[0003] The present invention is in the field of plant genetics. More specifically the invention relates to nucleic acid molecules and nucleic acid molecules that contain markers, in particular, single nucleotide polymorphism (SNP) and repetitive element markers. In addition, the present invention provides nucleic acid molecules having regulatory elements or encoding proteins or fragments thereof. The invention also relates to proteins and fragments of proteins so encoded and antibodies capable of binding the proteins. The invention also relates to methods of using the nucleic acid molecules, markers, repetitive elements and fragments of repetitive elements, regulatory elements, proteins and fragments of proteins.

### BACKGROUND OF THE INVENTION

I. Sequence Tagged Connector Nucleic Acid Molecules and the Bacterial Artificial Chromosomes (BACS) Containing these Sequences.

[0004] Sequence tagged connectors, or STCs, are sequences of insert data generated from both ends (at the vector-insert point) of a BAC clone in a genomic library. These sequences, and BACs containing these STC sequences, can be used, for example, for marker development, genetic mapping or linkage analysis, marker assisted breeding, and physical genome mapping (Venter, et al., Nature, 381:364-366 (1996), the entirety of which is herein incorporated by reference; Choi and Wing, http://www.genome.clemson.edu/protocols2-nj.html July, 1998). STCs can represent a copy of up to a full length of a mRNA transcript, a promoter element or part of a promoter, can contain simple sequence repeats (also called microsatellites) repetitive elements or fragments of repetitive elements, other DNA markers, or any combination thereof.

[0005] Markers have been used in genetic mapping which can be a step in isolating a gene. Genetic mapping or linkage analysis is based on the level at which markers and genes are co-inherited (Rothwell, Understanding Genetics. 4^{th} Ed., Oxford University Press, New York, p. 703 (1988). Statistical tests like chi-square analysis can be used to test the randomness of segregation or linkage (Kochert, The Rockefeller Foundation International Program on Rice Biotechnology, University of Georgia, Athens, Ga., pp 1-14 (1989), the entirety of which is herein incorporated by reference. In linkage mapping, the proportion of recombinant individuals out of the total mapping population provides the information for determining the genetic distance between the loci (Young, Encyclopedia of Agricultural Science, Vol. 3, pp 275-282 (1994), the entirety of which is herein incorporated by reference).

[0006] Classical mapping studies utilize easily observable, visible traits instead of molecular markers. These visible traits are also known as naked eye polymorphisms. These traits can be morphological like plant height, fruit size, shape and color or physiological like disease response, photoperiod sensitivity or crop maturity. Visible traits are useful and are still in use because they represent actual phenotypes and are easy to score without any specialized lab equipment. By contrast, the other types of genetic markers are arbitrary loci for use in linkage mapping and often not associated to specific plant phenotypes (Young, Encyclopedia of Agricultural Science, Vol. 3, pp. 275-282 (1994). Many morphological markers cause such large effects on phenotype that they are undesirable in breeding programs. Many other visible traits have the disadvantage of being developmentally regulated (i.e., expressed only at certain stages; or in specific tissues and organs). Often times, visible traits mask the effects of linked minor genes making it nearly impossible to identify desirable linkages for selection (Tanksely, et al., Biotech. 7:257-264 (1989), the entirety of which is herein incorporated by reference).

[0007] Although a number of important agronomic characters are controlled by loci having major effects on phenotype, many economically important traits, such as yield and some forms of disease resistance, are quantitative in nature. This type of phenotypic variation in a trait is characterized by continuous, normal distribution of phenotypic values in a particular population (Beckmann and Soller, Oxford Surveys of Plant Molecular Biology, Miffen. (ed.), Vol. 3, Oxford University Press, UK., pp. 196-250 (1986), the entirety of which is herein incorporated by reference). Such traits are governed by a large number of loci, Quantitative Trait Loci (QTL), each of which can make a small positive or negative effect to the final phenotype value of the trait (Beckmann and Soller, Oxford Surveys of Plant Molecular Biology, Miffen. (ed.), Vol. 3, Oxford University Press, U.K., pp. 196-250 (1986). Loci contributing to such genetic variation are often termed minor genes as opposed to major genes with large effects that follow a Mendelian pattern of inheritance. Polygenic traits are also predicted to follow a Mendelian type of inheritance, however the contribution of each locus is expressed as an increase or decrease in the final trait value.

[0008] Markers have been used in physical mapping studies with BAC libraries made from plant genomes. Such mapping studies have been carried out in rice (Kim et al., Genomics 34:213-218 (1996), herein incorporated by reference; Hang, Plant Mol. Biol. 35:129-133 (1997), herein incorporated by reference; Zhang and Wing., Plant Mol. Bio. 35:115-127 (1997) herein incorporated by reference; Chen et al., Proc. Acad. Sci. (U.S.A.) 94:3431-3435 (1997) herein incorporated by reference; Wang et al., Plant J. 7:525-533 (1995) herein incorporated by reference) sorghum (Zwick et al., Genetics 148:1983-1992 (1998) herein incorporated by reference; Zhang, et al., Molecular Breeding 2:11-24 (1996) the entirety of which is herein incorporated by reference) maize, (Chen, et al., Proc. Acad. Sci. (U.S.A.) 94:3431-3435 (1997), and Arabidopsis (Kim et al., Genomics 34:213-218 (1996) the entirety of which is herein incorporated by reference).

[0009] Repetitive elements have been used in physical mapping in cereals (Ananiev, et al., Proc. Acad. Sci. (U.S.A.) 95:13073-8 (1998), the entirety of which is herein incorporated by reference; McLean et al., Mol Gen Genet 253:687-694 (1997), the entirety of which is herein incorporated by reference).

II. Sequence Comparisons

[0010] STCs and sequenced BACs can be compared, for example, to sequences that encode promoters or proteins or other sequences. These homologies can be determined by similarity searches (Adams, et al., Science 252:1651-1656 (1991), the entirety of which is herein incorporated by reference).

[0011] A characteristic feature of a DNA sequence is that it can be compared with other DNA sequences. Sequence comparisons can be undertaken by determining the similarity of the test or query sequence with sequences in publicly available or propriety databases (“similarity analysis”) or by searching for certain motifs (“intrinsic sequence analysis”)(e.g., cis elements) (Coulson, Trends in Biotechnology, 12:76-80 (1994), the entirety of which is herein incorporated by reference; Birren, et al., Genome Analysis, 1:543-559 (1997), the entirety of which is herein incorporated by reference).

[0012] Similarity analysis includes database search and alignment. Examples of public databases include the DNA Database of Japan (DDBJ) (available on the World Wide Web at ddbj.nig.ac.jp/); Genebank (available on the World Wide Web at ncbi.nlm.nih.gov/web/Genbank/Index.html); and the European Molecular Biology Laboratory Nucleic Acid Sequence Database (EMBL) (available on the World Wide Web at ebi.ac.uk/ebi_docs/embl_db.html). A number of different search algorithms have been developed, one example of which are the suite of programs referred to as BLAST programs. There are five implementations of BLAST, three designed for nucleotide sequences queries (BLASTN, BLASTX, and TBLASTX) and two designed for protein sequence queries (BLASTP and TBLASTN) (Coulson, Trends in Biotechnology, 12:76-80 (1994); Birren, et al., Genome Analysis, 1:543-559 (1997)).

[0013] BLASTN takes a nucleotide sequence (the query sequence) and its reverse complement and searches them against a nucleotide sequence database. BLASTN was designed for speed, not maximum sensitivity, and may not find distantly related coding sequences. BLASTX takes a nucleotide sequence, translates it in three forward reading frames and three reverse complement reading frames, and then compares the six translations against a protein sequence database. BLASTX is useful for sensitive analysis of preliminary (single-pass) sequence data and is tolerant of sequencing errors (Gish and States, Nature Genetics, 3:266-272 (1993), the entirety of which is herein incorporated by reference). BLASTN and BLASTX may be used in concert for analyzing STC data (Coulson, Trends in Biotechnology, 12:76-80 (1994); Birren, et al., Genome Analysis, 1:543-559 (1997).

[0014] Given a coding nucleotide sequence and the protein it encodes, it is often preferable to use the protein as the query sequence to search a database because of the greatly increased sensitivity to detect more subtle relationships. This is due to the larger alphabet of proteins (20 amino acids) compared with the alphabet of nucleic acid sequences (4 bases), where it is far easier to obtain a match by chance. In addition, with nucleotide alignments, only a match (positive score) or a mismatch (negative score) is obtained, but with proteins, the presence of conservative amino acid substitutions can be taken into account. Here, a mismatch may yield a positive score if the non-identical residue has physical/chemical properties similar to the one it replaced. Various scoring matrices are used to supply the substitution scores of all possible amino acid pairs. A general purpose scoring system is the BLOSUM62 matrix (Henikoff and Henikoff, Proteins, 17:49-61 (1993), the entirety of which is herein incorporated by reference), which is currently the default choice for BLAST programs. BLOSUM62 is tailored for alignments of moderately diverged sequences and thus may not yield the best results under all conditions. Altschul, J. Mol. Biol. 36:290-300 (1993), the entirety of which is herein incorporated by reference, uses a combination of three matrices to cover all contingencies. This may improve sensitivity, but at the expense of slower searches. In practice, a single BLOSUM62 matrix is often used but others (PAM40 and PAM250) may be attempted when additional analysis is necessary. Low PAM matrices are directed at detecting very strong but localized sequence similarities, whereas high PAM matrices are directed at detecting long but weak alignments between very distantly related sequences.

[0015] Homologues in other organisms are available that can be used for comparative sequence analysis. Multiple alignments are performed to study similarities and differences in a group of related sequences. CLUSTAL W is a multiple sequence alignment package available that performs progressive multiple sequence alignments based on the method of Feng and Doolittle, J. Mol. Evol. 25:351-360 (1987), the entirety of which is herein incorporated by reference. Each pair of sequences is aligned and the distance between each pair is calculated; from this distance matrix, a guide tree is calculated, and all of the sequences are progressively aligned based on this tree. A feature of the program is its sensitivity to the effect of gaps on the alignment; gap penalties are varied to encourage the insertion of gaps in probable loop regions instead of in the middle of structured regions. Users can specify gap penalties, choose between a number of scoring matrices, or supply their own scoring matrix for both the pairwise alignments and the multiple alignments. CLUSTAL W for UNIX and VMS systems is available at: ftp.ebi.ac.uk. Another program is MACAW (Schuler et al., Proteins, Struct. Func. Genet, 9: 180-190 (1991), the entirety of which is herein incorporated by reference, for which both Macintosh and Microsoft Windows versions are available. MACAW uses a graphical interface, provides a choice of several alignment algorithms, and is available by anonymous ftp at: ncbi.nlm.nih.gov (directory/pub/macaw).

[0016] Sequence motifs are derived from multiple alignments and can be used to examine individual sequences or an entire database for subtle patterns. With motifs, it is sometimes possible to detect distant relationships that may not be demonstrable based on comparisons of primary sequences alone. Currently, the largest collection of sequence motifs in the world is PROSITE (Bairoch and Bucher, Nucleic Acid Research, 22:3583-3589 (1994), the entirety of which is herein incorporated by reference). PROSITE may be accessed via either the ExPASy server on the World Wide Web or anonymous ftp site. Many commercial sequence analysis packages also provide search programs that use PROSITE data.

[0017] A resource for searching protein motifs is the BLOCKS E-mail server developed by S. Henikoff, Trends Biochem Sci., 18:267-268 (1993), the entirety of which is herein incorporated by reference; Henikoff and Henikoff, Nucleic Acid Research, 19:6565-6572 (1991), the entirety of which is herein incorporated by reference; Henikoff and Henikoff, Proteins, 17:49-61 (1993). BLOCKS searches a protein or nucleotide sequence against a database of protein motifs or “blocks.” Blocks are defined as short, ungapped multiple alignments that represent highly conserved protein patterns. The blocks themselves are derived from entries in PROSITE as well as other sources. Either a protein or nucleotide query can be submitted to the BLOCKS server; if a nucleotide sequence is submitted, the sequence is translated in all six reading frames and motifs are sought in these conceptual translations. Once the search is completed, the server will return a ranked list of significant matches, along with an alignment of the query sequence to the matched BLOCKS entries.

[0018] Conserved protein domains can be represented by two-dimensional matrices, which measure either the frequency or probability of the occurrences of each amino acid residue and deletions or insertions in each position of the domain. This type of model, when used to search against protein databases, is sensitive and usually yields more accurate results than simple motif searches. Two popular implementations of this approach are profile searches (such as GCG program ProfileSearch) and Hidden Markov Models (HMMs) (Krough, et al., J. Mol. Biol. 235:1501-1531 (1994); Eddy, Current Opinion in Structural Biology 6:361-365 (1996), both of which are herein incorporated by reference in their entirety). In both cases, a large number of common protein domains have been converted into profiles, as present in the PROSITE library, or HHM models, as in the Pfam protein domain library (Sonnhammer, et al., Proteins 28:405-420 (1997), the entirety of which is herein incorporated by reference). Pfam contains more than 500 HMM models for enzymes, transcription factors, signal transduction molecules, and structural proteins. Protein databases can be queried with these profiles or HMM models, which will identify proteins containing the domain of interest. For example, HMMSW or HMMFS, two. programs in a public domain package called HMMER (Sonnhammer, et al., Proteins 28:405-420 (1997)) can be used.

[0019] PROSITE and BLOCKS represent collected families of protein motifs. Thus, searching these databases entails submitting a single sequence to determine whether or not that sequence is similar to the members of an established family. Programs working in the opposite direction compare a collection of sequences with individual entries in the protein databases. An example of such a program is the Motif Search Tool, or MoST (Tatusov, et al., Proc. Natl. Acad. Sci. 91:12091-12095 (1994), the entirety of which is herein incorporated by reference). On the basis of an aligned set of input sequences, a weight matrix is calculated by using one of four methods (selected by the user); a weight matrix is simply a representation, position by position in an alignment, of how likely a particular amino acid will appear. The calculated weight matrix is then used to search the databases. To increase sensitivity, newly found sequences are added to the original data set, the weight matrix is recalculated, and the search is performed again. This procedure continues until no new sequences are found.

### SUMMARY OF THE INVENTION

[0020] The present invention provides a substantially purified nucleic acid molecule, the nucleic acid molecule capable of specifically hybridizing to a second nucleic acid molecule having a nucleic acid sequence selected from the group consisting of SEQ ID NO: 1 through SEQ ID NO: 79201 or complement or fragment of either.

[0021] The present invention provides a substantially purified nucleic acid molecule comprising a nucleic acid molecule or fragment thereof having a pair of defined ends, wherein the pair of defined ends are selected from the defined ends in Table A in U.S. application Ser. No. 09/572,409, the entirety of which is incorporated herein by reference.

[0022] The present invention provides a substantially purified protein or fragment thereof encoded by a first nucleic acid molecule which specifically hybridizes to a second nucleic acid molecule, the second nucleic acid molecule having a nucleic acid sequence selected from the group consisting of SEQ ID NO:1 through SEQ ID NO:79201 or complements thereof.

[0023] The present invention provides a substantially purified protein or fragment thereof encoded by a nucleic acid sequence selected from the group consisting of SEQ ID NO:1 through SEQ ID NO:79201 or complements thereof or fragments of either.

[0024] The present invention provides a transformed plant having a nucleic acid molecule which comprises: (A) an exogenous promoter region which functions in a plant cell to cause the production of a mRNA molecule; which is linked to (B) a structural nucleic acid molecule, wherein the structural nucleic acid molecule is selected from the group consisting of SEQ ID NO:1 through SEQ ID NO:79201 or complements thereof or fragments of either; which is linked to (C) a 3′ non-translated sequence that functions in a plant cell to cause termination of transcription and addition of polyadenylated ribonucleotides to a 3′ end of the mRNA molecule.

[0025] The present invention provides a transformed plant having a nucleic acid molecule which comprises: (A) an exogenous promoter region which functions in a plant cell to cause the production of a mRNA molecule wherein the promoter nucleic acid molecule is selected from the group consisting of SEQ ID NO:1 through SEQ ID NO:79201 or complements thereof or fragments of either; which is linked to (B) a structural nucleic acid molecule encoding a protein or peptide; which is linked to (C) a 3′ non-translated sequence that functions in a plant cell to cause termination of transcription and addition of polyadenylated ribonucleotides to a 3′ end of the mRNA molecule.

[0026] The present invention provides a transformed plant having a nucleic acid molecule which comprises: (A) an exogenous promoter region which functions in a plant cell to cause the production of a mRNA molecule; which is linked to (B) a transcribed nucleic acid molecule with a transcribed strand and a non-transcribed strand, wherein the transcribed strand is complementary to a nucleic acid molecule having a nucleic acid sequence selected from the group consisting of SEQ ID NO:1 through SEQ ID NO:79201 or complements thereof or fragments of either and the transcribed strand is complementary to an endogenous mRNA molecule; which is linked to (C) a 3′ non-translated sequence that functions in plant cells to cause termination of transcription and addition of polyadenylated ribonucleotides to a 3′ end of the MRNA molecule.

[0027] The present invention provides a transformed plant having a nucleic acid molecule which comprises: (A) an exogenous promoter region which functions in a plant cell to cause the production of a mRNA molecule wherein the promoter nucleic acid molecule is selected from the group consisting of SEQ ID NO:1 through SEQ ID NO:79201 or complements thereof or fragments of either; which is linked to (B) a transcribed nucleic acid molecule with a transcribed strand and a non-transcribed strand, wherein the transcribed strand is complementary to an endogenous MRNA molecule; which is linked to (C) a 3′ non-translated sequence that functions in plant cells to cause termination of transcription and addition of polyadenylated ribonucleotides to a 3′ end of the mRNA molecule.

[0028] The present invention provides a computer readable medium having recorded thereon one or more of the nucleotide sequences depicted in SEQ ID NO:1 through SEQ ID NO: 79201.

[0029] The present invention provides a method of introgressing a trait into a plant comprising using a nucleic acid marker for marker assisted selection of the plant, the nucleic acid marker complementary to a nucleic acid sequence selected from the group consisting of SEQ ID NO: 1 through SEQ ID NO: 79201 or complement thereof or fragment of either, and introgressing the trait into a plant.

[0030] The present invention provides a method for screening for a trait comprising interrogating genomic DNA for the presence or absence of a marker molecule that is genetically linked to a nucleic acid sequence complementary to a nucleic acid sequence selected from the group consisting of SEQ ID NO: 1 through SEQ ID NO: 79201 or complements thereof or fragment of either; and detecting the presence or absence of the marker.

[0031] The present invention provides a method for determining the likelihood of the level, presence or absence of a trait in a plant comprising the steps of: (A) obtaining genomic DNA from the plant; (B) detecting a marker nucleic acid molecule; the marker nucleic acid molecule wherein the marker nucleic acid molecule specifically hybridizes with a nucleic acid sequence that is genetically linked to a nucleic acid sequence complementary to a nucleic acid sequence selected from the group consisting of SEQ ID NO: 1 through SEQ ID NO: 79201 or complements thereof; (C) and determining the level, presence or absence of the marker nucleic acid molecule, wherein the level, presence or absence of the marker nucleic acid molecule is indicative of the likely presence in the plant of the trait.

[0032] The present invention provides a method for determining a genomic polymorphism in a plant that is predictive of a trait comprising the steps: (A) incubating a marker nucleic acid molecule, under conditions permitting nucleic acid hybridization, and a complementary nucleic acid molecule obtained from the plant, the marker nucleic acid molecule having a nucleic acid sequence selected from the group consisting of SEQ ID NO: 1 through SEQ ID NO: 79201 or complements thereof; (B) permitting hybridization between the marker nucleic acid molecule and the complementary nucleic acid molecule obtained from the plant; and (C) detecting the presence of the polymorphism.

[0033] The present invention provides a method of determining an association between a polymorphism and a plant trait comprising: (A) hybridizing a nucleic acid molecule specific for the polymorphism to genetic material of a plant, wherein the nucleic acid molecule comprises a nucleic acid sequence selected from the group consisting of SEQ ID NO: 1 through SEQ ID NO: 79201 or complements thereof; and (B) calculating the degree of association between the polymorphism and the plant trait.

### DETAILED DESCRIPTION OF THE INVENTION

Agents of the Invention:

[0034] (a) Nucleic Acid Molecules

[0035] Agents of the present invention include nucleic acid molecules and more specifically BACs and STC nucleic acid molecules or nucleic acid fragment molecules thereof.

[0036] A subset of the nucleic acid molecules of the present invention includes nucleic acid molecules that are marker molecules. Another subset of the nucleic molecules of the present invention include nucleic acid molecules that are promoters and/or regulatory elements. Another subset of the nucleic acid molecules of the present invention include nucleic acid molecules that encode proteins or fragments of proteins. In a preferred embodiment the nucleic acid molecules of the present invention are derived from Oryza sativa L (rice) and more preferably Oryza sativa L (japonica type), more preferably Oryza sativa L (japonica type), cv. Nipponbane.

[0037] Fragment STC nucleic acid molecules and fragments of BACs may encode significant portion(s) of, or indeed most of, the STC or BAC nucleic acid molecule. In addition, a fragment nucleic acid molecule can encode a Oryza sativa L protein or fragment thereof. Alternatively, the fragments may comprise smaller oligonucleotides (having from about 15 to about 250 nucleotide residues, and more preferably, about 15 to about 30 nucleotide residues). In another preferred embodiment, the fragments may comprise oligonucleotides between about 50 to about 100 nucleotides.

[0038] The term “substantially purified”, as used herein, refers to a molecule separated from substantially all other molecules normally associated with it in its native state. More preferably a substantially purified molecule is the predominant species present in a preparation. A substantially purified molecule may be greater than 60% free, preferably 75% free, more preferably 90% free, and most preferably 95% free from the other molecules (exclusive of solvent) present in the natural mixture. The term “substantially purified” is not intended to encompass molecules present in their native state.

[0039] The agents of the present invention will preferably be “biologically active” with respect to either a structural attribute, such as the capacity of a nucleic acid to hybridize to another nucleic acid molecule, or the ability of a protein to be bound by an antibody (or to compete with another molecule for such binding). Alternatively, such an attribute may be catalytic, and thus involve the capacity of the agent to mediate a chemical reaction or response.

[0040] The agents of the present invention may also be recombinant. As used herein, the term recombinant means any agent (e.g., DNA, peptide etc.), that is, or results, however indirect, from human manipulation of a nucleic acid molecule.

[0041] It is understood that the agents of the present invention may be labeled with reagents that facilitate detection of the agent (e.g., fluorescent labels (Prober, et al., Science 238:336-340 (1987); Albarella et al., EP 144914, chemical labels (Sheldon et al., U.S. Pat. No. 4,582,789; Albarella et al., U.S. Pat. No. 4,563,417, modified bases (Miyoshi et al., EP 119448, all of which are hereby incorporated by reference in their entirety).

[0042] It is further understood, that the present invention provides, for example, bacterial, viral, microbial, insect, fungal and plant cells comprising the agents of the present invention.

[0043] The BAC nucleic acid molecules of the present invention include, without limitation, BAC nucleic acid molecules having inserts with two defined ends (STC) as set forth in Table A in U.S. application Ser. No. 09/572,409, the entirety of which is incorporated herein by reference. It is understood that fragments of such BAC molecules can contain one or neither of the defined ends.

[0044] STC nucleic acid molecules or fragment STC nucleic acid molecules, or BACs or fragments thereof, of the present invention are capable of specifically hybridizing to other nucleic acid molecules under certain circumstances. As used herein, two nucleic acid molecules are said to be capable of specifically hybridizing to one another if the two molecules are capable of forming an anti-parallel, double-stranded nucleic acid structure. A nucleic acid molecule is said to be the “complement” of another nucleic acid molecule if they exhibit complete complementarity. As used herein, molecules are said to exhibit “complete complementarity” when every nucleotide of one of the molecules is complementary to a nucleotide of the other. Two molecules are said to be “minimally complementary” if they can hybridize to one another with sufficient stability to permit them to remain annealed to one another under at least conventional “low-stringency” conditions. Similarly, the molecules are said to be “complementary” if they can hybridize to one another with sufficient stability to permit them to remain annealed to one another under conventional “high-stringency” conditions. Conventional stringency conditions are described by Sambrook et al., Molecular Cloning, A Laboratory Manual, 2nd Ed., Cold Spring Harbor Press, Cold Spring Harbor, New York (1989), and by Haymes et al., Nucleic Acid Hybridization, A Practical Approach, IRL Press, Washington, DC (1985), the entirety of which is herein incorporated by reference. Departures from complete complementarity are therefore permissible, as long as such departures do not completely preclude the capacity of the molecules to form a double-stranded structure. Thus, in order for an STC nucleic acid molecule, fragment STC nucleic acid molecule, BAC nucleic acid molecule or fragment BAC nucleic acid molecule to serve as a primer or probe it need only be sufficiently complementary in sequence to be able to form a stable double-stranded structure under the particular solvent and salt concentrations employed.

[0045] Appropriate stringency conditions which promote DNA hybridization are, for example, 6.0×sodium chloride/sodium citrate (SSC) at about 45° C., followed by a wash of 2.0×SSC at 50° C., are known to those skilled in the art or can be found in Current Protocols in Molecular Biology, John Wiley & Sons, N.Y. (1989), 6.3.1-6.3.6. For example, the salt concentration in the wash step can be selected from a low stringency of about 2.0×SSC at 50° C. to a high stringency of about 0.2×SSC at 50° C. In addition, the temperature in the wash step can be increased from low stringency conditions at room temperature, about 22° C., to high stringency conditions at about 65° C. Both temperature and salt may be varied, or either the temperature or the salt concentration may be held constant while the other variable is changed.

[0046] In a preferred embodiment, a nucleic acid of the present invention will specifically hybridize to one or more of the nucleic acid molecules set forth in SEQ ID NO: 1 through SEQ ID NO: 79201 or complements thereof under moderately stringent conditions, for example at about 2.0×SSC and about 40° C.

[0047] In a particularly preferred embodiment, a nucleic acid of the present invention will specifically hybridize to one or more of the nucleic acid molecules set forth in SEQ ID NO:1 through SEQ ID NO:79201 or complements thereof under high stringency conditions. In one aspect of the present invention, the nucleic acid molecules of the present invention have one or more of the nucleic acid sequences set forth in SEQ ID NO: 1 through to SEQ ID NO:79201 or complements thereof. In another aspect of the present invention, one or more of the nucleic acid molecules of the present invention share between 100% and 90% sequence identity with one or more of the nucleic acid sequences set forth in SEQ ID NO: 1 through to SEQ ID NO:79201 or complements thereof. In a further aspect of the present invention, one or more of the nucleic acid molecules of the present invention share between 100% and 95% sequence identity with one or more of the nucleic acid sequences set forth in SEQ ID NO: 1 through to SEQ ID NO:79201 or complements thereof. In a more preferred aspect of the present invention, one or more of the nucleic acid molecules of the present invention share between 100% and 98% sequence identity with one or more of the nucleic acid sequences set forth in SEQ ID NO: 1 through to SEQ ID NO:79201 or complements thereof. In an even more preferred aspect of the present invention, one or more of the nucleic acid molecules of the present invention share between 100% and 99% sequence identity with one or more of the sequences set forth in SEQ ID NO: 1 through to SEQ ID NO:79201 or complements thereof. In a further, even more preferred aspect of the present invention, one or more of the nucleic acid molecules of the present invention exhibit 100% sequence identity with one or more nucleic acid molecules present within the genomic library herein designated BAC#OJ(Monsanto Company, St. Louis, Mo., United States of America).

[0048] It is understood that the present invention encompasses fragments of such nucleic acid molecules and that such nucleic acid fragments may contain one, part of one, or neither of the defined sequences.

[0049] (i) Nucleic Acid Molecule Markers

[0050] One aspect of the present invention concerns nucleic acid molecules SEQ ID NO:1 through SEQ ID NO:79201 or complements thereof and other nucleic acid molecules of the present invention, that contain microsatellites, single nucleotide substitutions (SNPs), repetitive elements or parts of repetitive elements or other markers. Microsatellites typically include a 1-6 nucleotide core element within SEQ ID NO:1 through SEQ ID NO:79201 that are tandemly repeated from one to many thousands of times. A different “allele” occurs at an SSR locus as a result of changes in the number of times a core element is repeated, altering the length of the repeat region, (Brown et al., Methods of Genome Analysis in Plants, (ed.) Jauhar, CRC Press, Inc, Boca Raton, Fla., USA; London, England, UK, pp. 147-159, (1996), the entirety of which is herein incorporated by reference). SSR loci occur throughout plant genomes, and specific repeat motifs occur at different levels of abundance than those found in animals. The relative frequencies of all SSRs with repeat units of 1-6 nucleotides have been surveyed. The most abundant SSR is AAAAAT followed by Aₙ, AGₙ AAT, AAC, AGC, AAG, AATT, AAAT and AC. On average, 1 SSR is found every 21 and 65 kb in dicots and monocots. Fewer CG nucleotides are found in dicots than in monocots. There is no correlation between abundance of SSRs and nuclear DNA content. The abundance of all tri and tetranucleotide SSR combination jointly have been reported to be equivalent to that of the total di-nucleotide combinations. Mono- di- and tetra-nucleotide repeats are all located in noncoding regions of DNA while 57% of those trinucleotide SSRs containing CG were located within gene coding regions. All repeated trinucleotide SSRs composed entirely of AT are found in noncoding regions, (Brown et al., Methods of Genome Analysis in Plants, ed. Jauhar, CRC Press, Inc, Boca Raton, Fla., USA; London, England, UK, pp. 147-159, (1996).

[0051] Microsatellites can be observed in SEQ NO:1 to SEQ NO:79201 or complements thereof by using the BLASTN program to examine sequences for the presence/absence of microsatellites. In this system, raw sequence data is searched through databases, which store SSR markers collected from publications and 692 classes of di-, tri and tetranucleotide repeat markers generated by computer. Microsatellites can also be observed by screening the BAC library of the present invention by colony or plaque hybridization with a labeled probe containing microsatellite markers; isolating positive clones and sequencing the inserts of the positive clones; suitable primers flanking the microsatellite markers.

[0052] Single nucleotide polymorphisms (SNPs) are single base changes in genomic DNA sequence. They generally occur at greater frequency than other markers and are spaced with a greater uniformity throughout a genome than other reported forms of polymorphism. The greater frequency and uniformity of SNPs means that there is greater probability that such a polymorphism will be found near or in a genetic locus of interest than would be the case for other polymorphisms. SNPs are located in protein-coding regions and noncoding regions of a genome. Some of these SNPs may result in defective or variant protein expression (e.g., as a result of mutations or defective splicing). Analysis (genotyping) of characterized SNPs can require only a plus/minus assay rather than a lengthy measurement, permitting easier automation.

[0053] SNPs can be characterized using any of a variety of methods. Such methods include the direct or indirect sequencing of the site, the use of restriction enzymes (Botstein et al., Am. J. Hum. Genet. 32:314-331 (1980), the entirety of which is herein incorporated reference; Konieczny and Ausubel, Plant J. 4:403-410 (1993), the entirety of which is herein incorporated by reference), enzymatic and chemical mismatch assays (Myers et al., Nature 313:495-498 (1985), the entirety of which is herein incorporated by reference), allele-specific PCR (Newton et al., Nucl. Acids Res. 17:2503-2516 (1989), the entirety of which is herein incorporated by reference; Wu et al., Proc. Natl. Acad. Sci. USA 86:2757-2760 (1989), the entirety of which is herein incorporated by reference), ligase chain reaction (Barany, Proc. Natl. Acad. Sci. USA 88:189-193 (1991), the entirety of which is herein incorporated by reference), single-strand conformation polymorphism analysis (Labrune et al., Am. J. Hum. Genet. 48: 1115-1120 (1991), the entirety of which is herein incorporated by reference), primer-directed nucleotide incorporation assays (Kuppuswami et al., Proc. Natl. Acad. Sci. USA 88:1143-1147 (1991), the entirety of which is herein incorporated by reference), dideoxy fingerprinting (Sarkar et al., Genomics 13:441-443 (1992), the entirety of which is herein incorporated by reference), solid-phase ELISA-based oligonucleotide ligation assays (Nikiforov et al., Nucl. Acids Res. 22:4167-4175 (1994), the entirety of which is herein incorporated by reference), oligonucleotide fluorescence-quenching assays (Livak et al., PCR Methods Appl. 4:357-362 (1995a), the entirety of which is herein incorporated by reference), 5′-nuclease allele-specific hybridization TaqMan™ assay (Livak et al., Nature Genet. 9:341-342 (1995), the entirety of which is herein incorporated by reference), template-directed dye-terminator incorporation (TDI) assay (Chen and Kwok, Nucl. Acids Res. 25:347-353 (1997), the entirety of which is herein incorporated by reference), allele-specific molecular beacon assay (Tyagi et al., Nature Biotech. 16: 49-53 (1998), the entirety of which is herein incorporated by reference), PinPoint assay (Haff and Smimov, Genome Res. 7: 378-388 (1997), the entirety of which is herein incorporated by reference), and dCAPS analysis (Neff et al., Plant J. 14:387-392 (1998), the entirety of which is herein incorporated by reference).

[0054] SNPs can be observed by examining sequences of overlapping clones in the BAC library according to the method described by Taillon-Miller et al. Genome Res. 8:748-754 (1998), the entirety of which is herein incorporated). SNPs can also be observed by screening the BAC library of the present invention by colony or plaque hybridization with a labeled probe containing SNP markers; isolating positive clones and sequencing the inserts of the positive clones; suitable primers flanking the SNP markers.

[0055] Genetic markers of the present invention include “dominant” or “codominant” markers. “Codominant markers” reveal the presence of two or more alleles (two per diploid individual) at a locus. “Dominant markers” reveal the presence of only a single allele per locus. The presence of the dominant marker phenotype (e.g., a band of DNA) is an indication that one allele is present in either the homozygous or heterozygous condition. The absence of the dominant marker phenotype (e.g., absence of a DNA band) is merely evidence that “some other” undefined allele is present. In the case of populations where individuals are predominantly homozygous and loci are predominately dimorphic, dominant and codominant markers can be equally valuable. As populations become more heterozygous and multi-allelic, codominant markers often become more informative of the genotype than dominant markers.

[0056] In addition to SSRs and SNPs, repetitive elements can be used as markers. For most eukaryotes, interspersed repeat sequence elements are typically mobile genetic elements (Wright et al., Genetics 142:569-578 (1996), the entirety of which is herein incorporated by reference). They are ubiquitous in most living organisms and are present in copy numbers ranging from just a few elements to tens or hundreds or thousands per genome. In the latter case, they can represent a major fraction of the genome. For example, transposable elements have been estimated to make up greater than 50% of the maize genome (Kidwell, and Lisch Proc. Natl. Acad. Sci. (U.S.A.) 94:7704-7711 (1997), the entirety of which is herein incorporated by reference).

[0057] Transposable elements are classified in families according to their sequence similarity. Two major classes are distinguished by their differing modes of transposition. Class I elements are retroelements that use reverse transcriptase to transpose by means of an RNA intermediate. They include long terminal repeat retrotransposons and long and short interspersed elements (LINES and SINES, respectively). Class II elements transpose directly from DNA to DNA and include transposons such as the Activator-Dissociatiton (Ac-Ds) family in maize, the P element in Drosophila and the Tc-1 element in Caenhorabditis elegans. Additionally, a category of transposable elements has been discovered whose transpositon mechanism is not yet known. These miniature inverted-repeat transposable elements (MITEs) have some properties of both class I and II elements. They are short (100-400 bp in length) and none so far has been found to have any coding potential. They are present in high copy number (3,000-10,000) per genome and have target site preferences for TAA or TA in plants (Kidwell and Lisch, Proc. Natl. Acad. Sci. (U.S.A.) 94:7704-7711 (1997)).

[0058] Insertion elements are found in two areas of the genome. Some are located in regions distant from gene sequences such as in the heterochromatin or in regions between genes; other repeat elements are found in or near single copy sequences. The insertion of an Ac-Ds element into wx-m9, an allele of the waxy locus in maize is an example of a repetitive element found within a coding region. The effect of this insertion is attenuated by the loss through splicing of the transposable element after transcription (Kidwell and Lisch, Proc. Natl. Acad. Sci. (U.S.A.) 94:7704-7711 (1997)).

[0059] The genetic variability resulting from transposable elements ranges from changes in the size and arrangement of whole genomes to changes in single nucleotides. They may produce major effects on phenotypic traits or small silent changes detectable only at the DNA sequence level. Transposable elements may also produce variation when they excise, leaving small footprints of their previous presence (Kidwell and Lisch, Proc. Natl. Acad. Sci. (U.S.A.) 94:7704-7711(1997)).

[0060] In addition, other markers such as AFLP markers, RFLP markers, RAPD markers, phenotypic markers or isozyme markers can be utilized (Walton, Seed World 22-29 (July, 1993), the entirety of which is herein incorporated by reference; Burow and Blake, Molecular Dissection of Complex Traits, 13-29, Eds. Paterson, CRC Press, New York (1988), the entirety of which is herein incorporated by reference). DNA markers can be developed from nucleic acid molecules using restriction endonucleases, the PCR and/or DNA sequence information. RFLP markers result from single base changes or insertions/deletions. These codominant markers are highly abundant in plant genomes, have a medium level of polymorphism and are developed by a combination of restriction endonuclease digestion and Southern blotting hybridization. CAPS are similarly developed from restriction nuclease digestion but only of specific PCR products. These markers are also codominant, have a medium level of polymorphism and are highly abundant in the genome. The CAPS result from single base changes and insertions/deletions. Another marker type, RAPDs, are developed from DNA amplification with random primers and result from single base changes and insertions/deletions in plant genomes. They are dominant markers with a medium level of polymorphisms and are highly abundant. AFLP markers require using the PCR on a subset of restriction fragments from extended adapter primers. These markers are both dominant and codominant, are highly abundant in genomes and exhibit a medium level of polymorphism. SSRs require DNA sequence information. These codominant markers result from repeat length changes, are highly polymorphic, and do not exhibit as high a degree of abundance in the genome as CAPS, AFLPs and RAPDs. SNPs also require DNA sequence information. These codominant markers result from single base substitutions. They are highly abundant and exhibit a medium of polymorphism (Rafalski et al., In: Nonmammalian Genomic Analysis, ed. Birren and Lai, Academic Press, San Diego, Calif., pp. 75-134 (1996), the entirety of which is herein incorporated by reference). Methods to isolate such markers are known in the art.

[0061] Long Terminal repeat retrotransposons and MITEs have been found to be associated with the genes of many plants where some of the transposable elements contribute regulatory sequences. MITEs such as the Tourist element in maize and the Stowaway element in Sorghum are found frequently in the 5′ and 3′ noncoding regions of genes and are frequently associated with the regulatory regions of genes of diverse flowering plants (Kidwell and Lisch, Proc. Natl. Acad. Sci. (U.S.A) 94:7704-7711 (1997)). It is understood that one or more of the Long Terminal repeat retrotransposons and/or MITES may be a marker, and even more preferably a marker for a gene.

[0062] (ii) Nucleic Acid Molecules Comprising Regulatory Elements

[0063] Another class of agents of the present invention are nucleic acid molecules having promoter regions or partial promoter regions within SEQ ID NO: 1 through SEQ ID NO:79201 or other nucleic acid molecules of the present invention. Such promoter regions are typically found upstream of the trinucleotide ATG sequence at the start site of a protein coding region.

[0064] As used herein, a promoter region is a region of a nucleic acid molecule that is capable, when located in cis to a nucleic acid sequence that encodes for a protein or fragment thereof to function in a way that directs expression of one or more mRNA molecules that encodes for the protein or fragment thereof.

[0065] Promoters of the present invention can include between about 300 bp upstream and about 10 kb upstream of the trinucleotide ATG sequence at the start site of a protein coding region. Promoters of the present invention can preferably include between about 300 bp upstream and about 5 kb upstream of the trinucleotide ATG sequence at the start site of a protein coding region. Promoters of the present invention can more preferably include between about 300 bp upstream and about 2 kb upstream of the trinucleotide ATG sequence at the start site of a protein coding region. Promoters of the present invention can include between about 300 bp upstream and about 1 kb upstream of the trinucleotide ATG sequence at the start site of a protein coding region. While in many circumstances a 300 bp promoter may be sufficient for expression, additional sequences may act to further regulate expression, for example, in response to biochemical, developmental or environmental signals.

[0066] It is also preferred that the promoters of the present invention contain a CAAT and a TATA cis element. Moreover, the promoters of the present invention can contain one or more cis elements in addition to a CAAT and a TATA box.

[0067] By “regulatory element” it is intended a series of nucleotides that determines if, when, and at what level a particular gene is expressed. The regulatory DNA sequences specifically interact with regulatory or other proteins. Many regulatory elements act in cis (“cis elements”) and are believed to affect DNA topology, producing local conformations that selectively allow or restrict access of RNA polymerase to the DNA template or that facilitate selective opening of the double helix at the site of transcriptional initiation. Cis elements occur within, but are not limited to promoters, and promoter modulating sequences (inducible elements). Cis elements can be identified using known cis elements as a target sequence or target motif in the BLAST programs of the present invention.

[0068] Promoters of the present invention include homologues of cis elements known to effect gene regulation that show homology with the nucleic acid molecules of the present invention. These cis elements include, but are not limited to, oxygen responsive cis elements (Cowen et al., J Biol. Chem. 268(36):26904-26910 (1993) the entirety of which is herein incorporated by reference), light regulatory elements (Bruce and Quaill, Plant Cell 2 (II):1081-1089 (1990) the entirety of which is herein incorporated by reference; Bruce et al., EMBO J. 10:3015-3024 (1991), the entirety of which is herein incorporated by reference; Rocholl et al., Plant Sci. 97:189-198 (1994), the entirety of which is herein incorporated by reference; Block et al., Proc. Natl. Acad. Sci. (U.S.A.) 87:5387-5391 (1990), the entirety of which is herein incorporated by reference; Giuliano et al., Proc. Natl. Acad. Sci. (U.S.A.) 85:7089-7093 (1988), the entirety of which is herein incorporated by reference; Staiger et al., Proc. Natl. Acad. Sci. (U.S.A.) 86:6930-6934 (1989), the entirety of which is herein incorporated by reference; Izawa et al., Plant Cell 6:1277-1287(1994), the entirety of which is herein incorporated by reference; Menkens et al., Trends in Biochemistry 20:506-510 (1995), the entirety of which is herein incorporated by reference; Foster et al., FASEB J. 8:192-200 (1994), the entirety of which is herein incorporated by reference; Plesse et al., Mol Gen Gene 254:258-266 (1997), the entirety of which is herein incorporated by reference; Green et al., EMBO J. 6:2543-2549 (1987), the entirety of which is herein incorporated by reference; Kuhlemeier et al., Ann. Rev Plant Physiol. 38:221-257 (1987), the entirety of which is herein incorporated by reference; Villain et al., J. Biol. Chem. 271:32593-32598 (1996), the entirety of which is herein incorporated by reference; Lam et al., Plant Cell 2:857-866 (1990), the entirety of which is herein incorporated by reference; Gilmartin et al., Plant Cell 2:369-378 (1990), the entirety of which is herein incorporated by reference; Datta et al., Plant Cell 1:1069-1077(1989) the entirety of which is herein incorporated by reference; Gilmartin et al., Plant Cell 2:369-378 (1990), the entirety of which is herein incorporated by reference; Castresana et al., EMBO J. 7:1929-1936 (1988), the entirety of which is herein incorporated by reference; Ueda et al., Plant Cell 1:217-227 (1989), the entirety of which is herein incorporated by reference; Terzaghi et al., Annu. Rev. Plant Physiol. Plant Mol. Biol. 46:445-474 (1995), the entirety of which is herein incorporated by reference; Green et al., EMBO J. 6:2543-2549 (1987), the entirety of which is herein incorporated by reference; Villain et al., J. Biol. Chem. 271:32593-32598 (1996), the entirety of which is herein incorporated by reference; Tjaden et al., Plant Cell 6:107-118(1994), the entirety of which is herein incorporated by reference; Tjaden et al., Plant Physiol. 108:1109-1117 (1995), the entirety of which is herein incorporated by reference; Ngai et al., Plant J. 12:1021-1234 (1997), the entirety of which is herein incorporated by reference; Bruce et al., EMBO J. 10:3015-3024 (1991), the entirety of which is herein incorporated by reference; Ngai et al., Plant J. 12:1021-1034 (1997), the entirety of which is herein incorporated by reference), elements responsive to gibberellin, (Muller et al., J. Plant Physiol. 145:606-613 (1995), the entirety of which is herein incorporated by reference; Croissant et al., Plant Science 116:27-35 (1996), the entirety of which is herein incorporated by reference; Lohmer et al., EMBO J. 10:617-624(1991), the entirety of which is herein incorporated by reference; Rogers et al., Plant Cell 4:1443-1451 (1992), the entirety of which is herein incorporated by reference; Lanahan et al., Plant Cell 4:203-211 (1992) the entirety of which is herein incorporated by reference; Skriver et al., Proc. Natl. Acad. Sci. (U.S.A.) 88:7266-7270 (1991) the entirety of which is herein incorporated by reference; Gilmartin et al., Plant Cell 2:369-378 (1990), the entirety of which is herein incorporated by reference; Huang et al., Plant Mol. Biol. 14:655-668 (1990), the entirety of which is herein incorporated by reference, Gubler et al., Plant Cell 7:1879-1891 (1995), the entirety of which is herein incorporated by reference), elements responsive to abscisic acid, (Busk et al., Plant Cell 9:2261-2270 (1997), the entirety of which is herein incorporated by reference; Guiltinan et al., Science 250:267-270 (1990), the entirety of which is herein incorporated by reference; Shen et al., Plant Cell 7:295-307 (1995) the entirety of which is herein incorporated by reference; Shen et al., Plant Cell 8:1107-1119 (1996), the entirety of which is herein incorporated by reference; Seo et al., Plant Mol. Biol. 27:1119-1131 (1995), the entirety of which is herein incorporated by reference; Marcotte et al., Plant Cell 1:969-976 (1989) the entirety of which is herein incorporated by reference; Shen et al., Plant Cell 7:295-307 (1995), the entirety of which is herein incorporated by reference; Iwasaki et al., Mol Gen Genet 247:391-398 (1995), the entirety of which is herein incorporated by reference; Hattori et al., Genes Dev. 6:609-618 (1992), the entirety of which is herein incorporated by reference; Thomas et al., Plant Cell 5:1401-1410 (1993), the entirety of which is herein incorporated by reference), elements similar to abscisic acid responsive elements, (Ellerstrom et al., Plant Mol. Biol. 32:1019-1027 (1996), the entirety of which is herein incorporated by reference), auxin responsive elements (Liu et al., Plant Cell 6:645-657 (1994) the entirety of which is herein incorporated by reference; Liu et al., Plant Physiol. 115:397-407 (1997), the entirety of which is herein incorporated by reference; Kosugi et al., Plant J. 7:877-886 (1995), the entirety of which is herein incorporated by reference; Kosugi et al., Plant Cell 9:1607-1619 (1997), the entirety of which is herein incorporated by reference; Ballas et al., J. Mol. Biol. 233:580-596 (1993), the entirety of which is herein incorporated by reference), a cis element responsive to methyl jasmonate treatment (Beaudoin and Rothstein, Plant Mol. Biol. 33:835-846 (1997), the entirety of which is herein incorporated by reference), a cis element responsive to abscisic acid and stress response (Straub et al., Plant Mol. Biol. 26:617-630 (1994), the entirety of which is herein incorporated by reference), ethylene responsive cis elements (Itzhaki et al., Proc. Natl. Acad. Sci. (U.S.A.) 91:8925-8929 (1994), the entirety of which is herein incorporated by reference; Montgomery et al., Proc. Acad. Sci. (U.S.A.) 90:5939-5943 (1993), the entirety of which is herein incorporated by reference; Sessa et al., Plant Mol. Biol. 28:145-153 (1995), the entirety of which is herein incorporated by reference; Shinshi et al., Plant Mol. Biol. 27:923-932 (1995), the entirety of which is herein incorporated by reference), salicylic acid cis responsive elements, (Strange et al., Plant J. 11: 1315-1324 (1997), the entirety of which is herein incorporated by reference; Qin et al., Plant Cell 6:863-874 (1994), the entirety of which is herein incorporated by reference), a cis element that responds to water stress and abscisic acid (Lam et al., J. Biol. Chem. 266:17131-17135 (1991), the entirety of which is herein incorporated by reference; Thomas et al., Plant Cell 5:1401-1410 (1993), the entirety of which is herein incorporated by reference; Pla et al., Plant Mol Biol 21:259-266 (1993), the entirety of which is herein incorporated by reference), a cis element essential for M phase-specific expression (Ito et al., Plant Cell 10:331-341 (1998), the entirety of which is herein incorporated by reference), sucrose responsive elements (Huang et al., Plant Mol. Biol. 14:655-668 (1990), the entirety of which is herein incorporated by reference; Hwang et al., Plant Mol Biol 36:331-341 (1998), the entirety of which is herein incorporated by reference; Grierson et al., Plant J. 5:815-826 (1994), the entirety of which is herein incorporated by reference), heat shock response elements (Pelham et al., Trends Genet. 1:31-35 (1985), the entirety of which is herein incorporated by reference), elements responsive to auxin and/or salicylic acid and also reported for light regulation (Lam et al., Proc. Natl. Acad. Sci. (U.S.A.) 86:7890-7897 (1989), the entirety of which is herein incorporated by reference; Benfey et al., Science 250:959-966 (1990), the entirety of which is herein incorporated by reference), elements responsive to ethylene and salicylic acid (Ohme-Takagi et al., Plant Mol. Biol. 15:941-946 (1990), the entirety of which is herein incorporated by reference), elements responsive to wounding and abiotic stress (Loake et al., Proc. Natl. Acad. Sci. (U.S.A.) 89:9230-9234 (1992), the entirety of which is herein incorporated by reference; Mhiri et al., Plant Mol. Biol. 33:257-266 (1997), the entirety of which is herein incorporated by reference), antoxidant response elements (Rushmore et al., J. Biol. Chem. 266:11632-11639, the entirety of which is herein incorporated by reference; Dalton et al., Nucleic Acids Res. 22:5016-5023 (1994), the entirety of which is herein incorporated by reference), Sph elements (Suzuki et al., Plant Cell 9:799-807 1997), the entirety of which is herein incorporated reference), Elicitor responsive elements, (Fukuda et al., Plant Mol. Biol. 34:81-87 (1997), the entirety of which is herein incorporated by reference; Rushton et al., EMBO J. 15:5690-5700 (1996), the entirety of which is herein incorporated by reference), metal responsive elements (Stuart et al., Nature 317:828-831 (1985), the entirety of which is herein incorporated by reference; Westin et al., EMBO J. 7:3763-3770(1988), the entirety of which is herein incorporated by reference; Thiele et al., Nucleic Acids Res. 20:1183-1191 (1992), the entirety of which is herein incorporated by reference; Faisst et al., Nucleic Acids Res. 20:3-26 (1992), the entirety of which is herein incorporated by reference), low temperature responsive elements, (Baker et al., Plant Mol. Biol. 24:701-713 (1994), the entirety of which is herein incorporated by reference; Jiang et al., Plant Mol. Biol. 30:679-684 (1996), the entirety of which is herein incorporated by reference; Nordin et al., Plant Mol. Biol. 21:641-653 (1993), the entirety of which is herein incorporated by reference; Zhou et al., J. Biol. Chem. 267:23515-23519 (1992), the entirety of which is herein incorporated by reference), drought responsive elements, (Yamaguchi et al., Plant Cell 6:251-264 (1994), the entirety of which is herein incorporated by reference; Wang et al., Plant Mol. Biol. 28:605-617 (1995), the entirety of which is herein incorporated by reference; Bray EA, Trends in Plant Science 2:48-54 (1997), the entirety of which is herein incorporated by reference) enhancer elements for glutenin, (Colot et al., EMBO J. 6:3559-3564 (1987), the entirety of which is herein incorporated by reference; Thomas et al., Plant Cell 2:1171-1180 (1990), the entirety of which is incorporated by reference; Kreis et al., Philos. Trans. R. Soc. Lond., B314:355-365 (1986), the entirety of which is herein incorporated by reference), light-independent regulatory elements, (Lagrange et al., Plant Cell 9:1469-1479 (1997), the entirety of which is herein incorporated by reference; Villain et al., J. Biol. Chem. 271:32593-32598 (1996), the entirety of which is herein incorporated by reference), OCS enhancer elements, (Bouchez et al., EMBO J. 8:4197-4204 (1989), the entirety of which is herein incorporated by reference; Foley et al., Plant J. 3:669-679 (1993), the entirety of which is herein incorporated by reference), ACGT elements, (Foster et al., FASEB J. 8:192-200 (1994), the entirety of which is herein incorporated by reference; Izawa et al., Plant Cell 6:1277-1287 (1994), the entirety of which is herein incorporated by reference; Izawa et al., J. Mol. Biol. 230:1131-1144 (1993) the entirety of which is herein incorporated by reference), negative cis elements in plastid related genes, (Zhou et al., J. Biol. Chem. 267:23515-23519 (1992), the entirety of which is herein incorporated by reference; Lagrange et al., Mol. Cell Biol. 13:2614-2622 (1993), the entirety of which is herein incorporated by reference; Lagrange et al., Plant Cell 9:1469-1479 (1997), the entirety of which is herein incorporated by reference; Zhou et al., J. Biol. Chem. 267:23515-23519 (1992), the entirety of which is herein incorporated by reference), prolamin box elements, (Forde et al., Nucleic Acids Res. 13:7327-7339 (1985), the entirety of which is herein incorporated by reference; Colot et al., EMBO J. 6:3559-3564 (1987), the entirety of which is herein incorporated by reference; Thomas et al., Plant Cell 2:1171-1180 (1990), the entirety of which is herein incorporated by reference; Thompson et al., Plant Mol. Biol. 15:755-764 (1990), the entirety of which is herein incorporated by reference; Vicente et al., Proc. Natl. Acad. Sci. (U.S.A.) 94:7685-7690(1997), the entirety of which is herein incorporated by reference), elements in enhancers frQm the IgM heavy chain gene (Gillies et al., Cell 33:717-728 (1983), the entirety of which is herein incorporated by reference; Whittier et al., Nucleic Acids Res. 15:2515-2535 (1987), the entirety of which is herein incorporated by reference).

[0069] (iii) Nucleic Acid Molecules Comprising Genes or Fragments thereof

[0070] Nucleic acid molecules of the present invention can comprise one or more genes or fragments thereof. Such genes or fragments thereof include homologues of known genes or protein coding regions in other organisms or genes or fragments thereof that elicit only limited or no matches with known genes or protein coding regions.

[0071] Genomic sequences can be screened for the presence of protein homologues or genes utilizing one or a number of different search algorithms have that been developed, one example of which are the suite of programs referred to as BLAST programs. Other examples of suitable programs that can be utilized are known in the art, several of which are described above in the Background and under the section titled “Uses of the Agents of the Invention.” In addition, unidentified reading frames may be screened for protein coding regions by prediction software such as GenScan, which is located at http://gnomic.standford.edu/GENSCANW.html.

[0072] In a preferred embodiment of the present invention, the Oryza sativa L protein or fragment thereof of the present invention is a homologue of another plant protein. In another preferred embodiment of the present invention, the Oryza sativa L protein or fragment thereof of the present invention is a homologue of a fungal protein. In another preferred embodiment of the present invention, the Oryza sativa L protein or fragment thereof of the present invention is a homologue of a mammalian protein. In another preferred embodiment of the present invention, the Oryza sativa L protein or fragment thereof of the present invention is a homologue of a bacterial protein.

[0073] In a preferred embodiment of the present invention, the Oryza sativa L protein or fragments thereof or nucleic acid molecule or fragment thereof has a BLAST score of more than 200, preferably a BLAST score of more than 300, even more preferably a BLAST score of more than 400 with its homologue.

[0074] In another preferred embodiment of the present invention, the nucleic acid molecule encoding the Oryza sativa L protein or fragment thereof and/or nucleic acid molecule or fragment thereof exhibits a % identity with its homologue of between about 25% and about 40%, more preferably of between about 40 and about 70%, even more preferably of between about 70% and about 90%, and even more preferably between about 90% and 99%. In another preferred embodiment, of the present invention, the nucleic acid molecule encoding the Oryza sativa L protein or fragment thereof exhibits a % identity with its homologue of 100%.

[0075] In a preferred embodiment of the present invention, the Oryza sativa L protein or fragment thereof or nucleic acid molecule or fragment thereof exhibits a % coverage of between about 0% and about 33%, more preferably of between about 34% and about 66%, and even more preferably of between about 67% and about 100%.

[0076] Genomic sequences can be screened for the presence of proteins utilizing one or a number of different search algorithms have that been developed, one example of which are the suite of programs referred to as BLAST programs. Other examples of suitable programs that can be utilized are known in the art, several of which are described above in the Background. Nucleic acid molecules of the present invention also include non-Oryza sativa L homologues. Preferred non-Oryza sativa L homologues are selected from the group consisting of alfalfa, Arabidopsis barley, Brassica, broccoli, cabbage, citrus, cotton, garlic, oat, oilseed rape, onion, canola, flax, an ornamental plant, maize, pea, peanut, pepper, potato, rice, rye, sorghum, soybean, strawberry, sugarcane, sugarbeet, tomato, wheat, poplar, pine, fir, eucalyptus, apple, lettuce, lentils, grape, banana, tea, turf grasses, sunflower, oil palm, and Phaseolus.

[0077] In a preferred embodiment, nucleic acid molecules having SEQ ID NO: 1 through SEQ ID NO: 79201 or complements and fragments of either or other nucleic acid molecules of the present invention can be utilized to obtain such homologues.

[0078] The degeneracy of the genetic code, which allows different nucleic acid sequences to code for the same protein or peptide, is known in the literature. (U.S. Pat. No. 4,757,006, the entirety of which is herein incorporated by reference).

[0079] In an aspect of the present invention, one or more of the nucleic acid molecules of the present invention differ in nucleic acid sequence from those encoding an Oryza sativa protein or fragment thereof in SEQ ID NO: 1 through SEQ ID NO: 79201 due to the degeneracy in the genetic code in that they encode the same protein but differ in nucleic acid sequence.

[0080] In another further aspect of the present invention, one or more of the nucleic acid molecules of the present invention differ in nucleic acid sequence from those encoding a Oryza stativa protein or fragment thereof in SEQ ID NO: 1 through SEQ ID NO: 79201 due to fact that the different nucleic acid sequences encode a protein having one or more conservative amino acid residues. It is understood that codons capable of coding for such conservative substitutions are known in the art.

[0081] It is well known in the art that one or more amino acids in a native sequence can be substituted with another amino acid(s), the charge and polarity of which are similar to that of the native amino acid, i.e., a conservative amino acid substitution, resulting in a silent change. Conserved substitutes for an amino acid within the native polypeptide sequence can be selected from other members of the class to which the naturally occurring amino acid belongs. Amino acids can be divided into the following four groups: (1) acidic amino acids, (2) basic amino acids, (3) neutral polar amino acids, and (4) neutral nonpolar amino acids. Representative amino acids within these various groups include, but are not limited to, (1) acidic (negatively charged) amino acids such as aspartic acid and glutamic acid; (2) basic (positively charged) amino acids such as arginine, histidine, and lysine; (3) neutral polar amino acids such as glycine, serine, threonine, cysteine, cystine, tyrosine, asparagine, and glutamine; and (4) neutral nonpolar (hydrophobic) amino acids such as alanine, leucine, isoleucine, valine, proline, phenylalanine, tryptophan, and methionine.

[0082] Conservative amino acid changes within the native polypeptides sequence can be made by substituting one amino acid within one of these groups with another amino acid within the same group. Biologically functional equivalents of the proteins or fragments thereof of the present invention can have 10 or fewer conservative amino acid changes, more preferably seven or fewer conservative amino acid changes, and most preferably five or fewer conservative amino acid changes. The encoding nucleotide sequence will thus have corresponding base substitutions, permitting it to encode biologically functional equivalent forms of the proteins or fragments of the present invention.

[0083] It is understood that certain amino acids may be substituted for other amino acids in a protein structure without appreciable loss of interactive binding capacity with structures such as, for example, antigent-binding regions of antibodies or binding sites on substrate molecules. Because it is the interactive capacity and nature of a protein that defines that protein's biological functional activity, certain amino acid sequence substitutions can be made in a protein sequence and, of course, its underlying DNA coding sequence and, nevertheless, obtain a protein with like properties. It is thus contemplated by the inventors that various changes may be made in the peptide sequences of the proteins or fragments of the present invention, or corresponding DNA sequences that encode said peptides, without appreciable loss of their biological utility or activity. It is understood that codons capable of coding for such amino acid changes are known in the art.

[0084] In making such changes, the hydropathic index of amino acids may be considered. The importance of the hydropathic amino acid index in conferring interactive biological function on a protein is generally understood in the art (Kyte and Doolittle, J. Mol. Biol. 157, 105-132 (1982), herein incorporated by reference in its entirety). It is accepted that the relative hydropathic character of the amino acid contributes to the secondary structure of the resultant protein, which in turn defines the interaction of the protein with other molecules, for example, enzymes, substrates, receptors, DNA, antibodies, antigens, and the like.

[0085] Each amino acid has been assigned a hydropathic index on the basis of its hydrophobicity and charge characteristics (Kyte and Doolittle, 1982); these are isoleucine (+4.5), valine (+4.2), leucine (+3.8), phenylalanine (+2.8), cysteine/cystine (+2.5), methionine (+1.9), alanine (+1.8), glycine (−0.4), threonine (−0.7), serine (−0.8), tryptophan (−0.9), tyrosine (−1.3), proline (−1.6), histidine (−3.2), glutamate (−3.5), glutamine (−3.5), aspartate (−3.5), asparagine (−3.5), lysine (−3.9), and arginine (−4.5).

[0086] In making such changes, the substitution of amino acids whose hydropathic indices are within ±2 is preferred, those which are within ±1 are particularly preferred, and those within ±0.5 are even more particularly preferred.

[0087] It is also understood in the art that the substitution of like amino acids can be made effectively on the basis of hydrophilicity. U.S. Pat. No. 4,554,101, incorporated herein by reference in its entirety, states that the greatest local average hydrophilicity of a protein, as govern by the hydrophilicity of its adjacent amino acids, correlates with a biological property of the protein.

[0088] As detailed in U.S. Pat. No. 4,554,101, the following hydrophilicity values have been assigned to amino acid residues: arginine (+3.0), lysine (+3.0), aspartate (+3.0±1), glutamate (+3.0±1), serine (+0.3), asparagine (+0.2), glutamine (+0.2), glycine (0), threonine (−0.4), proline (−0.5±1), alanine (−0.5), histidine (−0.5), cysteine (−1.0), methionine (−1.3), valine (−1.5), leucine (−1.8), isoleucine (−1.8), tyrosine (−2.3), phenylalanine (−2.5), and tryptophan (−3.4).

[0089] In making such changes, the substitution of amino acids whose hydrophilicity values are within ±2 is preferred, those which are within ±1 are particularly preferred, and those within ±0.5 are even more particularly preferred.

[0090] In a further aspect of the present invention, one or more of the nucleic acid molecules of the present invention differ in nucleic acid sequence from those encoding an Oryza sativa protein or fragment thereof set forth in SEQ ID NO: 1 through SEQ ID NO: 79201 or fragment thereof due to the fact that one or more codons encoding an amino acid has been substituted for a codon that encodes a nonessential substitution of the amino acid originally encoded.

[0091] (iv) Nucleic Acid Molecules Comprising Introns and/or Intron/Exon Junctions

[0092] Nucleic acid molecules of the present invention can comprise an intron and/or one or more intron/exon junction. Sequences of the present invention can be screened for introns and intron/exon junctions utilizing one or a number of different search algorithms that have that been developed, one example of which are the suite of programs referred to as BLAST programs. Other examples of suitable programs that can be utilized are known in the art, several of which are described above in the Background and in the section entitled “Uses of the Agents of the Present Invention.”

[0093] (b) Protein and Peptide Molecules

[0094] A class of agents comprises one or more of the protein or peptide molecules encoded by SEQ ID NO: 1 through SEQ ID NO:79201, fragments thereof or complements thereof or one or more of the proteins encoded by a nucleic acid molecule or fragment thereof or peptide molecules encoded by other nucleic acid agents of the present invention. Protein and peptide molecules can be identified using known protein or peptide molecules as a target sequence or target motif in the BLAST programs of the present invention. In a preferred embodiment, the protein or peptide molecules of the present invention are derived from Oryza sativa L. (rice) and more preferably Oryza sativa L. (japonica type), more preferably Oryza sativa L. (japonica type), cv. Nipponbane.

[0095] As used herein, the term “protein molecule” or “peptide molecule” includes any molecule that comprises five or more amino acids. It is well known in the art that proteins or peptides may undergo modification, including post-translational modifications, such as, but not limited to, disulfide bond formation, glycosylation, phosphorylation, or oligomerization. Thus, as used herein, the term “protein molecule” or “peptide molecule” includes any protein molecule that is modified by any biological or non-biological process. The terms “amino acid” and “amino acids” refer to all naturally occurring L-amino acids. This definition is meant to include norleucine, ornithine, homocysteine, and homoserine.

[0096] One or more of the protein or fragments of peptide molecules may be produced via chemical synthesis, or more preferably, by expression in a suitable bacterial or eukaryotic host. Suitable methods for expression are described by Sambrook et al., Molecular Cloning, A Laboratory Manual, 2nd Edition, Cold Spring Harbor Press, Cold Spring Harbor, New York (1989), or similar texts.

[0097] A “protein fragment” is a peptide or polypeptide molecule whose amino acid sequence comprises a subset of the amino acid sequence of that protein. A protein or fragment thereof that comprises one or more additional peptide regions not derived from that protein is a “fusion” protein. Such molecules may be derivatized to contain carbohydrate or other moieties (such as keyhole limpet hemocyanin, etc.). Fusion protein or peptide molecules of the present invention are preferably produced via recombinant means.

[0098] Another class of agents comprises protein or peptide molecules encoded by SEQ ID NO: 1 through SEQ ID NO:79201 or complements thereof or, fragments or fusions thereof in which conservative, non-essential, or not relevant, amino acid residues have been added, replaced, or deleted. An example of such a homologue is the homologue protein of all non-Oryza sativa L. plant species, including but not limited to alfalfa, barley, Brassica, broccoli, cabbage, citrus, cotton, garlic, oat, oilseed rape, onion, canola, flax, maize, an ornamental plant, pea, peanut, pepper, potato, rice, rye, sorghum, soybean, strawberry, sugarcane, sugarbeet, tomato, wheat, poplar, pine, fir, eukalyptus, apple, lettuce, peas, lentils, grape, banana, tea, turf grasses, etc. Particularly preferred non-Oryza sativa L. plants to utilize for the isolation of homologues would include alfalfa, barley, cotton, corn, oat, oilseed rape, rice, corn, canola, ornamentals, sugarcane, sugarbeet, tomato, potato, wheat, and turf grasses. Such a homologue can be obtained by any of a variety of methods. Most preferably, as indicated above, one or more of the disclosed sequences (SEQ ID NO: 1 through SEQ ID NO:79201 or complements thereof) will be used to define a pair of primers that may be used to isolate the homologue-encoding nucleic acid molecules from any desired species. Such molecules can be expressed to yield homologues by recombinant means.

[0099] (c) Antibodies

[0100] One aspect of the present invention concerns antibodies, single-chain antigen binding molecules, or other proteins that specifically bind to one or more of the protein or peptide molecules of the present invention and their homologues, fusions or fragments. Such antibodies may be used to quantitatively or qualitatively detect the protein or peptide molecules of the present invention. As used herein, an antibody or peptide is said to “specifically bind” to a protein or peptide molecule of the present invention if such binding is not competitively inhibited by the presence of non-related molecules. In a preferred embodiment the antibodies of the present invention bind to proteins derived from Oryza sativa L. (rice) and more preferably bind to proteins or fragments thereof of Oryza sativa L. (japonica type), more preferably Oryza sativa L. (japonica type), cv. Nipponbane.

[0101] Nucleic acid molecules that encode all or part of the protein of the present invention can be expressed, via recombinant means, to yield protein or peptides that can in turn be used to elicit antibodies that are capable of binding the expressed protein or peptide. Such antibodies may be used in immunoassays for that protein. Such protein-encoding molecules, or their fragments may be a “fusion” molecule (i.e., a part of a larger nucleic acid molecule) such that, upon expression, a fusion protein is produced. It is understood that any of the nucleic acid molecules of the present invention may be expressed, via recombinant means, to yield proteins or peptides encoded by these nucleic acid molecules.

[0102] The antibodies that specifically bind proteins and protein fragments of the present invention may be polyclonal or monoclonal, and may comprise intact immunoglobulins, or antigen binding portions of immunoglobulins (such as (F(ab′), F(ab′)₂ fragments), or single-chain immunoglobulins producible, for example, via recombinant means). It is understood that practitioners are familiar with the standard resource materials which describe specific conditions and procedures for the construction, manipulation and isolation of antibodies (see, for example, Harlow and Lane, Antibodies: A Laboratory Manual, Cold Spring Harbor Press, Cold Spring Harbor, New York (1988), the entirety of which is herein incorporated by reference).

[0103] Murine monoclonal antibodies are particularly preferred. BALB/c mice are preferred for this purpose, however, equivalent strains may also be used. The animals are preferably immunized with approximately 25 μg of purified protein (or fragment thereof) that has been emulsified in a suitable adjuvant (such as TiterMax adjuvant (Vaxcel, Norcross, Ga.)). Immunization is preferably conducted at two intramuscular sites, one intraperitoneal site, and one subcutaneous site at the base of the tail. An additional i.v. injection of approximately 25 μg of antigen is preferably given in normal saline three weeks later. After approximately 11 days following the second injection, the mice may be bled and the blood screened for the presence of anti-protein or peptide antibodies. Preferably, a direct binding Enzyme-Linked Immunoassay (ELISA) is employed for this purpose.

[0104] More preferably, the mouse having the highest antibody titer is given a third i.v. injection of approximately 25 μg of the same protein or fragment. The splenic leukocytes from this animal may be recovered 3 days later, and are then permitted to fuse, most preferably, using polyethylene glycol, with cells of a suitable myeloma cell line (such as, for example, the P3X63Ag8.653 myeloma cell line). Hybridoma cells are selected by culturing the cells under “HAT” (hypoxanthine-aminopterin-thymine) selection for about one week. The resulting clones may then be screened for their capacity to produce monoclonal antibodies (“mAbs”), preferably by direct ELISA.

[0105] In one embodiment, anti-protein or peptide monoclonal antibodies are isolated using a fusion of a protein, protein fragment, or peptide of the present invention, or conjugate of a protein, protein fragment, or peptide of the present invention, as immunogens. Thus, for example, a group of mice can be immunized using a fusion protein emulsified in Freund's complete adjuvant (e.g., approximately 50 μg of antigen per immunization). At three week intervals, an identical amount of antigen is emulsified in Freund's incomplete adjuvant and used to immunize the animals. Ten days following the third immunization, serum samples are taken and evaluated for the presence of antibody. If antibody titers are too low, a fourth booster can be employed. Polysera capable of binding the protein or peptide can also be obtained using this method.

[0106] In a preferred procedure for obtaining monoclonal antibodies, the spleens of the above-described immunized mice are removed, disrupted, and immune splenocytes are isolated over a ficoll gradient. The isolated splenocytes are fused, using polyethylene glycol with BALB/c-derived HGPRT (hypoxanthine guanine phosphoribosyl transferase) deficient P3x63xAg8.653 plasmacytoma cells. The fused cells are plated into 96-well microtiter plates and screened for hybridoma fusion cells by their capacity to grow in culture medium supplemented with hypothanthine, aminopterin and thymidine for approximately 2-3 weeks.

[0107] Hybridoma cells that arise from such incubation are preferably screened for their capacity to produce an immunoglobulin that binds to a protein of interest. An indirect ELISA may be used for this purpose. In brief, the supernatants of hybridomas are incubated in microtiter wells that contain immobilized protein. After washing, the titer of bound immunoglobulin can be determined using, for example, a goat anti-mouse antibody conjugated to horseradish peroxidase. After additional washing, the amount of immobilized enzyme is determined (for example through the use of a chromogenic substrate). Such screening is performed as quickly as possible after the identification of the hybridoma in order to ensure that a desired clone is not overgrown by non-secreting neighbors. Desirably, the fusion plates are screened several times since the rates of hybridoma growth vary. In a preferred sub-embodiment, a different antigenic form of immunogen may be used to screen the hybridoma. Thus, for example, the splenocytes may be immunized with one immunogen, but the resulting hybridomas can be screened using a different immunogen. It is understood that any of the protein or peptide molecules of the present invention may be used to raise antibodies.

[0108] As discussed below, such antibody molecules or their fragments may be used for diagnostic purposes. Where the antibodies are intended for diagnostic purposes, it may be desirable to derivatize them, for example with a ligand group (such as biotin) or a detectable marker group (such as a fluorescent group, a radioisotope or an enzyme).

[0109] The ability to produce antibodies that bind the protein or peptide molecules of the present invention permits the identification of mimetic compounds of those molecules. A “mimetic compound” is a compound that is not that compound, or a fragment of that compound, but which nonetheless exhibits an ability to specifically bind to antibodies directed against that compound.

[0110] It is understood that any of the agents of the present invention can be substantially purified and/or be biologically active and/or recombinant.

Uses of the Agents of the Invention

[0111] Nucleic acid molecules and fragments thereof of the present invention may be employed for genetic mapping studies using linkage analysis (genetic markers). A genetic linkage map shows the relative locations of specific DNA markers along a chromosome. Maps are used for the identification of genes associated with genetic diseases or phenotypic traits, comparative genomics, and as a guide for physical mapping. Through genetic mapping, a fine scale linkage map can be developed using DNA markers, and, then, a genomic DNA library of large-sized fragments can be screened with molecular markers linked to the desired trait. In a preferred embodiment of the present invention, the genomic library screened with the nucleic acid molecules of the present invention is a genomic library of Oryza sativa L.

[0112] Mapping marker locations is based on the observation that two markers located near each other on the same chromosome will tend to be passed together from parent to offspring. During gamete production, DNA strands occasionally break and rejoin in different places on the same chromosome or on the homologous chromosome. The closer the markers are to each other, the more tightly linked and the less likely a recombination event will fall between and separate them. Recombination frequency thus provides an estimate of the distance between two markers.

[0113] In segregating populations, target genes have been reported to have been placed within an interval of 5-10 cM with a high degree of certainty (Tanksley et al., Trends in Genetics 11 (2):63-68(1995), the entirety of which is herein incorporated by reference). The markers defining this interval are used to screen a larger segregating population to identify individuals derived from one or more gametes containing a crossover in the given interval. Such individuals are useful in orienting other markers closer to the target gene. Once identified, these individuals can be analyzed in relation to all molecular markers within the region to identify those closest to the target.

[0114] Markers of the present invention can be employed to construct linkage maps and to locate genes with qualitative and quantitative effects. The genetic linkage of additional marker molecules can be established by a genetic mapping model such as, without limitation, the flanking marker model reported by Lander and Botstein, Genetics, 121:185-199 (1989), and the interval mapping, based on maximum likelihood methods described by Lander and Botstein, Genetics, 121:185-199 (1989), the entirety of which is herein incorporated by reference and implemented in the software package MAPMAKER/QTL (Lincoln and Lander, Mapping Genes Controlling Quantitative Traits Using MAPMAKER/QTL, Whitehead Institute for Biomedical Research, Massachusetts, (1990)). Additional software includes Qgene, Version 2.23 (1996), Department of Plant Breeding and Biometry, 266 Emerson Hall, Cornell University, Ithaca, N.Y., the manual of which is herein incorporated by reference in its entirety). Use of the Qgene software is a particularly preferred approach.

[0115] A maximum likelihood estimate (MLE) for the presence of a marker is calculated, together with an MLE assuming no QTL effect, to avoid false positives. A log₁₀ of an odds ratio (LOD) is then calculated as: LOD=log₁₀ (MLE for the presence of a QTL/MLE given no linked QTL).

[0116] The LOD score essentially indicates how much more likely the data are to have arisen assuming the presence of a QTL than in its absence. The LOD threshold value for avoiding a false positive with a given confidence, say 95%, depends on the number of markers and the length of the genome. Graphs indicating LOD thresholds are set forth in Lander and Botstein, Genetics, 121:185-199 (1989), the entirety of which is herein incorporated by reference and further described by Arús and Moreno-González, Plant Breeding, Hayward, Bosemark, Romagosa (eds.) Chapman & Hall, London, pp. 314-331 (1993).

[0117] Additional models can be used. Many modifications and alternative approaches to interval mapping have been reported, including the use of non-parametric methods (Kruglyak and Lander, Genetics, 139:1421-1428 (1995), the entirety of which is herein incorporated by reference). Multiple regression methods or models can be also be used, in which the trait is regressed on a large number of markers (Jansen, Biometrics in Plant Breed, van Oijen, Jansen (eds.) Proceedings of the Ninth Meeting of the Eucarpia Section Biometrics in Plant Breeding, The Netherlands, pp. 116-124 (1994); Weber and Wricke, Advances in Plant Breeding, Blackwell, Berlin, 16 (1994). Procedures combining interval mapping with regression analysis, whereby the phenotype is regressed onto a single putative QTL at a given marker interval, and at the same time onto a number of markers that serve as ‘cofactors,’ have been reported by Jansen and Stam, Genetics, 136:1447-1455 (1994) and Zeng, Genetics, 136:1457-1468 (1994). Generally, the use of cofactors reduces the bias and sampling error of the estimated QTL positions (Utz and Melchinger, Biometrics in Plant Breeding, van Oijen, Jansen (eds.) Proceedings of the Ninth Meeting of the Eucarpia Section Biometrics in Plant Breeding, The Netherlands, pp.195-204 (1994), thereby improving the precision and efficiency of QTL mapping (Zeng, Genetics, 136:1457-1468 (1994). These models can be extended to multi-environment experiments to analysis genotype-environment interactions (Jansen et al., Theo. Appl. Genet. 91:33-37 (1995).

[0118] Selection of an appropriate mapping population is important to map construction. The choice of appropriate mapping population depends on the type of marker systems employed (Tanksley et al., J.P. Gustafson and R. Appels (eds.), Plenum Press, New York, pp. 157-173 (1988), the entirety of which is herein incorporated by reference). Consideration must be given to the source of parents (adapted vs. exotic) used in the mapping population. Chromosome pairing and recombination rates can be severely disturbed (suppressed) in wide crosses (adapted×exotic) and generally yield greatly reduced linkage distances. Wide crosses will usually provide segregating populations with a relatively large array of polymorphisms when compared to progeny in a narrow cross (adapted×adapted).

[0119] An F₂ population is the first generation of selfing after the hybrid seed is produced. Usually a single F₁ plant is selfed to generate a population segregating for all the genes in Mendelian (1:2:1) fashion. Maximum genetic information is obtained from a completely classified F₂ population using a codominant marker system (Mather, Measurement of Linkage in Heredity: Methuen and Co., (1938), the entirety of which is herein incorporated by reference). In the case of dominant markers, progeny tests (e.g., F₃, BCF₂) are required to identify the heterozygotes, thus making it equivalent to a completely classified F₂ population. However, this procedure is often prohibitive because of the cost and time involved in progeny testing. Progeny testing of F₂ individuals is often used in map construction where phenotypes do not consistently reflect genotype (e.g., disease resistance) or where trait expression is controlled by a QTL. Segregation data from progeny test populations (e.g., F₃ or BCF₂) can be used in map construction. Marker-assisted selection can then be applied to cross progeny based on marker-trait map associations (F₂, F₃), where linkage groups have not been completely disassociated by recombination events (i.e., maximum disequilibrium).

[0120] Recombinant inbred lines (RIL) (genetically related lines; usually >F₅, developed from continuously selfing F₂ lines towards homozygosity) can be used as a mapping population. Information obtained from dominant markers can be maximized by using RIL because all loci are homozygous or nearly so. Under conditions of tight linkage (i.e., about <10% recombination), dominant and co-dominant markers evaluated in RIL populations provide more information per individual than either marker type in backcross populations (Reiter, Proc. Natl. Acad. Sci. (U.S.A.) 89:1477-1481 (1992). However, as the distance between markers becomes larger (i.e., loci become more independent), the information in RIL populations decreases dramatically when compared to codominant markers.

[0121] Backcross populations (e.g., generated from a cross between a successful variety (recurrent parent) and another variety (donor parent) carrying a trait not present in the former) can be utilized as a mapping population. A series of backcrosses to the recurrent parent can be made to recover most of its desirable traits. Thus a population is created consisting of individuals nearly like the recurrent parent but each individual carries varying amounts or mosaic of genomic regions from the donor parent. Backcross populations can be useful for mapping dominant markers if all loci in the recurrent parent are homozygous and the donor and recurrent parent have contrasting polymorphic marker alleles (Reiter et al., Proc. Natl. Acad. Sci. (U.S.A.) 89:1477-1481 (1992). Information obtained from backcross populations using either codominant or dominant makers is less than that obtained from F₂ populations because one, rather than two, recombinant gametes are sampled per plant. Backcross populations, however, are more informative (at low marker saturation) when compared to RILs as the distance between linked loci increases in RIL populations (i.e., about 0.15% recombination). Increased recombination can be beneficial for resolution of tight linkages, but may be undesirable in the construction of maps with low marker saturation.

[0122] Near-isogenic lines (NIL)(created by many backcrosses to produce an array of individuals that are nearly identical in genetic composition except for the trait or genomic region under interrogation) can be used as a mapping population. In mapping with NILs, only a portion of the polymorphic loci are expected to map to a selected region.

[0123] Bulk segregant analysis (BSA) is a method developed for the rapid identification of linkage between markers and traits of interest (Michelmore et al., Proc. Natl. Acad. Sci. (U.S.A.) 88:9828-9832(1991). In BSA, two bulked DNA samples are drawn from a segregating population originating from a single cross. These bulks contain individuals that are identical for a particular trait (resistant or susceptible to particular disease) or genomic region but arbitrary at unlinked regions (i.e., heterozygous). Regions unlinked to the target region will not differ between the bulked samples of many individuals in BSA.

[0124] Applications for markers in plant breeding include: Quantitative Trait Loci (QTL) mapping (Edwards et al., Genetics 116:113-115 (1987), the entirety of which is herein incorporated by reference); Nienhuis et al., Crop Sci. 27:797-803 (1987); Osborn et al., Theor. Appl. Genet. 73:350-356 (1987); Romero-Severson et al., Use of RFLPs In Analysis of Quantitative Trait Loci In Maize, In Helentjaris and Burr (eds.) pp. 97-102 (1989), the entirety of which is herein incorporated by reference; Young et al., Genetics 120:570-585 (1988), the entirety of which is herein incorporated by reference; Martin et al., Science 243:1725-1728 (1989), the entirety of which is herein incorporated by reference): Sarfatti et al., Theor. Appl Genet. 78:22-26 (1989), the entirety of which is herein incorporated by reference; Tanksley et al., Biotech. 7:257-264 (1989); Barone et al., Mol. Gen. Genet. 224:177-182 (1990), the entirety of which is herein incorporated by reference); Jung et al., Theor, App. Genet. 79:663-672 (1990), the entirety of which is herein incorporated by reference; Keim et al., Genetics 126:735-742 (1990), the entirety of which is herein incorporated by reference, Theor. Appl. Genet. 79:465-369 (1990), the entirety of which is herein incorporated by reference; Paterson et al., Genetics 124:735-742 (1990), the entirety of which is herein incorporated by reference; Martin et al., Proc. Natl. Acad. Sci. (U.S.A.) 88:2336-2340(1991), the entirety of which is herein incorporated by reference; Messeguer et al., Theor. Appl. Genet. 82:529-536 (1991), the entirety of which is herein incorporated by reference; Michelmore et al., Proc Natl. Acad. Sci. (U.S.A) 88:9828-9832 (1991), the entirety of which is herein incorporated by reference; Ottaviano et al., Theor. Appl. Genet. 81:713-719 (1991), the entirety of which is herein incorporated by reference; Yu et al., Theor. Appl. Genet. 81:471-476 (1991), the entirety of which is herein incorporated by reference; Diers et al., Crop Sci. 32:77-383 (1992), the entirety of which is herein incorporated by reference, Theor. Appl. Genet. 83:608-612 (1992), the entirety of which is herein incorporated by reference, J. Plant Nut. 15:2127-2136 (1992), the entirety of which is herein incorporated by reference; Doebley et al., Proc. Natl. Acad. Sci. (U.S.A.) 87:9888-9892 (1990), the entirety of which is herein incorporated by reference), screening genetic resource strains for useful quantitative trait alleles and introgression of these alleles into commercial varieties (Beckmann and Soller, Theor. Appl. Genet. 67:35-43 (1983), the entirety of which is herein incorporated by reference; Tanksley et al., (1989) the entirety of which is incorporated by reference), or the mapping of mutations (Rafalski et al., In: Nonmammalian Genomic Analysis, ed. Birren and Lai, Academic Press, San Diego, Calif., pp. 75-134 (1996). Additionally, markers can be used to characterize transformants or germplasm, as a genetic diagnostic test for plant breeding or to identify individuals or varieties (Soller and Beckmann, Theor. Appl. Genet. 67:25-33 (1983), the entirety of which is herein incorporated by reference; Tanksley et al., 1989). Markers also can be used to obtain information about: (1) the number, effect, and chromosomal location of each gene affecting a trait; (2) effects of multiple copies of individual genes (gene dosage); (3) interaction between/among genes controlling a trait (epistasis); (4) whether individual genes affect more than one trait (pleiotropy); and (5) stability of gene function across environments (G×E interactions).

[0125] It is understood that one or more of the nucleic acid molecules of the present invention may in one embodiment be used as markers in genetic mapping. In a preferred embodiment, nucleic acid molecules of the present invention may in one embodiment be used as markers with Oryza sativa L.

[0126] The nucleic acid molecules of the present invention may be used for physical mapping. Physical mapping, in conjunction with linkage analysis, can enable the isolation of genes. Physical mapping has been reported to identify the markers closest in terms of genetic recombination to a gene target for cloning. Once a DNA marker is linked to a gene of interest, the chromosome walking technique can be used to find the genes via overlapping clones. For chromosome walking, random molecular markers or established molecular linkage maps are used to conduct a search to localize the gene adjacent to one or more markers. A chromosome walk (Bukanov and Berg, Mo. Microbiol, 11:509-523 (1994), the entirety of which is herein incorporated by reference; Birkenbihl and Vielmetter Nucleic Acids Res. 17:5057-5069 (1989), the entirety of which is herein incorporated by reference; Wenzel and Herrmann, Nucleic Acids Res. 16:8323-8336, (1988), the entirety of which is herein incorporated by reference) is then initiated from the closest linked marker. Starting from the selected clones, labeled probes specific for the ends of the insert DNA are synthesized and used as probes in hybridizations against a representative library. Clones hybridizing with one of the probes are picked and serve as templates for the synthesis of new probes; by subsequent analysis, contigs are produced.

[0127] The degree of overlap of the hybridizing clones used to produce a contig can be determined by comparative restriction analysis. Comparative restriction analysis can be carried out in different ways all of which exploit the same principle; two clones of a library are very likely to overlap if they contain a limited number of restriction sites for one or more restriction endonucleases located at the same distance from each other. The most frequently used procedures are, fingerprinting (Coulson et al., Proc. Natl. Acad. Sci. (U.S.A) 83:7821-7821, (1986), the entirety of which is herein incorporated by reference); Knott et al., Nucleic Acids Res. 16:2601-2612(1988), the entirety of which is herein incorporated by reference; Eiglmeier et al., Mol. Microbiol. 7(2):197-206 (1993), the entirety of which is herein incorporated by reference, 1993), restriction fragment mapping (Smith and Bimstiel, Nucleic Acids Res. 3:2387-2398 (1976), the entirety of which is herein incorporated by reference, or the “landmarking” technique (Charlebois et al., J. Mol. Biol. 222:509-524 (1991), the entirety of which is herein incorporated by reference).

[0128] To generate a physical map of a genome with BACs using the fingerprinting technique, a BAC library containing a number of clones equivalent to 4×-20× haploid genome can be used. (Zhang and Wing, Plant Mol. Bio. 35:115-127 (1997)). For example, BAC DNA can be purified with the conventional alkaline lysis procedure as used for plasmid DNA purification, digested with the restriction enzyme used for construction of the BAC libraries and end-labeled with ³²P-dATP, digested with Sau3AI and fractionated on a denaturing polyacrylamide gel. The gel is dried to chromatography paper and exposed to X-ray film. Fingerprints are scanned and then converted into database records, according to the positions of each band relative to the bands of the closest molecular-weight marker on a gel. The incoming database of fingerprints are first compared against each other to assemble contigs if overlapped, and then compared against all existing databases to place the incoming BACs and BAC contigs in established contigs if overlapped. The physical length of a contig in kb is estimated according to the number of restriction sites of the enzyme used for the first digestion prior to fragment end labeling.

[0129] Restriction analysis of a certain clone can be carried out, for example, according to a method originally described by Smith and Berstiel, Nucleic Acids Res. 3:2387-2398 (1976), First, the number and size of cloned restriction fragments to be mapped are determined by complete digestion and agarose gel electrophoresis. Then, the clone is linearized at a unique restriction site outside of the cloned DNA. Aliquots of the linearized molecules are digested to different extents with the enzyme selected for mapping. These partially cut samples are separated on agarose gels, blotted, and hybridized to a labeled fragment of vector DNA. This probe is derived entirely from one side or the other of the unique site used to linearize the clone.

[0130] The results show a ladder of DNA fragments that have the same unique end. By repeating these analyses in pairs with all the neighboring intermediate DNA fragments, the correct order of restriction fragments as well as the orientation of the cloned insert can be deduced. The order of restriction fragments produced by restriction enzymes other than the cloning enzyme can be determined similarly. Fragment data from different enzymes are then combined by a computer program and compared with the alignments of other clones of the library (Kohara et al., Cell 50:495-508 (1987), the entirety of which is herein incorporated by reference).

[0131] The landmarking technique can be carried out without any labeling and relies on agarose gel analysis. Clones are first digested preferably with a 6 bp specific endonuclease A, if possible with the original clone enzyme. Clones are then digested with a second endonuclease B. Endonuclease B is chosen based on its ability to cut rarely in the genome, for example, on average only once in 30 kbp. Of the fragments generated by digestion of one clone with enzyme A, statistically only a small number (between zero and three fragments) will also be cut by enzyme B. The very specific pattern of those fragments which are produced by double digestion are easily recognized. Any of these fragments which have a restriction site for the rarely cutting endonuclease is called a “landmark” Generally one common landmark is sufficient for defining two overlapping clones.

[0132] Alternatively to chromosome walking and the associated comparative restriction analyses methods, chromosome landing also has been reported to be used to locate a gene of interest (Tanksley et al., Trends in Genetics 11 (2):63-68 (1995), the entirety of which is herein incorporated by reference). For chromosome landing, a DNA marker is isolated at a physical distance from the targeted gene. High resolution linkage analysis is used to identify such a marker that cosegregates with the gene. The marker is isolated at a distance that is less than the average insert size of the genomic library used for clone isolation. The DNA marker is then used to screen the library and isolate (or “land” on) the clone containing the gene without chromosome walking. Genome coverage of a library can also be determined by cross-hybridization of individual large insert clones by screening a BAC library with single copy RFLP markers distributed randomly across the genome by hybridization. To assure accuracy of the physical map, the markers should be single-copy or of single-locus origin, if multiple-copy.

[0133] Chromosome landing of large-insert clones using chromosome-specific DNA markers such as STSs microsatellites, RFLPs, or other markers can correlate physical and genetic maps (Zwick et al., Genetics 148:1983-1992 (1998), the entirety of which is herein incorporated by reference in its entirety). These strategies include chromosome landing of BACs containing markers or BAC contigs by BAC-FISH (Fluorescent In Situ Hybridization), a technique that involves tagging the DNA marker with an observable label. BAC clones giving positive hybridization signals are individually analyzed by FISH to metaphase chromosome spreads. The location of the labeled probe can be detected after it binds to its complementary DNA strand in an intact chromosome. The FISH of a BAC selected from a BAC contig will directly place the BAC contig to a specific chromosome region and establish a linkage relationships of the BAC contig to another BAC contig.

[0134] Likewise, BACs and STCs of the present invention can be used for contig mapping (Venter et al., Nature, 381:364-366 (1996), the entirety of which is herein incorporated by reference). A “seed” BAC insert can be sequenced and then STCs and the corresponding BAC of each STC can be placed on the sequenced insert using the BLASTN program. Marker or gene containing STCs can be determined by the BLASTN program and their corresponding BACs can be hybridized to specific chromosomes using BAC-FISH (Zwick et al., Genetics 148:1983-1992 (1998)).

[0135] STCs can be used to identify a minimum tiling path of BACs by computational procedures. Any nucleation sequence (the sequence of an entire BAC, for example) can be electronically compared to a database of STCs to identify the next clones to be sequenced to maximally extend a contig. Chosen STCs need to occupy correct positions in the tiling path. Several factors can contribute to errors in the positioning and selection of these clones. An STC that contains all or part of a repetitive element can appear to align at any part of the growing mosaic which contains that element. One method of selecting the appropriate BAC is to mask out all sections of DNA sequence which are known to be repetitive elements. The sequence symbols of these section are replaced with Ns. These sections of DNA are not used to align the STC. STCs which are completely comprised of Ns are discarded. In this way, the unmasked sections of DNA may be aligned against the growing mosaic without misplacing them due to redundant sequence. A program publicly available, PowerBLAST includes a number of options for masking repetitive elements and low complexity subsequences (Zhang and Madden, Genome Res 7:649-56 (1997), the entirety of which is herein incorporated by reference). cDNA and genomic libraries also can be used as probe sources, thus directly combining the ordering of the genomic DNA with the localization of transcribed sequences. By a simultaneous hybridization to the genomic and back to the transcriptional libraries, results are produced on sequence homologies between transcribed sequences.

[0136] It is understood that the nucleic acid molecules of the present invention may in one embodiment be used in physical mapping. In a preferred embodiment, nucleic acid molecules of the present invention may in one embodiment be used in the physical mapping of Oryza sativa L.

[0137] Nucleic acid molecules of the present invention can be used in comparative mapping (physical and genetic) and to isolate molecules from other cereals based on the syntenic relationship between cereals. Comparative mapping within families provides a method to the degree of sequence conservation, gene order, ploidy of species, ancestral relationships and the rates at which individual genomes are evolving. Comparative mapping has been carried out by cross-hybridizing molecular markers across species within a given family.

[0138] In a preferred embodiment, the nucleic acid molecules of the present invention can be utilized to isolate corresponding syntenic regions in non-Oryza sativa L. plants (Bennetzen and Freeling, Trends in Genet., 9(8):259-261 (1993); Ahn et al., Mol. Gen. Genet., 241(5-6):483-490 (1993); Schwarzacher, Cur. Opin. Genet. & Devel., 4(6): 868-874 (1994); Kurata et al., Bio/Technology, 12:276-278 (1994); Kilian et al., Nucl. Acids Res., 23(14):2729-2733 (1995); Bennett, Symp. Soc. Exp. Biol., 50:45-52 (1996); Hu et al., Genetics, 142(3):1021-1031 (1996); Kilian, Plant Mol. Biol., 35:187-195 (1997); Bennetzen and Freeling, Genome Res., 7(4):301-306 (1997); Foote et al., Genetics, 147(2):801-807 (1997); Gallego et al., Genome, 41(3):328-(1998), all of which are herein incorporated by reference in their entirety). In a particularly preferred embodiment, the nucleic acid molecules of the present invention that define a genomic region in Oryza sativa L. plants associated with a desirable phenotype are utilized to obtain corresponding syntenic regions in non-Oryza sativa L. plants. A region can be defined either physically or genetically.

[0139] One or more of the nucleic acids molecules may be used to define a physical genomic region. For example, two nucleic acid molecules of the present invention can act to define a physical genomic region that lies between them. Moreover, for example, a physical genomic region may be defined by a distance relative to a nucleic acid molecule. In a preferred embodiment of the present invention, the defined physical genomic region is less than about 1,000 kb, more preferably less than about 500 kb, even more preferably less than about 100 kb or less than about 50 kb.

[0140] One or more of the nucleic acids molecules may be used to define a genomic region by its genetic distance from one or more nucleic acid molecules. In a preferred embodiment of the present invention, the genomic region is defined by its linkage to a nucleic acid molecule of the present invention. In such a preferred embodiment, the genomic region that is defined by one or more nucleic acid molecules of the present invention is located within about 50 centimorgans, more preferably within about 20 centimorgans, even more preferably with about 10, about 5 or about 2 centimorgans of the trait or marker at issue.

[0141] In another particularly preferred embodiment, two or more nucleic acid molecules of the present invention derived from Oryza sativa L. plants that flank a genomic region of interest in Oryza sativa L. plants are used to isolate the syntenic region in another cereal, more preferably maize, sorghum or wheat. Regions of interest in Oryza sativa L. include, without limitation, those regions that are associated with a commercially desirable phenotype in Oryza sativa L. In another particularly preferred embodiment the desirable phenotype in Oryza sativa L. is the result of a quantitative trait locus (QTL) present in the region.

[0142] One exemplary approach to isolate syntenic genomic regions is as follows. Nucleic acid molecules derived from Oryuza sativa L. of the present invention can be used to select large insert clones from a total genomic DNA library of a related species such as maize, sorghum or wheat. Any appropriate method to screen the genomic library with a nucleic acid molecule of the present invention may be used to select the required clones (See, for example, Birren et al., Detecting Genes: A Laboratory Manual, Cold Spring Harbor, New York, N.Y. (1998). For example, direct hybridization of a nucleic acid molecule of the present invention to mapping filters comprising the genomic DNA of the syntenic species can be used to select large insert clones from a total genomic DNA library of a related species. The selected clones can then be used to physically map the region in the target species. An advantage of this method for comparative mapping is that no mapping population or linkage map of the target species is needed and the clones may also be used in other closely related species. By comparing the results obtained by genetic mapping in model plants, with those from other species, similarities of genomic structure among plants species can be established. Cross-hybridization of RFLP markers have been reported and conserved gene order has been established in many studies. Such macroscopic synteny is utilized for the estimation of correspondence of loci among these crops. These loci include not only Mendelian genes but also Quantitative Trait Loci (QTL) (Mohan et al., Molecular Breeding 3:87-103 (1997), the entirety of which is herein incorporated by reference). Other methods to isolate syntenic nucleic acid molecules may be used.

[0143] It is understood that markers of the present invention may be used in comparative mapping. In a preferred embodiment the markers of present invention may be used in the comparative mapping of cereals, more preferably maize, soybean and wheat.

[0144] It is understood that markers of the present invention may be used to isolate nucleic acid molecules from other cereals based on the syntenic relationship between such cereals. In a preferred embodiment the cereal is selected from the group of maize, soybean and wheat.

[0145] The nucleic acid molecules of the present invention can be used to identify polymorphisms. In one embodiment, one or more of the STC nucleic acid molecules or a BAC nucleic acid molecule (or a sub-fragment of either) may be employed as a marker nucleic acid molecule to identify such polymorphism(s). Alternatively, such polymorphisms can be detected through the use of a marker nucleic acid molecule or a marker protein that is genetically linked to (i.e., a polynucleotide that co-segregates with) such polymorphism(s). In a preferred embodiment, the plant is selected from the group consisting of cereals, and more preferably maize, soybean and wheat.

[0146] In an alternative embodiment, such polymorphisms can be detected through the use of a marker nucleic acid molecule that is physically linked to such polymorphism(s). For this purpose, marker nucleic acid molecules comprising a nucleotide sequence of a polynucleotide located within 1 mb of the polymorphism(s), and more preferably within 100 kb of the polymorphism(s), and most preferably within 10 kb of the polymorphism(s) can be employed.

[0147] The genomes of animals and plants naturally undergo spontaneous mutation in the course of their continuing evolution (Gusella, Ann. Rev. Biochem. 55:831-854 (1986)). A “polymorphism” is a variation or difference in the sequence of the gene or its flanking regions that arises in some of the members of a species. The variant sequence and the “original” sequence co-exist in the species' population. In some instances, such co-existence is in stable or quasi-stable equilibrium.

[0148] A polymorphism is thus said to be “allelic,” in that, due to the existence of the polymorphism, some members of a species may have the original sequence (i.e., the original “allele”) whereas other members may have the variant sequence (i.e., the variant “allele”). In the simplest case, only one variant sequence may exist, and the polymorphism is thus said to be di-allelic. In other cases, the species' population may contain multiple alleles, and the polymorphism is termed tri-allelic, etc. A single gene may have multiple different unrelated polymorphisms. For example, it may have a di-allelic polymorphism at one site, and a multi-allelic polymorphism at another site.

[0149] The variation that defines the polymorphism may range from a single nucleotide variation to the insertion or deletion of extended regions within a gene. In some cases, the DNA sequence variations are in regions of the genome that are characterized by short tandem repeats (STRs) that include tandem di- or tri-nucleotide repeated motifs of nucleotides. Polymorphisms characterized by such tandem repeats are referred to as “variable number tandem repeat” (“VNTR”) polymorphisms. VNTRs have been used in identity analysis (Weber, U.S. Pat. No. 5,075,217; Armour et al., FEBS Lett. 307:113-115 (1992); Jones et al., Eur. J. Haematol. 39:144-147 (1987); Horn et al., PCT Application WO91/14003; Jeffreys, European Patent Application 370,719; Jeffreys, U.S. Pat. No. 5,175,082; Jeffreys et al., Amer. J. Hum. Genet. 39:11-24 (1986); Jeffreys et al., Nature 316:76-79 (1985); Gray et al., Proc. R. Acad. Soc. Lond. 243:241-253 (1991); Moore et al., Genomics 10:654-660 (1991); Jeffreys et al., Anim. Genet. 18:1-15 (1987); Hillel et al., Anim. Genet. 20:145-155 (1989); Hillel et al., Genet. 124:783-789 (1990), all of which are herein incorporated by reference in their entirety).

[0150] The detection of polymorphic sites in a sample of DNA may be facilitated through the use of nucleic acid amplification methods. Such methods specifically increase the concentration of polynucleotides that span the polymorphic site, or include that site and sequences located either distal or proximal to it. Such amplified molecules can be readily detected by gel electrophoresis or other means.

[0151] The most preferred method of achieving such amplification employs the polymerase chain reaction (“PCR”) (Mullis et al., Cold Spring Harbor Symp. Quant. Biol. 51:263-273 (1986); Erlich et al., European Patent Appln. 50,424; European Patent Appln. 84,796, European Patent Application 258,017, European Patent Appln. 237,362; Mullis, European Patent Appln. 201,184; Mullis, et al., U.S. Pat. No. 4,683,202; Erlich., U.S. Pat. No. 4,582,788; and Saiki et al., U.S. Pat. No. 4,683,194, all of which are herein incorporated by reference), using primer pairs that are capable of hybridizing to the proximal sequences that define a polymorphism in its double-stranded form.

[0152] In lieu of PCR, alternative methods, such as the “Ligase Chain Reaction” (“LCR”) may be used (Barany, Proc. Natl. Acad. Sci.(U.S.A.) 88:189-193 (1991), the entirety of which is herein incorporated by reference. LCR uses two pairs of oligonucleotide probes to exponentially amplify a specific target. The sequences of each pair of oligonucleotides is selected to permit the pair to hybridize to abutting sequences of the same strand of the target. Such hybridization forms a substrate for a template-dependent ligase. As with PCR, the resulting products thus serve as a template in subsequent cycles and an exponential amplification of the desired sequence is obtained.

[0153] LCR can be performed with oligonucleotides having the proximal and distal sequences of the same strand of a polymorphic site. In one embodiment, either oligonucleotide will be designed to include the actual polymorphic site of the polymorphism. In such an embodiment, the reaction conditions are selected such that the oligonucleotides can be ligated together only if the target molecule either contains or lacks the specific nucleotide that is complementary to the polymorphic site present on the oligonucleotide. Alternatively, the oligonucleotides may be selected such that they do not include the polymorphic site (see, Segev, PCT Application WO 90/01069, the entirety of which is herein incorporated by reference).

[0154] The “Oligonucleotide Ligation Assay” (“OLA”) may alternatively be employed (Landegren et al., Science 241:1077-1080 (1988), the entirety of which is herein incorporated by reference). The OLA protocol uses two oligonucleotides which are designed to be capable of hybridizing to abutting sequences of a single strand of a target. OLA, like LCR, is particularly suited for the detection of point mutations. Unlike LCR, however, OLA results in “linear” rather than exponential amplification of the target sequence.

[0155] Nickerson et al. have described a nucleic acid detection assay that combines attributes of PCR and OLA (Nickerson et al., Proc. Natl. Acad. Sci. (U.S.A.) 87:8923-8927 (1990), the entirety of which is herein incorporated by reference). In this method, PCR is used to achieve the exponential amplification of target DNA, which is then detected using OLA. In addition to requiring multiple, and separate, processing steps, one problem associated with such combinations is that they inherit all of the problems associated with PCR and OLA.

[0156] Schemes based on ligation of two (or more) oligonucleotides in the presence of nucleic acid having the sequence of the resulting “di-oligonucleotide”, thereby amplifying the di-oligonucleotide, are also known (Wu et al., Genomics 4:560 (1989), the entirety of which is herein incorporated by reference), and may be readily adapted to the purposes of the present invention.

[0157] Other known nucleic acid amplification procedures, such as allele-specific oligomers, branched DNA technology, transcription-based amplification systems, or isothermal amplification methods may also be used to amplify and analyze such polymorphisms (Malek et al., U.S. Pat. No. 5,130,238; Davey et al., European Patent Application 329,822; Schuster et al., U.S. Pat. No. 5,169,766; Miller et al., PCT Application WO 89/06700; Kwoh et al., Proc. Natl. Acad. Sci. (U.S.A.) 86:1173-1177 (1989); Gingeras et al., PCT Application WO 88/10315; Walker et al., Proc. Natl. Acad. Sci. (U.S.A.) 89:392-396 (1992), all of which are herein incorporated by reference in their entirety).

[0158] The identification of a polymorphism can be determined in a variety of ways. By correlating the presence or absence of it in an plant with the presence or absence of a phenotype, it is possible to predict the phenotype of that plant. If a polymorphism creates or destroys a restriction endonuclease cleavage site, or if it results in the loss or insertion of DNA (e.g., a VNTR polymorphism), it will alter the size or profile of the DNA fragments that are generated by digestion with that restriction endonuclease. As such, individuals that possess a variant sequence can be distinguished from those having the original sequence by restriction fragment analysis. Polymorphisms that can be identified in this manner are termed “restriction fragment length polymorphisms” (“RFLPs”). RFLPs have been widely used in human and plant genetic analyses (Glassberg, UK Patent Application 2135774; Skolnick et al., Cytogen. Cell Genet. 32:58-67 (1982); Botstein et al., Ann. J. Hum. Genet. 32:314-331 (1980); Fischer et al. (PCT Application WO90/13668); Uhlen, PCT Application WO90/11369).

[0159] Polymorphisms can also be identified by Single Strand Conformation Polymorphism (SSCP) analysis. The SSCP technique is a method capable of identifying most sequence variations in a single strand of DNA, typically between 150 and 250 nucleotides in length (Elles, Methods in Molecular Medicine: Molecular Diagnosis of Genetic Diseases, Humana Press (1996), the entirety of which is herein incorporated by reference); Orita et al., Genomics 5:874-879 (1989), the entirety of which is herein incorporated by reference). Under denaturing conditions a single strand of DNA will adopt a conformation that is uniquely dependent on its sequence conformation. This conformation usually will be different, even if only a single base is changed. Most conformations have been reported to alter the physical configuration or size sufficiently to be detectable by electrophoresis. A number of protocols have been described for SSCP including, but not limited to Lee et al., Anal. Biochem. 205:289-293 (1992), the entirety of which is herein incorporated by reference; Suzuki et al., Anal. Biochem. 192:82-84 (1991), the entirety of which is herein incorporated by reference; Lo et al., Nucleic Acids Research 20:1005-1009 (1992), the entirety of which is herein incorporated by reference; Sarkar et al., Genomics 13:441-443 (1992), the entirety of which is herein incorporated by reference). It is understood that one or more of the nucleic acids of the present invention, may be utilized as markers or probes to detect polymorphisms by SSCP analysis.

[0160] Polymorphisms may also be found using a DNA fingerprinting technique called amplified fragment length polymorphism (AFLP), which is based on the selective PCR amplification of restriction fragments from a total digest of genomic DNA to profile that DNA. Vos et al., Nucleic Acids Res. 23:4407-4414 (1995), the entirety of which is herein incorporated by reference. This method allows for the specific co-amplification of high numbers of restriction fragments, which can be visualized by PCR without knowledge of the nucleic acid sequence.

[0161] AFLP employs basically three steps. Initially, a sample of genomic DNA is cut with restriction enzymes and oligonucleotide adapters are ligated to the restriction fragments of the DNA. The restriction fragments are then amplified using PCR by using the adapter and restriction sequence as target sites for primer annealing. The selective amplification is achieved by the use of primers that extend into the restriction fragments, amplifying only those fragments in which the primer extensions match the nucleotide flanking the restriction sites. These amplified fragments are then visualized on a denaturing polyacrylamide gel.

[0162] AFLP analysis has been performed on Salix (Beismann et al., Mol. Ecol. 6:989-993 (1997), the entirety of which is herein incorporated by reference); Acinetobacter (Janssen et al., Int. J. Syst. Bacteriol 47:1179-1187 (1997), the entirety of which is herein incorporated by reference), Aeromonas popoffi (Huys et al., Int. J. Syst. Bacteriol. 47:1165-1171 (1997), the entirety of which is herein incorporated by reference), rice (McCouch et al., Plant Mol. Biol. 35:89-99 (1997), the entirety of which is herein incorporated by reference); Nandi et al., Mol. Gen. Genet. 255:1-8 (1997); Cho et al., Genome 39:373-378 (1996), herein incorporated by reference), barley (Hordeum vulgare) (Simons et al., Genomics 44:61-70 (1997), the entirety of which is herein incorporated by reference; Waugh et al., Mol. Gen. Genet. 255:311-321 (1997), the entirety of which is herein incorporated by reference; Qi et al., Mol. Gen. Genet. 254:330-336 (1997), the entirety of which is herein incorporated by reference; Becker et al., MoL Gen. Genet. 249:65-73 (1995), the entirety of which is herein incorporated by reference), potato (Van der Voort et al., Mol. Gen. Genet. 255:438-447 (1997), the entirety of which is herein incorporated by reference; Meksem et al., Mol. Gen. Genet. 249:74-81 (1995), the entirety of which is herein incorporated by reference), Phytophthora infestans (Van der Lee et al., Fungal Genet. Biol. 21:278-291 (1997), the entirety of which is herein incorporated by reference), Bacillus anthracis (Keim et al., J. Bacteriol. 179:818-824 (1997)), Astragalus cremnophylax (Travis et al., Mol. Ecol. 5:735-745 (1996), the entirety of which is herein incorporated by reference), Arabidopsis (Cnops et al., Mol. Gen. Genet. 253:32-41 (1996), the entirety of which is herein incorporated by reference), Escherichia coli (Lin et al., Nucleic Acids Res. 24:3649-3650 (1996), the entirety of which is herein incorporated by reference), Aeromonas (Huys et al., Int. J. Syst. Bacteriol. 46:572-580 (1996), the entirety of which is herein incorporated by reference), nematode (Folkertsma et al., Mol. Plant Microbe Interact. 9:47-54 (1996), the entirety of which is herein incorporated by reference), tomato (Thomas et al., Plant J. 8:785-794 (1995), the entirety of which is herein incorporated by reference), and human (Latorra et al., PCR Methods Appl. 3:351-358 (1994) the entirety of which is herein incorporated by reference). AFLP analysis has also been used for fingerprinting mRNA (Money et al., Nucleic Acids Res. 24:2616-2617 (1996), the entirety of which is herein incorporated by reference; Bachem, et al., Plant J. 9:745-753 (1996), the entirety of which is herein incorporated by reference). It is understood that one or more of the nucleic acid molecules of the present invention, may be utilized as markers or probes to detect polymorphisms by AFLP analysis for fingerprinting mRNA.

[0163] Polymorphisms may also be found using random amplified polymorphic DNA (RAPD) (Williams et al., Nucl. Acids Res. 18:6531-6535 (1990), the entirety of which is herein incorporated by reference) and cleavable amplified polymorphic sequences (CAPS) (Lyamichev et al., Science 260:778-783 (1993), the entirety of which is herein incorporated by reference). It is understood that one or more of the nucleic acid molecules of the present invention, may be utilized as markers or probes to detect polymorphisms by RAPD or CAPS analysis.

[0164] Nucleic acid molecules of the present invention can be used to monitor expression. A microarray-based method for high-throughput monitoring of plant gene expression may be utilized to measure gene-specific hybridization targets. This ‘chip’-based approach involves using microarrays of nucleic acid molecules as gene-specific hybridization targets to quantitatively measure expression of the corresponding plant genes (Schena et al., Science 270:467-470 (1995), the entirety of which is herein incorporated by reference; Shalon, Ph.D. Thesis. Stanford University (1996), the entirety of which is herein incorporated by reference). Every nucleotide in a large sequence can be queried at the same time. Hybridization can be used to efficiently analyze nucleotide sequences.

[0165] Several microarray methods have been described. One method compares the sequences to be analyzed by hybridization to a set of oligonucleotides or cDNA molecules representing all possible subsequences (Bains and Smith, J. Theor. Biol. 135:303 (1989), the entirety of which is herein incorporated by reference). A second method hybridizes the sample to an array of oligonucleotide or cDNA probes. An array consisting of oligonucleotides or cDNA molecules complementary to subsequences of a target sequence can be used to determine the identity of a target sequence, measure its amount, and detect differences between the target and a reference sequence. Nucleic acid molecule microarrays may also be screened with protein molecules or fragments thereof to determine nucleic acid molecules that specifically bind protein molecules or fragments thereof.

[0166] Additionally, microarrays of BACs may be prepared to sufficiently cover 3× of an entire genome. Such microarrays can be used in a variety of genomics experiments including gene mapping, DNA fingerprinting and promoter identification. Microarrays of genomic DNA can also be used for parallel analysis of genomes at single gene resolution (Lemieux et al., Molecular Breeding 277-289 (1988), the entirety of which is herein incorporated by reference). It is understood that one or more of the molecules of the present invention, preferably one or more of the nucleic acid molecules or protein molecules or fragments thereof of the present invention may be utilized in a genomic microarray based method. In a preferred embodiment of the present invention, one or more of the Oryza sativa L nucleic acid molecules or protein molecules or fragments thereof of the present invention may be utilized in a genomic microarray based method. For example, Genomic Mismatch Scanning (GMS), a hybridization-based method of linkage analysis that allows rapid identification of regions of identity-by-descent between two related individuals, can be carried out with microarrays. GMS is reported to have been used to identify genetically common chromosomal segments based on the ability of these DNA sequences to form extensive regions of mismatch-free heteroduplexes. A series of enzymatic steps, coupled with filter binding, is used to selectively remove heteroduplexes that contain mismatches (i.e., chromosomal regions that do not share identity-by descent.). Fragments of chromosomal DNA representing inherited regions are hybridized to a microarray of ordered genomic clones and positive hybridization signals pinpoint regions of identity-by-descent at high resolution (Lemieux et al., Molecular Breeding 277-289 (1988)).

[0167] It is understood that one or more of the molecules of the present invention, preferably one or more of the nucleic acid molecules or protein molecules or fragments thereof of the present invention may be utilized in a GMS microarray based method to locate regions of identity-by-descent between related individuals. In a preferred embodiment of the present invention, one or more of the Oryza sativa L nucleic acid molecules or protein molecules or fragments thereof of the present invention may be utilized in a GMS microarray based method to locate regions of identity-by-descent between related individuals. The GMS microarray approach can also be used as a tool to map mutigenic traits. For example, in yeast, the entire genomic sequence is known and it has been reported that the genes responsible for growth at elevated temperature, a trait required for the pathogenicity of certain yeast strains, may be determined using GMS (Lemieux et al., Molecular Breeding 277-289 (1988)). By analyzing the inheritance of large numbers of tetrads derived from crosses of pathogenic and wild type strains, all the genes responsible for a yeast strain's ability to grow at 42° C., for example, could be identified.

[0168] It is understood that one or more of the molecules of the present invention, preferably one or more of the nucleic acid molecules or protein molecules or fragments thereof of the present invention may be utilized in a GMS microarray based method to map multigenic traits. In a preferred embodiment of the present invention, one or more of the Oryza sativa L nucleic acid molecules or protein molecules or fragments thereof of the present invention may be utilized in a GMS microarray based method to map multigenic traits.

[0169] Plant repeat elements may be used with GMS microarraying to identify species specific chromosomes in another species background. For example, the maize genome contains moderately repetitive DNA sequences (ZLRS) representing about 2500 copies per haploid genome; these sequences are present in the genus Zea and absent in other graminaceous species. Ananiev et al. (Proc. Natl. Acad. Sci. (U.S.A.) 94:3526-3529 (1997), all of which are herein incorporated by reference in their entirety) have reported unusual plants with individual maize chromosomes added to a complete oat genome generated by embryo rescue from oat (Avena sativa )×Zea mays crosses. By using highly repetitive maize-specific sequences as probes, Ananiev et al. (Proc. Natl. Acad. Sci. (U.S.A.) 94:3526-3529 (1997) were able to selectively isolate cosmid clones containing maize genomic DNA.

[0170] It is understood that one or more of the molecules of the present invention, preferably one or more of the nucleic acid molecules or protein molecules or fragments thereof of the present invention may be utilized in a GMS microarray based method using repeat elements to selectively isolate clones containing species specific DNA. In a preferred embodiment of the present invention, one or more of the Oryza sativa L nucleic acid molecules or protein molecules or fragments thereof of the present invention may be utilized in a GMS microarray based method to selectively isolate clones containing species specific DNA. A particular preferred microarray embodiment of the present invention is a microarray comprising nucleic acid molecules encoding genes that are homologues of known genes or nucleic acid molecules that comprise genes or fragments thereof that elicit only limited or no matches to known genes. A further preferred microarray embodiment of the present invention is a microarray comprising nucleic acid molecules encoding genes or fragments thereof that are homologues of known genes and nucleic acid molecules that comprise genes or fragments thereof that elicit only limited or no matches to known genes. A further preferred microarray embodiment of the present invention is a microarray comprising nucleic acid molecules encoding genes or fragments thereof that elicit only limited or no matches to known genes.

[0171] It is understood that one or more of the molecules of the present invention, preferably one or more of the nucleic acid molecules or protein molecules or fragments thereof of the present invention may be utilized in a microarray based method.

[0172] In a preferred embodiment of the present invention, one or more of the Oryza sativa L nucleic acid molecules or protein molecules or fragments thereof or other agents of the present invention may be utilized in a microarray based method. Nucleic acid molecules of the present invention may be used in site directed mutagenesis. Site-directed mutagenesis may be utilized to modify nucleic acid sequences, particularly as it is a technique that allows one or more of the amino acids encoded by a nucleic acid molecule to be altered (e.g., a threonine to be replaced by a methionine). Three basic methods for site-directed mutagenesis are often employed. These are cassette mutagenesis (Wells et al., Gene 34:315-23 (1985), the entirety of which is herein incorporated by reference), primer extension (Gilliam et al., Gene 12:129-137 (1980), the entirety of which is herein incorporated by reference); Zoller and Smith, Methods Enzymol. 100:468-500 (1983), the entirety of which is herein incorporated by reference; and Dalbadie-McFarland et al., Proc. Natl. Acad. Sci. (U.S.A.) 79:6409-6413 (1982), the entirety of which is herein incorporated by reference) and methods based upon PCR (Scharf et al., Science 233:1076-1078 (1986), the entirety of which is herein incorporated by reference; Higuchi et al., Nucleic Acids Res. 16:7351-7367(1988), the entirety of which is herein incorporated by reference). Site-directed mutagenesis approaches are also described in European Patent 0 385 962, the entirety of which is herein incorporated by reference, European Patent 0 359 472, the entirety of which is herein incorporated by reference, and PCT Patent Application WO 93/07278, the entirety of which is herein incorporated by reference.

[0173] Site-directed mutagenesis strategies have been applied to plants for both in vitro as well as in vivo site-directed mutagenesis (Lanz et al., J. Biol. Chem. 266:9971-6 (1991), the entirety of which is herein incorporated by reference; Kovgan and Zhdanov, Biotekhnologiya 5:148-154, No. 207160n, Chemical Abstracts 110:225 (1989), the entirety of which is herein incorporated by reference; Ge et al., Proc. Natl. Acad. Sci. (U.S.A.) 86:4037-4041 (1989), the entirety of which is herein incorporated by reference, Zhu et al., J. Biol. Chem. 271:18494-18498 (1996), Chu et al., Biochemistry 33:6150-6157 (1994), the entirety of which is herein incorporated by reference, Small et al., EMBO J. 11:1291-1296 (1992), the entirety of which is herein incorporated by reference, Cho et al., Mol. Biotechnol. 8:13-16 (1997), Kita et al., J. Biol. Chem. 271:26529-26535 (1996), the entirety of which is herein incorporated by reference, Jin et al., Mol. Microbiol. 7:555-562(1993), the entirety of which is herein incorporated by reference, Hatfield and Vierstra, J. Biol. Chem. 267:14799-14803 (1992), the entirety of which is herein incorporated by reference, Zhao et al., Biochemistry 31:5093-5099 (1992), the entirety of which is herein incorporated by reference).

[0174] Any of the nucleic acid molecules of the present invention may either be modified by site-directed mutagenesis or used as, for example, nucleic acid molecules that are used to target other nucleic acid molecules for modification. It is understood that mutants with more than one altered nucleotide can be constructed using techniques that practitioners skilled in the art are familiar with such as isolating restriction fragments and ligating such fragments into an expression vector (see, for example, Sambrook et al., Molecular Cloning: A Laboratory Manual, Cold Spring Harbor Press (1989)). In a preferred embodiment of the present invention, one or more of the Oryza sativa L nucleic acid molecules or fragments thereof of the present invention may be modified by site-directed mutagenesis.

[0175] Nucleic acid molecules of the present invention may be used in transformation. Exogenous genetic material may be transferred into a plant cell and the plant cell regenerated into a whole, fertile or sterile plant. Exogenous genetic material is any genetic material, whether naturally occurring or otherwise, from any source that is capable of being inserted into any organism. In a preferred embodiment of the present invention the exogenous genetic material can include Oryza sativa L genetic material. Such genetic material may be transferred into either monocotyledons and dicotyledons including but not limited to the plants, Zea mays and Arabidopsis thaliana and rice (See specifically, Chistou, Particle Bombardment for Genetic Engineering ofPlants, pp. 63-69(Zea mays), pp50-60 (rice), Biotechnology Intelligence Unit, Academic Press, San Diego, Calif. (1996), the entirety of which is herein incorporated by reference and generally Chistou, Particle Bombardment for Genetic Engineering of Plants, Biotechnology Intelligence Unit, Academic Press, San Diego, Calif. (1996), the entirety of which is herein incorporated by reference).

[0176] Transfer of a nucleic acid that encodes for a protein can result in overexpression of that protein in a transformed cell or transgenic plant. One or more of the proteins or fragments thereof encoded by nucleic acid molecules of the present invention may be overexpressed in a transformed cell or transformed plant. Such overexpression may be the result of transient or stable transfer of the exogenous material.

[0177] Exogenous genetic material may be transferred into a plant cell by the use of a DNA vector or construct designed for such a purpose. Vectors have been engineered for transformation of large DNA inserts into plant genomes. Vectors have been designed to replicate in both E. coli and A. tumefaciens and have all of the features required for transferring large inserts of DNA into plant chromosomes (Choi and Wing, http://genome.clemson.edu/protocols2-nj.html July, 1998). ApBACwich system has been developed to achieve site-directed integration of DNA into the genome. A 150 kb cotton BAC DNA is reported to have been transferred into a specific lox site in tobacco by biolistic bombardment and Cre-lox site specific recombination.

[0178] A construct or vector may include a plant promoter to express the protein or protein fragment of choice. A number of promoters which are active in plant cells have been described in the literature. These include the nopaline synthase (NOS) promoter (Ebert et al., Proc. Natl. Acad. Sci. (U.S.A.) 84:5745-5749 (1987), the entirety of which is herein incorporated by reference), the octopine synthase (OCS) promoter (which are carried on tumor-inducing plasmids of Agrobacterium tumefaciens), the caulimovirus promoters such as the cauliflower mosaic virus (CaMV) 19S promoter (Lawton et al., Plant Mol. Biol. 9:315-324 (1987), the entirety of which is herein incorporated by reference) and the CAMV 35S promoter (Odell et al., Nature 313:810-812 (1985), the entirety of which is herein incorporated by reference), the figwort mosaic virus 35S-promoter, the light-inducible promoter from the small subunit of ribulose-1,5-bis-phosphate carboxylase (ssRUBISCO), the Adh promoter (Walker et al., Proc. Natl. Acad. Sci. (U.S.A.) 84:6624-6628 (1987), the entirety of which is herein incorporated by reference), the sucrose synthase promoter (Yang et al., Proc. Natl. Acad. Sci. (U.S.A.) 87:4144-4148 (1990), the entirety of which is herein incorporated by reference), the R gene complex promoter (Chandler et al., The Plant Cell 1:1175-1183 (1989), the entirety of which is herein incorporated by reference), and the chlorophyll a/b binding protein gene promoter, etc. These promoters have been used to create DNA constructs which have been expressed in plants; see, e.g., PCT publication WO 84/02913, herein incorporated by reference in its entirety.

[0179] Promoters which are known or are found to cause transcription of DNA in plant cells can be used in the present invention. Such promoters may be obtained from a variety of sources such as plants and plant viruses. It is preferred that the particular promoter selected should be capable of causing sufficient expression to result in the production of an effective amount of protein to cause the desired phenotype. In addition to promoters which are known to cause transcription of DNA in plant cells, other promoters may be identified for use in the current invention by screening a plant cDNA library for genes which are selectively or preferably expressed in the target tissues or cells.

[0180] For the purpose of expression in source tissues of the plant, such as the leaf, seed, root or stem, it is preferred that the promoters utilized in the present invention have relatively high expression in these specific tissues. For this purpose, one may choose from a number of promoters for genes with tissue- or cell-specific or -enhanced expression. Examples of such promoters reported in the literature include the chloroplast glutamine synthetase GS2 promoter from pea (Edwards et al., Proc. Natl. Acad. Sci. (U.S.A) 87:3459-3463 (1990), herein incorporated by reference in its entirety), the chloroplast fructose-1,6-biphosphatase (FBPase) promoter from wheat (Lloyd et al., Mol. Gen. Genet. 225:209-216 (1991), herein incorporated by reference in its entirety), the nuclear photosynthetic ST-LS1 promoter from potato (Stockhaus et al., EMBO J. 8:2445-2451 (1989), herein incorporated by reference in its entirety), the phenylalanine ammonia-lyase (PAL) promoter and the chalcone synthase (CHS) promoter from Arabidopsis thaliana. Also reported to be active in photosynthetically active tissues are the ribulose-1,5-bisphosphate carboxylase (RbcS) promoter from eastern larch (Larix laricina), the promoter for the cab gene, cab6, from pine (Yamamoto et al., Plant Cell Physiol. 35:773-778 (1994), herein incorporated by reference in its entirety), the promoter for the Cab-I gene from wheat (Fejes et al., Plant Mol. Biol. 15:921-932 (1990), herein incorporated by reference in its entirety), the promoter for the CAB-1 gene from spinach (Lubberstedt et al., Plant Physiol. 104:997-1006 (1994), herein incorporated by reference in its entirety), the promoter for the cab1R gene from rice (Luan et al., Plant Cell. 4:971-981(1992), the entirety of which is herein incorporated by reference), the pyruvate, orthophosphate dikinase (PPDK) promoter from Zea mays (Matsuoka et al., Proc. Natl. Acad. Sci. (U.S.A.) 90:9586-9590 (1993), herein incorporated by reference in its entirety), the promoter for the tobacco Lhcb1*2 gene (Cerdan et al., Plant Mol. Biol. 33:245-255. (1997), herein incorporated by reference in its entirety), the Arabidopsis thaliana SUC2 sucrose-H+ symporter promoter (Truemit et al., Planta. 196:564-570 (1995), herein incorporated by reference in its entirety), and the promoter for the thylacoid membrane proteins from spinach (psaD, psaF, psaE, PC, FNR, atpC, atpD, cab, rbcS). Other promoters for the chlorophyll a/b-binding proteins may also be utilized in the present invention, such as the promoters for LhcB gene and PsbP gene from white mustard (Sinapis alba; Kretsch et al., Plant Mol. Biol. 28:219-229 (1995), the entirety of which is herein incorporated by reference).

[0181] For the purpose of expression in sink tissues of the plant, such as the tuber of the potato plant, the fruit of tomato, or the seed of Zea mays, wheat, rice, and barley, it is preferred that the promoters utilized in the present invention have relatively high expression in these specific tissues. A number of promoters for genes with tuber-specific or -enhanced expression are known, including the class I patatin promoter (Bevan et al., EMBO J. 8:1899-1906 (1986); Jefferson et al., Plant Mol. Biol. 14995-1006 (1990), both of which are herein incorporated by reference in its entirety), the promoter for the potato tuber ADPGPP genes, both the large and small subunits, the sucrose synthase promoter (Salanoubat and Belliard, Gene. 60:47-56 (1987), Salanoubat and Belliard, Gene. 84:181-185 (1989), both of which are incorporated by reference in their entirety), the promoter for the major tuber proteins including the 22 kd protein complexes and proteinase inhibitors (Hannapel, Plant Physiol. 101:703-704 (1993), herein incorporated by reference in its entirety), the promoter for the granule bound starch synthase gene (GBSS) (Visser et al., Plant Mol. Biol. 17:691-699 (1991), herein incorporated by reference in its entirety), and other class I and II patatins promoters (Koster-Topfer et al., Mol. Gen. Genet. 219:390-396 (1989); Mignery et al., Gene. 62:27-44 (1988), both of which are herein incorporated by reference in their entirety).

[0182] Other promoters can also be used to express a fructose 1,6 bisphosphate aldolase gene in specific tissues, such as seeds or fruits. The promoter for β-conglycinin (Chen et al., Dev. Genet. 10:112-122 (1989), herein incorporated by reference in its entirety) or other seed-specific promoters such as the napin and phaseolin promoters, can be used. The zeins are a group of storage proteins found in Zea mays endosperm. Genomic clones for zein genes have been isolated (Pedersen et al., Cell 29:1015-1026 (1982), herein incorporated by reference in its entirety), and the promoters from these clones, including the 15 kD, 16 kD, 19 kD, 22 kD, 27 kD, and gamma genes, could also be used. Other promoters known to function, for example, in Zea mays, include the promoters for the following genes: waxy, Brittle, Shrunken 2, Branching enzymes I and II, starch synthases, debranching enzymes, oleosins, glutelins, and sucrose synthases. A particularly preferred promoter for Zea mays endosperm expression is the promoter for the glutelin gene from rice, more particularly the Osgt-1 promoter (Zheng et al., Mol. Cell Biol. 13:5829-5842 (1993), herein incorporated by reference in its entirety). Examples of promoters suitable for expression in wheat include those promoters for the ADPglucose pyrophosphorylase (ADPGPP) subunits, the granule bound and other starch synthases, the branching and debranching enzymes, the embryogenesis-abundant proteins, the gliadins, and the glutenins. Examples of such promoters in rice include those promoters for the ADPGPP subunits, the granule bound and other starch synthases, the branching enzymes, the debranching enzymes, sucrose synthases, and the glutelins. A particularly preferred promoter is the promoter for rice glutelin, Osgt-1. Examples of such promoters for barley include those for the ADPGPP subunits, the granule bound and other starch synthases, the branching enzymes, the debranching enzymes, sucrose synthases, the hordeins, the embryo globulins, and the aleurone specific proteins.

[0183] Root specific promoters may also be used. An example of such a promoter is the promoter for the acid chitinase gene (Samac et al., Plant Mol. Biol. 25:587-596 (1994), the entirety of which is herein incorporated by reference). Expression in root tissue could also be accomplished by utilizing the root specific subdomains of the CaMV35S promoter that have been identified (Lam et al., Proc. Natl. Acad. Sci. (U.S.A.) 86:7890-7894 (1989), herein incorporated by reference in its entirety). Other root cell specific promoters include those reported by Conkling et al. (Conkling et al., Plant Physiol. 93:1203-1211 (1990), the entirety of which is herein incorporated by reference).

[0184] Additional promoters that may be utilized are described, for example, in U.S. Pat. Nos. 5,378,619, 5,391,725, 5,428,147, 5,447,858, 5,608,144, 5,608,144, 5,614,399, 5,633,441, 5,633,435, and 4,633,436, all of which are herein incorporated in their entirety. In addition, a tissue specific enhancer may be used (Fromm et al., The Plant Cell 1:977-984 (1989), the entirety of which is herein incorporated by reference).

[0185] Constructs or vectors may also include, with the coding region of interest, a nucleic acid sequence that acts, in whole or in part, to terminate transcription of that region. For example, such sequences have been isolated including the Tr7 3′ sequence and the nos 3′ sequence (Ingelbrecht et al., The Plant Cell 1:671-680 (1989), the entirety of which is herein incorporated by reference; Bevan et al., Nucleic Acids Res. 11:369-385 (1983), the entirety of which is herein incorporated by reference), or the like.

[0186] A vector or construct may also include regulatory elements. Examples of such include the Adh intron 1 (Callis et al., Genes and Develop. 1:1183-1200 (1987), the entirety of which is herein incorporated by reference), the sucrose synthase intron (Vasil et al., Plant Physiol. 91:1575-1579 (1989), the entirety of which is herein incorporated by reference) and the TMV omega element (Gallie et al., The Plant Cell 1:301-311 (1989), the entirety of which is herein incorporated by reference). These and other regulatory elements may be included when appropriate.

[0187] A vector or construct may also include a selectable marker. Selectable markers may also be used to select for plants or plant cells that contain the exogenous genetic material. Examples of such include, but are not limited to, a neo gene (Potrykus et al., Mol. Gen. Genet. 199:183-188 (1985), the entirety of which is herein incorporated by reference) which codes for kanamycin resistance and can be selected for using kanamycin, G418, etc.; a bar gene which codes for bialaphos resistance; a mutant EPSP synthase gene (Hinchee et al., Bio/Technology 6:915-922 (1988), the entirety of which is herein incorporated by reference) which encodes glyphosate resistance; a nitrilase gene which confers resistance to bromoxynil (Stalker et al., J. Biol. Chem. 263:6310-6314 (1988), the entirety of which is herein incorporated by reference); a mutant acetolactate synthase gene (ALS) which confers imidazolinone or sulphonylurea resistance (European Patent Application 154,204 (Sep. 11, 1985), the entirety of which is herein incorporated by reference); and a methotrexate resistant DHFR gene (Thillet et al., J. Biol. Chem. 263:12500-12508 (1988), the entirety of which is herein incorporated by reference).

[0188] A vector or construct may also include a transit peptide. Incorporation of a suitable chloroplast transit peptide may also be employed (European Patent Application Publication Number 0218571, the entirety of which is herein incorporated by reference). Translational enhancers may also be incorporated as part of the vector DNA. DNA constructs could contain one or more 5′ non-translated leader sequences which may serve to enhance expression of the gene products from the resulting mRNA transcripts. Such sequences may be derived from the promoter selected to express the gene or can be specifically modified to increase translation of the mRNA. Such regions may also be obtained from viral RNAs, from suitable eukaryotic genes, or from a synthetic gene sequence. For a review of optimizing expression of transgenes, see Koziel et al., Plant Mol. Biol. 32:393-405 (1996), the entirety of which is herein incorporated by reference.

[0189] A vector or construct may also include a screenable marker. Screenable markers may be used to monitor expression. Exemplary screenable markers include a β-glucuronidase or uidA gene (GUS) which encodes an enzyme for which various chromogenic substrates are known (Jefferson, Plant Mol. Biol, Rep. 5:387-405 (1987), the entirety of which is herein incorporated by reference; Jefferson et al., EMBO J. 6:3901-3907 (1987), the entirety of which is herein incorporated by reference); an R-locus gene, which encodes a product that regulates the production of anthocyanin pigments (red color) in plant tissues ((Dellaporta et al., Stadler Symposium 11:263-282(1988), the entirety of which is herein incorporated by reference); a β-lactamase gene (Sutcliffe et al., Proc. Natl. Acad. Sci. (U.S.A.) 75:3737-3741 (1978), the entirety of which is herein incorporated by reference), a gene which encodes an enzyme for which various chromogenic substrates are known (e.g., PADAC, a chromogenic cephalosporin); a luciferase gene (Ow et al., Science 234:856-859 (1986), the entirety of which is herein incorporated by reference) a xylE gene (Zukowsky et al., Proc. Natl. Acad. Sci. (U.S.A.) 80:1101-1105 (1983), the entirety of which is herein incorporated by reference) which encodes a catechol diozygenase that can convert chromogenic catechols; an α-amylase gene (Ikatu et al., Bio/Technol. 8:241-242 (1990), the entirety of which is herein incorporated by reference); a tyrosinase gene (Katz et al., J. Gen. Microbiol. 129:2703-2714 (1983), the entirety of which is herein incorporated by reference) which encodes an enzyme capable of oxidizing tyrosine to DOPA and dopaquinone which in turn condenses to melanin; an α-galactosidase, which will turn a chromogenic α-galactose substrate.

[0190] Included within the terms “selectable or screenable marker genes” are also genes which encode a secretable marker whose secretion can be detected as a means of identifying or selecting for transformed cells. Examples include markers which encode a secretable antigen that can be identified by antibody interaction, or even secretable enzymes which can be detected catalytically. Secretable proteins fall into a number of classes, including small, diffusible proteins detectable, e.g., by ELISA, small active enzymes detectable in extracellular solution (e.g., α-amylase, β-lactamase, phosphinothricin transferase), or proteins which are inserted or trapped in the cell wall (such as proteins which include a leader sequence such as that found in the expression unit of extension or tobacco PR-S). Other possible selectable and/or screenable marker genes will be apparent to those of skill in the art.

[0191] Methods and compositions for transforming a bacteria and other microorganisms are known in the art (see for example Sambrook et al., Molecular Cloning: A Laboratory Manual, Second Edition, Cold Spring Harbor Laboratory Press, Cold Spring Harbor, N.Y., (1989), the entirety of which is herein incorporated by reference).

[0192] There are many methods for introducing transforming nucleic acid molecules into plant cells. Suitable methods are believed to include virtually any method by which nucleic acid molecules may be introduced into a cell, such as by Agrobacterium infection or direct delivery of nucleic acid molecules such as, for example, by PEG-mediated transformation, by electroporation or by acceleration of DNA coated particles, etc. (Pottykus, Ann. Rev. Plant Physiol. Plant Mol. Biol. 42:205-225 (1991), the entirety of which is herein incorporated by reference; Vasil, Plant Mol. Biol. 25:925-937 (1994), the entirety of which is herein incorporated by reference). For example, electroporation has been used to transform Zea mays protoplasts (Fromm et al., Nature 312:791-793 (1986), the entirety of which is herein incorporated by reference).

[0193] Technology for introduction of DNA into cells is well known to those of skill in the art. Four general methods for delivering a gene into cells have been described: (1) chemical methods (Graham and van der Eb, Virology, 54:536-539 (1973), the entirety of which is herein incorporated by reference); (2) physical methods such as microinjection (Capecchi, Cell 22:479-488 (1980), electroporation (Wong and Neumann, Biochem. Biophys. Res. Commun., 107:584-587 (1982); Fromm et al., Proc. Natl. Acad. Sci.(U.S.A.), 82:5824-5828 (1985); U.S. Pat. No. 5,384,253; and the gene gun (Johnston and Tang, Methods Cell Biol. 43:353-365 (1994), all of which are herein incorporated by reference in their entirety; (3) viral vectors (Clapp, Clin. Perinatol., 20:155-168(1993); Lu et al., J. Exp. Med., 178:2089-2096 (1993); Eglitis and Anderson, Biotechniques, 6:608-614 (1988), all of which are herein incorporated by reference in their entirety); and (4) receptor-mediated mechanisms (Curiel et al., Hum. Gen. Ther., 3:147-154 (1992); Wagner et al., Proc. Natl. Acad. Sci. U.S.A., 89:6099-6103 (1992), all of are herein incorporated by reference in their entirety).

[0194] Acceleration methods that may be used include, for example, microprojectile bombardment and the like. One example of a method for delivering transforming nucleic acid molecules to plant cells is microprojectile bombardment. This method has been reviewed by Yang and Christou, eds., Particle Bombardment Technology for Gene Transfer, Oxford Press, Oxford, England (1994), the entirety of which is herein incorporated by reference). Non-biological particles (microprojectiles) that may be coated with nucleic acids and delivered into cells by a propelling force. Exemplary particles include those comprised of tungsten, gold, platinum, and the like.

[0195] A particular advantage of microprojectile bombardment, in addition to it being an effective means of reproducibly, and stably transforming monocotyledons, is that neither the isolation of protoplasts (Cristou et al., Plant Physiol. 87:671-674 (1988), the entirety of which is herein incorporated by reference) nor the susceptibility of Agrobacterium infection is required. An illustrative embodiment of a method for delivering DNA into maize cells by acceleration is a biolistics-particle delivery system, which can be used to propel particles coated with DNA through a screen, such as a stainless steel or Nytex screen, onto a filter surface covered with corn cells cultured in suspension. Gordon-Kamm et al., describes the basic procedure for coating tungsten particles with DNA (Gordon-Kamm et al., Plant Cell 2:603-618 (1990), the entirety of which is herein incorporated by reference). The screen disperses the tungsten nucleic acid particles so that they are not delivered to the recipient cells in large aggregates. A particle delivery system suitable for use with the present invention is the helium acceleration PDS-1000/He gun which is available from Bio-Rad Laboratories (Bio-Rad, Hercules, Califomia)(Sanford et al., Technique 3:3-16 (1991), the entirety of which is herein incorporated by reference).

[0196] For the bombardment, cells in suspension may be concentrated on filters. Filters containing the cells to be bombarded are positioned at an appropriate distance below the microprojectile stopping plate. If desired, one or more screens are also positioned between the gun and the cells to be bombarded.

[0197] Alternatively, immature embryos or other target cells may be arranged on solid culture medium. The cells to be bombarded are positioned at an appropriate distance below the macroprojectile stopping plate. If desired, one or more screens are also positioned between the acceleration device and the cells to be bombarded. Through the use of techniques set forth herein one may obtain up to 1000 or more foci of cells transiently expressing a marker gene. The number of cells in a focus which express the exogenous gene product 48 hours post-bombardment often range from one to ten and average one to three.

[0198] In bombardment transformation, one may optimize the prebombardment culturing conditions and the bombardment parameters to yield the maximum numbers of stable transformants. Both the physical and biological parameters for bombardment are important in this technology. Physical factors are those that involve manipulating the DNA/microprojectile precipitate or those that affect the flight and velocity of either the macro- or microprojectiles. Biological factors include all steps involved in manipulation of cells before and immediately after bombardment, the osmotic adjustment of target cells to help alleviate the trauma associated with bombardment, and also the nature of the transforming DNA, such as linearized DNA or intact supercoiled plasmids. It is believed that pre-bombardment manipulations are especially important for successful transformation of immature embryos.

[0199] In another alternative embodiment, plastids can be stably transformed. Methods disclosed for plastid transformation in higher plants include particle gun delivery of DNA containing a selectable marker and targeting of the DNA to the plastid genome through homologous recombination (Svab et al. Proc. Natl. Acad. Sci. (U.S.A.) 87:8526-8530 (1990); Svab and Maliga Proc. Natl. Acad. Sci. (U.S.A.) 90:913-917 (1993)); Staub, J. M. and Maliga, P. EMBO J. 12:601-606(1993), U.S. Pat. No. 5,451,513 and 5,545,818, all of which are herein incorporated by reference in their entirety).

[0200] Accordingly, it is contemplated that one may wish to adjust various aspects of the bombardment parameters in small scale studies to fully optimize the conditions. One may particularly wish to adjust physical parameters such as gap distance, flight distance, tissue distance, and helium pressure. One may also minimize the trauma reduction factors by modifying conditions which influence the physiological state of the recipient cells and which may therefore influence transformation and integration efficiencies. For example, the osmotic state, tissue hydration and the subculture stage or cell cycle of the recipient cells may be adjusted for optimum transformation. The execution of other routine adjustments will be known to those of skill in the art in light of the present disclosure.

[0201] Agrobacterium-mediated transfer is a widely applicable system for introducing genes into plant cells because the DNA can be introduced into whole plant tissues, thereby bypassing the need for regeneration of an intact plant from a protoplast. The use of Agrobacterium-mediated plant integrating vectors to introduce DNA into plant cells is well known in the art. See, for example the methods described (Fraley et al., Biotechnology 3:629-635 (1985); Rogers et al., Meth. In Enzymol, 153:253-277 (1987), both of which are herein incorporated by reference in their entirety. Further, the integration of the Ti-DNA is a relatively precise process resulting in few rearrangements. The region of DNA to be transferred is defined by the border sequences, and intervening DNA is usually inserted into the plant genome as described (Spielmann et al., Mol. Gen. Genet., 205:34 (1986), the entirety of which is herein incorporated by reference).

[0202] Modem Agrobacterium transformation vectors are capable of replication in E. coli as well as Agrobacterium, allowing for convenient manipulations as described (Klee et al., In: Plant DNA Infectious Agents, T. Hohn and J. Schell, eds., Springer-Verlag, New York, pp. 179-203 (1985), the entirety of which is herein incorporated by reference. Moreover, recent technological advances in vectors for Agrobacterium-mediated gene transfer have improved the arrangement of genes and restriction sites in the vectors to facilitate construction of vectors capable of expressing various polypeptide coding genes. The vectors described have convenient multi-linker regions flanked by a promoter and a polyadenylation site for direct expression of inserted polypeptide coding genes and are suitable for present purposes (Rogers et al., Meth. In Enzymol., 153:253-277 (1987), the entirety of which is herein incorporated by reference). In addition, Agrobacterium containing both armed and disarmed Ti genes can be used for the transformations. In those plant strains where Agrobacterium-mediated transformation is efficient, it is the method of choice because of the facile and defined nature of the gene transfer.

[0203] A transgenic plant formed using Agrobacterium transformation methods typically contains a single gene on one chromosome. Such transgenic plants can be referred to as being heterozygous for the added gene. More preferred is a transgenic plant that is homozygous for the added structural gene; i.e., a transgenic plant that contains two added genes, one gene at the same locus on each chromosome of a chromosome pair. A homozygous transgenic plant can be obtained by sexually mating (selfing) an independent segregant transgenic plant that contains a single added gene, germinating some of the seed produced and analyzing the resulting plants produced for the gene of interest.

[0204] It is also to be understood that two different transgenic plants can also be mated to produce offspring that contain two independently segregating added, exogenous genes. Selfing of appropriate progeny can produce plants that are homozygous for both added, exogenous genes that encode a polypeptide of interest. Back-crossing to a parental plant and out-crossing with a non-transgenic plant are also contemplated, as is vegetative propagation.

[0205] Transformation of plant protoplasts can be achieved using methods based on calcium phosphate precipitation, polyethylene glycol treatment, electroporation, and combinations of these treatments. See for example (Potrykus et al., Mol. Gen. Genet., 205:193-200 (1986); Lorz et al., Mol. Gen. Genet., 199:178, (1985); Fromm et al., Nature, 319:791,(1986); Uchimiya et al., Mol. Gen. Genet.:204:204, (1986); Callis et al., Genes and Development, 1183,(1987); Marcotte et al., Nature, 335:454, (1988), all of which the entirety is herein incorporated by reference).

[0206] Application of these systems to different plant strains depends upon the ability to regenerate that particular plant strain from protoplasts. Illustrative methods for the regeneration of cereals from protoplasts are described (Fujimura et al., Plant Tissue Culture Letters, 2:74,(1985); Toriyama et al., Theor Appl. Genet. 205:34. (1986); Yamada et al., Plant Cell Rep., 4:85, (1986); Abdullah et al., Biotechnology, 4:1087, (1986), all of which the entirety is herein incorporated by reference).

[0207] To transform plant strains that cannot be successfully regenerated from protoplasts, other ways to introduce DNA into intact cells or tissues can be utilized. For example, regeneration of cereals from immature embryos or explants can be effected as described (Vasil, Biotechnology, 6:397,(1988), the entirety of which is herein incorporated by reference). In addition, “particle gun” or high-velocity microprojectile technology can be utilized (Vasil et al., Bio/Technology 10:667, (1992), the entirety of which is herein incorporated by reference).

[0208] Using the latter technology, DNA is carried through the cell wall and into the cytoplasm on the surface of small metal particles as described (Klein et al., Nature, 328:70, (1987); Klein et al., Proc. Natl. Acad. Sci.(U.S.A.), 85:8502-8505, (1988); McCabe et al., Biotechnology, 6:923, (1988), all of which the entirety is herein incorporated by reference). The metal particles penetrate through several layers of cells and thus allow the transformation of cells within tissue explants.

[0209] Other methods of cell transformation can also be used and include but are not limited to introduction of DNA into plants by direct DNA transfer into pollen (Zhou et al., Methods in Enzymology, 101:433, (1983); Hess et al., Intern Rev. Cytol., 107:367, (1987); Luo et al., Plant Mol. Biol. Reporter, 6:165, (1988), all of which the entirety is herein incorporated by reference), by direct injection of DNA into reproductive organs of a plant (Pena et al., Nature, 325:274, (1987), the entirety of which is herein incorporated by reference), or by direct injection of DNA into the cells of immature embryos followed by the rehydration of dessicated embryos (Neuhaus et al., Theor. Appl. Genet., 75:30, (1987), the entirety of which is herein incorporated by reference).

[0210] The regeneration, development, and cultivation of plants from single plant protoplast transformants or from various transformed explants is well known in the art (Weissbach and Weissbach, In: Methods for Plant Molecular Biology, (Eds.), Academic Press, Inc., San Diego, Calif., (1988), the entirety of which is herein incorporated by reference). This regeneration and growth process typically includes the steps of selection of transformed cells, culturing those individualized cells through the usual stages of embryonic development through the rooted plantlet stage. Transgenic embryos and seeds are similarly regenerated. The resulting transgenic rooted shoots are thereafter planted in an appropriate plant growth medium such as soil.

[0211] The development or regeneration of plants containing the foreign, exogenous gene that encodes a protein of interest is well known in the art. Preferably, the regenerated plants are self-pollinated to provide homozygous transgenic plants, as discussed before. Otherwise, pollen obtained from the regenerated plants is crossed to seed-grown plants of agronomically important lines. Conversely, pollen from plants of these important lines is used to pollinate regenerated plants. A transgenic plant of the present invention containing a desired polypeptide is cultivated using methods well known to one skilled in the art.

[0212] There are a variety of methods for the regeneration of plants from plant tissue. The particular method of regeneration will depend on the starting plant tissue and the particular plant species to be regenerated.

[0213] Methods for transforming dicots, primarily by use of Agrobacterium tumefaciens, and obtaining transgenic plants have been published for cotton (U.S. Pat. No. 5,004,863, U.S. Pat. No. 5,159,135, U.S. Pat. No. 5,518,908, all of which the entirety is herein incorporated by reference); rice (U.S. Pat. No. 5,569,834, U.S. Pat. No. 5,416,011, McCabe et al., Biotechnology 6:923, (1988), Christou et al., Plant Physiol., 87:671-674 (1988), all of which the entirety is herein incorporated by reference); Brassica (U.S. Pat. No. 5,463,174, the entirety of which is herein incorporated by reference); peanut (Cheng et al., Plant Cell Rep. 15:653-657 (1996), McKently et al., Plant Cell Rep. 14:699-703 (1995), all of which the entirety is herein incorporated by reference); papaya (Yang et al., (1996), the entirety of which is herein incorporated by reference); pea (Grant et al., Plant Cell Rep. 15:254-258, (1995), the entirety of which is herein incorporated by reference).

[0214] Transformation of monocotyledons using electroporation, particle bombardment, and Agrobacterium have also been reported. Transformation and plant regeneration have been achieved in asparagus (Bytebier et al., Proc. Natl. Acad. Sci.(U.S.A.) 84:5345, (1987), the entirety of which is herein incorporated by reference); barley (Wan and Lemaux, Plant Physiol 104:37, (1994), the entirety of which is herein incorporated by reference); maize (Rhodes et al., Science 240:204, (1988), Gordon-Kamm et al., Plant Cell, 2:603, (1990), Fromrnm et al., Bio/Technology 8:833, (1990), Koziel et al., Bio/Technology 11:194, (1993), Armstrong et al., Crop Science 35:550-557, (1995), all of which the entirety is herein incorporated by reference); oat (Somers et al., Bio/Technology, 10: 1589, (1992), the entirety of which is herein incorporated by reference); orchardgrass (Horn et al., Plant Cell Rep. 7:469, (1988), the entirety of which is herein incorporated by reference); rice (Toriyama et al., Theor Appl. Genet. 205:34, (1986); Park et al., Plant Mol. Biol.,32: 1135-1148, (1996); Abedinia et al., Aust. J. Plant Physiol.24:133-141, (1997); Zhang and Wu, Theor. Appl. Genet. 76:835, (1988); Zhang et al., Plant Cell Rep. 7:379, (1988); Battraw and Hall, Plant Sci. 86:191-202, (1992); Christou et al., Bio/Technology 9:957, (1991), all of which the entirety is herein incorporated by reference); sugarcane (Bower and Birch, Plant J. 2:409, (1992), the entirety of which is herein incorporated by reference); tall fescue (Wang et al., Bio/Technology 10:691, (1992), the entirety of which is herein incorporated by reference), and wheat (Vasil et al., Bio/Technology 10:667, (1992), the entirety of which is herein incorporated by reference; U.S. Pat. No. 5,631,152, the entirety of which is herein incorporated by reference.

[0215] Assays for gene expression based on the transient expression of cloned nucleic acid constructs have been developed by introducing the nucleic acid molecules into plant cells by polyethylene glycol treatment, electroporation, or particle bombardment (Marcotte, et al., Nature, 335:454-457 (1988), the entirety of which is herein incorporated by reference; Marcotte, et al., Plant Cell, 1:523-532 (1989), the entirety of which is herein incorporated by reference; McCarty, et al., Cell 66:895-905 (1991), the entirety of which is herein incorporated by reference; Hattori, et al., Genes Dev. 6:609-618 (1992), the entirety of which is herein incorporated by reference; Goff, et al., EMBO J. 9:2517-2522 (1990), the entirety of which is herein incorporated by reference). Transient expression systems may be used to functionally dissect gene constructs (See generally, Mailga et al., Methods in Plant Molecular Biology, Cold Spring Harbor Press (1995)).

[0216] Any of the nucleic acid molecules of the present invention may be introduced into a plant cell in a permanent or transient manner in combination with other genetic elements such as vectors, promoters enhancers etc. Further any of the nucleic acid molecules of the present invention may be introduced into a plant cell in a manner that allows for over expression of the protein or fragment thereof encoded by the nucleic acid molecule.

[0217] Nucleic acid molecules of the present invention may be used in cosuppression. Cosuppression is the reduction in expression levels, usually at the level of RNA, of a particular endogenous gene or gene family by the expression of a homologous sense construct that is capable of transcribing mRNA of the same strandedness as the transcript of the endogenous gene (Napoli et al., Plant Cell 2:279-289 (1990), the entirety of which is herein incorporated by reference; van der Krol et al., Plant Cell 2:291-299 (1990), the entirety of which is herein incorporated by reference). Cosuppression may result from stable transformation with a single copy nucleic acid molecule that is homologous to a nucleic acid sequence found with the cell (Prolls and Meyer, Plant J. 2:465-475 (1992), the entirety of which is herein incorporated by reference) or with multiple copies of a nucleic acid molecule that is homologous to a nucleic acid sequence found with the cell (Mittlesten et al., Mol. Gen. Genet. 244: 325-330 (1994), the entirety of which is herein incorporated by reference). Genes, even though different, linked to homologous promoters may result in the cosuppression of the linked genes (Vaucheret, C.R. Acad. Sci. III 316: 1471-1483 (1993), the entirety of which is herein incorporated by reference).

[0218] This technique has, for example been applied to generate white flowers from red petunia and tomatoes that do not ripen on the vine. Up to 50% of petunia transformants that contained a sense copy of the chalcone synthase (CHS) gene produced white flowers or floral sectors; this was as a result of the post-transcriptional loss of mRNA encoding CHS (Flavell, Proc. Natl. Acad. Sci. (U.S.A.) 91:3490-3496 (1994)), the entirety of which is herein incorporated by reference). Cosuppression may require the coordinate transcription of the transgene and the endogenous gene, and can be reset by a developmental control mechanism (Jorgensen, Trends Biotechnol, 8:340344 (1990), the entirety of which is herein incorporated by reference; Meins and Kunz, In: Gene Inactivation and Homologous Recombination in Plants (Paszkowski, J., ed.), pp. 335-348. Kluwer Academic, Netherlands (1994), the entirety of which is herein incorporated by reference).

[0219] It is understood that one or more of the nucleic acids of the present invention comprising SEQ ID NO:1 or complement thereof through SEQ ID NO:79201 or complement thereof or fragment thereof or other nucleic acid molecules of the present invention, may be introduced into a plant cell and transcribed using an appropriate promoter with such transcription resulting in the co-suppression of an endogenous protein.

[0220] Nucleic acid molecules of the present invention may be used to reduce gene function. Antisense approaches are a way of preventing or reducing gene function by targeting the genetic material (Mol et al., FEBS Lett. 268:427-430 (1990), the entirety of which is herein incorporated by reference). The objective of the antisense approach is to use a sequence complementary to the target gene to block its expression and create a mutant cell line or organism in which the level of a single chosen protein is selectively reduced or abolished. Antisense techniques have several advantages over other ‘reverse genetic’ approaches. The site of inactivation and its developmental effect can be manipulated by the choice of promoter for antisense genes or by the timing of external application or microinjection. Antisense can manipulate its specificity by selecting either unique regions of the target gene or regions where it shares homology to other related genes (Hiatt et al., In Genetic Engineering, Setlow (ed.), Vol. 11, New York: Plenum 49-63 (1989), the entirety of which is herein incorporated by reference).

[0221] The principle of regulation by antisense RNA is that RNA that is complementary to the target mRNA is introduced into cells, resulting in specific RNA:RNA duplexes being formed by base pairing between the antisense substrate and the target mRNA (Green et al., Annu. Rev. Biochem. 55:569-597 (1986), the entirety of which is herein incorporated by reference). Under one embodiment, the process involves the introduction and expression of an antisense gene sequence. Such a sequence is one in which part or all of the normal gene sequences are placed under a promoter in inverted orientation so that the ‘wrong’ or complementary strand is transcribed into a noncoding antisense RNA that hybridizes with the target mRNA and interferes with its expression (Takayama and Inouye, Crit. Rev. Biochem. MoL Biol. 25:155-184 (1990), the entirety of which is herein incorporated by reference). An antisense vector is constructed by standard procedures and introduced into cells by transformation, transfection, electroporation, microinjection, or by infection, etc. The type of transformation and choice of vector will determine whether expression is transient or stable. The promoter used for the antisense gene may influence the level, timing, tissue, specificity, or inducibility of the antisense inhibition.

[0222] It is understood that protein synthesis activity in a plant cell may be reduced or depressed by growing a transformed plant cell containing a nucleic acid molecule of the present invention.

[0223] Antibodies have been expressed in plants (Hiatt et al., Nature 342:76-78 (1989), the entirety of which is herein incorporated by reference; Conrad and Fielder, Plant Mol. Biol. 26:1023-1030 (1994), the entirety of which is herein incorporated by reference). Cytoplasmic expression of a scFv (single-chain Fv antibodies) has been reported to delay infection by artichoke mottled crinkle virus. Transgenic plants that express antibodies directed against endogenous proteins may exhibit a physiological effect (Philips et al., EMBO J. 16:4489-4496 (1997), the entirety of which is herein incorporated by reference; Marion-Poll, Trends in Plant Science 2:447-448(1997), the entirety of which is herein incorporated by reference). For example, expressed anti-abscisic antibodies reportedly result in a general perturbation of seed development (Philips et al., EMBO J. 16:4489-4496 (1997)).

[0224] Nucleic acid molecules of the present invention may be used as antibodies. Antibodies that are catalytic may also be expressed in plants (abzymes). The principle behind abzymes is that since antibodies may be raised against many molecules, this recognition ability can be directed toward generating antibodies that bind transition states to force a chemical reaction forward (Persidas, Nature Biotechnology 15:1313-1315 (1997), the entirety of which is herein incorporated by reference; Baca et al., Ann. Rev. Biophys. Biomol. Struct. 26:461-493 (1997), the entirety of which is herein incorporated by reference). The catalytic abilities of abzymes may be enhanced by site directed mutagenesis. Examples of abzymes are, for example, set forth in U.S. Pat. No. 5,658,753; U.S. Pat. No. 5,632,990; U.S. Pat. No. 5,631,137; U.S. Pat. No. 5,602,015; U.S. Pat. No. 5,559,538; U.S. Pat. No. 5,576,174; U.S. Pat. No. 5,500,358; U.S. Pat. No. 5,318,897; U.S. Pat. No. 5,298,409; U.S. Pat. No. 5,258,289 and U.S. Pat. No. 5,194,585, all of which are herein incorporated in their entirety.

[0225] It is understood that any of the antibodies of the present invention may be expressed in plants and that such expression can result in a physiological effect. It is also understood that any of the expressed antibodies may be catalytic.

[0226] In addition to the above discussed procedures, practitioners are familiar with the standard resource materials which describe specific conditions and procedures for the construction, manipulation and isolation of macromolecules (e.g., DNA molecules, plasmids, etc.), generation of recombinant organisms and the screening and isolating of clones, (see for example, Sambrook et al., Molecular Cloning: A Laboratory Manual, Cold Spring Harbor Press (1989); Mailga et al., Methods in Plant Molecular Biology, Cold Spring Harbor Press (1995), the entirety of which is herein incorporated by reference; Birren et al., Genome Analysis: Analyzing DNA, 1, Cold Spring Harbor, New York (1998), the entirety of which is herein incorporated by reference).

[0227] The nucleotide sequence provided in SEQ ID NO: 1, through SEQ ID NO:79201 or fragment thereof, or complement thereof, or a nucleotide sequence at least 90% identical, preferably 95%, identical even more preferably 99% or 100% identical to the sequence provided in SEQ ID NO: 1 through SEQ ID NO:79201 or fragment thereof, or complement thereof, can be “provided” in a variety of mediums to facilitate use fragment thereof. Such a medium can also provide a subset thereof in a form that allows a skilled artisan to examine the sequences.

[0228] In one application of this embodiment, a nucleotide sequence of the present invention can be recorded on computer readable media. As used herein, “computer readable media” refers to any medium that can be read and accessed directly by a computer. Such media include, but are not limited to: magnetic storage media, such as floppy discs, hard disc, storage medium, and magnetic tape: optical storage media such as CD-ROM; electrical storage media such as RAM and ROM; and hybrids of these categories such as magnetic/optical storage media. A skilled artisan can readily appreciate how any of the presently known computer readable mediums can be used to create a manufacture comprising computer readable medium having recorded thereon a nucleotide sequence of the present invention.

[0229] As used herein, “recorded” refers to a process for storing information on computer readable medium. A skilled artisan can readily adopt any of the presently known methods for recording information on computer readable medium to generate media comprising the nucleotide sequence information of the present invention. A variety of data storage structures are available to a skilled artisan for creating a computer readable medium having recorded thereon a nucleotide sequence of the present invention. The choice of the data storage structure will generally be based on the means chosen to access the stored information. In addition, a variety of data processor programs and formats can be used to store the nucleotide sequence information of the present invention on computer readable medium. The sequence information can be represented in a word processing text file, formatted in commercially-available software such as WordPerfect and Microsoft Word, or represented in the form of an ASCII file, stored in a database application, such as DB2, Sybase, Oracle, or the like. A skilled artisan can readily adapt any number of data processor structuring formats (e.g., text file or database) in order to obtain computer readable medium having recorded thereon the nucleotide sequence information of the present invention.

[0230] By providing one or more of nucleotide sequences of the present invention, a skilled artisan can routinely access the sequence information for a variety of purposes. Computer software is publicly available which allows a skilled artisan to access sequence information provided in a computer readable medium. The examples which follow demonstrate how software which implements the BLAST (Altschul et al., J. Mol. Biol. 215:403-410 (1990)) and BLAZE (Brutlag et al., Comp. Chem. 17:203-207 (1993), the entirety of which is herein incorporated by reference) search algorithms on a Sybase system can be used to identify open reading frames (ORFs) within the genome that contain homology to ORFs or proteins from other organisms. Such ORFs are protein-encoding fragments within the sequences of the present invention and are useful in producing commercially important proteins such as enzymes used in amino acid biosynthesis, metabolism, transcription, translation, RNA processing, nucleic acid and a protein degradation, protein modification, and DNA replication, restriction, modification, recombination, and repair.

[0231] The present invention further provides systems, particularly computer-based systems, which contain the sequence information described herein. Such systems are designed to identify commercially important fragments of the nucleic acid molecule of the present invention. As used herein, “a computer-based system” refers to the hardware means, software means, and data storage means used to analyze the nucleotide sequence information of the present invention. The minimum hardware means of the computer-based systems of the present invention comprises a central processing unit (CPU), input means, output means, and data storage means. A skilled artisan can readily appreciate that any one of the currently available computer-based system are suitable for use in the present invention.

[0232] As indicated above, the computer-based systems of the present invention comprise a data storage means having stored therein a nucleotide sequence of the present invention and the necessary hardware means and software means for supporting and implementing a search means. As used herein, “data storage means” refers to memory that can store nucleotide sequence information of the present invention, or a memory access means which can access manufactures having recorded thereon the nucleotide sequence information of the present invention. As used herein, “search means” refers to one or more programs which are implemented on the computer-based system to compare a target sequence or target structural motif with the sequence information stored within the data storage means. Search means are used to identify fragments or regions of the sequence of the present invention that match a particular target sequence or target motif. A variety of known algorithms are disclosed publicly and a variety of commercially available software for conducting search means are available and can be used in the computer-based systems of the present invention. Examples of such software include, but are not limited to, MacPattern (EMBL), BLASTIN and BLASTIX (NCBIA). One of the available algorithms or implementing software packages for conducting homology searches can be adapted for use in the present computer-based systems.

[0233] The most preferred sequence length of a target sequence is from about 10 to 100 amino acids or from about 30 to 300 nucleotide residues. However, it is well recognized that during searches for commercially important fragments of the nucleic acid molecules of the present invention, such as sequence fragments involved in gene expression and protein processing, may be of shorter length.

[0234] As used herein, “a target structural motif,” or “target motif,” refers to any rationally selected sequence or combination of sequences in which the sequence(s) are chosen based on a three-dimensional configuration which is formed upon the folding of the target motif. There are a variety of target motifs known in the art. Protein target motifs include, but are not limited to, enzymatic active sites and signal sequences. Nucleic acid target motifs include, but are not limited to, promoter sequences, cis elements, hairpin structures and inducible expression elements (protein binding sequences).

[0235] Thus, the present invention further provides an input means for receiving a target sequence, a data storage means for storing the target sequences of the present invention sequence identified using a search means as described above, and an output means for outputting the identified homologous sequences. A variety of structural formats for the input and output means can be used to input and output information in the computer-based systems of the present invention. A preferred format for an output means ranks fragments of the sequence of the present invention by varying degrees of homology to the target sequence or target motif. Such presentation provides a skilled artisan with a ranking of sequences which contain various amounts of the target sequence or target motif and identifies the degree of homology contained in the identified fragment.

[0236] A variety of comparing means can be used to compare a target sequence or target motif with the data storage means to identify sequence fragments sequence of the present invention. For example, implementing software which implement the BLAST and BLAZE algorithms (Altschul et al., J. Mol. Biol. 215:403-410 (1990)) can be used to identify open frames within the nucleic acid molecules of the present invention. A skilled artisan can readily recognize that any one of the publicly available homology search programs can be used as the search means for the computer-based systems of the present invention.

[0237] Having now generally described the invention, the same will be more readily understood through reference to the following examples which are provided by way of illustration, and are not intended to be limiting of the present invention, unless specified.

### EXAMPLE 1

[0238] BACs are stable, non-chimeric cloning systems having genomic fragment inserts (100-300 kb) and their DNA can be prepared for most types of experiments including DNA sequencing. BAC vector, pBeloBAC11, is derived from the endogenous E. coli F-factor plasmid, which contains genes for strict copy number control and unidirectional origin of DNA replication. Additionally, pBeloBAC11 has three unique restriction enzyme sites (HindIII, BamHI and SphI) located within the LacZ gene which can be used as cloning sites for megabase-size plant DNA. Indigo, another BAC vector contains HindIII and EcoRI cloning sites. This vector also contains a random mutation in the LacZ gene that allows for darker blue colonies.

[0239] As an alternative, the P1-derived artificial chromosome (PAC) can be used as a large DNA fragment cloning vector (Ioannou, et al., Nature Genet. 6:84-89 (1994), the entirety of which is herein incorporated by reference; Suzuki, et al., Gene 199:133-137 (1997), the entirety of which is herein incorporated by reference). The PAC vector has most of the features of the BAC system, but also contains some of the elements of the bacteriophage P1 cloning system.

[0240] BAC libraries are generated by ligating size-selected restriction digested DNA with pBeloBAC11 followed by electroporation into E. coli. BAC library construction and characterization is extremely efficient when compared to YAC (yeast artificial chromosome) library construction and analysis, particularly because of the chimerism associated with YACs and difficulties associated with extracting YAC DNA.

[0241] There are general methods for preparing megabase-size DNA from plants. For example, the protoplast method yields megabase-size DNA of high quality with minimal breakage. The process involves preparing young leaves which are manually feathered with a razor-blade before being incubated for four to five hours with cell-wall-degrading enzymes. The second method developed by Zhange et al., Plant J. 7:175-184 (1995), the entirety of which is herein incorporated by reference, is a universal nuclei method that works well for several divergent plant taxa. Fresh or frozen tissue is homogenized with a blender or mortar and pestle. Nuclei are then isolated and embedded. DNA is prepared by the nucleic method often more concentrated and is reported to contain lower amounts of chloroplast DNA than the protoplast method.

[0242] Once protoplasts or nuclei are produced, they are embedded in an agarose matrix as plugs or microbeads. The agarose provides a support matrix to prevent shearing of the DNA while allowing enzymes and buffers to diffuse into the DNA. The DNA is purified and manipulated in the agarose and is stable for more than one year at 4° C.

[0243] Once high molecular weight DNA has been prepared, it is fragmented to the desired size range. In general, DNA fragmentation utilizes two general approaches, 1) physical shearing and 2) partial digestion with a restriction enzyme that cuts relatively frequently within the genome. Since physical shearing is not dependent upon the frequency and distribution of particular restriction enzymes sites, this method should yield the most random distribution of DNA fragments. However, the ends of the sheared DNA fragments must be repaired and cloned directly or restriction enzyme sites added by the addition of synthetic linkers. Because of the subsequent steps required to clone DNA fragmented by shearing, most protocols fragment DNA by partial restriction enzyme digestion. The advantage of partial restriction enzyme digestion is that no further enzymatic modification of the ends of the restriction fragments are necessary. Four common techniques that can be used to achieve reproducible partial digestion of megabase-size DNA are 1) varying the concentration of the restriction enzyme, 2) varying the time of incubation with the restriction enzyme 3) varying the concentration of an enzyme cofactor (e.g., Mg²⁺) and 4) varying the ratio of endonuclease to methylase.

[0244] There are three cloning sites in pBeloBAC11, but only HindIII and BamHI produce 5′ overhangs for easy vector dephosphorylation. These two restriction enzymes are primarily used to construct BAC libraries. The optimal partial digestion conditions for megabase-size DNA are determined by wide and narrow window digestions. To optimize the optimum amount of HindIII, 1, 2, 3, 10, and 5-units of enzyme are each added to 50 ml aliquots of microbeads and incubated at 37° C. for 20 minutes.

[0245] After partial digestion of megabase-size DNA, the DNA is run on a pulsed-field gel, and DNA in a size range of 100-500 kb is excised from the gel. This DNA is ligated to the BAC vector or subjected to a second size selection on a pulsed field gel under different running conditions. Studies have previously reported that two rounds of size selection can eliminate small DNA fragments co-migrating with the selected range in the first pulse-field fractionation. Such a strategy results in an increase in insert sizes and a more uniform insert size distribution. A practical approach to performing size selections is to first test for the number of clones/microliter of ligation and insert size from the first size selected material. If the numbers are good (500 to 2000 white colony/microliter of ligation) and the size range is also good (50 to 300 kb) then a second size selection is practical. When performing a second size selection one expects a 80 to 95% decrease in the number of recombinant clones per transformation.

[0246] Twenty to two hundred nanograms of the size-selected DNA is ligated to dephosphorylated BAC vector (molar ratio of 10 to 1 in BAC vector excess). Most BAC libraries use a molar ratio of 5 to 15:1 (size selected DNA:BAC vector).

[0247] Transformation is carried out by electroporation and the transformation efficiency for BACs is about 40 to 1,500 transformants from one microliter of ligation product or 20 to 1000 transformants/ng DNA.

[0248] Several tests can be carried out to determine the quality of a BAC library. Three basic tests to evaluate the quality include: the genome coverage of a BAC library-average insert size, average number of clones hybridizing with single copy probes and chloroplast DNA content.

[0249] The determination of the average insert size of the library is assessed in two ways. First, during library construction every ligation is tested to determine the average insert size by assaying 20-50 BAC clones per ligation. DNA is isolated from recombinant clones using a standard mini preparation protocol, digested with NotI to free the insert from the BAC vector and then sized using pulsed field gel electrophoresis (Maule, Molecular Biotechnology 9:107-126 (1998), the entirety of which is herein incorporated by reference).

[0250] To determine the genome coverage of the library, it is screened with single copy RFLP markers distributed randomly across the genome by hybridization. Microtiter plates containing BAC clones are spotted onto Hybond membranes. Bacteria from 48 or 72 plates are spotted twice onto one membrane resulting in 18,000 to 27,648 unique clones on each membrane in either a 4×4 or 5×5 orientation. Since each clone is present twice, false positives are easily eliminated and true positives are easily recognized and identified.

[0251] Finally, the chloroplast DNA content in the BAC library is estimated by hybridizing three chloroplast genes spaced evenly across the chloroplast genome to the library on high density hybridization filters.

[0252] There are strategies for isolating rare sequences within the genome. For example, higher plant genomes can range in size from 100 Mb/1C (Arabidopsis) to 15,966 Mb/C (Triticum aestivum), (Arumuganathan and Earle, Plant Mol Bio Rep.9:208-219 (1991), the entirety of which is herein incorporated by reference). The number of clones required to achieve a given probability that any DNA sequence will be represented in a genomic library is N=(ln(1−P))/(ln(1−L/G)) where N is the number of clones required, P is the probability desired to get the target sequence, L is the length of the average clone insert in base pairs and G is the haploid genome length in base pairs (Clarke et al., Cell 9:91-100 (1976) the entirety of which is herein incorporated by reference).

[0253] The rice BAC library of the present invention is constructed in the pBeloBAC11 or similar vector. Inserts are generated by partial EcoRI or other enzymatic digestion of DNA. The library provides approximately twenty-five fold coverage of the rice genome.

### EXAMPLE 2

[0254] Two basic methods can be used for DNA sequencing, the chain termination method of Sanger et al., Proc. Natl. Acad. Sci. (U.S.A.) 74:5463-5467 (1977), the entirety of which is herein incorporated by reference and the chemical degradation method of Maxam and Gilbert, Proc. Natl. Acad. Sci.(U.S.A.) 74:560-564 (1977), the entirety of which is herein incorporated by reference. Automation and advances in technology such as the replacement of radioisotopes with fluorescence-based sequencing have reduced the effort required to sequence DNA (Craxton, Methods, 2:20-26 (1991), the entirety of which is herein incorporated by reference; Ju et al., Proc. Natl. Acad. Sci. (U.S.A.) 92:4347-4351 (1995), the entirety of which is herein incorporated by reference; Tabor and Richardson, Proc. Natl. Acad. Sci.(U.S.A.) 92:6339-6343 (1995), the entirety of which is herein incorporated by reference). Automated sequencers are available from, for example, Pharmacia Biotech, Inc., Piscataway, N.J. (Pharmacia ALF), LI-COR, Inc., Lincoln, Nebr. (LI-COR 4,000) and Millipore, Bedford, Mass. (Millipore BaseStation).

[0255] In addition, advances in capillary gel electrophoresis have also reduced the effort required to sequence DNA and such advances provide a rapid high resolution approach for sequencing DNA samples (Swerdlow and Gesteland, Nucleic Acids Res. 18:1415-1419 (1990); Smith, Nature 349:812-813 (1991); Luckey et al., Methods Enzymol. 218:154-172 (1993); Lu et al., J Chromatog. A. 680:497-501 (1994); Carson et al., Anal. Chem. 65:3219-3226 (1993); Huang et al., Anal. Chem. 64:2149-2154 (1992); Kheterpal et al., Electrophoresis 17:1852-1859 (1996); Quesada and Zhang, Electrophoresis 17:1841-1851 (1996); Baba, Yakugaku Zasshi 117:265-281 (1997), all of which are herein incorporated by reference in their entirety).

[0256] A number of sequencing techniques are known in the art, including fluorescence-based sequencing methodologies. These methods have the detection, automation and instrumentation capability necessary for the analysis of large volumes of sequence data. Currently, the 377 DNA Sequencer (Perkin-Elmer Corp., Applied Biosystems Div., Foster City, Calif.) allows the most rapid electrophoresis and data collection. With these types of automated systems, fluorescent dye-labeled sequence reaction products are detected and data entered directly into the computer, producing a chromatogram that is subsequently viewed, stored, and analyzed using the corresponding software programs. These methods are known to those of skill in the art and have been described and reviewed (Birren et al., Genome Analysis: Analyzing DNA,1, Cold Spring Harbor, New York, the entirety of which is herein incorporated by reference).

We claim:

1. A substantially purified nucleic acid molecule, said nucleic acid molecule capable of specifically hybridizing to a second nucleic acid molecule having a nucleic acid sequence selected from the group consisting of SEQ ID NO: 1 through SEQ ID NO: 79201 or complement or fragment of either.

2. The substantially purified nucleic acid molecule according to claim 1, wherein said nucleic acid molecule comprises a microsatellite sequence.

3. The substantially purified nucleic acid molecule according to claim 1, wherein said nucleic acid molecule comprises a region having a single nucleotide polymorphism.

4. The substantially purified nucleic acid molecule according to claim 1, wherein said nucleic acid molecule comprises a nucleic acid molecule having a nucleic acid sequence selected from the group consisting of SEQ ID NO: 1 through SEQ ID NO: 79201 or complement thereof or fragment of either.

5. The substantially purified nucleic acid molecule according to claim 4, wherein said nucleic acid molecule further comprises a bacterial ORI site.

6. The substantially purified nucleic acid molecule according to claim 1, wherein said nucleic acid molecule has a promoter or partial promoter region.

7. The substantially purified nucleic acid molecule according to claim 6, wherein said promoter region comprises a CAAT cis element and a TATA cis element and an additional cis element.

8-10. (canceled)

11. A substantially purified protein or fragment thereof encoded by a first nucleic acid molecule which specifically hybridizes to a second nucleic acid molecule, said second nucleic acid molecule having a nucleic acid sequence selected from the group consisting of SEQ ID NO: 1 through SEQ ID NO:79201 or complements thereof.

12. A substantially purified protein or fragment thereof encoded by a nucleic acid sequence selected from the group consisting of SEQ ID NO: 1 through SEQ ID NO:79201 or complements thereof or fragment of either.

13. A substantially purified antibody or fragment thereof, said antibody or fragment thereof capable of specifically binding to the protein or fragment thereof of claim 11 or 12.

14. A transformed plant having a nucleic acid molecule which comprises:
(A) an exogenous promoter region which functions in a plant cell to cause the production of a mRNA molecule; which is linked to
(B) a structural nucleic acid molecule, wherein said structural nucleic acid molecule is selected from the group consisting of SEQ ID NO:1 through SEQ ID NO:79201 or complements thereof or fragment of either; which is linked to
(C) a 3′ non-translated sequence that functions in a plant cell to cause termination of transcription and addition of polyadenylated ribonucleotides to a 3′ end of said mRNA molecule.

15. The transformed plant according to claim 14, wherein said structural nucleic acid molecule is in the antisense orientation.

16. The transformed plant according to claim 14, wherein said plant is a dicot.

17. The transformed plant according to claim 14, wherein said plant is a monocot.

18. A transformed plant having a nucleic acid molecule which comprises:
(A) an exogenous promoter region which functions in a plant cell to cause the production of a mRNA molecule wherein said promoter nucleic acid molecule is selected from the group consisting of SEQ ID NO:1 through SEQ ID NO:79201 or complements thereof or fragment of either; which is linked to
(B) a structural nucleic acid molecule encoding a protein or peptide; which is linked to
(C) a 3′ non-translated sequence that functions in a plant cell to cause termination of transcription and addition of polyadenylated ribonucleotides to a 3′ end of said mRNA molecule.

19. The transformed plant according to claim 18 wherein said structural nucleic acid molecule is in the antisense orientation.

20. The transformed plant according to claim 18, wherein said plant is a dicot.

21. The transformed plant according to claim 18, wherein said plant is a monocot.

22. A transformed plant having a nucleic acid molecule which comprises:
(A) an exogenous promoter region which functions in a plant cell to cause the production of a mRNA molecule; which is linked to
(B) a transcribed nucleic acid molecule with a transcribed strand and a non-transcribed strand, wherein said transcribed strand is complementary to a nucleic acid molecule having a nucleic acid sequence selected from the group consisting of SEQ ID NO:1 through SEQ ID NO:79201 or complements thereof or fragment of either and said transcribed strand is complementary to an endogenous mRNA molecule; which is linked to
(C) a 3′ non-translated sequence that functions in plant cells to cause termination of transcription and addition of polyadenylated ribonucleotides to a 3′ end of said mRNA molecule.

23. A transformed plant having a nucleic acid molecule which comprises:
(A) an exogenous promoter region which functions in a plant cell to cause the production of a mRNA molecule wherein said promoter nucleic acid molecule is selected from the group consisting of SEQ ID NO:1 through SEQ ID NO:79201 or complements thereof or fragment of either; which is linked to
(B) a transcribed nucleic acid molecule with a transcribed strand and a non-transcribed strand, wherein said transcribed strand is complementary to an endogenous MRNA molecule; which is linked to
(C) a 3′ non-translated sequence that functions in plant cells to cause termination of transcription and addition of polyadenylated ribonucleotides to a 3′ end of said mRNA molecule.

24. Computer readable medium having recorded thereon one or more of the nucleotide sequences depicted in SEQ ID NO:1 through SEQ ID NO: 79201.

25. Computer readable medium according to claim 24, wherein nucleotide sequences depicted in SEQ ID NO:1 through SEQ ID NO: 79201 are recorded thereon.

26. A method of introgressing a trait into a plant comprising using a nucleic acid marker for marker assisted selection of said plant, said nucleic acid marker complementary to a nucleic acid sequence selected from the group consisting of SEQ ID NO: 1 through SEQ ID NO: 79201 or complements thereof or fragment of either, and introgressing said trait into a plant.

27. A method for screening for a trait comprising interrogating genomic DNA for the presence or absence of a marker molecule that is genetically linked to a nucleic acid sequence complementary to a nucleic acid sequence selected from the group consisting of SEQ ID NO: 1 through SEQ ID NO: 79201 or complements thereof or fragment of either; and detecting said presence or absence of said marker.

28. The method for screening for enhanced yield according to claim 27, wherein said marker molecule is a microsatellite marker.

29. The method for screening for enhanced yield according to claim 27, wherein said marker molecule is a single nucleotide polymorphic marker.

30. The method for screening for enhanced yield according to claim 27, wherein said detecting of said presence or absence of said marker is detected by a detection method selected from the group consisting of AFLP, RFLP, RAPD, SNP microsatellite analysis.

31. A method for determining the likelihood of the presence or absence of a trait in a plant comprising the steps of:
(A) obtaining genomic DNA from said plant;
(B) detecting a marker nucleic acid molecule; said marker nucleic acid molecule wherein said marker nucleic acid molecule specifically hybridizes with a nucleic acid sequence that is genetically linked to a nucleic acid sequence complementary to a nucleic acid sequence selected from the group consisting of SEQ ID NO: 1 through SEQ ID NO: 79201 or complements thereof;
(C) determining the level, presence or absence of said marker nucleic acid molecule, wherein the level, presence or absence of said marker nucleic acid molecule is indicative of the likely presence in said plant of said trait.

32. The method for determining the likelihood of the presence or absence of a trait in a plant according to claim 31, wherein said marker molecule is a microsatellite marker.

33. The method for determining the likelihood of the presence or absence of a trait in a plant according to claim 31, wherein said marker molecule is a single nucleotide polymorphic marker.

34. The method for determining the likelihood of the presence or absence of a trait in a plant according to claim 31, wherein said detecting of said presence or absence of said marker is detected by a detection method selected from the group consisting of AFLP, RFLP, RAPD, SNP and microsatellite analysis.

35. A method for determining a genomic polymorphism in a plant that is predictive of a trait comprising the steps:
(A) incubating a marker nucleic acid molecule, under conditions permitting nucleic acid hybridization, and a complementary nucleic acid molecule obtained from said plant, said marker nucleic acid molecule having a nucleic acid sequence selected from the group consisting of SEQ ID NO: 1 through SEQ ID NO: 79201 or complements thereof;
(B) permitting hybridization between said marker nucleic acid molecule and said complementary nucleic acid molecule obtained from said plant; and
(C) detecting the presence of said polymorphism.

36. A method of determining an association between a polymorphism and a plant trait comprising:
(A) hybridizing a nucleic acid molecule specific for the polymorphism to genetic material of a plant, wherein the nucleic acid molecule comprises a nucleic acid sequence selected from the group consisting of SEQ ID NO: 1 through SEQ ID NO: 79201 or complements thereof or fragments of either; and
(B) calculating the degree of association between the polymorphism and the plant trait.

37. A method for isolating a nucleic acid molecule in a non-Oryza sativa L. cereal comprising:
(A) defining a genomic region of Oryza sativa L. by reference to a marker molecule, wherein said marker molecule comprises a nucleic acid sequence selected from the group consisting of SEQ ID NO: 1 through SEQ ID NO: 79201 or complement thereof or fragment of either;
(B) identifying a syntenic genomic region of non-Oryza sativa L. cereal that corresponds to said defined genomic region of Oryza sativa L.; and
(C) isolating said syntenic genomic region of non-Oryza sativa L. cereal that corresponds to said defined genomic region of Oryza sativa L.

38. A method for interrogating a genomic region of a non-Oryza sativa L. cereal comprising interrogating genomic DNA for the presence or absence of two marker molecules, wherein said two marker molecules comprise two nucleic acid sequences selected from the group consisting of SEQ ID NO: 1 through SEQ ID NO: 79201 or complement thereof or fragment of either, and detecting the presence or absence of said two marker molecules.

The application's sequence listing, which the Patent Office published only in electronic form, follows.

SEQUENCE LISTING (79201 sequences)

SEQ ID NO: 1 - DNA, 401 bp, Oryza sativa
  unsure (1)..(401): unsure at all n locations
agcttcctanaagattcacccaaaatgaatctcttattttatatncaacttttcctgggaaatctaaaatgaatcatgtcttgcttcgtctgctacgtggatccatgaggcatatatatatagcttcgattgtgaatatctatcattagatggcccatctatatgccaccttaattggataacattttggttctagcttacacatggactgcatgccaactatgcatgccaagtggctcactcgtcggtgatcagtataattagtcaggattattcctttggtccatccatgcataatataaggcatttgttctatctaagctgtctgtctacgatggtaatcgaatgacatcgattaagattacgtaaattataatatgtggccttgattattctgtact

SEQ ID NO: 2 - DNA, 442 bp, Oryza sativa
agcttgttttcaatgacagggaccagatggcttctatttctgctagacagactaagcagtgaaaagaaggcccaggttttatacttgttgtggagagcctagtatattaggaatgaggtggttcatggtaaaggtaatgtccctattacagattcggtgcgttttttgattaattatgataacctacagttgcccgcccgaaaacacatggaagacatcaaggggaaaggacctatgtttcaggatccatgtcagaaagagcacacatgtcagttgaatgcagagaaagaaaagtggagttgcccgcctgatggaagtgcaaagctcaatgtggacgcagcttatagaactgaaacaggcgaagcaagcgctgggattatcatcagagattgcaggggctagtactcctggctgcatataaaactttgcatcagtgtacctc

SEQ ID NO: 3 - DNA, 436 bp, Oryza sativa
tcgcagaaccctcatcgacggaggcagtgcactcaatatcctcttcttcaagaccttggatgatatgcagattcctcgctccaagctaaaaccaagcaatgcgccttttcacggagtaattccaggattatccgcaactccactcggccagatcaccctcccggtcacttttggcactcgggaaaacttccgcacagagaatatcagctttgaagtcaccgattttgagacagcataccatgccatactcggacgcccggcgttagccaagttcatggccgtcccgcactacacttacatgatgatgaagatgcctggtccccgaggagtcctatccctacggagcgacatcaagcaagccgtcacatgcgacaaggagagttgcgacatggcccaaacccgcgagatggcgtctgcccgagaggatatccgactg

SEQ ID NO: 4 - DNA, 480 bp, Oryza sativa
  unsure (1)..(480): unsure at all n locations
agcttncactctcgagtttgtagttactaatatttgattcttggaattattgtttttgaacaatatttattgcattgggaattgattttaattagttcaacttcccaaagatatctgaatctccatttattttagtatattattcgggttcttgtattccattagtattttgggatttgggaattatataaaggttttaattcctggttccatgttgtcaatagaactctagatgataccccgcgcattgctgctagatcttatagaaatggctttttttaatgaaatattgtaatgaanaaattaatagagttgtatgatagatcagaagataagtgtgtgaagtgaagacaagtttacaaacattggtgatgagctgtgaganaacataattagtgagaacattagaaagataaaactatcatcgatggaacttacctcaatctagaaatgctctcaaactatgtctgaactctttca

SEQ ID NO: 5 - DNA, 174 bp, Oryza sativa
cacaaaaactagctttaaatacagatatcccatagccatctttttctctcatgaccgtgagcaccgctaatcgattagtttttacaactctgcagagtttggacagctttacccacatgatgtgaatcactctagtttggtcggtacccggcggtaccaccatacttttcacat

SEQ ID NO: 6 - DNA, 456 bp, Oryza sativa
  unsure (1)..(456): unsure at all n locations
agcttaaagnccaacttcgacttccttcaatgatggtagagggaaagattattctttgcaaagatttttgcactgtaataaaacctccagcgtgttttctggctcttattgtttttcctttgaactacgaggtgcacctcaaatcctcaatacctggtatacctggtatttacagtggatgatcgtcatgtctgtcagccttcatgtacaacaggatcatatgttgatccaaaagaatcaatccgacgatctatgaaatggcgcattctttgcgccattcaactgcatctttcttttcctctgaatttggcggactgtttcacaaatcaatagaattcagtttggcactccattgcttgtcaagtgcaggtcaattccaacttttttcaagcttctataacgagcctctgagattntggatcatgatcagaacatcgtgatggagtaatgcctgtc

SEQ ID NO: 7 - DNA, 433 bp, Oryza sativa
accttaaaactcagcttcccagtccagaacaagagatgaaaaaactgttaacttattccaaatgttatttgctgatttttattggaatcagatcctgcttaaaattcatgttttcatatgtagctcaataatgcagcaaaaagttcagaatcctttttgttttgtgaggagaaacccataactgaatcaatcaaaggtttccaagttaggaattctctcaccctgccacctttggggaaaggtttagagccattcttgcatgtgtgggcatcacagaattggcgcaagagaaattctgtgaaacaagttggataagcaagaaagctacacgagagtgctatgaggacagataattagattcaagtagtgctcaagtgctcacttaccatgaagacggctggcagatttgccttgattaataagaaagcaacta

SEQ ID NO: 8 - DNA, 415 bp, Oryza sativa
agcttatccagaagagaccgacgtcatgtatttgcgtcatggcaagttatctattaatcaggaatagtttgttagtctccttttatctttaggaaagtgtgttcagcgtcctataaggactttatcttgccttttatctctaggaaagtttctttcttgtctgacaaggacttgtatcaacccatgggtataaatatatacacccagggtctatataatctatcgctatgatcaatacaattcagtgcatcgccaccctttctacttctacttttgtttttacgttccggcggaacttggcactcgacgcggtgctgcatcgtcttcgatctccggcgaacggataagtccaatgttctgccggtccaggcaattgtatcgtctacgtcggcgtctgtcaacgctgcatcacgac

SEQ ID NO: 9 - DNA, 424 bp, Oryza sativa
  unsure (1)..(424): unsure at all n locations
tattacaatgngactcaatattaccgaagattggtactttatgcaacaacaacccanaggcaaccgcttttaatccctttggatacactccttctgactcactttgaactctcgggttttatggcctaaactatgcaaactacacggatgtgtatccctatatatgctattcggcacgtataggccacaccacccatagtgaagggcacactttggtgttttatgcgcttcaactattgattatttgtgtatcagtacataaaaatggtttttgttttgagacatgggagcaacaaataaaacattaacataggttaaaaggggccacatacttgttttgttgcatgcaaaacgaatgcaatgtgcaacaattatgctcaacactcacgtactcataaaggtgtatgacatatacttcttgctg

SEQ ID NO: 10 - DNA, 377 bp, Oryza sativa
  unsure (1)..(377): unsure at all n locations
agcttgcagnaatgtagacgcacgcaatatatttctgtctctctgttgaatgcagttccggttgggcctctgactaataattcaatggtgaacacatcataaatgttagcgtatttacgtagtgtcatttcttcttagagggtatgcaaaagtatacagttcaccagaaaaaatntataggacaccgaatgctgatatcttatacacaatatgtatgtacatgcataataaacaatgctaatttcatttagatttctctaactacaaaagaagataattgatctcaaagttgctaatggtagcgacttggtagtataaaataatccttaagctcctcgtttntccacttgcatcattttctattgaagttcttttat

SEQ ID NO: 11 - DNA, 440 bp, Oryza sativa
agcttcatcttggagccatcggagaacttttttctgttcttcatctatggccaattgaacctgtcgtcgaaacacattgcaatcattagtggaatgagaatgagaatcatgccatttacaataagctcgacgtttcaattcttcttgagatggtatgatatggcctttaggtaatctaatttgtttttcttgtaaaagataatcaaaaatcttatcacacttggccacatcaaaactatatttaacctcactttgccgatctttgcgaggagtcggcattatgttagaacaaacaaaaggctttgttttgttagtccatgaccattcagcaacatacatatcatgatcaccctcatcttcactatcactagcctcagggtaatcaatcacattaacattacgctttttctcatattggctaacaatttttttattatcct

SEQ ID NO: 12 - DNA, 440 bp, Oryza sativa
actcaagcttatctcctacgcttcaggaatggatcagtcagaacatctttatctgtttgcgttcgtctgccgccggctggtgtctccgcctgcacggctggccaattatgccgccgttgttgggcgtctacgtcttcaccgaccggccgcctcgtctgccgccgactggtgtctccccctgcacggctggcctattatgccgccgttgttgggcgtctacgtcttcaccgaccggccacctcgtctgccaccgactggtgtctccgcctgcacggctggcctattatgccgccgtctgttgggcgtctacgtcttcaccgaccggccgcctcgtctgccgccgactggtgtctccgcctgcacggctggcctattatgctgccgtctgttgggcgtctacgtcttcacctaccggccgcctcgtctgccgacgactggtg

SEQ ID NO: 13 - DNA, 436 bp, Oryza sativa
  unsure (1)..(436): unsure at all n locations
agcttgcccctaggaagcgaagggtcctgcttcttcggactccgacgccgacgacgaggatgatgccgaagaacgcgacggcgaggaggaaggagaggagaaagaggaggccatggccgataaggccgcgaacgaggcgatcgaagaccgcgtcgacacccccgactacactcctaccccaagtcccggtcacaacgagaccggngtggagtcgaacagctccccccttcgacggaaggatttggaaggggcgaaggccctagttgcattctcctcgggcaaggcggcgaagggaggtccggtgcagaagatctctaaaaagaaaggactcgtcgacatcgcccacgttttcagcgacgacgaatcttctaacgggactccaacttcgcctgctggccgcagtttagacctttcgactgctcccctcactccactc

SEQ ID NO: 14 - DNA, 461 bp, Oryza sativa
gacacttgaaactaagcttgacaatatattagccctcaaatattcctagggcgacttatatattttattataaaaataacttgcttataatctcagttaacatagaccatttgtttgttcagttttatggatttctgcattggtccttttgcactgactgtcaagattgtaaagcatcacaaaaatgtggctgcattgaagggaaaaaagttgtcatctgtgactacagagatggactaattatccgtgtcaacagaaacagtaacccacaagcagattatgaacagaagcatatatcatttggagagcctccatgatccttatctgcttgaaggctgcaaaatacatttattgggcaggaagagcaatccgtaaagtaaagaagccatatatcccaagactctttttatcctgaggttaaatcaaatgcaaggcaccagaattcataagcaatggagacg

SEQ ID NO: 15 - DNA, 466 bp, Oryza sativa
  unsure (1)..(466): unsure at all n locations
agcttgacaatctcaaccctctagagattgattgtttatattaaagataatgtacttacaagattgttaacttggttaattctgacaaacttgctgggattggtccttcaaatgaatntccttggaaagccctacaagttcatactttaagataaaatgtggagatatgcctgtctattttaatataataaaaaaagaagctctccatgtcaactattctagataaaaactctacgcattaacatgccatagggccagcttattggcatgcatgtgtgcacgtctgtttagtcaggacagagaagagaaacatatacccnannatnannttgcacagtttccatctgttactgcataatatacactgaataatggtatattcacaacttaatatagctgatcttacnnnnntncagactacttcatgctgccaaatatcaggtattttgcctgtgaaatcattatc

SEQ ID NO: 16 - DNA, 439 bp, Oryza sativa
  unsure (1)..(439): unsure at all n locations
tgataactganttgtgaaatacaatcgagcagacggattggtgttattgtaaatgggagttcttcactgggatttatcagtaatctgacatctttgaccaacttgtatgtgatgcctttttctatagagcattagagcttacaatattgtcaaagttacaagtcacctatatttgatttcatttttacagagtattaaggaactgcaggatatcggaaaaccttgaaacagtagatttttcgaagtttgcagcgttaaccatgctgtatgttttcattattggccatggtgcctgctataatgcttttggtcatttcctggaattgataagtatttgttcaagtaatgtttctttcctgtggcacagggacttgagttntaacaatattacaggccaagttcctcagtccatcctgaatctaggaatgcttcaattcct

SEQ ID NO: 17 - DNA, 356 bp, Oryza sativa
cctggacatgacaaaatccgagagcctcaaacgtaatgttcagctgcctgcgccttcatctcatcccacttgtcatcatccatcttttccggcatcgtctcctcaagagccttggatatcccctgctgagccaacagatccttcagcctcatctgcgaaagaacgaaattcctagtgccatcgaacttcaccacctcaaatttggaaaccaccgtcgccgccatcaacgataatcaacttgatcagctgtcgccctgattaaattgatctaccctgatttaattgacccactgactaaacttgcacagtcaccagccggacaaaaccaaccctctttttctcacaaaaaaccggtt

SEQ ID NO: 18 - DNA, 449 bp, Oryza sativa
aactcaagcttatctcttacgctccaggaatggatcagtcagaacatcttcgtcggtctgtctccgtcgccaccgactggtgtcttcgcctacacggctggcctattatgccgccgttgttgggcgtctacgacttcaccgccggcctgcctccgtcgccgccgactggtgtctccgcctgcacggctggcctattatgccgccgtctgttgggcgtttacgtcttcaccgaccggccgcctcgtctgccgccgactggtgtctccgcctacacggctgacctattatgccgccggtgttgggcgtctacgtttacaccgactggccacctcgtttgccgccgagtggagtctccgcctgcacggctggcctattatgccgccgtctgttgggcgtctacgtcttcaccgaccggccgcctcgtctgccgtcgactggtgtccccgcct

SEQ ID NO: 19 - DNA, 393 bp, Oryza sativa
  unsure (1)..(393): unsure at all n locations
agcttgccaccggcggccaaagcccttgtgctgtatttctctagattgaactgccaagagattgaatcgaacgcttgggctatgtcaaagtttcaggagagccgtangctggtgcctctcatgcaaccgcttggcagactgtcggaccaacataaagttatcatggatgcaccgcttctggatgaaagcgctctggtggtgcgtgtacacttgactcgtggagcccattagatcaccaatcttccctgtggtgtccataaatactctatccgcctagctagctgctattcatcaagtgtctgggacttgcccaaaatctcactcacctatgcatcagaggggaaagaataagatgaaaaaacgaacaacagatcatggtagccggatctggta

SEQ ID NO: 20 - DNA, 441 bp, Oryza sativa
tttagcttattagatataaggagctagctcgaactggctcgtattcttctcgcaagccaaacaaaccagcaagcagcgggctatcaacccaagcccatctcgaaccctaaaactccaacccagtgcttattatcctcacccatggtatgtggcattctttaagtttcaacacaactcatcccctccatccactcatcttcttgtgcagctccactcaatcatacgtatcaacattttgactgatcttgctatgctttggttgattatataaagtatggaattaataatgcatttgctaatttatatgttactaatttgtaaacttgagatgatattgattttaagtgttgcttcacgagcttaatgagccagctcgagctgacaaacaagccaagccgagtgcgccatgcttctagctcgttaagataacgagccaagcca

SEQ ID NO: 21 - DNA, 409 bp, Oryza sativa
  unsure (1)..(409): unsure at all n locations
gagaagtgcaacgaactttcactctctctctttaggtgcacaaagatccagtgttagatttcctgtgaattactcagatacactacccctagtatttgaataaattttataaaactgcggnnnntgatcaacttattgcaaaaattacagataaatcacaaaactacagatttaatgacagaattatcacaagctatatatttaatattgatgttatcacgaaactacatattctagaacttaaatcctagcactatcgttatattggagctatacaattatagtgctgtgattaaattgcccaaacctttagttgtatgataatcaaaattgctacttattctttattttcgtgacactccatcttatatatatagtnttgtgagagatttacgctaaatatatagtt

SEQ ID NO: 22 - DNA, 433 bp, Oryza sativa
agatgggccaaaaaggcttcttcagcccttgcggtggtttctggacatggcgaagccgtccttcttcgctggatgccagggcgaactggctatggcgaagtcatccttcttcgtcaggtactcacgcgacccttcgcctcgcctcatccttggttcatagccttcgccacgggtttcggcaaattaggtcgaagggcctcatgccatccgccaacaagtatagtcagcaactattgcatgaattggctattaaatcgtctataaatgaattggagccaatagtggggctatactattaaacctgctcttagattaaacaagaatctattggtgtcaggtgacaccacacctaacacagatgatccgcccctcaccacaagtttgctttgctcccgtcattaacgatggctcatcatcctcctctattctcatg

SEQ ID NO: 23 - DNA, 465 bp, Oryza sativa
  unsure (1)..(465): unsure at all n locations
agctngtgcctgtttggagagatcatcatattttattaaagtatgccgntcgcggtacataaaatactcagccagggctgctcccgtataaggagcgaggtattgtaatgtagcaggggaatccgccatttcagctactacaatagtgtattccatggccccctcttcatggaaagtnagtactacttgagctacggaggatgctctttgaccgatagctacataaacacatattacatcttgccctttttgattgagaattgtatctgtagctactgctgttttgccggtttgtctgtccccaataattaactctcgctgaccgcgcccaataggaatcatcgaatcgatagcaataagccccgtttgaaggggttcatatacagaacgcctggaaattatacccggagcangagattcaattaagcgagatttcgaagctacaatttcgcctctcccatcaat

SEQ ID NO: 24 - DNA, 437 bp, Oryza sativa
tctgcaatttctgaatcaccctgtagaatggcctgttcttttctgtcggaataggtagttccttcccctagaaccgtacttgagagtttcctacctcatacggctcagaaattgctatcttaatttcccttgtcttaactgaattcgatttctcaaaaatcgatccaatttcttcttgggttacgcagaagaagttaattacctaagtttcaaaccctaaattttgatcaataatcagtttgatcttttctcccacctgcagaaaaatgaagcatagatagacctatatccttcgtccgaattttctgaaaggtaactatctcggtttcatatatgaaatttctatagaatccttgaaaaagactttttccccataagcaagagaaaagaacttactatctttgggatctgatactacaccgctgcttaatccctta

SEQ ID NO: 25 - DNA, 434 bp, Oryza sativa
  unsure (1)..(434): unsure at all n locations
taataacatccttgaccatgacagaagaaaccaattaatttgtttgctctacngagtaatcaacgccatatgctattatgtaaatgaaacttgcccacgacaatctatagaaatgctatgtgaaacaaagataatgcttaagtgccaatcactggggctgacgaactcaacccaacatagatcattggtttagaagtacctaccatacataccaaatgcataaagcatcctctccaagcttaaaaacatccttgacagtgacagatcaacttaacgaatctgggggctctatggagtttcatgcaaactttgctaaatacaaggcgaacactcagaatatcatgtcgaattatttaaccgattggatcaccggctgtcaaggcaaaatactacctaatacgggcaccatttatcaccactaaagctaattaaat

SEQ ID NO: 26 - DNA, 472 bp, Oryza sativa
  unsure (1)..(472): unsure at all n locations
agcttcaagaaaaaaaagcaactgtagataatttgctatcagcaatcaaattatatgcagntattaatagggagacaagcaatacaaatggttgacagagatctactacttgcaagtcttggtacaggaagcttatttgaatgtaaatcgcaacagggaaaacattttgacaaaaaaaacctaacctcacttgaatcagtctgtgccattatagcttgaagaggatcattccttttcagtcggctctcctcgttaggcatgatcacatccttcagtgggcattctcggtcaccactctgatgaccatagtttccacaccttaaacatctaacgttacgaacttcaactccaaatggtttaaccctcgcaagagcacctgtctccaacctgagagtacaacataaacatattacatcataatatgctacttaagatgtatctcaatgcagcacaatgatgctctcagcctact

SEQ ID NO: 27 - DNA, 437 bp, Oryza sativa
  unsure (1)..(437): unsure at all n locations
aactagngcttcatcatcctgctgcactggatctttctttcttctttatnccggctctctcccgcaatttctgtagtaaggaaatataaaaaaatgcttaagaaacataaggtctcatttggaaacaagtagtaatgctaaaaaaaatggcataaaaaggatggacacttctgttcggaattgtaatacaagaaaagctagaatattcctagttaatttgcacgggctttaagtagaagaaagttaccctgtgagttacttcttctggtcttaccagcagctgaagtccatctgcattgagaaataaagcacccacattgaatggattgatcttagtagatgcaatcatatagaattataaatctgtcattgttcactaattatcacctttttcagttaacgagaaaatcctgagtttaatgctggcttgactactc

SEQ ID NO: 28 - DNA, 401 bp, Oryza sativa
agcttatgaacaatttcaggaaatgcatcttatattttacaatataatcctaacagaaaagaaaagactcttcgacatatatctggaattatgggacttacacatcagtgaaggcatataaatgttttgcctccatcttttaagtggctctgggcaagttgtgtgcaatcaaagcacaaggttttttctgacttttgttaaatgataggctaaatacaagaaatctgctgagaaggaaaatttcgagagggctaactataattatgtactttgcaatcaacaacatgaggagacactgcaacacctcttcctgacttgtccattctctcaatgttgttggaatttcatttgccccagaaagagaagagaccatacagtccaagaagcagtagaagatatgc

SEQ ID NO: 29 - DNA, 439 bp, Oryza sativa
taacctattctgatgtccaaatcgatgcttatgccctgtttatcgaggcatataagggaaccaggaaaggacatagtttttgcaattctattagagaacaattatgcaaaacctccagtaatcagaggaaagataagaagaaagaggaacaggaagagatcgtaccattcggatctgctcgatcggcatcatcatcggccatcataaatccaatccatccgaatcagcagcaattcggccccgatcagacaggaaaagcgattagtttggctaaatccggaactggatcaaagcgattaatcacaagaacgactcggggagaagagatgataccattctgccagttctttgcaggctggaagtgataggcagttcttctggcatggttggccgtgtccgcctccgtgggagctcgccggagcgaggaggtcgacgcaag

SEQ ID NO: 30 - DNA, 299 bp, Oryza sativa
gaacttgcggcctacacgagtaaggttacatctatgactatgcgtgaagatgagagtggttaatgaagtgttaattaccacctcctttaacatctttcagagccgtgtccctttgttctgccaattcggtcgtgtctttctccaaagcttggatgcgcatttccagctcggatatcttggcaggttgcactgagtagcttcttgccggctgatatcacaaggatagcagaataaataagttagactaagacagtatttaccttttgaccaactgctcagctcaaagatggaatcttgga

SEQ ID NO: 31 - DNA, 429 bp, Oryza sativa
taggtagggcccttcactgcactgactacttatgtgtcttcatacttccattccttgctgcatgttgatcagaacggatcaaactgcaatcatgtgctcatgtgctggtgggtcatctcatttacatctccttttggagtacttcctctttgatgattgtggctggttcttgcatttacggctggtaagtttccatgttcatagcggtggaacatgacctggaattttccaaggaagcatcttatataatagcattgtcactaatgccctatcgcctaatctcatgcctatgcacgttttataggacttattcatgggtcagctaattacttaacattatctgaaaaataaacttgtcaaggtggactacttcctaagcaaaatcgaccaaaacaacattcatttgccgattacatattactcaaaatt

SEQ ID NO: 32 - DNA, 470 bp, Oryza sativa
  unsure (1)..(470): unsure at all n locations
agctagcttgttccttgatcgcaaacattctctttatgtgctccgcaattgggagataccacaccacctttcctgggcctcccctctttgacttactttcttcaccttcacttcttgctcgtttgtatcttgatgccccacagatagggcagacatccaagtcagcgtattccttgtaatacaaaatgcagtcgttcggacatgcatgaattcttctgacctccaggcccaacggacataatacttgcttcgcttcatatgtcgtctgaggtaaattgttcccctctggcaacagatcctttaacagctcaagaagttctgtaaaactcttgtccgaccagccattacaagccttaagcttcatgagttccaacacgcatgacaacttgctgtgcttcgacttgcatccatcatacaacggcatctggcaatcttccaccaacttactaaacttctcanaatctctgtcg

SEQ ID NO: 33 - DNA, 442 bp, Oryza sativa
  unsure (1)..(442): unsure at all n locations
tcttcttgaacacccacttgcaccccacaggtttacactcatatggtcgctctgtcacctcccaagtcccgttagcgataatggaatccatttcactacggacagcctccttccagtagtctgcatcaggagatgcatatgcttctgaaattgacttaggagtgtcatccacgaggtacacagtgaagtcatcaccaaaagacttagccgtcctttgtctcttactccttcgaggagcttcactgacatcctcctcagagacaagttcatgtgtatgttcagtttgttctggtggtgtgattgaactgggaattatttcagagggttggttcgaaccactatgtgtatccttcattgngaaaaagctctcaaagaaggtagcatcacgagactccataattgtaccaacatgcatgtccggtacctcggatttaactattaa

SEQ ID NO: 34 - DNA, 432 bp, Oryza sativa
  unsure (1)..(432): unsure at all n locations
caagcttgngattntctaaaacttcataagatattttgataagaannttgttagtctatttttcaactaaattntacaatgctaaaattcattagaattataaatgaaaataaagtaaaaatttttaaataatagaaatggattgtatctctgatctctgcctgtgagcatacaaccaaaaagtctcaaaaataaaaagaaaagaacttaagaaaatgtgtgatgggttaaaccttcaacttctgacaataagatggtatactaaaataatggttttaaaatcatatatattatatcataaaattaaattccataaatcacgtacgctaaagcatagtatagcactgatcacggatcacatggcctggtctatcttacgtggctccacgcaaagtcacagcatgtggacaaatagcgctcctgtcccaagtg

SEQ ID NO: 35 - DNA, 436 bp, Oryza sativa
  unsure (1)..(436): unsure at all n locations
tataaaactaagcttggaaaccatctcttcaggagtaggctacgaccatctttctttctctgacattgtactactactctcatgtctgaatatcatgcttccacaaaattggttcattttcagctgttagtctcccactcctacctaacataatttgacgatttctaatacgagtaacatttagtacctgaaactatctttatgtttgtccgaatgtgaacagacaaacttgcccttcgaaattccggcttgacttctgcaaagtcagtgccgtacttcatcgtattgatctgaactttgacaaacgccaccatcctgcattggttgatctcaattcttaactacggactagtcatacagtgattcatcaacaaatcacataaatnaatttgggcaatagtatcatgcatgtctgatttgctggagtctgaccgat

SEQ ID NO: 36 - DNA, 313 bp, Oryza sativa
  unsure (1)..(313): unsure at all n locations
gaatccatatanggaaaaaagagtactgaggccatattaactaatgaacctaatagtgctgaagaataaatctaaagagagacataaatgatgtgatgaaacgacttagaaaaagacataccctgagttaggagaaaacccttgttgagaccatgaaatagatcgagcgcattattcagtttcacgtgcttaggaagtgggcattatacatggttcaaagagatctgcgaaataagcaataaaaactgattcctggtgcgcaccttctatcgatgaccagtgtaacttttcagtttgcacaagagaagtgact

SEQ ID NO: 37 - DNA, 382 bp, Oryza sativa
  unsure (1)..(382): unsure at all n locations
agaaaattcatccaacgtgtattatatactaaaagtccattaaacaccttagagacgcccttacatcgtcatgtggcactggtacaaatactatctaaacgttacgggtgctctaatatatggagaaaattntacaaattctatactaacaaataataagtcccctcatatttaaagaaaaaaatgtacctatactaacaaaatttgatagtttgagtggtgctatttacgtagtacaaatttgggtctctactaaatcacatatagactcaaaacttccacgtagtgataccactgcatattctcaattcttgagcgtccatatacttcctatgtctctcagactcttctctttgtccgtccccaatggtccccattgacg

SEQ ID NO: 38 - DNA, 383 bp, Oryza sativa
tccttaagtcacctgaggcatgaagcttgcagacaagaatgacacaacttcctattctaaagcttctaatggctatagaagctgcggtgtggataaaatcttttgagccctgggctctacgagagctaacttatctcatgctcttggaggctaactaaacagagcttttcaggttcaaatcagacaagtcttcaataccagaggtaattccactcaaaaaacaggctcaacaatgtaaggcgggcaagagtaagaaaccattgctaagaaaacaaatgcccttgaatggctgggttggatcgcatcaagagttagacaatcacacgatctgagttcaacaatgccctacttggtttaaactcacttccgagctcttcctcgct

SEQ ID NO: 39 - DNA, 376 bp, Oryza sativa
  unsure (1)..(376): unsure at all n locations
agtaaaagaaaaaaaatattccatgtctttgatctttaatattaccacagtgagtataaatatagcgggttggatagatcgaaaaattgaggagagatcaatttatggaaaactttaaaccctagctaagctacatatttgctttttagctttgtagtcgtaactgaaattaaatttaaatttaatttagatttttttgatgtntttttagtttatttctcaacattagttttaattactaacaacaattatataagtttatttataactattttgaagtgtacacagtgttttcggaacgcagtgtacagcttctcctcttatggngagttcgagtacagggcgcatacattcagttatataagttaataaaaat

SEQ ID NO: 40 - DNA, 56 bp, Oryza sativa
ctaaaaactcaggtagatgcccgcgctaagaaggtctgagcatctgtttatgtttg

SEQ ID NO: 41 - DNA, 350 bp, Oryza sativa
gttcaacgagaggatgactaccactaaccttcttctgctggctccccctcagatgcctatccacgtgcccctgctggttcccctccgcatacctctgcacgtagccttccatcttcaagtgactggtatggatactccttccccttttcttcaatccaaaactggctgcttccctacgagattggatcgacaatatgtgttgctcatagaggtcagacatctgttgatacaagaaacatcagcaacgacacgagacatttatgctctattaaactcaatcatgtttgctaagagtaaatgtggtacatgataaccctacacaaccttacatgctaagtctaaatacaaat

SEQ ID NO: 42 - DNA, 439 bp, Oryza sativa
tgaactctctcttatgccctctacttctcatgaatggcttattgtttcaaacttccaccattaggttgctttgaaatcgatcaagtttccccttttctcatggaagaagcaattgaggcttgccatcaaactatgtcaaatagtccagcgatggaagcacataggtgtgtaatacaactacaaggccatgaatgttctctaagaatatgtgtgccaatatgtaatcaatgtttacagcatggttttggcgatttttttgttagcatatctatgcactagtttcatactcagtagtgtttttttttttcaatacagaaataacttgatgcctagtttggtacctcaagttggcatggaatttacaaattcagatgtggcttgggcattttggcttagctactgtggacagaaaggttttgaggtcatgaaaaggtataca

SEQ ID NO: 43 - DNA, 434 bp, Oryza sativa
  unsure (1)..(434): unsure at all n locations
nttcatgccaagatctgctgaatagcgaagacaattactgttttcggcgaanaaataaagaatatggtgcatcgaatagatgcacctaattaggtgtagcccccaactatgtgattagttaataaactaaacatatagttgagaacaaaataatagcacagttatgcatcatatgacaaaagcatacgcggcgcctaaagaggcattctagccgactgctttttagccgtaataaaaggaatccgagtggtttacactctaaaaggttcacgaatgaacatacttgacaggcatccgaataaaaaactctaaaaattacccaccaagtattataaaaattatggtaatgaataagtccaatagcctaggctatgactatttaccataatgaanacaggtatataacataccaaggaaatgactatgataaaaac

SEQ ID NO: 44 - DNA, 274 bp, Oryza sativa
cagcatagctcccgctcgggcgcgccgctcatccctcactggcacaccgcactcgttctatcgcccgctgtcaccgctgagaagagggacacaactgtcgtgcgcggccgaatggatgtggtgtgaggccgtgaagctgatggtactcatagatcttggtgcactgttcttatataccgtcgcccgtgcgctgccaaccgtcttactcgactctccaaccgggtgagttactatcccgatcaattgtgcgtgatctctcttcaggtcaccccct

SEQ ID NO: 45 - DNA, 375 bp, Oryza sativa
ctccgccaccagcgaacgagattttttttttccactgcatctgcagcaacacgggctgacgtggtgtagtagcatgcgttgcgcataaggaggggatctctagggtgaagctcatacaacaacgaaacattatgcggacctgtgtaagactgaaagagagtaggagttggagacatggtgtgcttaaagatgcaccttataacaagctgcgcccggattatgggatgactgaaactgacgattaaactctatgggctattgacggatcatgacatcgacccgaaggatgcttactagcctgaatatctttacagagaatgaattcatccaatggtacttgttattcagatagagaaccgtttatgacaccatgct

SEQ ID NO: 46 - DNA, 367 bp, Oryza sativa
agcgaaaccagcgagtcttttttataaggagctaacccacgttagccctaatcgcgaagattaaggaagagggcgaattttggattatggcgggagccaaacgcctggcaaagatgttaccgtagatccagaccgttgtgctgtaatattatttttttccttacttggaaatttacccattatatttaatgagtaggcaagctttggctatcgttaaaaaaaattgctgcttgcgttgggggtagatgagaggagcaatccgctagtactagtagcctctcttgtttggaaaatgcttgtaaccgggcgttcgacaggagacgaaacgtcggacagcgctcatggtgggacccacttgtcaattttt

SEQ ID NO: 47 - DNA, 433 bp, Oryza sativa
  unsure (1)..(433): unsure at all n locations
ctgtgtntattcacacatttttgtgcttacactgtttggcttatgttcttttccttctctgaagctactatagtttttttgccaacgtgtggagccgatgttctctcctgtttcctgtccaagccaataagactgaagatggcatatttagagggtgtttagatccaggggtgtaaagttttggcgtgtcacatagggtattatatagggtgtcgcatggggtgttcgggcactaataaaaaaaactaattacagaatccgttagtaaaccgcgagacgaatttattaagcctaattaatctgtcattagcaaatgtttactgtagcaccacattgtcaaatatggagcaattaggcttaaaagattcgtctcgcaaattagtcacaatctgtgcgaattagttattttagcctatatttaatacttcatgca

SEQ ID NO: 48 - DNA, 439 bp, Oryza sativa
  unsure (1)..(439): unsure at all n locations
catgcaagcttgagagtaaacaaacagttctggctctgatagccaacgcgactgcgatcaatgacaagaaagatgagacccacagaaaggtggtgcttacattgcaatcctacttccgcttttgactatatggtgctacaggtttcacctggccctgtagtattaggccaaattctcttctaggtctgaatgtccgactttctgacttcattatataacttgcagttctatattgtgttggttagaaatgtcagaagcgtccaggtcaaatatggatagaaaccagaagggttgcagctttgccatttggacaagacgatctttgtgtataattggattgaanaatatgttggaaaacccatttacattgtaacacactatcatttactcttgacatatgttaagctacactgaaatggttctcgctgacatgctgaaa

SEQ ID NO: 49 - DNA, 414 bp, Oryza sativa
  unsure (1)..(414): unsure at all n locations
tggcgccaccattgacatccgcctagaggtataattcactgttctttgccttgacagttcatgccacatgatggattgtcttgtgttcttggtacaatttcatgatgactgttactgaattttggcatatgctgctgtttgatgcaagatccgaggaagaaggagaaagaactcttggcatgggaggaggatttgaggcgaagggagctggtctgatcgcctttnttcctcttcaataaaattctattgaatcattatctttatgtccaccattttctagaaaattgaagtggcttttgtttagttttcatgccctttctccccttttcngttgttgctgttttctccaaatcggaatgccatgtgttcttttcttttgctgcatatttcctttttttttataatcatgtgaag

SEQ ID NO: 50 - DNA, 343 bp, Oryza sativa
  unsure (1)..(343): unsure at all n locations
agcttatatagctgccccgctgacttttttatagncatggcgctgnttgggtttatcaagcaattgattggatacaatatcattgctttttgccacgtaagagtgcatttntattgaccaatattatggcttacgctgattatatatattggtcatttttcagacggttgtgaaatccttatgagtttatttactcggatggtacaccacatatgccatatattttcaggtgtgtgttaatcatgtgtctttatggacttaagcacatttgttaaagcagtgggcccatggtgtatgccccatactttggaaatttcttattcacaacatcaaacctgttttt

SEQ ID NO: 51 - DNA, 430 bp, Oryza sativa
  unsure (1)..(430): unsure at all n locations
tcttggnttttatcctttatcattatctatgtctcctctctctctggaccatgtgccctagaaatctccggaaatttccatacgtttatccaattgttattttttagtgcatatgtaactttctgatctaatggctattatttattcaacggttgatatatatttgatgatgtggcgtgttctcatgtaagaaagcttgcagctttcactatataaaataacataagataagatatcaattagaatcacacttaattaacgtcggagatcatcccaaagtcatattattattgatcattggattattttttgttggcttatatttctattagtgatacatgtttcatcccgtgcatttctttctcctcatcatggttagcataaccatgcaacctcaattaatcaagcatacaatagggcaccaatacca

SEQ ID NO: 52 - DNA, 391 bp, Oryza sativa
acagatatgttactgcggacgaaaaaattgaacacaccggcctgggagatatgctaagctcatgtgccggtccaaatcttagtgagatgagggcgtgccagtcattttgatcctacaactgactagatatgcgaatagtagatcaaaacagccgatcggctgacaagccgatggaatatttccagtcgatagccgataatagccgatgccgatgccgataccagccgatagtgataggggttaaacaatcggttgtatgtctaatgtagataatgatatgaagacaatcggttgatgatgatgtaataatataacaatataatccagtattaaccaatctggaaataatgatatgataaataagcatcgatctgaaggttatagcacacat

SEQ ID NO: 53 - DNA, 443 bp, Oryza sativa
  unsure (1)..(443): unsure at all n locations
ggttctaatccatanatggatctctatagacgacatcccttattttcttttcctttcatgacgaaacctttcggctgtgccatgtatacttttcctccaaatctccatttagaaatgccgctttacatccatctgatgtaattctaaatcataatgtgccactagtgccattgtaatccttaaggaatctttacaagagactagagaaaatgtctcattgtaatcaatcccttctctttgcgtgaagccttttgccacaagtcgcgctttaaacttttccatatgccctctggagtcatatttggttttatagacccatttacagcctactgttttggcttctttaggaatttcttctaaatcccagacattgggtaatttcattaattttatttcatctttcatggcttccaaccattcagatgagcgagcgcttctcatgg

SEQ ID NO: 54 - DNA, 388 bp, Oryza sativa
atcttaagtcaccgcggctgcagcttaaatgctaaagacaactggtagctccttcttctagaatttaaaaaataaaatgggatttctagattccatagctatgtccctgtcgcggacgcacaaaagacgcataccattctattagaagcagtacgatcttatgtggtggagttgaaaattataagaaacaactgacaagcaatcaaccaacatatactgaatatgggaaagtttcttttagcttttctaaattaagtactgattcttaaacttaagtgagaatctagcctgttcaggggcgacggctaaaggacatagcaccactagtctacgcgaatgcaaaatagaagaatgcaagcctgcaacaagtatcgctttcccgaccaat

SEQ ID NO: 55 - DNA, 439 bp, Oryza sativa
  unsure (1)..(439): unsure at all n locations
tgatgagatggaactcanattacacccacttggagctcttgatttacctccatgctgagtggagaagtagttggcgcatagcgctccacaacacgcccctctttgtcgaccaagaacttggagaagttccatttgatattgtcaccgaaaagaccacctttgctggacttcagaaacttgtagatgggtgcagtgttgtcaccattaacatcaacctattaagataatggtagttagaacttctagatctcacctctctaaacaataaaaatcaattgatcatcacattataaacatccatgattctttcttgtgataaatgaaaggataaaactggtatcaggcttatcgatcgcatacatcatacgaaatgcataagaatcggataaaaacttcatggacttgatcaatttccttttaagtactagacaagtatctg

SEQ ID NO: 56 - DNA, 473 bp, Oryza sativa
  unsure (1)..(473): unsure at all n locations
agcttatcgngctgctacctgtttcttgatctgcatatcattctggtccggagcagctgcaaatgcagtagttgtagaagcagatgcattcaacgaaactgatgtaatctatcgagctatcagctcaagaggccaccacaatgacatgctgcagacggcaaaactggtatttgttagcagctgttactatactatatatgttaataccagtataccagtcagtgagtaaaacggcacatgaccactacatgacaacccaaaatgtacaattgcaattatttacattttagtgtcttggagatgctgtcccacctcctaaatctccacccctatattcatctttactatacattgaaacaagaaactcaatctcctactccctccgtcccaaanaaaggcaaactctgggtttcccgtgtctaacgtgactgtccgtcttatatgaannatttttataattcgtattttcattg

SEQ ID NO: 57 - DNA, 408 bp, Oryza sativa
  unsure (1)..(408): unsure at all n locations
acgtgacctatgaaactaagcttctgacttggatgggtaaaccttggatagcagtaattttccaaatttgaatgagccagattatacatctacaaagggcaccaagcctttacctgatagtagcagccggttaagctcttctgctctaaagcgcacacagcangagcaattgtcgcattggcaaaagaaccgacgaatgctggtaagtagcatatctgaaactgaatcaactaattgatatttgatagaaccttgccaatgttgtgatgcctgatgccacatgcccacatcaaagtgatgcatttaatagtttttatagtaaattcacactagtngtgagcttttgttgaacatctgggctaataatactttggtcttttacctggcataaaccacatgaaaattatt

SEQ ID NO: 58 - DNA, 347 bp, Oryza sativa
  unsure (1)..(347): unsure at all n locations
agcttcaacagaaatgataatctagagtgactttttcatcctgngtatagctcgcgncgtgcacttgttaacagacggtcaaatctgtctgcttcttcattatgttcagcaccaatatttccactacctgcttgggcaccaatacatccactacctgcttgggcttgcctgagaatcccagctgtacctctatggatgtctcctaacagatcttgaatcatgtccagaccatcaaaatcctcatcatcttcatcattgataggctcatcaactggatcaatatctacggccacttgctcaccatgaagaacccaatgcttgtatgaaacttgtatgccatataatac

SEQ ID NO: 59 - DNA, 422 bp, Oryza sativa
actcagctgcccatgctgatgagcaagaataaaattcctgtttttacatcctgagagagaacacctgtcacccggaaagattagtttagatcgcccccatttgcatagtactagtatatagtactatgagccaaaattagtaggtcacgatggaaaacgttacaatatttcagagaaacaacctaactaaagttttacttgtttctcttgccttcttctcagatcgatcaatctattatatctatttaccagagtgttgcacaccggctgaccgatttgctgtgaattatctatggtactatgcgccacgtggataaattaaatgcttgcgaatttaagcttgcaatcctaacaagttagtggtggcaagtgagctctcatccatgcctagaaaatccaggtgtacaactttaagcggacag

SEQ ID NO: 60 - DNA, 422 bp, Oryza sativa
  unsure (1)..(422): unsure at all n locations
agcttcgcattccaaaccttgaaaatctgtctctaatacactgcccctctagtgtaatggagtatttccattttcttcctaccagcaaaactgaagcaggatagctattgtggtagtgttatatatgcatgagttaatgaattactggaaattcctaacacacaaacgggctcctggtctcttttattctattttctttttgattttcctatctattttgactatgaaattcgtgacaaaaaaattagcagtgaattaaattntatattaacagcaggcattagaatttgggcagacaaattgttgaccttctcatataagacttttcacccaacttgggcaataaatttgttcacgttttcctcggatttttgaattattttggctcgtcgcaattggtgacatgtanttttctatggtac

SEQ ID NO: 61 - DNA, 433 bp, Oryza sativa
  unsure (1)..(433): unsure at all n locations
nganagcgtgcacacaaacacacagcagactgtatgtctggttctataagcaatcagatacgataaagattcaatcatgttgttagttacagcttcaccatcttcatcaggatccaacacagctgtagaaccaattgatgttaacattgtacttcgtttgatgcacaaatgtaccttgaggtgtttgcttaatttgcaatcccaaaaagtatgataactcactcatcatgcttatcttaaactccctgcgcatagtctcagcaaactccacaaccaaagcgtaagttgaacaaccaaagatgatatcatgcacataaatctgaacgaacagttgattatcaccatgcttaagaactaanagtgtcttgtcaacctttccaattgtaaaacatttcgcaagcaaaaaattcttaagcctatcataccatgctct

SEQ ID NO: 62 - DNA, 452 bp, Oryza sativa
  unsure (1)..(452): unsure at all n locations
cttcgtctacgtggcatactatgaacatcaaaaatcggcgatgcactgggaacgccctgaagatgcctcacttcaggcggagcctctccgcttggatgatagaccgattatttgagcctctccacttggatgatagaccgactatttaagcttggaaggagttgctttcctcctttctcttcgttaatttggaatctgtgatttgaacaatttgctatgtatctctttcctctaattagctctccccctgttgatatttcaaaaaacaacactcgctggaatagtggaagcagctagcaccccaaagatcattcagatcacagatggacaatagacataggtaacgggcgcttaatgattactctgtgcattagcattggtttacctcagcttcccncaacccaagggccaaggcccctatcccaagcgtcgaccgacaacaaacggtccca

SEQ ID NO: 63 - DNA, 422 bp, Oryza sativa
  unsure (1)..(422): unsure at all n locations
tcgattcttagatgagcttcggtcgctgcgctcctcttctactgtgccggggccgncggaagcgatttcaacctcattctcgaagctcaggataaaaacaaccttcatctcaatcgtcgtatgatgggtcgttttcgtccgctcatcaacaagttggaactccgggagctgccgcttgacggacgccgcttcacttggagcaatgagcgtgagtcgcccacgcttgttaagctcgaccgcgtcctcttctctgtggattgggaagagcttttgccctcttgccttctacaagcggtcttttctatcgcctctgatcactgtgctcttctccttcatacctgcgtcacctgcccgaaagcgcatcgttgtctttatgaggccttttggcccaaggtcgacggctttcttccagtcgtgtatga

SEQ ID NO: 64 - DNA, 422 bp, Oryza sativa
  unsure (1)..(422): unsure at all n locations
ntcttaattaggtgaggctggttgtttgctaatgttattttttatagcggattgcgagatactttaaatttcgacgagtccacaaaaatgggtatttgtattggtcgaaattaaaaatattctgtttggatagaatcacaatttggaatcaaatatcaaaattgagttcaaattaatacggtgcgtcctactactacttatcgtactttggacgctaagatgtgttcttttgtgctctntggtgatagaatttgacatggatctatgaatatggccagcagcactaaattaaaaggtgaggagaggctggataagcccaaagggtgcccccacgtctctccgtactacaatgccgtcgatcctattatcatcaatggcaaagggattgatccctttgagctgagtgaaggtatggataaaag

SEQ ID NO: 65 - DNA, 422 bp, Oryza sativa
  unsure (1)..(422): unsure at all n locations
agcttgagaacagcaagacagatctcaatcttttttactaaggaggtacagacttttccctggaatcaatgagagagtctgtagcattaaatacttacacatgaggtgatgtgctgtctatttcaggcgaaagaaaattcaatcctacaagcaagtctcgaaagaaggaaagtagaattgcataaacgccgattagcactcgaaaaagaagtaagagctcaaactatgggaaaagtattatatttttttctagaaagagaacgcccaggtagattctatgatttagtctctacatccataagagatccttaaatctatgtcaagcacaccagagattttatacatcttcaatatctggctgaaacatgcattctctngtcactgctaaacaagaaaaatgtttttgctgttctgcactcaac

SEQ ID NO: 66 - DNA, 428 bp, Oryza sativa
  unsure (1)..(428): unsure at all n locations
tacatgctaacatacactggaaggtacacatctgttatatctnccttcccatgctcaaggcgagagcgcagagcgcgatacggggaaggtcggaaggccacaatctaggatcatatatcatgatcatatgcgcccgacattgtcgcagctacacctcttccctgtgtgggattggcagcgattgggatggctgctgctgatgctcttcggctttgctgttgactttgatcggtgaatccggtgacggctgctgctgctcttcagctttgttgttgactttgatctcaaatagccgctcaacgggctgtcggcagatcgggcaccgggtcgtctggtacctcaagaccttggcacactcgctgcacatacactgtaccagagtatacaaatgtcagggtttactggagatgctaaaaatgcatggaaat

SEQ ID NO: 67 - DNA, 268 bp, Oryza sativa
  unsure (1)..(268): unsure at all n locations
tgtctctagggagataacgacaaaagcaccgctgccgtcgtccgtcaaggtcttctaaggaaacaatgactaggttttcacccggtagccccacaagagatgattggatagcacgacaacacccttcagaggaagtgacgctctgaacgcaatcgttgccagctcgaccaaggccggactangttttcacccaccgtctgccgcttgccaatccatcgctgacacatcaatgctccactgttgtctaacctccgcggacatgtgggca

SEQ ID NO: 68 - DNA, 436 bp, Oryza sativa
  unsure (1)..(436): unsure at all n locations
ctgcgtnattttttattaggtatatataaaaaccaagttattttctgtttaattaaattaaatgtaaatgccttacagcttatggctggtgaaaatttcgaaatcgaaggacacgcataaggaatcatctatactaatataaaaaggaggagttgcaccctccaatcctacgtctccaatcctacgtgtgaaatcatccggatcaatcctaccgtccatccgcacacacgatttcactaccgcccgatttactgtcgcgaagactactctccatccacgcgcgattgcgcgaagacatcgctcctcctctctcgctcactcctcgctcctctgtactgtatccgaggtccccttccgccgccgccggatcctaccatccgccgtggccagctccatacgctgcggccggcgctcctcctcctcactccggattact

SEQ ID NO: 69 - DNA, 469 bp, Oryza sativa
  unsure (1)..(469): unsure at all n locations
agctngccttctagaacaagtattgtcaccatctataagctctctttcttctgatggtgaattaacagtcggatgcagcaatgctgattgaggagaagatattgccacccgaggctaaaactagtgagatatcttgtgctaaaactgttgatattgtcaaatgaagactctgggtgtcggcatttaacttcactgcaatggtcggatggcatcttcgttntgcactccgttgtatgaagaatgaacaaagagagaggcatgggaactgaaaacccctcattattgtgagcactcgttcttctgataatttntactgagtcttgtgagtactctcagtctctcacactaggagtgaatctctctctctctctctctctacctattgnggattggcattgccatctcacaattctgtgactatactacctatcatttcttatacatcgtatagaaacaatngaacttctat

SEQ ID NO: 70 - DNA, 428 bp, Oryza sativa
  unsure (1)..(428): unsure at all n locations
tatatcttatcattcgtctgatctgataaccatttccttattctggtcctactggatactgctgtgtactccattcatttgctaatccagttggcagttgcccctagattctttctgcaatgtagtctatggtcctatatagtacataagatagattgccttctggtttgttaaacagaaaaacgggtgtcttatgctgtgttggctggtcgatttccctttcgaagtcagctagttgaaattaggaaattcatctgtatacttggggcgcttcaatgtctaatctttcctatttatgattttgactattatcaccagtttatcacatgaatgcaattaattcaggtacttaaatcggttggtgatntctcctaaagtgacgtggatactatgatggtgagctactgagctaccatggaatttgctat

SEQ ID NO: 71 - DNA, 431 bp, Oryza sativa
  unsure (1)..(431): unsure at all n locations
agctttgagatgacatatttggtgtctgtttgtcacaactctagctcccaactccaacttacctagagccggagctgtgccaaatggtccagatccttcgtatttttggagtagagttagcagagttgctcctataaaaatgaactacgggggtggtgatggagttttgctactccacagctccactctatccaaaagacccaataccttttaatntttcaacatatttgtgcaaaactaccactgacctatcccaacacacctcctcacctctcactcccgtaaccctcccagccaccgagccaagcggcgacaggcgaacaggtggtgagcagcaggctgactgctgcgtttctgtggcggcttatcggagctgccggcgggtaacaggatgacgacagcgctcgggcggacaacatgccgacagtggc

SEQ ID NO: 72 - DNA, 426 bp, Oryza sativa
  unsure (1)..(426): unsure at all n locations
cttgggaagaggaagaaggatgaatggaccactgttgattttcgtanagatcgtaagactctgtcactgatccaacttcatctatctaatgatattttgcaagaagtgttgcaggaaaaaactgctgcagaactttggctcaaattggaatcgatctgcatgtctaaaaatctaaccagcaagatgcatatgaagatgaagttgttcacagacaagttacaagagagtggttttgtgttgaaccacatatcggtcttcaaggagatcgctgccgacctagtgtcgatagaggtacaagttgatgatgaagaattaggtcttctactgttatgctcaatgcctagttcatatgcaaaatttctgtgataccatactattaaagctgtgatgaactaacccttgcggaagctgttctctaccatttat

SEQ ID NO: 73 - DNA, 473 bp, Oryza sativa
  unsure (1)..(473): unsure at all n locations
agcttgaggtggacagcatctcagcggcgtttgttcccccatttgagcctcctctcttccaccctgtacaggttgaggttcacttatgatgtgtggatgaaaaatttcacaaaagagcaggagcaggcacttgagctcctcacctccctccgaaatctagaattctatgagtgccaccgtctgcagtcccttcccgaagggttgcatctcctttcttctatctgcacattaggcatcgtcggatgtcctgaaatcagatcgttgcccgaggagggcatcccagcttcactgaaaaaactactagcaatgcgttgcagcgtcgacctgaaggatcaactcaagagattagaagaatcgaaccaagatntacaagtattctacatctgatcacccaaggtaagacgtgatgtcccaactcctttttgttttactctttcatctgcagttggtcatatttaaactctcctttacct

SEQ ID NO: 74 - DNA, 441 bp, Oryza sativa
tatactccctccgtaccaaattgatcatcatataagtttatgtattcgttacttaggataatctaaatcacatcaatgaagtaaccatatacatattctcccacaatgcatgcatcgattaaaacaccatgtcaattatacattttagcatgcacatgttctctcatgctgcattaattgtattatgatgaaatccgtgtctatgcggttacatgatgatcaatttaagaaattttaaatttcattatatgatgatcaatttgggaacgagggagtagttagcctatactccctctacttttgatagtcatattttcatcttggcacacagaccaaggataagttattctacttatcatccatttaaacatgctactaatcattcctcgtaaacaagcgattcattaatatttacatttcttaatgaccatgtagccaatc

SEQ ID NO: 75 - DNA, 412 bp, Oryza sativa
  unsure (1)..(412): unsure at all n locations
agcttgaactacagcctggaattcgcacaaagtttatctaaagcctagaatntacacgaaggtgaatcaaagttactgtgggatnggcaaaattacctccttcctaatccgatcaagctcatctgcactgcagccaacaatcctctctgcctgatcattgaacagagaaagccaggcctcaccagtagggtcggagaccttgatgaccatgatgtacctgaagaaaggaaccagtgtagcattagctttggctttgtatcatctcaaattcaagcatgcacggtgtaattcagcccaaagttttacctcaatgagcactcagcatcattcttctggcacccttcacaccagtatcctgatccaattgcctcagtcaccttcctgttgcacgtcttgcaagctcggaccacat

SEQ ID NO: 76 - DNA, 442 bp, Oryza sativa
  unsure (1)..(442): unsure at all n locations
ctaagctccctntctggcatacacaagaaagcgtggtcaggtacagttctttatgttgagggtgcatatttaagactcagcatgaaactattaaaattatgaattttgtgtagctttgagccttttactaagattcctcagacagctacagcatgaagataaaggacttaatcagctagtttccacatcaaatcaacaagcaagaaatatcattgcacttttaattaactagggagtaaaagagtgtttcggatgttggagcagccaagcaagacaaaagttttgaccttggagaccataagtgacaaatggttttccccactcggaaacaatcaatctacgagcagatttgtattctttcacatagaaaagggcatacataacaatctaaaaattcttacagatccttatgtatgtcagcagaaaattttaagatcaagaa

SEQ ID NO: 77 - DNA, 436 bp, Oryza sativa
  unsure (1)..(436): unsure at all n locations
tccaggttgaagagacntaatacttggagtaccacaacttgattcccccgaccccacaaccaggataaagttggttctggaaaagaacattanggatcttaccttttgctttgtcattataaagaaaaaaaactgctgttagttaaccctcaagttttcacattttccattgagcctctatgtttctcagagcaactctatgatatggttgttgcttcttgaatagtgatctaaatttgttctgtaaatttgatcaagattgacactgctttggagcaaggggtggatgctgtgagaactcttgtgttgaaaggttttagtggaagtattgagagattcaatctggttcacaagtacaagatccacactgtttgagaattattaagaggcttggatatacttgctgaggacgcataaatacgcatcatcaatatca

SEQ ID NO: 78 - DNA, 447 bp, Oryza sativa
  unsure (1)..(447): unsure at all n locations
agcttatatacccaaagtttatgctgtagttctcgttctctaagtttatatacccaatgcgaatttgaatntaaattcagattaaaaaattcaatgtatntatttatatttataatgtttatgcacacagatatttttaaacgtagttattttttctttagttagtattttatttcttctatcaaactaattggttaactttgtttcaaaacaaatctaaatgtgcacgtggtagggagaagaaagttgcagtgtctggtggggtgtggccgattntgactccacgtgatcacccattcattaggtggaccctgaaaacgattaggcttggggacccgaatgttgacatgtcgtaagtacagattttaaccgttaactncggcataaaacaataaaataaaactaagtggatgggtttattactattatttccaccataactttaaa

SEQ ID NO: 79 - DNA, 434 bp, Oryza sativa
  unsure (1)..(434): unsure at all n locations
ngcctcagctctgcctcccttaattatttgtaatatgcatttatctcaaccaaatttaaatagcaaatctgagtaggtttctctgttatctaaacatactcatggttcatattgctttctatctttgtttcagttttacttcttatattatacatcaagtttttatgcttttgcttggcagatgagggagaatgcgttgacctgaaattttacgcactccgacctcctccatcggctgcgctgccgctcaacctatgccaccgccggatcgacgggagccgccagccgctccacctgcgccgtcatagggagcctccaaccgacctcctccatcggctgcgcagccgctccacctgtgccaccgccggatcgacgggagccacccgctttccccctcccctacaccttcacctggtatggtgtccaacctaact

SEQ ID NO: 80 - DNA, 352 bp, Oryza sativa
attacagtaagatgggaacggcaacacctgccaaaccatgaagtgactgatggaaatgactctgaatgtaacctaagacggtgctattatccaggatctgctgcctattttcttatgctatacttggcacgctcttaaaatacataaacttgtcatacaaaaaaatatgtataagagcgaaactgacgacttaatacgttattacgtctcgtactaacaccatgattattagtgtgacgcaaatatccagtgcatcagaaatggagttacatcattacggcaaggtttcgatctctgtgtacctgcaccagggtcattactagtacgaatcaggaatgaaccaaatcatctg

SEQ ID NO: 81 - DNA, 227 bp, Oryza sativa
aatgacttatacgctcctctctttgtgtattccacagacggtctagggccagatgatactctgagtgaaacttgcttgctcaagacttgcacatcaaggccgatgacattgctcaggtgtgagtcagtgtagcttggacttctaagtggatattcaatgataatcggcctacatctaaccggtggttataaacagtacttggaacacgcaaatctcccgggatttga

SEQ ID NO: 82 - DNA, 314 bp, Oryza sativa
tacaacttaaaagaaattattatctgctgtcgacgccaatcctctggagatagacataacttaagccaaccctacccaaaactcggggactagatttattttaagggggatagactcgaacatacccgaaatgttatgacttacaaattcttgacaaaacacgtagaggttaacttctccatatttcgagagccacaaatttccgatttaatttaggtgacgatcaactctaaccattgcatgatcaaaacttgagaacaaaattaaatcttttcattcccaacatcagactagaaatgtcattaagcatacat

SEQ ID NO: 83 - DNA, 419 bp, Oryza sativa
  unsure (1)..(419): unsure at all n locations
ttatagcgcaannnacgagaagacatgcatgaatgtttttgttatcgggcggcgagcctatcccagataatttatggccgaagatgactttatcttcctatgggttacaatttgattagcttggaccttatatattggatagggtcaactaaatgctataagtttagttgcttatccatgcttagaaacattagctaattaatgggatggatcatatatactacattattatttatggttatatttaatggtagctcacgatggttaatcgtgtaaagttaattaattgataattaaaacatggttataggtgggttgtgagcatatggtcttgatggttgtgctcatgacaattaacgactggatcgcgagctactggtgtgaaacatttaccgtgccaaccacaagccagcgtgggc

SEQ ID NO: 84 - DNA, 394 bp, Oryza sativa
agcttacatgtacatagaaagcaacagcttattgtttttttaattaaaagataacgtggtgttgaagtaatatactgcagccagaaatcgctactcgggctgctgccttctgtctgcagccaacctgcagtacgtgcacatgacaaaaaaatagctccaatacatctttcagaatacaggatcgccaatttggaagtaatgttttatgtaataatgcaaaatagccattttttgtgcaagctatattttaaaagtagaattggacttgatgtacaaatcttatctcatgtttccaactttccgtacatacaattgaaattatagccagattgataagacaatttgacttgatacacaatcttagctgatggcaataaagcacgtgcattatcta

SEQ ID NO: 85 - DNA, 441 bp, Oryza sativa
  unsure (1)..(441): unsure at all n locations
ttactcacttgnaaactatntgagtccattatgtaagttttttttttgngnntccccctgattcagttggttgtgtagaaattaaacacaagagtttccaagaaaggagctccaatctccattgcaaaggagaaaataaaggaggaagaaaagggaacacgcataggcttttctttttcttttgtttaattaatgtcatattcaccataagcattaagctaccatgccaaaagctcagaacttttgacttgtgaaaataaaagataacaagtgtgatgatctaattagctccagccttttccaaagctcacggatattacatcgaaattgcaggtattaatgcgatgccttccagaacaatcacatatttggagcctgatgtggtatgcttattctcactgggataatgacatgctctgttgcattttaagcttgatacca

SEQ ID NO: 86 - DNA, 380 bp, Oryza sativa
  unsure (1)..(380): unsure at all n locations
agcttgttattcagncagatgaaatatgcaggttaactctgtttccatntgctcttccaagaacttacgccatatgggagtaatagaaacatagaatactttaagctacatgatatatgcagtcagatgcaaaaatagcagagatttaaatactcttgtgctacatactataaagacttcaagcaacaaaataaaaatattatgctactttgcaattagtactgtctaaaatgtccagataaaaataaaaattagcatacaaataaattaaatttctcattcataatcaatgcatatttattcaaaacatgcaacatggtgcattggaatgaggcagctcaacaaatcaaacgattgtacgggctanacaaccacttcat

SEQ ID NO: 87 - DNA, 432 bp, Oryza sativa
  unsure (1)..(432): unsure at all n locations
tcctcgggtcctcctcttacgatagccccctttcccgtgctctcccgtgccccgnagcgtcgccgccgtgtgcacgaagtccgccgccgccgccggccatcttcggcatcgtcgcgctgccgtctccgccgtcgcctttggtcgccgccaccaccgttaggtgcgccgtggtgtggagaagttcggccgcccctccgttttcgccgccaacccccggagcaccctcgacgccgtcgacccgaaccgccgcgccgcctcttctcgtcgccggccgccgtcgtgcattgtttcttgtcggggtaagcaccaacgggttcgcctcgttgccctctacgcgttgatgccctccaatcccggcgccgatgtgcctagcgccggcgagctcgtcgacccgagccggccgtcgtgctgacgtcatgccgacgtcaaccc

SEQ ID NO: 88 - DNA, 425 bp, Oryza sativa
  unsure (1)..(425): unsure at all n locations
cccttgcactgagtagatgtgatgcatttgcgttcgctggacagctggcccctgccgggcangagccgtagcacgccgtcttggtctccgtgagcccgttgtagctggcgtaccggctgtcgtataggatcctcctccgcgggtacgctgactcctcctcctacaccacgctcgacaacacgtcctcgacgtcagccacccggccgcgcagcacgtgcatcggcaacaaggcgccgctgctgccgacatccaccgccgccaccagcaccaacgccgcggcgacgacggtggcggcgaagaggagcatcagcttcatactgtatgtcagtacttgggctagctgctagctagctgagacgaataaaaatggggtggttttttgctgttagctatgatttaaaggaggtgcactggattggaggact

SEQ ID NO: 89 - DNA, 441 bp, Oryza sativa
ggctctgacaggttagattattttagcttctgtattttctcttctgtgcacgaattcatctgaagaataagaatattatcgtgttctctgcttagagaacttatccatatttgataaacacaagattaatcatggtttactcttgttttacctatcactgatatcaagttgtccatacttgtactgccacattgctagagccctttttatattatttacaggagccgtcaaggactctgtggttggagaggagcgtatagcgaaatatttattgtctcttcttaatattagaaaaacccctctacattgggagcgactagtttaccgaagagaacaattcaatgaagatgcattcaatagtaatgaaaaagactatagagattcaccacgaaggaggaggcgaccaaataactctgacgccttatatgtacaggtaccaac

SEQ ID NO: 90 - DNA, 329 bp, Oryza sativa
gatatagatgatgcttggtgaaactcagtttgtgtaacaattatacacaaacgaataattaaatattagaaagctcaaaagtccatgtgctgccaatgttcggatggtggtttcggattggctaacagaacatggcggcagggttgcagagggttccaagcgaaaacttagcccaatgaattattgggtcaactatcgctttgggcgtggtaatcatcctgaggacgctgttgggatacccctccttcaacagtaaagagctctgagtgaaaacctgtctagttcttcggacggatgacaacggcgtctttcggcaccacaaccttcgt

SEQ ID NO: 91 - DNA, 440 bp, Oryza sativa
tatgtgtgtagacaagttttgatgtgatggagaagctgtatttttttattacaagttgagaactaaacaagacctctgcttatttccctaccatgggacaatcgaaggaacaaacaggatcgtgattcatgaatagccgcgtgcgcctacaagagaccctttcggataaacgagccagtagccggagtttataaattaacatacgagaaaacggccctttcatacacaataatgaatcaatttgaatcacatatagaatttgttcaatataccatttgaataaaagattgcgcgtctatggaatacatgaatacatgagagtttggacggaatctaacatgagatctaaccttatatgaaattccctgttcaagtattcgtttactacttatcttgacgggagtaagcctaattataagttacgtattaacatccgacag

SEQ ID NO: 92 - DNA, 435 bp, Oryza sativa
  unsure (1)..(435): unsure at all n locations
agcttgcatgaatttttttgtcttcttcacttcatagccaaaggcgaaaatatccccttcttcgggtggtgaaaccaggaatgcgtagntgattcttttcctactgattcttattggtaaaattggactcagtttgtatgaaaatccaacatttttttctctaagtgaagaaatgtttttttaagggctcatatcacaaaaattgaacttgattaatggttattattattttttcccgttgcaacgtgtaggatcgaatcacaagaactaagctaaccagaggggggtgaatggttggtataccaaaaaccgaaaacttttagcggaaataaaagttaccctcgaaatcgacggaagtcggtctgaccgagattaatctaccggtctgaccgagtagatgccgccggtctgaccacccgtatgccgcaggtctga

SEQ ID NO: 93 - DNA, 439 bp, Oryza sativa
tgaagttagcagtcaaagacgaaagatacaaacgaaatgtctttcttaaaatcgacgaaggtgttcaatattccaagaattgttgatgagagtaccatcttcgcgcttgagtcgataagaacctggccgagtgacttcggcaattatgaacggtccttcccataagggagataatttacgccgatcctgtgtggtttgaattttcctcagaaccaggtcgccgactaaaaaggctcacgatcgaacattccgattatgataacggcgcaacccttgcaaatatcgagtcgactgaattaaagctacttctcgggcttcttctagtcgattgatgtcgtcaactcggccctcttcatagtcctcctcgttgaagttccgaaatcgtagtgattcaaattccacttcactcggcaacattgcttctgcaccataaaccaaa

SEQ ID NO: 94 - DNA, 351 bp, Oryza sativa
  unsure (1)..(351): unsure at all n locations
agctngcctgcaagtccttctttgctgcttactggtgttattnttcttgagccataattgttaccactactgtctatgacacgagtagaccaccaactaagggcaagtgacttgggatttttattcagcattactatatgtcattggattgtgtaccactcatatacatatatttggccttcctagctccacatattacttctggacagtacgtacaggttcttgatccctacaatcgctgactacgccttctaggtatcctttgctttgctggtaagaaccttataagagcttggttaggaactccatattgctgagaatcgttgagaggcaccactacacctgcgtagt

SEQ ID NO: 95 - DNA, 416 bp, Oryza sativa
  unsure (1)..(416): unsure at all n locations
tgatggaccgtgatgcgagctgcatgatcgatcaataatatgtctcttaaacacacgctgaataatgtttttccacgaggagatgagacagccttcgtaaccgtgaaagaaagagccaaccgcgaatccgcaatgtgctgcgtgtcagagaggccactgggatcngaatatggacaaaaacgctttttctatggccctagctacggatggagcttgcaccacaagttctgcacccgacaatgagatcttcacttttccggccactacacttggcaagtggcacctttctcctgtccccacgcccagaaaagcaagtgcnagtcctttcctgtattaacaattatagactttggggtaatcaatgtgcacgaaataattgttatgaataataacctatcctaagagcacccgcaatg

SEQ ID NO: 96 - DNA, 407 bp, Oryza sativa
tatggtgttctccttcagacgatgttcaacaacctcgtttcttgtgaaatatttaccgaagctgaatccaaatggaattcgtgtgctgcaaatacgttctgaattgtgaacagaaaaaaataaccttcaagttttttatgatagtataaaaatgagtaatcattgataacatggtaatgtgggcacttttcctttaatcttcctatgacagtatcatatgacgcatgatgttatgaagaggtcagcatctctagacctgcaatactgattatcgatgcctgtaacacacagtccatggactcgatggccttttcgatgttatgggaaggaatgtgatctatatatttgaacagagtgtttccaaagaatgaaatgtatctacttgggtcttttaagcttctcctatg

SEQ ID NO: 97 - DNA, 352 bp, Oryza sativa
  unsure (1)..(352): unsure at all n locations
cctgcggcatgcaagctttncgatancctggcgtcggcggtactctttttttgatctaaatcctcatgcactctaggcgtgcatgtttctagcagtgagaggagttctggcactcctgagaaagagacatttcacacacatattaaattatggttcacgctaagttctctctcacacacacttatggcagtcctaccaatagctacaccgatgtatgagcacgccacgtggccctacactaacggctgccccacaggagcgcacatgcctcacttaggggtgaaccatctatgcagggatactgtctctgctcggatatctaatacgctaggtctatacccattcgaaatgt

SEQ ID NO: 98 - DNA, 434 bp, Oryza sativa
  unsure (1)..(434): unsure at all n locations
tcggatgtgcatcgactacaccgaccttaacaaggcatgtcctattgacccttaccccctgcctcgcatagatcagattgtcgactccacagcggggtgcgaccttntgtgttttctagatgcatactctggttaccatcagattcgcatggctagggaagatgaggaaaaaactgcattcattacccccataggaacttattgttatacgacaatgcccttcgggttaaagaatgcaggtcctacttttcaacgtactactcgaatttctttgggtagccaaataggacgtaatgttgaggcttatgtcgatgacttggttgtaaagacgcgcaaccaagagaccttactctcgaatctagcggaaacttttgaaagtctccgctccgcccgcataaaactgaaccccgataagtgcgtgttcggtgtacctg

SEQ ID NO: 99 - DNA, 371 bp, Oryza sativa
  unsure (1)..(371): unsure at all n locations
tatggataagccaaaacaatgtatgcaaggggcaacttggacctaatcgtgatatttcgtagagaaaaacttggctctaataatgtcacacttcaattaccgagcaaacaagccaatcaggagttgacagaaatgcaaggcctacctttgctcatgacccaattgacaagagagaagaagtccctacttttgtctggccctgtggtatataatactccttctagtttaaattatctatcgtcctatgtctntaaagtcaaatatatttatatctgactgcaatttagagatccatataatataccattacaagagttatanttttagattctctatgagacatatttgcatgttgttgaactatacggatc

SEQ ID NO: 100 - DNA, 374 bp, Oryza sativa
  unsure (1)..(374): unsure at all n locations
cctcgatggcctccttgacagatgcagacatacccctgatattgtttctgacactgnggtctataggaatcttcttttctggacttcgaggcttgaattgtctcttgacttctgatgcaacgtaagcgtcaagctcctcttgcgtgcaatcgtaccccgggtccttgttcttggcggcgtcaactatcgccttctttgttgcccttgtgtgggcaaacggtggagctgggggggcccttgactttgaatgtgccggaagaggagcttgctggggagtatgtgtaggagcacgatgaggagtccgtgcaggatcctgaggaggagtcgatgctggagcctgaggtggagacngtgctggcggagcatgaggagga

SEQ ID NO: 101 - DNA, 382 bp, Oryza sativa
  unsure (1)..(382): unsure at all n locations
tcttggtgagttccagcttggaggattccaccttcctatatgtatgcctcannatgaggtcacattcgacatcgatgccaatggtattgtcaaggtgtcagccaaggacaagtccactggcaaagagcaagaaatcactataaagtcttcaggcggtttgtctgaaagtgatatcgaaaagatggtgagggaggctgaactacattctcagaaggatcaggaaaggaaatcattgattgatctgaagaactctgcagacaccacgatctacagcattgagaagagtgtcagtgagtacaaggacaatgttcctgctgaagtcaccaatgagattcagtctgctgtatctgatctaagagcagcaatggctgatgatgatttg

SEQ ID NO: 102 - DNA, 175 bp, Oryza sativa
ctgaacatatgtgcaggaacaacatgtgccttcctacacacatataaagaagaacatggacatgtgtgaagacctgaaattatttatattaaacacctcaaatatcacttatggatatcccacctcatccattatgagccagccccactccctatttcgaaattcttcaatatct

SEQ ID NO: 103 - DNA, 369 bp, Oryza sativa
  unsure (1)..(369): unsure at all n locations
tgcgaagnncgtnattttttaagaagaaagaacttgtcttttcgcatattagccccnacagggatgggactcgcccgtagcggtgcaggctgatgactagcttaaccttcaagctatccagatcgtccgcttttttttttattaccaagaagcccttaacaagatgacacgacgatataatccacatatatgtacaattccgcttcagctcccaacacataacacacttggcgcgccatcacgttcacactattgttgatcatcagacaagcaaagcttttgcagggggcttgctaataagttgagctttacaccaacgttacagcgccgatcctaactaataacttatctctggtttcccgtttacta

SEQ ID NO: 104 - DNA, 425 bp, Oryza sativa
  unsure (1)..(425): unsure at all n locations
ctgcagctgaaatgtcacttggtgggctgaaagactggtctgggcaagaantatgtgacttattggtgtaatgacaaacaaggtaacctgcaactgtagtttaaaatggttccttcaattcgngttttccttttttacattttctctttttgtattaacttatgcagattatcatcaggttaaagcatgttcctcaatcctcatgagctttgagtgtgcttcaactacccttcattgttcctgcagagttagtttacttttgtttttgggtagtatgctagtagtatgcaagttatccccgttgtaaattattattcatcttcttcagaaaactcctatttttatctgtgccattgaaaacctgtatagacaccttaactgtaacattttcttttgatatcttagtattcaattttgtcttcaag

SEQ ID NO: 105 - DNA, 406 bp, Oryza sativa
  unsure (1)..(406): unsure at all n locations
gaagcaatgacatttttgttgttcacgcacactgcacaactgaatattgtaagaactatgggaagatattttcttgcttttgtttcttcttctagttactatcttgtgttctttatcccaaaaagatgggccaatctggagatcggtttctccttcatgcattgagcggaggattgactcaaaaagtggtgtagatgactggaattgtgttcctttgtaagagaatttcaatcttgagaacttgtgcccgtcacctgaggaatcaacattcgttaattgtgtttctcttagaatcatgatatcatagtngaccaagtaaacaacattgcagtatgtaacatcatgtaatgaagtacactagatgctagaggtaagcggcataggagaaaggtaaataccatttctg

SEQ ID NO: 106 - DNA, 429 bp, Oryza sativa
ggatcttaagtcacctgcggcatgaagcttccattgaattttgagacgaaaagccatatctgccaatgatgttgaagaacttcctccactgtcaccagatatctgccttgttaacttctataccagcagtggtaagttaggtcttcaccaggtacgaaagatccacaatcttcaacgttatacaattatatttcaaagattagtattacaagtcttcctcaataaattactccaacaaaatcctcacctaggtcaaagcagcttttcctatggttattttcttcagagtttcttgtacttgcatttgtatagtataatgccttcaattcctctgcttttcaattgaaatgtttatattggctgtgatcctcttggtgattactaactggactgtgtgaatgtatcatttttacaggacaaagatgaaac

SEQ ID NO: 107 - DNA, 405 bp, Oryza sativa
  unsure (1)..(405): unsure at all n locations
agcttctcttactgaaagggggagaaagatatatttttttgtgtacatccacacnactcagcaagccacatctggagatgcataattaatgcaagggagtacaaggcgataataatatatgggttaaagtttgcagctacacagcaatctagaagatacttagcttgccaaagctcatttataaagacgaaccttaagctactcagtattattaatcaaggcacgtgaacccacacgaacctgccttaacccatggcctacgatgattcagaccgaactggaacccgaccctgggtcccatgtcgttccagccaacccaagtcaaccattccacattttagttgtaaatcaattctaagaattaaaacaccgacttgtggacattgctcagcttagccataaccg

SEQ ID NO: 108 - DNA, 440 bp, Oryza sativa
  unsure (1)..(440): unsure at all n locations
tatacgaacaactagtacaatntacttgttatattttgagagtgccatttttcttcctttctgctccggcttggcccgtgcgccacaccttctcctccttcggtttctcttctcggcttctcgccttcttttccgccgtcgcgcgcgatccagttcagttcagatccccccccctctccctctcccccggcgcagttgcgctggcttccctttgcttcactccgccgccgccgccgcgaggcgaccaccgcccctcgagcaggcgccaccaatggacgacgagcccatcaacgcgcacaagctcctcaaggagcagtgagtcccaaaatgtcccccaaacaccccctgagaacctctcgctggtacgcctcctaagaaccgtcctcttcgcctcgcgcatgttcgtcagcaacttgacggggtctgtcctgctggagatc

SEQ ID NO: 109 - DNA, 351 bp, Oryza sativa
  unsure (1)..(351): unsure at all n locations
agctaggggggtntcgttgacggtcgttattgatctttttctaccgtcaatattgccaaaatagaggagaactagtgatgcttacaatgcataattacgttagaataataatattccactagtattaggtatactaacattctgcagagaatgacaataaagtgaaggagaatcgacatcaacacagatgataaatcaatcggacgatgtcgacaatcaaactaatgtatgaatgagcctagaactcagaattgacacgatgaattgggccaaaattcacaagtctacagagtggagcaatagaggaggccaccagccgaaattgggctggattgtgccagccccacgttc

SEQ ID NO: 110 - DNA, 440 bp, Oryza sativa
  unsure (1)..(440): unsure at all n locations
ntattgtatntagagtattttaaaaatatatataggttgaactatctatatagaaatcatagatacgccactcagcaccacgtcagcgaaaacacctacaatattgtcttggagttgggactatatttggactggttttaaaatatcagatatatgttatattcagcattacaagtaatgaatgtaattcaaactcaatgttttgaacgtgttccttgaaaagaaccgcacgagttagctcgtctatggctgtgtttagatccaaagtttggatccaaacttcagtctttttccatcacatcaacctgtcatacacacacaacttttcagtcacatcatcttcaatttcaacccaaatctaaactttgcgctgatctaaacacagcctatgttgtgggctagcaaacaactatagctacctgcagcctagccgtgcccgt

SEQ ID NO: 111 - DNA, 424 bp, Oryza sativa
  unsure (1)..(424): unsure at all n locations
agctntgaatgaatntcatcataaatagncattatattacatctatgtatttgaagtgaatacattttcagcaatataagttgatttgtcgagaaatacatatttacagcaagaatcaatgctgtcaggcatggaagagaattgagttacatcacagtatcttattgacggaactaaattgaaggcaattctctgtcaaccactaatcacctgcgcaactgagttatttatatattacaatacaaaattatcaagtgccaacctgcagaaagacacgttaatgcgtcacacacctatgtttaactgcatatccatgaaaatcaaggaagtccagtagaaagctacttttacacactcacagagtgtgacgcaaaccaaaggccaagggtattagtagaatacctcaagaaccactgatctggtc

SEQ ID NO: 112 - DNA, 421 bp, Oryza sativa
  unsure (1)..(421): unsure at all n locations
gtcgnggagcacgacgggcgggttcttttatttcgcgacgtcgtcttcttccccggcgtggtcatgctgggcggcggcaccggaggcggagccgtggtgggtggtgtcgtccatggcctcctgggcgcggtcgaagtatggcttgaagccgacgcggaatgagaggtatccgaatgcggtggcgcccagcaccaccaggcccgaccgcatcgcgttctgccgcgcccggctcctgccgccgagcgcgcctctcatcgcgattctttcctccctcccttctctctcgtgtgcgcttcgttggagtggcggattcgagactcactggaagtgattccgctttgtgaatcgtagctgactagctgttgctgaagggacagatcacttcgcttcgtcgatgttttttacctgcgcggcagatgat

SEQ ID NO: 113 - DNA, 176 bp, Oryza sativa
  unsure (1)..(176): unsure at all n locations
agctntgngctctcttggtctctctcttttacttgctctccatggccacagnagacgagagccgcaacatcgaccgatgagggcgagggcaacgacacgacggtggcagccgtggccgaggcggacgaagttggcggcgacagctgcagtggacaaggtcggcggcagcggcatac

SEQ ID NO: 114 - DNA, 397 bp, Oryza sativa
  unsure (1)..(397): unsure at all n locations
tctatggaagggtgctgaattctggaaagagtgtatggatctgctgcgttgcgcggagcaagcgaatggagccgctggggcagatggagctagccaagatgagacccttatctggagaaggcaattccttgttctttgtagatagacttgttatggatttacttattgcttctgtttggcatgtcttttgtgggctgctgtatttgtgtgtgcacattatgagaagtggtttaactgaactgagcaggggaattatacggccgcctacaagcgagaaaactgctgacatattgctggaggtactgctgaattaagattgtgctgatatgctcangtgcttcctcttttgtttctggtgtacgatcttgactgcttcgacctatccaagttagaatgc

SEQ ID NO: 115 - DNA, 385 bp, Oryza sativa
  unsure (1)..(385): unsure at all n locations
agctntgatagtttccctcanattcaaatacttatttgcatatatacaagttgctttggtgaaactaaccgtcgggtgaaatntttgtcattcctaacccccgccgagttagtccactcttgctccattgtgcaaaatgaggaggcgactgtctcgtctgttcaaggggtccggctcttaatcaagtcgtcatgatgagtctagggctcgttcatccaccgatgtcttgatggaagacgccgaagctccgcgatgactcctgaacaacaccgacctcgaccttgtcagtgatcgggagaaacaagcctactacatgctgagcgaccgggagtatgctcacacgcgagaatactcactggaactacttaaaaagataagtatggat

SEQ ID NO: 116 - DNA, 427 bp, Oryza sativa
  unsure (1)..(427): unsure at all n locations
tgtcacctgaataagttatcttgactggaataaagtgagtctccttggtgagatgatcaactataacccaaatggaatcataccctaactgagtcttgggcaaaccggtgatgaaatccataccaatctcataccacttccattctggtaccttcaatggttgtagaagtccggcaagttgttggtgctctgccttgactcgctggcaaacatcacaaagtaccacatattctgcgatctcacgcctcatactangccaccatagtctgttcctgagatcctggtacatctttgtagttcccggatgaatagaataacgagattcatgtgcctctgacaatatgagcttcttgagttctggctgatctggtacaaccaacttctcatgtaaccatataacaccattctcatcctcagtgaatcctat

SEQ ID NO: 117 - DNA, 397 bp, Oryza sativa
  unsure (1)..(397): unsure at all n locations
agcttgcggagagctcacggattcagttctctcttgcggnctgcgtgaactccctgtgctcgtgagcttggagttgcagttttgctccggggtggagtgcatcggcggtgagatatggagcgaaatgccgtctctccagaggctgaagatcttctgctgccaggagctgagctccatcggaggagaagaatccattgctagggtggagagtgttgatatcaggcattgcccaaagctgagagagctggagcagccgtttcagagaggctaactgaactgtcatctgctgctgcctgctgttgccacgacccanaatgtctgtaaatgtacactgctgttaaccctgctgcaaggaccaatggatcgtgtntttgtctaaaccaaacaatttgagtct

SEQ ID NO: 118 - DNA, 422 bp, Oryza sativa
  unsure (1)..(422): unsure at all n locations
tgagccgtggaatctagctttgaagaattctattgaaactaatactccggnccgagtgattcatggattcaaaggtcatagtaaaggtgaagctagccattctaaatccaagcaaatctcaacatatatttatgatgggctgtacatggtggtggattattggaaagaaggcccagagggctcgatggtctacaagtacaagttgcaaaggatcccaggtcaacccgagttagcattacacataatcaaggcaacgaggaagtccaaagttcgcgaaggtgtttgtgtgcctgatatatctcaaggaagggagaggattcccatacctgcgaatcaacacaatgacgatacgcagccaacagcatttaagtacactacggaagtcatatatccacattcctatgcaaaagaacctctgaaag

SEQ ID NO: 119 - DNA, 462 bp, Oryza sativa
  unsure (1)..(462): unsure at all n locations
agcttgcggagagctcacggattcagttctcttatgctgcctgcgngaactccctgtgctcgtgagcttggagttgcagttttgctccggggtggagtgcatcggcggtgagatatggagcgaaatgccgtctctccagaggctgaagatcttctgctgccaggagctgagctccatcggaggagaagaatccattgctagggtggagagtgttgatatcaggcattgcccaaagctgagagagctggagcagccgtttcagagaggctaactgaactgtcatctgctgctgcctgctgttgccacgacccaaaatgtctgtaaatgtacactgctgttaaccctgctgcattgtaccaatggatcgtgtttttgtctagaccaaacaatttgagtctgtagtctcccctttgtatgtacgagtatgtatgtatgtatgttctgttattaccaagagtatat

SEQ ID NO: 120 - DNA, 435 bp, Oryza sativa
  unsure (1)..(435): unsure at all n locations
tgagccgtggaatctagctntgaagaattctattgaatcttatactccggnccgagtgattcatggattcaaaggtcatagtaaaggtgaagctagccattctaaatccaagcaaatctcaacatatatttatgatgggctgtacatggtggtggattattggaaagaaggcccagagggctcgatggtctacaagtacaagttgcaaaggatcccaggtcaacccgagttagcattacacataatcaaggcaacgaggaagtccaaagttcgcgaaggtgtttgtgtgcctgatatatctcaaggaagggagaggattcccatacctgcgatcaacacaattgacgatacgcagccaacagcatttaagtacactacggaagtcatatatccacattcctatgcaaaagaacctctgaaaggctgtgattgcac

SEQ ID NO: 121 - DNA, 428 bp, Oryza sativa
  unsure (1)..(428): unsure at all n locations
ntntatcattctggcatcgagcctatttgccgcatgacctcccctacagtatcgncaccgcagtagagtttaaccaccaaattcgggatggattggtgtggttcctctacgcctaggacaccagaatatcgaaccatgaacgaggaaaggcatgagagaaatattggctagtaattgtgaagccccaattcttgactggaagggacaccaaaggcctctgccctccctctctatctatccaagagatggaagggcagagcttttttttggttttttcatcttttcatcaaagagttgaacaatgaagatagatggcaagtgcctgatcgatttgatcaggtcgtgtaggaacaaggttcanatcgttcgttcgttaggatgcctcagctgcatacatcactgcacttccacttgacacctatttaaac

SEQ ID NO: 122 - DNA, 379 bp, Oryza sativa
tcccagaatctatacgcgagctcaagaaactggaggagcttcgcatggaccataactacatatctggggagctgccatcaaccttggccaattgcacaaatctagcagccatcgtcctcgtgagcaacaaattcacaggagaccttgctaaggttaacttctccaacctaccaaatctgaaaactttagatctttgcacgaattacttcaccggcacaattccagcaagtatctactcatgcagtaatttaacttgcgtgcggttatctttcaataagcttcacggtcagttgccagaggagacagaaaagttgaaatcccttacctttgtatctctttcgacaactacttaccaatatacaggtgcacttcatatact

SEQ ID NO: 123 - DNA, 422 bp, Oryza sativa
  unsure (1)..(422): unsure at all n locations
ttgagtaactntcatcaaggaacagataacattatagaacttcgtcgcgatattttcaaaaaggagtatatgtaaattgagatgaaacctggagaagctttggattactatctttctaggtttaataaaattttgagtgatcttaaatctgttgattcttcttatgatactaattatccacaatctgatatttctcgtcactttttgaatggtcttgacatgtctatttgggagatgaaagttacatctattcaggagtctgttaatatgtctactttgactttggattcactttacacaaaattgaaaacacatgagatgaatgttctttctcgggaagttgattctaagtcgagtgctttggtttcttcttcttcttctttggatggtgatgcttcttcatctaagccttcttttcttgc

SEQ ID NO: 124 - DNA, 452 bp, Oryza sativa
  unsure (1)..(452): unsure at all n locations
gctngctaaaaacatgcatctatgtatgcatgagggggagagagagagtagtagcaggttgtttcagggattntgtgaaacacactgaagacacatattataacatatcactatcacgtatgaaacattttgttttaacagtttgaaacacatgtttttcttttgacataatataatcatgtgatattttgttggaaagatttaattgcaacgaatacaaacgatgtgataggttcgtagatcggataagtaatttaggagaaaaaaatctaaagagaggaggaaagaatgaaaagaaacagatagacatgcatgttacggtaacatggttcgtccaatccaccaggctgctgatttgtagtattttcctgacgtcgacagagagagaagaaattattacataagaagtgagctggtcgtaagtgtccgatgatctttatctgatcggacgt

SEQ ID NO: 125 - DNA, 392 bp, Oryza sativa
tatctcttacgctccaggaatggagcagtcagaacatcttcaccggctcgccggcgacgccgccgactggtgtcttcacctatacggatggttggtcacaacaccgttgtcaagcgtctacattttcaccactggtttgctcatcccaacgctgattggtgtcaccgcctacacggctggcctattatgccgccattgttgggcgtatacgtcttcaccgaccggatagccttcatcgccgacgactggtgtattcgcctgcacagctggcctattatgccaccattgttgggcgtctacttcttgaccgaccggattgacttcgacgacgccaactggtgtattacactgcacggcttgcctctatgccgccggtgttgggcgtctacata

SEQ ID NO: 126 - DNA, 471 bp, Oryza sativa
  unsure (1)..(471): unsure at all n locations
gctagctgaacagtcaaatatgagatgatcgcccatatgatcttacatganatcgagttgagacaggttccctagttcacttggaacattaccactgaaactgcaacctatcagagctctgcacaatagttcaacttacacatgagatggtgagtagtaattatggattgtagatgcaaacagtcaaacagaagattgtatatttcatagtaagagcgccgcctcgtctgttatggagaactgttgcaacttacaaaattctaaggttagccaacttcccaatagccggtgtgagagtaccaccaacacctctgtttgaggataaatccctgcgatggagttcatcattaggtgattcagtgtcgtcatgaanaaccatacgacgtaggcatcttatgacactgaacctagtttggaatgtacattcttacaaaagctctactacaagctacaaaagaaggctacgtaatc

SEQ ID NO: 127 - DNA, 439 bp, Oryza sativa
tggtctgctccagaactacaaaaagagaggatatgggggatgttgacaatagtatccttggggttttttctgttttcgtgatgtataactgataattgtttattgagtaaattgcgcttgtggtacaaaaatttgtatggtgggtgcaaataggtataataacttgcaaattgctcatttcggtgtagtaacttgactagtccgtgcgaattgggccaaaattgtcaatgcaaaccaaattgttgtaaaacatcacaaacagatgtggcatgatagcttacatgtatgaccatgttttggatatcttatttaaaatccaaagaaaaagagaaattagatgtgtaaaattacatttttgatgcatataaaagaatttatttcatgtcttggaaaaaaattgtcctgtatataagtcgtataatgtctggccaggaaaatt

SEQ ID NO: 128 - DNA, 250 bp, Oryza sativa
ttaagtcacctgcggcatgcaagcttcctatcattcaaggccttggatgccttgtgcttgttatagtgcatcctgtccattcccttcatcacggcacacatgtggctgaatgtggtgtctttctcaccggccgtcaggcggaatgttctgacgtcgacaccatttgctcggtgagggtggaagctgtaccccgtgtttcacaatgtgtagttgtggcgaacacgaagcttggccatcattaaatatgctg

SEQ ID NO: 129 - DNA, 439 bp, Oryza sativa
  unsure (1)..(439): unsure at all n locations
tggttggtgttacagtatagtcctagagactatttggcgctctgtgattntacctacatgaggtatttttggtgtttgatgtttttcatgctacaagaggaaattcgtctcaaggtggagattgttaaatatgtgatccgaattttgggcccacaatatattcggtttagtttcctagtaagagttcctattaggtgtctttcttttatcccctatatatactcttgtaagctgtatgggaaggggtgacgttcccattgtgattccgctacgtttgtaatcaactcctctatagtgatcattgccggtcggcgcccgtggttttttcccgcaaggggtttccacgtaaaattcgtgtcttcgttgtgcatctattttcataacagtgtgaacaccttgtgctcaacgaggtcgaacggttcagttggtggtggcgatg

SEQ ID NO: 130 - DNA, 456 bp, Oryza sativa
  unsure (1)..(456): unsure at all n locations
agcttgaaacttgngatgaatgcaaaatactgtttataaaaagatntgggttttcatactatagacgtgctctccttgagaaatgggaacatctaaaacaaggtgacaaaactgttagggagtacttttatgattttaanaattgtatcacttatagtggtttacaagaatctaatgagaacacaatgactagattttttagagggcttaatttcaatattcaggctgggcttgttaatgtgacatataatcatataggccaattgttcatgcttgcttgcattgttgagcgcaaaattttggagaatccaatggagcaacaagatatgcttgtgcctcctatcactgatgttttgcaggaaagtcagaaaagtctccaaaatgagaagaacgatatgtttgagatgtcacttccatcactcgcgaatgaggagaacgctgatgcagctacattat

SEQ ID NO: 131 - DNA, 440 bp, Oryza sativa
tcgaagagatccaggagctcattcaactaggaggactcttgagccgggtcacgttgctaaatgaaatagaagacatagtcttatggaaaaggagcaatgtgaccacatattcggcaaagagtgcctatctctttcaattcatcggctctcagcaagacaaggtttttctattgaattggaaggcgttggcacttccaaagcaaaaattcttaggatggctcattctgcaccaaaagattctaatagccgaaaacatgttgattcaacactgggagtgcaactggatttgccccttatgtagaggagtcttcaaggatactgatcacttatttcgacaatgtgatttctttaaagaaacatggaatcgtgtctctgctgtacaaggtattcaaaataaccagactttctcctctctgaaagaatgtatgacatacatcatg

SEQ ID NO: 132 - DNA, 473 bp, Oryza sativa
  unsure (1)..(473): unsure at all n locations
agctngagagcgccttctgaatcaagaagaaacatttctttcaattccctgattttcgcagcactaacgntaatatcagaattcagaagttatgtggtattgtctagttgttgggcacattcatgttgtcttgtttgttctaacaagatcaatagtatggccatggcacctacataaccgttcaagaagctacaaactgcttaaaaaataacctgcagtcaataatttcatcaattcagacaactatctttaactgcagaactgacccaatggcatgatgtttgtccttctaatactactaattttacttgactcaacaaagttaggttgcatgactaacagactaagaagccaattgcatggtttaatangatttgtaactgaaatatgttcagacgtatttaaataaatacatcactaatcccatttccaactctggcatgaaagtgagatcttcatgtaatcgatctcta

SEQ ID NO: 133 - DNA, 439 bp, Oryza sativa
  unsure (1)..(439): unsure at all n locations
ntcagccacctctcttcttgccaaaatcaagaaagaggctttgtcttaattagtggaagcgaaagtcttcataattggccctgatcttttagttagtttggaccgaaggtcctgagctcctttgtctttcctttcgctttgtaaagattactctttttctattcaatgaaattagcgctcatcgattcgtttaaaaaaagtaataaagactaggtaatattattcgatttctctttgagatcctcacctatatttcctttccttaattaggagttaagatgacttaggctgcgtttttttgggtttatttggaaatctactttctcgttttgataagcacgaattcccaaaagttagacgatgtgtcattntcaaaaactttatatatttttttcataaataaataaaattcaatttaaaatttacaatagctaatact

SEQ ID NO: 134 - DNA, 458 bp, Oryza sativa
  unsure (1)..(458): unsure at all n locations
agctgcatactgtgacatggctattgttctgtgtatctcggaancaaccattgtggtccagtcagcagaatttgctgaatactccccgctgttctgcgtcttaatttatcttgagcaaatgtggtgggattggaattgaactagagaacggatttataacaataagtccatgcaaaagcataccgtatagttacaggtatgatacgatagcatacaacgaaaatatgggaaacgggtacatttttaagttccagctgccttttatggatgtactctaagagctgagaccactgcttcttgtttatgtttaacttgaacagactatctcttctgaaatataccgaagcttcaaattgatggtggcgaacacacctgaacaatatcccaactatggtgaactgttataataaatggagactataatcatgattcgatgcattcaatatatccccaattgt

SEQ ID NO: 135 - DNA, 346 bp, Oryza sativa
actcagctcgtaacaccgcatcatgacatgagcaggttttattatataatgacggtcttttaccggggaaagacaaaatgaaaaccactcaaaacctatacgacaaaaggcattacacacaatttcctttctattgggtgaagaaaattggtataactaaaggaacaatctatatgatgtggtggaactatagagatatataaaggggccgacccccgagactacttatatgtcaaataagaaagaacactcaagtttttacgtcatgggcctagcttattgcacctaaagatgtaggtggggagatacataaatctatttatagggcagattacccacaaatgga

SEQ ID NO: 136 - DNA, 344 bp, Oryza sativa
gcttcaagccctgcccctgctgcacactctattctgtacaggtcctttatccaactagaacttgcggcgcgcttcgcggcgccctatcagctcatattcagtgatgtaaaaggagtaaattgctaagaggaatatacgaatcatattttagctgaactggaagtttaggccttgctcagcaggctaattgttaggaaaacaaaaactgacagaacacgtagagaaaacactaagcagctgttcgcatgatccatgagcatggagaggcacgcgaaaatgttaggctttaaagcatacataacagagggcagtgttttatgtaattaaggtaggcgacaacgcct

SEQ ID NO: 137 - DNA, 426 bp, Oryza sativa
  unsure (1)..(426): unsure at all n locations
ntgccgaccaatgttcgaccggtggcgtgtgacccacatatgccttcatgtatgtcgaggaggaggtgtctgtcatcgtcggtcgagacgcatttgagaagtaccccgtttagcgctttcttgtatagatcgttgctgaccatagagtagatctttgctttacgggttattttctcggcttctgtatcgtcctcgggcaacttctcgctgctgatgaatttgattagtgggacgcgccagtcgtctgtggtttcgatgtcggcaacggcgcgttctgcctcggtgacctccgagctaatgtcgggggtgttcgggctgacttcgccgctaacctctttcaccgatggcttcatcaagatatcgagaaaagtgccgggctcgagcgattttcgtctggatgcacgtcgtgctaggtctgctggctcg

SEQ ID NO: 138 - DNA, 434 bp, Oryza sativa
agcttttattgaaatatgttaaccatctattcttttaatcggatgtcgggcatatagtaatatccctagataaaaaacatccgatatataataatatctatgggtataacttagaattagagtcatgggaaaagatgcatggatgaccattacgacatggatggcatcccattttcttcttaggtcataccaggttaaagctttgttcttaaaaaaataagataccaatatgagctgtcctttttcattaatgagatttttaattagatataccttcctatcttgattatgataaagatgttatctacactagcaagaccaaatattaaccccacaacacatctatctatctattatatactactaaaagtaaattaaacttcctataaacgcttccaaaccgccatgtggcaccctacaaacactcctacacc

SEQ ID NO: 139 - DNA, 438 bp, Oryza sativa
  unsure (1)..(438): unsure at all n locations
tgagtgcagngaagtaatccgttcgttataaataattgtttcttattttattttgtacttttatatactctgatacaaatgttgattaaaaataaatttattttgagacaatcaaaaaggaaaagatgaacttattatataaagaagtagtatttgtgtgaattttagaaaccaaagaccaagacgattaaaagataaaatatgtaagcccatctaattgctttaagcggattatagattatctgattttgatggtttaaagtaatagattaactatataattccttttttagaaaataatatagtgaaaataagcataacgttaagatgggttggtttgtattgcgatcctatcaaaaaaaattatggtgcgtacaaactttcatggcagaaaagagaagactttcaccgtgttcagatccaattttttcttccgac

SEQ ID NO: 140 - DNA, 260 bp, Oryza sativa
  unsure (1)..(260): unsure at all n locations
cactatccagcgcgagataccaataagtcattatctttgctccaattatacattttattcctcttttcagcatctactggaaagtagggatgggaccagctaataaaatatacaactataactgaagaaccacgggaaggagctactacaaagatttatccatccttttctgcatgaagtggaataaagggtagaatntcctgcccaccatgcatctttcttttatcatccaagtttcaatttggttcagagcgaagcat

SEQ ID NO: 141 - DNA, 368 bp, Oryza sativa
  unsure (1)..(368): unsure at all n locations
agcttgaccagaccaccagagttgattagttttttgcgaattgagatagacaagtaggtgaaggaaattcagtgccagacatgacaagagacagggcaccccagacaagatgtgcaacgagacattcgagtctcagagcccagatatgcccgaagtcctaaacaacttgatacaattntgctacaagatcaaaccgtaacggctagatcaaggtacagttctatttttatgtccggttggccgatctagctaatgaattgacaaaatataagtacagntacagacccactaatcaataaagacatcccatgctaaaacaagtatgaaagatgcgcatatccctccgtatctaaaagactatagtttta

SEQ ID NO: 142 - DNA, 436 bp, Oryza sativa
  unsure (1)..(436): unsure at all n locations
tcccaagcatcacgtcgaggatatgcgcagatcttgttctagaggagcacgacggcgtgctgtacctctactcgtggctggcgagccaccagacgcagcaggccaccaccatggcgtcgtcgccgccggccggcgtcagcggatggttccaccagcagtacatgaagcaggtggccgtcgacgcggagttcgacgcgtgcggcatccagcccggggtagagacgaccgagatcgacgcgacggcggactgcggctgcgtcgtgggccttcaggacaggatcgaccgccggctggagctctggtccaacctcaagcgcgaggcgccgctcatgttccagccgtccgaggacgccgagtcgcaccaccttcaccgncgtttccgcgaggcgttgctcgatgccatcaaccgtgccatgcaccacgacatgtacctggg

SEQ ID NO: 143 - DNA, 458 bp, Oryza sativa
  unsure (1)..(458): unsure at all n locations
agctntagacaatataaaaacatggttgggaatttcanngatttcaaaacatggtggttgtgtgacataaacttcctcctgtataaaaccatttagaaaagcacttttcgcatccatttgatacaatttaaaaccttttgaagcagcaaaagccaacaaaagtctaattgcctcaattctagcaacaggagcaaaagtttcatcaaaatccaaaccctcaacttgagtaaaaccttgagcaacaagcctagctntatttctcacaatcaaaccatcctcattntgtttattnttgaaaacccacttggttccaataacattatgtccagaaggtggttcaactaaagtccaaactttgtttctctcanaattttcaagttcttcatgcatggcgttaatccacgattcatcagttaatgcatgtgacacatctttgggttcaaaagaagcaacaaatg

SEQ ID NO: 144 - DNA, 359 bp, Oryza sativa
  unsure (1)..(359): unsure at all n locations
actcaagctgnctggcnggctatgtatagtcaataaagaccttgttttttgggaattccatccaagtatcttacagtgccaccacacgggtattatgggataccccttggaaagtacttaattagtccatgattattttatatgccagtagtagtgggacactgggatgaggagacgaagttgtgtgtgtaatgagatatatggccatgtgtggcccctcctctattggggcgatcagcaccgataggtgtaagaacatccctagggtacctgagtagacgatggctatggctaccacatgcttgtcgtgcgactcgaccgactatgtggtatgggattttcatggactaactttggaa

SEQ ID NO: 145 - DNA, 367 bp, Oryza sativa
ggacaaatatcacccgagcgaaaggcccaagttttaaagaagatagctacttaagctcttcattctcgctagcaatgtgaataacatgtttaaactcaacacatagtggctctactatagaactaacatgctcattcacatagtggggcatggatataagagaagcatcgcacaactgttcgtatcacatgtaacagaaagctaattgatatgcgacaaaggtatttcaacaatcggttccactatgggttgctctaacgcagcataagtagtggacatagttggcacattataaatatgcataccttgagtagctgcagcaccatgatcattacccttttatctcatctgcagaaactatcagcgc

SEQ ID NO: 146 - DNA, 395 bp, Oryza sativa
  unsure (1)..(395): unsure at all n locations
tctcttactgaanggnggagaaagatagagcaataattattacaaccacagtactcagcaagccacaccggcggatgcacgattaatgcaagggggtacaagggataatgatataggggttaagttttgcagaaaacagcatttaaaagtcacttagttgcccaaagccattttaaaaagacgatcctaaagctacacagtattattaatcaaggtcgtgaacccgcacgaacctgccttaacccaaggcctacgatgattcagaccgaactggcaacccgaccctgtgtcccagctcgttcctagccattccaagccaaccatttcacattttatttggtgagcaaattttaagaattaaaacactaacttgggtacaatgttcggtttgccat

SEQ ID NO: 147 - DNA, 335 bp, Oryza sativa
ctacacataagcgacccaagcttaaggatgggaagtactcatcaacataatcaccacaaacagatcatactaaccgacctgcagcgatcattatactttaaatgaatccactatggacttgagaacctttctcgacgactgccactgcttgacactggcaattgcgaacaataacacaacacgggctcccttggctgtcaccttctaccatattgtgataaccggccaatgccaatggagtctttaccacatcactggtgtactgtacctcacaataattgcccttgcatcatagttaaaaacatataccactccaagactgttaatccaataac

SEQ ID NO: 148 - DNA, 293 bp, Oryza sativa
  unsure (1)..(293): unsure at all n locations
gccagatgcctacaaattaaatggcgtagcaatgtggtatgtatgtagtaatgggaaggaacaatcttggttcaacgcctagaagattatttgaaaaacaaataaaaaagagaaaatacttgtttccgataccaaactgaaatgtccaaattggtgccgtgcaagatcaatgttgcatacggttgacttcccacaaatncaaacataatatgctacatcgttctcgttatccggataacgcgtacttccgcgtcggggtaatggtccaagaatgcgataactatacatggaca

SEQ ID NO: 149 - DNA, 334 bp, Oryza sativa
  unsure (1)..(334): unsure at all n locations
ttaagcacctgggctgcagcttgtatcagctgaaaagtttgtggtggtgttataaatggtttctataacgaacgacggcagatccaaatcctggtgatttccctgaccagcaggacgcatggaattgttgtcctgngcatccgtggatgcagcaacatggtttctttgccagaagggagtaatcttccaattgttcagtgctgaagcagtatggtttctttgtccgaaaagagtaacctgtccaattgtttaatgctgatgggatcngccttcctgttttctttgccttgatgacaccaattgacagtccagctagaaacaacaatagtgcgac

SEQ ID NO: 150 - DNA, 283 bp, Oryza sativa
  unsure (1)..(283): unsure at all n locations
tcatcactctcagatacaactgtaccagaaaacagatttattccattctgctgattntctgtctcatcaacaacgggacctggagagttctccccaataatgacaggtggtgattgcagactgtcatctggttgaggaaaaggaagtttatcatctgatcctgactcctcatcaaagattatgttgatttcttgatcatcatcaagatcagcccttggttgtctcggtttctctggcttggtagagacattgtcatccaaagttgccttacttcttatctgag

SEQ ID NO: 151 - DNA, 249 bp, Oryza sativa
  unsure (1)..(249): unsure at all n locations
tactancacccacaatttatacgcataaatgtggtcttacggaggtttgttaaatatggtccatggagttatgctaacctaaatctattgaccatttggtgaacgagcacaatcgcgggtgagtgcttgcgggatgtgtgtgagtgtaagagtgttgatgtaccatgtgtggatggacatttttctcataatggaaggaaaaaatattatgatgttttcagactggaacaagtttttcattatatatat

SEQ ID NO: 152 - DNA, 433 bp, Oryza sativa
agcttatggatctagagttatgattgatattgacttattggcgagccatcttgctcctcatgcgcacatacgtcatgcgatgtatcatcctcagttggtactcatagataccatgtctggtgcatgttgtatcacaactgatacatcccaggtattagacacaatacctataggtactaggcctaatatctttggtatctcggctgatacccataggtaccaggcctggtatctacaaggtatcaagtctgttgaggagagggggtgcaagcgtgctgcttggcccgatagcgagccgtttagcactaacacctcctcttctcttctcccttcccctcggctcgaccctcgctccttgctgctgctgacacgaccaacgtcgatatctatgtcatcgtcaacacgcgagataagtgaggggtgggtgcgtaat

SEQ ID NO: 153 - DNA, 405 bp, Oryza sativa
  unsure (1)..(405): unsure at all n locations
agcttgaattcaacttatgtgtggcgtttctctctcaatcggnngagggaatggtagaagtcacgatctcaagagggcgagttgtgtgggaggatggcattctgaacgttgttcccggttcacgaagatacgttagaacaccgccttacagctacctgtttgatggcattgaaaagtcagacgctgcctacagagcctcccttcgtgcccctgtgaaacgtggcaaggctgctgcttaacgatgcccgctgctgatgaactacagaactagtttctccaaggtgaacgacgtctgctccatgcgtaacttccttgtgtttgtgtatacagatctcattattcatatcattctctgataggtaagaatgtaaaattacctgatactacctccgtttttaatagatg

SEQ ID NO: 154 - DNA, 445 bp, Oryza sativa
actcaagcttccggtggcgttggtgggtgcgcgtatgagaggactaggttggctggatcttgttggcgacttggcgagaccggccgccgttgggttggccgtctactcagttttgttattggaagtggttactttattatcattttaattaacactattaaactggatttgagaaaagcactagtattaaaatttagtgttaccaaattatggatcagcaataaactaaacatgatcttataacataaaatcttaccttttgatagtttcaaagaatctatgttggtaacgaactaaatataaccttgctaaatacaattttccagaatttggtagatctaaaaattttcttttatataaatactatcaaaacttatgaagacatcaaactaatttgacattatccaaatttagtctatcattttggtaataaaattactctctt

SEQ ID NO: 155 - DNA, 404 bp, Oryza sativa
  unsure (1)..(404): unsure at all n locations
gcagcatgcanactcaaaactatgctagtcccgagttttatactcagaaaaacaaactcggaaggtgatcaagagcttctaccatgatgtatatctcaaatgaacaactgcaaagaatgagtaccctctctcatattagtaagaaagcacggtggcttacccataagcgcaatccccgtggaacacatgctcctagtcactgttgaccggcgctatcgatagatatcgccccgcgatattactaaaaaagaggagaactaaatatgctcgcaatgcgattcgagttaaaataagaataatacactatcactaggctttcaaaccttgttagagaataaacacaaatggaggaaatcgacaaaatttgacgatcatcaaccggcgtatcgaaacaaacataggat

SEQ ID NO: 156 - DNA, 448 bp, Oryza sativa
  unsure (1)..(448): unsure at all n locations
agcttgtaaggtagttattatagactatttcatctcttgccttgctccagngncattaccccccacccacccctcagttatctttgttacccttttcacagttttgtaatgtgctagacagccaatatctgtatgctcctgtttatctctaggaattcttcaaatgccttgcactctgccatacggttcttcctgagggtgaggagacaccagaaaagatcagttatcaagctgcttctcctgatgaggctgcacttgtggctgctttanagaactttggcttcttcttttataggtatttccgaactttaacttattttcagtaactcttgcacagttttattcttttatgtatctatccaatcagaatgtctcgaatacattagttatggtgacatttttgtgcttctttatagacgtacaccaactacagtcatatgtcgtgaat

SEQ ID NO: 157 - DNA, 298 bp, Oryza sativa
  unsure (1)..(298): unsure at all n locations
tggcagttcgggtatgttttttctctcttcctgattntcctcttcttttgtacatgtcacataattaacatttgttctctttgcccattcctaccttgcatccagattcttgtagctcactattcgacagagtgaaccgtgcgggcccgtcttgacggattcaagaaccgtcttcgggccaaggatgacgaaataggccgcaagaacttgcaggtggaggccctcgccaacaccctgaaagaggcgaaagccgaaaacaagcggctccaatccgagttagagaaaggaaaggaagcta

SEQ ID NO: 158 - DNA, 441 bp, Oryza sativa
agcttacaacccgtactccgtgcacactatctaataccaataaaaagttctagaagaaaattgtgcatgtattttcaatagtgttgtatatatctataaaatattaactttaaattcattatattctagccataacaaaaaggaaatatgataattttatgagtatatcactgatagaagtttgttttttttttttgctaacatataatgaattgaagatgagactttatatataggtataattaatactattgacagtacatgcatacttttctctctaaagttatttttgttgaaatttgttattacctctgtctgaaaataagcgcagtccttctaattaaatatgaactagatgctgcacttttttaaaacaaagggagtagatggtttgcgcggagtatacatagaatgcgttccggatcagagtttccagagata

SEQ ID NO: 159 - DNA, 413 bp, Oryza sativa
ggctaaaataaatgcatggatgcatgcatgaggtggagtatatattttatcaggtagtttcaagaattttgtgaaacacaccgaagacacatattaaaacatatcactatcacgtataaaatattttgttttaacggtttgaaacacatttttcttttgacataatataatcatgtgatatcttcttgtaaagatttaattgcaacgaatacaacggtgtgatcggttcgtagatcggataagtaatttaggagaaaaatatttaaagagatgaggaaagaatgaaaagaaacggctaagcattgtatgtttacactgacaggggttcgtccaacccacaggctaccgatttgcaacatttttttgacgtcaacagggagaaaggagaaactagttagtaaaggagtgagctg

SEQ ID NO: 160 - DNA, 374 bp, Oryza sativa
gcgagaagtgagaccgcagcgacatggtccagcacttcaatgaattcaaggactaaacaagcaaacgcgcggtgtctacgaattcaacaaatccgatcaatcctaaacccagacgctcggccaagaccccaaagatcgattggatcgatgaagagtgatggaagcgctttggccgcccttcccctcctgaatcatgcgcctctaactatccccgtcggcgccgatgtccatctctactgtaatatggaatttccttaaagcatgaagaaaatttgatgttacaatcttatcaagatcaattgcatcaagacgcttaattatctacatgccctgaatcgcacagactattaatgtaatcacggtggcatgctatc

SEQ ID NO: 161 - DNA, 374 bp, Oryza sativa
  unsure (1)..(374): unsure at all n locations
acacaagaaactcagcttgataggtttgggggcctgtggaatcgaaagattttnttttttgataagaagnncatacatgatgtaagtcataaataaaaggcaatttcatctccaggttcctaatcattgtaccttctcttttgaggggagcctaatagcttgaactttggtgttaattcaacaatgagaaaagaaacaaaccccttgtgctctcagaaaatatagtgttaaaaaaaaaagactgctacagaaggaatatcaaatatatatataatacgatttggtttttatttggataacaagattcatcctgatgtgaaggtataattaaaaagcggttcaattcccctgtttatgaccatttaaggattctt

SEQ ID NO: 162 - DNA, 244 bp, Oryza sativa
gagaagaaaacaaacccacacaagcgacgcacgcagacacttacaaaaggtcaaaaacataaacgaacacgacacatcctccaaagagagactggtaaaaactctgacgcgagtaaaaaagggaccaaaggaacaatacataacgtgtcccacaaaccaccaaacaattaaaacaaggatcaactaaacatcacaaagatccaacgctcaaccaaaaaagaaagcacagaaattcacaaacgaa

SEQ ID NO: 163 - DNA, 375 bp, Oryza sativa
  unsure (1)..(375): unsure at all n locations
tcacgatccaacgcctggctcccntttttctactccgtatcttaataacaanaaaaaacacaaaacagctttggacttgccctttctattcttgttcaacattatgtgcagctcccagaaacggttcccaactactgaacttacaggatcactcttcagtttctctatgatctacaattgcttattagtccagaacgtctaggattagtcaccataaagagttattcaccccaaaagaaatagaggaagaaacaaggaatacaatattgtgcccattctaaaatacatntactagcatttccttgtacataagtaacatctaacgtatcactaaagctaaaaatacaatgtccggtacatatacatgcatgacac

SEQ ID NO: 164 - DNA, 422 bp, Oryza sativa
  unsure (1)..(422): unsure at all n locations
agctgtcctcataccaaatgctctatttctttctaggccaattnttgttgccttattaccttctatggactgaagatcaccccttcaccagttcgccaccatttgaggcccacaactccagtcacagttttctaagcattttcttcacacagagatctccttttccatttggccttcataccattctttcaaggcgtttttaatcaaaggatttggtggagaaattcataggaatttaaatcctatagaagattttctatttaatcatttgataggaaggattggagttttccaaatcctatgaaatttctatgaacctcatcgggtacccatatttcctaataagccacaaggtttattatggaataanaattaatttatacgtagaacttttatatacttgtncataatgatttaaaagc

SEQ ID NO: 165 - DNA, 390 bp, Oryza sativa
  unsure (1)..(390): unsure at all n locations
acctgagaaactcagctgtatggcggttgttctcaattatacttgcgnatggtatatttaggctctttccttttcctagccaccagttgcatatttattttaggaaaaactatcacctttttaataatagatctaatctaatggtctaaattaacgggggcaccaacttaagagaaaatcaacggcgagattagatagtgccacgtggcggcttacgagtgtttgtataaacaccatgtgacggcttaagagcgtttgtanggagtttaatggactcttagtatataatatattanagccgtgtacgccgggcatgcttcgtctttgcaaaagaacaaaaaactgttaagactatgccaattctggaccatgtcttgtttcttttaaagt

SEQ ID NO: 166 - DNA, 440 bp, Oryza sativa
atccttaaaggcacctgaggcatgcaagcttgtaatgatcccttgtttctatattcttcctagatacgagtagcatattagcgtgccgtcgttgggtgtagtgtgtttaacgtgcaacggatatattatgctagtagctcaactacctggattatttgtttgcatagaggaccctcgaccattcgtttgttatgaagcatcgagttaaaaatatgttaggcatgctgcttgatatttttttcaacgtgagaattgaccatggaccttgtaataatgatatattgcattaacgtactgaaaatagattggaataacggaaagcaccaacgatgctgaggtgaaatcctgggtacataacctcacccactttgatatatccaaaatatagagtgaatcttactttgagtcatcttttattactggtggttcatattaaatca

SEQ ID NO: 167 - DNA, 408 bp, Oryza sativa
agcttcttgaccatgagactgtaccctattttaatcttccttgacgagcaaaggcagaaagaagagacatatttgcctgagttgtttcccggtccttcaagtgttctaatgatgtaagatcttttataatgtttacaaatatactagcatcttcaacaatcccaacaaaatacagttcaattagaagtttcagtgtgcttctcttcttcatagctcttgagtttttgtctgcgtccaaatcttctccaaatttcccaagaaagaatacctttagtagcccttgtgtaagacaaagagaaaaatccttgtatctttgatgaagtaaggagcaaacctaaattacattgacacaatagttattatattacacaattccagatagaagtgacacttttggaagttcaagtc

SEQ ID NO: 168 - DNA, 326 bp, Oryza sativa
  unsure (1)..(326): unsure at all n locations
gctcgatgtanaggtgaagctcatggaggaggagcgggtgctttatcccgagttgacgnncttatctcaaggcgaatggatagtgacgacaaactttgacaacccaagcacgaagtagagattttgccatcatcgtgcacatcctcttctttcttcttcgctcaaggacgtgctaatgcagctcacccccgcaccttcaccgtagcgactgctgagccgcagtctccgctgctttctacatgcccacaggttgacaaactaatctaattatttacaaccacttgttaagagtggcanatagttaattatttcctacatatgggctt

SEQ ID NO: 169 - DNA, 451 bp, Oryza sativa
  unsure (1)..(451): unsure at all n locations
agctccacgaaatcaaacaaactggntttattattgtttaaaccacaccaaaaggggggaaaatcgaaaggggccaactctatgaattatgtagtatctgcacagcatagcagacaaatggaatagctgcacacaacggtgtgcaaccaaaaatatggaagagattaagtgcagtgcagtccaaatacagccgagctgtgataaaaccttgttttacttcagggaaaaagatatctgcctatgaagctcgcattaataaatcgtaacatctcaaaaggttaatgaaatctaaaaaaaaacataaacactaaaaaatagtggacgtgagctggagcctttaagactgaaaacaaatgtcaggttagtccactcacaacactacagtctacaggtggtgaccacaacaaaaatcaatatggatacttggcacaaagatgctctaatcatcagt

SEQ ID NO: 170 - DNA, 444 bp, Oryza sativa
agcttaaagcctactctcctagtgtgcttattgttaactcactaaatctctattaaaaacacatactttctccgtctcataaaaaatgaatctaagaccagatctaacatattctagtattacgaatctgtacagatgtatgtttatatggacgggggaatacttaagttcatagcagttttaggtgtcaatattaacttggtgggttaagtaaagcacctgcgagtctgcgactcaactatcacattctaaaatttttcacgtggatttttgtaaggaattattctgagatatactccatctgtcacaaaatataagtatttttggatctcaacacaatcttcgagatgctattttgaccaacaatatctataaaaatataataatgtagataacaaaaattgcatattatgattgtttgattaatgataaatctagaaacgt

SEQ ID NO: 171 - DNA, 428 bp, Oryza sativa
  unsure (1)..(428): unsure at all n locations
agataatagaagctttattcatacaattgtagctctaggagtgagtagtttgattcattcatataaggacggggtatgaagacgtatgttgacaaaaagaaaatcacagaaaatgataatgcatgacatatttctatgacaagaataaaaatacattttcatatcccgagttacttcctccgtttcacaatgcaagtcattctagcatttcccacattcatattaatggtaatgaatctagctagatatatatgtttagattcattaacatcaatatgaatgtagaaaatgttagaatgacttacattgtgaaacggagggagtactttactaagtcatccaatgatgatccntgaaatgattctacaacatttcagatgggtagtttaccatcattgagaagatacgtgaggaccataattttaagt

SEQ ID NO: 172 - DNA, 431 bp, Oryza sativa
agcttgagactgcaccataagaaataaaatgctgttgtatgtttgtaatgtacatgttggtctttgaatcctacatgttaaaaggtaaaaatatgttttcctcagtgggttccaccttaattaaggttaagaaaaaatcattagcattgtagcatatgctattataaaaaatatatatggttccaaccttatagcctctacgaacttaaacattgagaatgtcaaacgttattattaagcatgaaactaacgtgaaaggagcagagcaagtatctaactggcaatgcacacatgttgtattaatgtggttattatctatgcaccggtgaatgacataccaactcgagtacaataagtaaattattggtacattttatggtgcctccactgctacgtgtagtagtatagtaagattatatcttagcgttgat

SEQ ID NO: 173 - DNA, 405 bp, Oryza sativa
  unsure (1)..(405): unsure at all n locations
ctatgagcctagaagagaaacaattcatcgtacaactatcgtaacaaattagtcgtatgtatagcagcgccggttataaaatacgtgaggtgtactagtacttgagtcaggactttacatgtcctctagcgtttctaaaacttcttgtggtcataaagttttaaagttttgtataagatataaaaaacacgaatattagggaatgacttaatatcaaataattagaagtggtgagtccccgcanaaaaaaaatagaagtggtgaggttctgaaactctangtcgtttagcccaccaccttgtggagctagccggaagacctctagaacgttctcttgtgtaagatttcatcgaacttttaaaacttaaatatatgacagtttccatagaaatcgttgaattcatc

SEQ ID NO: 174 - DNA, 414 bp, Oryza sativa
  unsure (1)..(414): unsure at all n locations
agcttagccgnctgggtatgtcgagcgccctctttaaatgttgcttttccacaacttatgctaattttcttcattttagcccccccttttttttagatacccgcagctcattgttcgaccgagcgaaccgtgagggctcgccttgacagctntaaaagtcgtcttcgggctaaggatgaagaactgggccgcaaggggctagaaatggaaaacctagccaacacccttaaggagacgaatactgagaataagcagctccaagttgagctggagaaggggagcgagcgaaggccgatatcgagcgcctcaaggctgagcttataaaagaacgagattagtccaccgccttgactgattactataaccttaccgagccgaagatggatgctcttcgtcaggaggtcagcaaggtag

SEQ ID NO: 175 - DNA, 405 bp, Oryza sativa
ctcagcttaacatgggagtcctttcgtcgcatgactaaactctaccggacatgtatcgcatgagccgtcacgacaccaagttaatttcgctcgctccacgatcaaaatttacttggtggggggcatgtgtttgatggtattttggcgattatatgtgtacacaagacttactcatgatggacaaagcaaacaagcagtttgtaagttggctagcttatcatttctacacaatgctcggccatgtatatacacgcaaataaatgcatgcacaggcagctgggaatatatatacttggattagtatatgtgcatgtataattaaccaataactagccgtgtgaagattggctggtgaggcaatcacgtgcatgcatgcatgtactacagtagacggtcgtatgtgtg

SEQ ID NO: 176 - DNA, 400 bp, Oryza sativa
  unsure (1)..(400): unsure at all n locations
ccggatcttnagtcacctgcggcatgcagcttgaagagaagaatgagcgatttttttaccttcttttcgttggatagaggacaactggacaagtcctcaaccccaagataatcagctgaactcccaacggtaggcgttgatggagaacccaacaaccaccgtccatgaagtcctgcatgcctatcaagtcatgacaagaatagccaaatgcccgtaacctcttgagttgcataaagaaaggaaaaggaagaagaacgaaatgaacagaagtacaggtttaacccaactagcctgcccctactaaggaccaaagaaatcctatccatcattctcccatcacgtgacggtgagccaccgatatcacaaagagggacatataggttgtggattatcgtggtgc

SEQ ID NO: 177 - DNA, 336 bp, Oryza sativa
  unsure (1)..(336): unsure at all n locations
tcatactgtacaaccatagcgtattcatatatgctgtgtgtatatnccgctacattatattctgacaagtaactggatttaataattaagaacacttaacttcttctcatcagttgctattactcaactgtcctggaggcctaggggcttactggttgaccaatttgactcaaaagatgatgtaatcagtgcagttattacatccctctttattcctgggtacaatacatgttaacttttcctcactcgtactgtatgtatcttctatattntgcggtctaaggttaagaataattgggtgtgcttgtttcagattataactcccaagcctcaact

SEQ ID NO: 178 - DNA, 449 bp, Oryza sativa
  unsure (1)..(449): unsure at all n locations
agcttactctttcaaatctggagttggaactgtatgagatagatttgttccactctgagctcccaaaatataagaagctgaaattttgggaaaaagcaatagatgtaactagatcatattatgatgtactctgcaattgaaaatgaagttgtatataaaagtatagaactgatgagcccatacgaaaatgcaatattagctatatttggatgtgaccaagaaaaattatgacttgagggcaagtaatgcaagacaggtatttaataaaaatacttggtctatccactaatgtcagcagttttcaaagaaaaatacttcgaaaatgcctaagtacatcagaggtgtgtcaacttctcagatantttttattgtttaatatcttaccagtgggtcatggtgtattttgcaactggccaaaaaattttggtcgaatctctcgaaagaatcgg

SEQ ID NO: 179 - DNA, 383 bp, Oryza sativa
  unsure (1)..(383): unsure at all n locations
ctcagcttgtatggcggcttgtatcggcgggattatggcttacattattttgacactctaatctagctaatgcatctgcctatttatcatatgtcttagttaatccaaatcgatgatttaattacctgtatcgaccagatcttttctatggttttgctggtatcgacaaaattgtttcatcgatttagattaggtaaggtatccaccaccctgaaaatcagttaaaggcttgattgtttagactttatgcttcttttcacacttcctgcttgttaacagtgaaatatggtaagcctcgaagtcatcatcggcctagagtcaatatccgcttcagagccttgaatcggnctatgggaattatcaagtcgccaatagttgaattc

SEQ ID NO: 180 - DNA, 441 bp, Oryza sativa
  unsure (1)..(441): unsure at all n locations
agctagttctggacctctgaggcattttctccataatgcgcctcacctgagctacctccttgcccaatgaactggccaagggatgtatcattcattagataataatcaaagcagctctcatcataactgatatacacaatcgtcaaagtgatttctctgaaatccatctcccaaacattgcaagacacctctccggctggtactctggtgcagtgtgtccaccaccctgngttaaatagcgttacagccgagttattcgcaattgtatacgtaatgcataatcatctattcttgtgcgttatgtcacattagtacgtttgtccagtaattaacaaggacactataattaagacaattcagtcttatcagaaagtcccagagagcagtaaattgacaaattttccctgccagctcaactaaagttcctctggttttttaaaa

SEQ ID NO: 181 - DNA, 311 bp, Oryza sativa
  unsure (1)..(311): unsure at all n locations
ngnganaggctgtaggaatatatcaccacctgtcatcatcataggatggacaagtggctcatcccgcanagtttcccacactactacaaaacatcaaataggtgttgccactataggtgacggtagtgctaaaacgggcacctatagtgtttttctcacttttgtaggatgaaaaaattaaaaccaacacctttaaataaagataggtgctggttttttcgttaaaaccggcacctatacctataatatattataagtatccggtttttaaaaaaccgacacctgcaatatattatatgtgccggtttttg

SEQ ID NO: 182 - DNA, 424 bp, Oryza sativa
  unsure (1)..(424): unsure at all n locations
agcntatattaatcttattagtgttatgcttgttttttaaagagagatcaactgtgggaatttgcttgatattgtatttacaagatcatgagctataattagaagtccgatcgtctcaagtcagaatgtgagttttttaaagtgatttcttatacgacacctctattttctaaagcaaactaattaaaaaacccactcagatatcaatcaatacctacttataaaaattaaaaaataagtaaggcttccgtaaatattttcgtacgtcattaagcgtgggccaacacgatatttcgttgttaatccacgattcggaagcgtgacagcgatctcttacgctcgctaataaaagagaaaaaataagagagagagcctcgtattcgtggagcagcccatccatagcagccccgatttgtggattagt

SEQ ID NO: 183 - DNA, 412 bp, Oryza sativa
  unsure (1)..(412): unsure at all n locations
tgttgctgcatgctgcaacaagctgttcacttgcagattctgccatgataaaattagtgatcatacgatggaaaggtagagtctgtactgcatcattttactattgtagaatacttatgttgcctgatcatactagagtaagtatacctaattttgctagaagttggctaccctatgtctgaaaaagaagataaacgtgtagaaaatagagagcttgcagttaaatttcatagacataagcacaatggtgtgtttgatcatctcctttattggtatcctttaaatatcttttctcccacactaatattcatatttttatggctttgcctgtntaatgtggcataaaataagttgttcgattatgctcatcgattggctatattgaaatgagttgatgcagatgaacaaaaac

SEQ ID NO: 184 - DNA, 438 bp, Oryza sativa
  unsure (1)..(438): unsure at all n locations
agcttttcttcctctgtctttgtcctcttttattctggccctaaatgtagtctactgtagtaaagatttccctggtttcaatttaaatcaaattgttttggggggaagaatatgatattgtacgttctaacgttccttcaaatatgatatatgcatttcacttgtgaacgcgaggcactgattggttggtccattattatgaagtttggttgtatgatgtcacactatcttttttaagtcccttgtaaaatctttatttggattcttgttcagtttaaaaatgggaaaatgccaagtaaatgaactttcttttaattgcatcgtgttgcttttgcttttgcggtgcttcaactgaaaaaaaagcttattctttgacatgaatgtangaaaacatgtgcattccactccaatttccaacttgtcatgtaatatacacat

SEQ ID NO: 185 - DNA, 332 bp, Oryza sativa
tcaaaaatatttaaaaagaagcgcttcaaagcatatgtatattttgacaaaattaaaaaaaatattaagaggtaggtcataatggatctatcaatcataccaaatttttgtgcaaatataacttatatatgacttatataaagagagattatccaaaaagagaaatgttggtaggcagtaaggggaaccgctttcaatagttcaaggatataaaacgagataaaaaattatttcaggttgtatgtgcttcacctaatagctcaggagagtaaaagggattcttatatatatttacccaaattaactattcactggacattgtaatatgtcct

SEQ ID NO: 186 - DNA, 382 bp, Oryza sativa
  unsure (1)..(382): unsure at all n locations
taccgccccgggtggaccactcggtctggatgatccgagtggtcgaacttgattgttgactcccaccaccgaatatactgtggcgtatcgggctggacagcgttgatctcccgtacagtcagctcttgttttcttttacactcgtaagccagagggtcgccaaggatgtggctgagctccttgcggtgatcttgaaaatctgtcggggcatcatcatcatcatccttctttttcgacgcgctttggtctccgtcttgggtcttccgagcattcttggcatattgatttgcatactgcttgtacacgatacaatatttatctgcgntggtagagttgggatgatgcggacattgatagttcatgatcctgtcaaaagtgttga

SEQ ID NO: 187 - DNA, 371 bp, Oryza sativa
  unsure (1)..(371): unsure at all n locations
taaactgtaaaaatgatattaaaaatttgggattntctcgatgatttcacagnttagcatacaaaagaagaagaagaagcngaagatacgcaatctgtggggtgagaacgagataacgggcctaatatgggttcttttttatataaaaagaaaatcttactaacgagaatgcaaaatgcagctgatttcctgcttataattacatatgtaactaaccagcacatgtcctccgctgagcaaaatgaagtttccaaagggcttttttcgacaaacgacccataggattccataataatccgcaatattaaagaatcccatccatctgattggcgtttgcggggtgggggggccttattntaaattgaaaataa

SEQ ID NO: 188 - DNA, 339 bp, Oryza sativa
  unsure (1)..(339): unsure at all n locations
tcctncctgagctgaaaatggtgaggaggatttgcttcttttatctaaccattctatttgcatctcacataattgggagttgattatgtgattgctgattgagaacagaattatcagggggtagtacaggatagtactttctgcaaatcgatggtctccatttgggtgagctcggcgtatgaagaaccgtcccatgccgtggcgtgctgcctgatgccaataaccctgcacccaaccctactcattcgctcgtacgggttcgtcgaccttacgcaaaagccaaatttcaattcaggtccagttatgttcagtatatctcaagagaattcacctgacttg

SEQ ID NO: 189 - DNA, 391 bp, Oryza sativa
tgtcgttcatgttaggcttaatttgggtatagagtgttctacctatgagataaacttgcacaatcgcagataatgtaaatatatgggagtatagtgtatatgcctaataaagagcgatcgatcgaatcatgcaagtatgcatgcatctcttcgccacaaagaagaaggaaataatatacatcataaatggacggagctaactacagaggtgagaacagaacaaaactatatatagctctacgtcaacgcccttggaatttagcacgggaatgtactaagttaacactttgatgagttgagattacgacatacgctagacaagtggctcgcagccactggttgattgattgctttcaagcattttgtgtttctttaagaacatactccaagc

SEQ ID NO: 190 - DNA, 447 bp, Oryza sativa
  unsure (1)..(447): unsure at all n locations
agcttgcttaacctaattgacaacatcttgtctaaactctcttgtctttctattcttgacctttcttatacaccactagaatcactccctccttcagtttggcatctatttaatctcaggttgctttctctcagaggatgtactaacctcaaaagcctatgcaatttctccaatcgtggcaacactctgtcaccaaatgacaaatgccatgtgaacaacttgctctatcttgatctcactcagctcaacataaacatttttccctgtgatcttttccaagatatgataaaactggaagagctcttgctttccatgtgctccaaccttgaggaattgcctcgttccatatctgctntatctagcttgctaacccttgaaatctcagggaccaaaatgacatcacttccagattggatgtttatagaaatgcaacagcttcagttactc

SEQ ID NO: 191 - DNA, 432 bp, Oryza sativa
  unsure (1)..(432): unsure at all n locations
aagctcgcaacaatagatntatcatgcaaaaagaacacccaagtgtagcgagaataatcatcaacaatcacaagacaatgactattaccaccaatgctcctatagtttgttgggccaaacaaatccatatgcaagagctccaatggtctagatgtggacatgatactcttagtaggatgagaacatgcaacttgcttgccggcttgacaagcactacaaagctgtattttctcaaacttcacatctttcaagcccacaactagatcacgttttngaaagttgctcaattgattcatgccaacatgtgctagcctcctatgccacagtcaacccaatgaagtntttgcaactaaacaagttttcaaatttgcttcactagaattgacatcaaccaaataaagatttccaaatctaaaaacctttgaacacaca

SEQ ID NO: 192 - DNA, 449 bp, Oryza sativa
  unsure (1)..(449): unsure at all n locations
agcttacactcggattgtgtagtggtaatttattttttgtattgaaattaatttgaattaaactacagaacaattttgatttgtagtctcttcgatttgccagatttttaaccgtgttcaacaaattttcactcaatgattatttaacatcttttcacctcatataatttgaaattgatatatattatttcacgttgcaacgcacggacacccagctagtatatatgtaatttgtaaatatcatttacatgttttagcaatgtaataatcatgttgtttacttgaatttattggagcattcagttntgtttgcaaccataaatttatttccttagcaacgcacatgcacttaatttgctagcataataaattcaaaattgctagacgagncgaaaagttagtgacacacaagagattctcttgtgtattcgtaggagagattatattcg

SEQ ID NO: 193 - DNA, 233 bp, Oryza sativa
  unsure (1)..(233): unsure at all n locations
nttcccgttcagcccaatggccgaacgagcaaaagcgcacaacctctcgtcgtgtctctgctgtgacgaccgcgatcggaacctacgaagaccaactagtactctgtcgaactgctctggcatgatggttatgctgtaagacgacctgcaggcgtgtttatgatatgcacaataccacttatctatctacagagactgactgcgagacagtgagcaggaccttctggaatacg

SEQ ID NO: 194 - DNA, 426 bp, Oryza sativa
  unsure (1)..(426): unsure at all n locations
agcttcacgagcctcttttaagtgagcacttttttattcttatattaatcattacactaactatattaattagtagtatttgtgtggcatcttccactaataaaaagaagagcataattaatttgtcatcttgttgtcgagctaacggcagagaagtccaaaaagatgatctctcttgagctactcccatgaccaatgttctcgagtctcgactagtttaattaattactttaattaattgtgagttcttcttgctaattcaacactgggctccacgcattcaacaagaagcgcgtagtcgccacccaaataaatacaaaaagtttctccaaaaatttaaggcccaactaatttatgtntgcaattgagtttagatgactctttgatcggtttgttgtgagtttgtgactcacgtaggtacgacgt

SEQ ID NO: 195 - DNA, 276 bp, Oryza sativa
agattgggatcccatttgtgtgtagctgccattacttaataaaaggttgttaggccatctggttatggtaataaattcaccttcatttctatgtgtgagaggtgccgataatatttctaattctacaaagttgctgaaagggtacgattatttcccttccaacctttatggttgtatcccgtactctctcatggtttaataccattttgtttatataagaaaatgattgagccacaactttctaaatagagcatcacttgtgtaaaatacattttt

SEQ ID NO: 196 - DNA, 434 bp, Oryza sativa
  unsure (1)..(434): unsure at all n locations
agctntntctaaataaactagaaactcccttgttctccctccgtttcaaaatatttgacactcttgattatagcacatgtttaaccgtttgtcttattaaaaaaattgtgaaatatgtaaaactatatgtgtacatgaaagtatatttaacaatgaatcaaatgatatgaaaagaataaataattacttaattttttttaataagacgaatggtcaaacacgtactaaaaagttaacggtgtcaaacaatttaaaaacggagggagtatatttaaaggagggtgtacttcaaaattagatagcactacaaaacaaggttgctgcaagagtagccgggccgtggtggtctcgcacagttcgtacggtggttcggttcgtatgtttaccagcctattgcanagctagctagcctccagagaccactctagcaaagc

SEQ ID NO: 197 - DNA, 387 bp, Oryza sativa
taatgcagacaagtagcatacaaaagagcatctggttatattattgttcctagcagtaaatttctttattttttttatagtattggattcattgatttgagaatttttcacaaaagtaattattgaaactttagtacatttacttgcaaagaattaccatggtatatgtttttccagatcctgttggaccgtttgcaaatatgcttacatggtacccatccatcacaaatctgatcaatggctgggattcaccaaaaacctcactgtgttcaaagaaaaaaaaaggtcaaactataactctcaaaataaatatcagccagccttccaaaatatgcacctttctttttttgaaaccgtgtgcaatttattcatcattactcacctaat

SEQ ID NO: 198 - DNA, 439 bp, Oryza sativa
  unsure (1)..(439): unsure at all n locations
agctggncgaattgctccttattttgtatattattgattttcttttaccattctccattgttcttgcactcagtacaactgtaaaagaaaagaaattctggaagactggaattgaataatcgcaaggtgtttgaaattctggaattgaataatcgcaaggtgtttcggcatttggctgttccctaacttggcatcaaatgggctaattactctctttaatcatttcttataatctactacattttcgaccacagattcataatgaaaataaggaacatctctatcatagctgacagattcagattacactccctctgttcatattcttgtcaaggggatttaggtgaattgtcctcaacatatagaaaagaaataatatgtgaatgggaaagctagctgctgccaaactttagctgatatcatctgatgactgaaccaa

SEQ ID NO: 199 - DNA, 448 bp, Oryza sativa
  unsure (1)..(448): unsure at all n locations
gctgaccatcgtgaaaaggatccacctatagggacctatttacacggtttcaccgngagtatcagagttcttactgaaaaaaaaaaactttacctcggaagcttgacgatcatcaaataaggacccacttatcagtgacccatcgacgtggttttgccgtgggcactgttcttatcatgtgatctatagaagtctagaacctaccacctccactgaatatataaagaattacacgtatctttgctccagatgagaaagggattacgattgattggcttcctttntagcttttctacggcgcatccgatgctgttttgcaataacaaaggtcaaagggagggagaaggaaagccaatgaaaaaaaaaagaaggggtggaaccatccaaacacctgaaggatgtcaaaaagagagcaattacggatgagactactactgtgatgataaag

SEQ ID NO: 200 - DNA, 443 bp, Oryza sativa
  unsure (1)..(443): unsure at all n locations
cggatccntaaagcacctgcggcatcaagctttggacagaagatgtgatttttcttttctaggccaagctatgggatttttattcacctcagttgcaaactgcaatgagttttatatgtatacatccaaatgaaaataatactttctccgtgcagccagcatgtgctgtagagatttgtttaagcagccaaaatatcatgtgctcatcatgtaaggcggtcggagtcagagaaaagaagtggatcagtgaatataacatctctaaacatatatgctttttagttgattgctagcataattacttttagtattatgaagtttcctagatggtgcgaaacaatctgatgaacgatatctgtcgcgacttatttgctaatatgattatgtattatttgttacatacgtacatacatacatatatatatatatatatatgtatatat

SEQ ID NO: 201 - DNA, 448 bp, Oryza sativa
  unsure (1)..(448): unsure at all n locations
agcttgagtcgagatcaacacttgtgtatttttttattcaaccatgtttataccaaggtatttaccatcatttgtcaagactttcttcttatcacaagcttgatttcattcttgccaacatggcgatgtccttggcttggtgaccattaacccatcgtgtcatccattagccttatcatagtaggacctattccttttcacatttcaaaggagaacattagtctcaacaaatcggttgtcatccttcacttgatgaccaaccggttgcatatgaaagatatggatatgtttgttgagttttcattaacatcacaagtgtcatatactcgtatgcaagctcaagtgcaaagattcgatataaataataggtgaacaacatggatctagaacatgcacaataaatgtataggatntgcgtcccctaaatatatgcatacaaataaatata

SEQ ID NO: 202 - DNA, 367 bp, Oryza sativa
aaccgctgcccagtcccaacaccactatcgggtctttttatgctgtctgagcggagactctcaaaagtttccgctagatccgagagtaaggtctcttggttgcgcgtctttacaaccaagtcatcgacataagcctcaacattacgtcctaattggctacccaaagaaattcgagtagtacgttgaaaagtaggacctgcattctttaacccgaagggcattgtcgtataacaataagttcctatgggggtaatgaatgcagttttttcctcatcctccctagccatgcgaatctgatggtaaccagagtatgcatctagaaaacacaaaaggtcgcaccccgctgtggagtcgacaatctgatcta

SEQ ID NO: 203 - DNA, 314 bp, Oryza sativa
ggacttaacaccgcgctgcactttgtacaatttcattttttttatagggaagagcttcacataacaaagacagttaccttgactgatgaactaaagtgaaaagaaactttaatcgacaaaacagactacatttagtttacccattataaatatactcgactatcttccacacttaccctatttgtcagatctacgattactttccagatcagaggaggtttatcgtgtgccgaataaaaaacattttgctctagcaatacacctgaaagaagatgtgcgcgcgagcagtggcccgaaacgtccgttacccacga

SEQ ID NO: 204 - DNA, 333 bp, Oryza sativa
  unsure (1)..(333): unsure at all n locations
tgaaggagaacataccatctctctgttttcctgattgcctggtcacaacacacgcatagagattttgatcagcatgtcaatacatagggaaaatgatattggaaaaataacagtgtttacatggcattttgcaatcctttactagacgagtgttaatcaatatgctntttttgcagatgaagttttatttcttctcttaacatgacaatatataagaatatttttatatacatgtcttgttgatgcacatttatattttgtgccttttcgctttatggctttgtgtagaatgatagctaanaaaattattacatggacagaccacaagggaaa

SEQ ID NO: 205 - DNA, 381 bp, Oryza sativa
  unsure (1)..(381): unsure at all n locations
agcttgccagattaccgatcgaggtggtttttgtttgatttgngaaaactaaaatggcctatatttatgtgaggatttgatgcttctatgtggcatgaggtaaccctgggtcggcttgggaaaggctttgttgcgaacctccgataccgacgggtgttcggaataagttcgtatcttgtgggtaaagtgtacccctctgcagaggttaactaactgttcgaacagccgtgcccacggtcatgggcggatgtgaggtggtttccgttgcgtagatttgtgtgcctgtgctttattgaaaagttgttgtggattgggaatcgtcaccaaaatcagcctacatggcagatggatgacctgagtggtcaaaaacgaatctgtgtg

SEQ ID NO: 206 - DNA, 300 bp, Oryza sativa
  unsure (1)..(300): unsure at all n locations
taacatgcanagatgcccatcaggagctctttcaagattttacatcancatccactaagtaacaagaggcccacatttaaacatcatgcaaacatgctatatctttataggttttatcatttaagagcttttcaaatacaaacatgttaaattatcatccaatataattcacataatggtgcaatatatatccttaatatggcttataatattctatatatttatatagttcatcctcacttaattagtgcttaaataattaatctattgtcccaaatatctttcctctttttttcctct

SEQ ID NO: 207 - DNA, 472 bp, Oryza sativa
  unsure (1)..(472): unsure at all n locations
acccggatccttaagtcacctgcggcatgcaagctntgcaaactcttgctccgtcctctgttttcctaccttgaagaggacaaacatgatcatatccatggtgaatgaatcccgtgcagctggactaatatttggggtctccggcaggagaccatccacaatgatcactttcccgcctttcgggagagcttggtggcaattcttcagtatcttgatgcagtcttcgtcactaaacataaggagcatccactgcataagcatgtatgaattaattttgaattatctccatctttatagcatgagtttagttctttctactagccaaatcctagtttcacagctatatcggagacatcgttcaaccttagcatcaattggtttattgtattngtactctcaaaaatttcatgcgtcacatactgtatatgaataaacattntctttctatatgactataacaacccaaatgaat

SEQ ID NO: 208 - DNA, 239 bp, Oryza sativa
accccaagtctcgcctagatccgagagtaaacgtccccgcggtgcgcgaccttttgtgctttctatatgcatactctggttatcatcagattctcatggctacggaggatgacgaaaaaactgctttcattacccccataggaacttattgctatacgacaatgcctttctggctagagaatgcgggtgctacttttcaacgtactactccaatttcttttggtagccagataagacgc

SEQ ID NO: 209 - DNA, 362 bp, Oryza sativa
agctatggacaacaaaagaaatgttttatgtttgttatacacccatccacatgctgaatccaattgtcttatagcaaagctatcaatagttaaatatatcgggcctaatcagctccacatgtcccaacaggccaacacaaccattctccagtactagatcttttctttctgtgatacacaatgtttttatgcatgttgaaccgtctacgagggtggcttggaaacaacaaaaggtagtgcaacatgatgacatggtgaaaaatctgaaggatgttaaggtataacttactttatcctcatcttcctcagtgtagggcatatctgatagactatcaaatgagtactccacatactcgccatca

SEQ ID NO: 210 - DNA, 426 bp, Oryza sativa
  unsure (1)..(426): unsure at all n locations
tactttgaggggtcttgatatttcgataattattcgtttccttattcgtttcgattcgtattcactccgtatctatattcgataatattcgattctgttttcgtatccgggtttctgattccaattccgtgaaaagaaatatgaaaacggatatggtagagctagtttccgaccatatttgattcgttttcacccctaaatgtgacaccttcttttcaacagcattangaaccaatttaatagaactttttattcttcaaaattttggatatattttcgagttctgtctcaaaatttattttgcatcaatagtttgtgtaatttatctcttagaaacaactactactataaatcacccatatttttccacggtactataccttactggcctagctttcacacacctagctagaagcctggaataca

SEQ ID NO: 211 - DNA, 441 bp, Oryza sativa
  unsure (1)..(441): unsure at all n locations
agcttctagaagtggcagtgaagaggaactctatagagttatataaagatagagatcgacgaggttcaaccgaaccaagccgccgccgtcgccgccgtggccgaagccgtcgatgaatctgttcgttgcttgaagttctcctgctactgccttttgtattcatctcctttgtttgtttgggccttggcatggattagcaattgagtcagcccatgtgtagctcaatgggttcctgacaatctcctctccttgaaattcgacttgtccacaagtcgatgacaagtaaattgcagaaatggcaaacctccactttgatttctccagtattcttgcatcgntccaaaagcttcatcaatgtccaatttgttttcagcttgccaacagaaaacttgcgtctcataagaacagctcaagcaaatcctggcacttcgcatgtgaaag

SEQ ID NO: 212 - DNA, 404 bp, Oryza sativa
  unsure (1)..(404): unsure at all n locations
ctcaagccttattcttgatgatatgcgtgcttgtgaaanatctttcttgcaggaacattatacatttgtttgaaagcagntaccttcgcgagtttcagagttagcttcactagcctcggtgagttctgaaggaatacaattagtgcatggaagtttgcatccaggcaccattcaccaagagtcaggttgacaacatcgacaaattccggacaccattgcgaattgtttgcaatcatcagctgcaaaagatttaaatgattatacacttccataatcaccaaacttgcccaactaagagcactaatgtctcttaattntctgtttgtacattgccttggaatgtctcttaattntcaaattaatgctagcatagtgtccgtgcattggaacacatctccaataac

SEQ ID NO: 213 - DNA, 449 bp, Oryza sativa
tgcaagcttgctcctgtatggcctccggcggtagtagttgtctctacgtggcactggaaataataattcttgagtatggcacctgagtctacagtggagctccatggcaagggtggtcttgccaatgccggcgggtccaactatggccatgacccggagacccttgtcggtggtcatgagccatctgaacatctcgtttgccatgctgtcgatgccaacaagatgatcattgaaggcaccagcctcaacttgggctgcttgatgcggcgaaggcatgaactccgaacttgggagctcgaggcgtggatcactgtagcactcactgtatagactgtacgcctgtcttcggaatgttatactctaaagacctttggcggatgaagcaccgcatggctcttctcagcatctccacattatgtagctcttctccgtactgatatacagagata

SEQ ID NO: 214 - DNA, 227 bp, Oryza sativa
  unsure (1)..(227): unsure at all n locations
cctcaacncggcggcaatgacgaccttttaatcttaacccctgtctctagggagaactaggtggtacactggttgacctcgggggggttgactgggccgatagactgccaggaagggaaccacctatgccgtagaaataatgcatacagagacagcgacgcacgcctaatgtgagcagtgcacgctcgcgcacttccgagcaccttctctcatgcgtgctgagtggt

SEQ ID NO: 215 - DNA, 439 bp, Oryza sativa
  unsure (1)..(439): unsure at all n locations
agctntgcttttctgccttcataatttgctatgcacatgctgggcatgtactggatgacctctttaattgtttctcccgtttctgattttctatggtttgctagtaccttgggacttgggatatgctgctgaaatgaagggcaagcatgtagggcagtactcctgccttgctgcctgcattttcacaaattcataatgtagcaaacacctctaagtggacagccgatcattaaggatccagtggaaccatctcatgtgcaaaagtggacatgattctgatggacacatgaactggattctgaaagttcttggcagcaaccctaacttttagcttgagcattgcacattattttgcccagaaagctcttcattttccttgggtgatcagacaagctcacaagcaacatagatttgactaaacagatggcaccaatccacc

SEQ ID NO: 216 - DNA, 180 bp, Oryza sativa
  unsure (1)..(180): unsure at all n locations
tggcggcatcccggacccgngcgcgcgcatcgttctctgtcccggtttgaactcctccagcaccatccatggggagaagccggggtccctagcctggtaactcgctaacacgagttccaccgctccttgggcgaggtccctcgaggatgacttgatggtcttctcgaattccttggggag

SEQ ID NO: 217 - DNA, 458 bp, Oryza sativa
  unsure (1)..(458): unsure at all n locations
atcttaagcaccgcggctgcagctgtagccaagctggaagtaattttttatctacgcaagtggggttaagattctcttgaaattacttggaaaaacatttttctagataacgacttgaaaaaaaatgcatgaggatttaacttcttgaaagcagtagattttgaagaatcgggaggggattcaaagatcagagcaatttcgtgattgccttaatatgaacataatattgcattttgtgctaccttaagacatgatgacctcaatactttttacaaggtttgtgttgattagcatgctcatatatgttcgtgctagactctagccatactgaacctttgacttctttggtatcttgaacaggtttacggttcatcctgagcttgaggctgggaatcgtataactcttcctgcatcttgcanatccaaggtatttcatgtccttggcattattnttctcg

SEQ ID NO: 218 - DNA, 437 bp, Oryza sativa
  unsure (1)..(437): unsure at all n locations
cacttataatataatacctcaatttcatgatacagggtcttgttctaaagtataaaggtctacatgacactgttaattgtagtactgagtaattatgtgcatcttagtaagggtaggcaaatcagccttttctactccatgtgttcatttcgcatttttaccatttcatctgtgtgcaaagtagaatggaaccatataaaatgagactacgagtaacacattntgaagtagatggattttgccatttctttagtctgggtctgataagacgtatattctatattcctttaaaatgattctaatggtggtggcagnnaancttcccccacactaccaccattattgtttacccattacactttgacattctaaattctcctaacatctatactctaaatattctccatttactatcaacttagtggtactcctcgttg

SEQ ID NO: 219 - DNA, 365 bp, Oryza sativa
agcttggagcctacaatgcgtgtgctttgctcaccgtcttgtcatctcttgcattggcggcaatcgtcacatgggaggaggaataaactgatttatataatggttgttttgcatgggtccgcttcttggtttttgggagtcaattttagccggtctcttcgagggatagctattttcagatatcaaatctcatttacgatttctaaaatcagatttattctttttggggggaggggggaatttatcccatctctttgtgatatgctctcggagcatctacaagagatgcccacacagggttccttaaggttaatttcaggatattaattaaaataaatatgtttcgaacagatataccccaatat

SEQ ID NO: 220 - DNA, 310 bp, Oryza sativa
tgatcagctgtctgagggcccgatcaagtccaatatcgatcggcttgaagctcgtaagattgatctcatggcacaccttcaagaatgcaacgtcgagctggatatggagcacaagaagctagccgatctcccgcaagctgtcgaagaacagaaggcaaggctgaaatcggctattaagaatgtcgctgatatgaccaagtccttgaaagtcatccctggaaccgatgctcaagatgcccaagccatagaagaagtagaacaaattatgcagagagctatatcggctattcagcgatatttgtcttagtga

SEQ ID NO: 221 - DNA, 212 bp, Oryza sativa
agctgcaatggaaaacctgtctgtgggaccgattagaattgttccctttcagagtcatcttgtggcttggcatgtccacccaccaatcaactttttctcctacttgctgctttttgtgagtttcctttgtttctgtgtctcagtacacgatgaaatagaagaaatatagcatgtttttctgtgttacatttcaaaatcttcatacatacata

SEQ ID NO: 222 - DNA, 275 bp, Oryza sativa
tatcatgcattggagccaaagatgatctcagaattcttattcttgagaaaaaaaatacaggtactgattggagtgaaactatgatggaaccgctaccggattggtctactctatctgccaagggtattcaacatcacattcacatatctcccggggttatgaattgatggtacaaacaggttaaattaccggtaacaagttaagaataactatatttactatattattttctttgaagatgaaaaggagttggatgaaaccgaaacagtaaccac

SEQ ID NO: 223 - DNA, 326 bp, Oryza sativa
ccaaggacatcagatctaatgcccattttgcgatccgcccatttgcttcacgattgtgaagaatatccccgaggggaaacgatgtaaccaccgtgaccgagtgaccttggaaggattgagattatttcctgacggcgattagaacaccatattatagctgctggacctgaggatatcttgtcttggagtcggccaaaaccttgctaacgaagtagattggtcgctggactttctggacatggccttcttcttcacgttcaacaaccaggaccgtgcttacaacctgataagttgccgatacatacaacaatatcggctcttgctaa

SEQ ID NO: 224 - DNA, 436 bp, Oryza sativa
  unsure (1)..(436): unsure at all n locations
nggagtgtgtgtgagaagtgaaagagtttttttttattattgcagatatgacggcgtaactatgcaaattgtcggaaatgccccgcaaccgccatcaagagagcatctggagcatccataccaaaacctaaatccaacggtgatcaccacggttcgcaaccagggctaggccagatggcccccaaattcggtctgggcctcctcctcactctgccttatacatttctccggtaggtgggtccatctactggtgttttgatggagtttaggagcccaactcttgtatggatagaattcttcttcactttagtataaaaatcctccccacttcagtgggttatagccttgatcccaatatacactaatactcgtggaatatattaaaaatgaatcctatcactatgttggatgttgcatatctataattatgtaggat

SEQ ID NO: 225 - DNA, 417 bp, Oryza sativa
  unsure (1)..(417): unsure at all n locations
agctttaaattgctcaccatccttcagactagtgccataactgcctcacatctcactggctactccactccaatgcaataacctcctcatcttcaagctctcatcagctagcaatccatattctcagcagagaaaaagatctgcattttcactgtgctttgcagagaaaaaggatggaggagacgtacaccgtgaaggtgggtgaagcaactccggccgccggcggcaagccgtcggccgggccagtctaccggagcatctactccaaggatggcctcatgaagctccctgaagatatcctgtccccttgggacttcttcaggttggtttcttggcatggtgcccgtcaatttgacaatgcattattcaatttgctttcatcaagattgtgctaatnttctagtgagaagcttgtat

SEQ ID NO: 226 - DNA, 357 bp, Oryza sativa
  unsure (1)..(357): unsure at all n locations
gtatctcaatgaattggttcacatgaacatgctacagcttgttgaaaggaactcatttggcaggataaaagcattcagaatgcatgatatcgtacacgagttggcagttgatttgtgccggagagaaatgtttggtgtttcatacagttgtgagaataagcgtttcgagtttcttgaggagaatgatgaacgacggatggtaatacacagattagacacggatattaatcangtaatttcaagtgaatgccgccttcgatctttcatcgcattggataaagccatgccatcatccactctgctacctctgctatccgagaagtgtagatatatgtcagtacttgagttaagcggcta

SEQ ID NO: 227 - DNA, 401 bp, Oryza sativa
  unsure (1)..(401): unsure at all n locations
agcttgtgaagaaaaaggaacagttntatggagattattattggctggnttggtgatgaagaaaaggcacgtgaaaatgcatgggtatttttaaaaaattaaagtcaaaatgcatgaaagttcagactataacggataatggataatataaaataagtgtttgccatttataaaccacgtttttctttcttttttgggtcattttctcaaggtgttgttgatctctcaaattcgtgaatgtattttgagccatgtgtttttcatttttttttcctccttttgtattattgcatatgatggtgatgaacaacacgtgaatattctttttgagaaacttgtgaaaaaaagtttanatggaattattggttggtctgttgacgaaaaaacgcacatganaatgc

SEQ ID NO: 228 - DNA, 412 bp, Oryza sativa
  unsure (1)..(412): unsure at all n locations
tgtttaaatttcgaggttntgatatgcttggcaatttttctctgttcaaaagctccttgggatttgctcacagcatcttgagaaaggtgaaacccaccaggggccagctgtcctaggaattgcgcttattgcaatggctgaagaattangagctgagatggctgtacggtcacttgagcgtcttttacagtatggcgagcagaatattagacgggcagttcctcttgctcttggcatactctgcatatctaatccgaaggtatgcaacatttgaccaacataagttttgttaaggatcacgatctaagttaaatttgaagtaatgctttgatgattaagtgtaaaaaaaactttgagagaggatgcagaatctaaactccagttcaatgaaagtgtgatcaatttgtttatg

SEQ ID NO: 229 - DNA, 446 bp, Oryza sativa
  unsure (1)..(446): unsure at all n locations
agcttagcaagtgtgagttctggttgctttttcaaattcttgnggcacgtgatatctgctaagggagttgctgtggaccccgaaacagtgaccgccgtcaccgattggaagcaacccaagacagtcactcaagtccgcagtttcttaggtttggcaggatactaccggaggttcatcgagaacttctccaaaatcgctcgacccatgacacagttgttgaagaaggaagagaaanttgtgtggagcccgcaatgcgagaaggcattccaaactctcaaagaaaagctggtcttctcgccagtgttaatcttgcccgatactcgcaaggatttcatggtttattgtgatgcttcgcgccaggattggggtgcgtgctcatgcaggacggtcatgtggtagcctatgcctcacgtcagctacgacctcatgaaggcaactaccctacc

SEQ ID NO: 230 - DNA, 445 bp, Oryza sativa
agcttctcgggttcttggtctctgcccgatgtatctatgccaaccccgagaagatacgagctatagagcggatgcgcccccccagcaagcttagggatgtgcagtgcgtcaccggctgcatggccgccctaagtcggttcatatcgaggctgggagagaaggcgctacccctatttaagctcctcaaatgctccgggccgtttacctggacggaggaggctgagcaggccttcactcagttgaaggcgtacctcagttctcccccagtcctggtcgccccggagccagatgagccgttgctactctacctggcggcaaccccgcatgtggtcagcgcggcgttggtcgtggagcgcgacgaggacaaccctcactccgcgcatcctcaccctgtgtcgactcaacccgggagtgagcatggaggagaggcccccgagccgaacgg

SEQ ID NO: 231 - DNA, 369 bp, Oryza sativa
ctgagctgcagctcataccataataagaaaagttttttttttaaattaaagaaatgattgtaagcatgatagaaaacagcatccatagtaaacaaacttgatcaaaactataaaaaggaccttattggacaataatctgagtacagctaaaataaaaacagacatattgcctaaaaggcatgtacagatttgtaagtagaccaccaaatatgatgatatcttaataaagaaaatctacacccaaaagggcattctagatatgcctggatataacactgacctctcaactgactggatgacctggcttaatccatacactgatctgcagaatcaagaaatttatataatgatacaatatatgtataagat

SEQ ID NO: 232 - DNA, 322 bp, Oryza sativa
  unsure (1)..(322): unsure at all n locations
tatcattaagttagtactgtctcagttaggtccgatctagtaggttntgatttgttaaatatgtttgttcgatttgatagattatgtcgaacatttcatcaaagtctcagccgatgatctatctatttactatcaattgaatcaccacatcgactaatattcaaaattatatcattgactatcttttatgtttattagtttcagtcttatactgactcggtttgatccgacctatcaaagattgtccctaataaagaaaaaggtattaaaattatttttttagcctcagaggatgatagtataatttgaattatattatata

SEQ ID NO: 233 - DNA, 438 bp, Oryza sativa
  unsure (1)..(438): unsure at all n locations
agctgttggttcctgggcaggacttatattttttagagagggtccctctcttccaaacatctctttaggtcttagcaccgtatacaatacgactagggtcttgtttggtttcatgggctaatgtaagaatttaaacatgtgggctaattttgatctaaaatgaattatcccccctcaaaacattagcccctccaagagatgctaatggagctaattttgtgtgaggactataaaaaccagctctctctctccttctctcccctctctttctactctctctctctccaccttttagccttgaattaactcatggatccaaacatgccaccctagactaatatttagcctaccaatttatgactaaacattggctcttaaaattagccctgngctaatctttccaacaggcatagtacaatactcgtacgtatcatatgc

SEQ ID NO: 234 - DNA, 450 bp, Oryza sativa
  unsure (1)..(450): unsure at all n locations
tcgtcacgacgtccagatcacaggctcacagcaacgcactatacgagcccttcaacaaaaatcactaacctgactcaacaacgtacttggagaaagaaacgcaggtggaacaaattatcagtgccaactgccaacaatcaaacgcgcccgtgacgcctgtactgctgtacaagccgccttggcagtagactgctgcaaaggacaacggataaaaggcaaagtgtaccagtctctgtctcttggatctcatgttctttggttgctttacttcccaaaagccaaaggagaaaaaaaaaagcaaatgtattatactgtcgagtcgcatatctatacatatttgcagagaagttatatcttgtaacttctcgtacaacaaagaacaggttgaactgggaaagctatagagcanaccactaaaaanaagaattgggattccaacacagaaggaac

SEQ ID NO: 235 - DNA, 411 bp, Oryza sativa
ctgcaagcttgctcaattcttttgctcagtcaactggttcttattgtcaatttcagtaaatccagcatatatcctcttaatctttcttctaaaaaagctgaacttctggctgaattgttgggatgtcctattggtactttaccttttcacatatttaggactgcccatgggcactaccagacctagagtggttgattttgcccctttggttgatagagtggaaataagactcacatcaagctcaatgtttcttcctcaggggggggggggggggtaatctacccctcataattcacttcactctctttatagtaatattcttatattatctacatagaattttctcaactaatttcctaaactttattactttcacccttctctattaattgcaatatatctagtatttat

SEQ ID NO: 236 - DNA, 392 bp, Oryza sativa
  unsure (1)..(392): unsure at all n locations
tggttgaggtcatgaagaaggatgcagagccgaattcctttcttataatatcatcatagatatgctttgcttgggtgggagggttgaggaggcgtatangatacttgatgagatggagcatgctagtttgtttccgaacttgttgactgtgaatataatggtggataggctgtgcaaagcaaggaagcttgaggaggcctataagatatttgaaagcgcaagccagagaggttgcaatcctgattgtgtgacatactgttcacttattgatggtttaggaaagaaagggcaggttgacgaggcctatatgctatntgagaaaatgctggatgcagggcacaatgctaatccttgtgtatacacctccttgattangaatttcttcattcatg

SEQ ID NO: 237 - DNA, 356 bp, Oryza sativa
gtgtggaaattacagggctgacaagagatatgttgaataaccaatcaagcacctacgtgattatggccataaaaggctatagtcttagataaccaagcgttctaatacagggaaaatcagatgttgagcttgtcagaaccgcataatggagagatactttgaaagacaaaaactagtagttacctgccattggacataaagacccttgctcttgtactcaacataaaggcatcttgagaattggacaactgcactgacaaacaaaagattattagtctcattcctatgtttcctcacataggtagattgcaatgacgagagagacagatagagagagagagacagcctctctgttc

SEQ ID NO: 238 - DNA, 380 bp, Oryza sativa
  unsure (1)..(380): unsure at all n locations
acaacttaagtcaagggaaaagggctcacactccggaggatatccaccggacatacccacaagatgtcactcactcctatttgacatgcccacttctctcttggcttangacttgagaaaccttatcacacttgggtagacaagcccccaaaagcgactacatgcataggaactaatatgcgcaagatcttccacaacttcgttaataaacccctcttgatagtaccggcctttctaccaaatccggctacaccaaacaccaagaccgggaaaaactaataaaacaatctagcttcattaacctttgcttgcgcactcatcttggggcaagcttgaccgagacaacacttgaacctccggtgaaccagtttatccatgtc

SEQ ID NO: 239 - DNA, 446 bp, Oryza sativa
  unsure (1)..(446): unsure at all n locations
agcttccaggaacagtctatgacggtgattattttttgtcatcgcgttggggctccatcgactctgtgatggtcaaaagtaaatcaacgtggggaaagcgacggttcgataagaaaatggatgggtgagaaaatgaacgagactaacgggtaatgtatgggtgtttctataagaaattttaggttgagaggggtttggatgcaaaataagtaactaaagcataaatagaggacttaaatttaaattattgggctgaactgaataattcaatcgtgggtccgatgagaccacccagtgttgagcatgttaaggtagccatatcttgaaagaaactacctatacatctgtcgataaatnttctatcaaaaatttaagagttctaaatacaatataaccgcgtagtgtaattatattgtaacttgcatantactgtaatataacaactt

SEQ ID NO: 240 - DNA, 331 bp, Oryza sativa
  unsure (1)..(331): unsure at all n locations
tgntgctnntacacggttacctcatactgcttccactgtatcagtgcttctgttataggcaagagaatcaaatgtccaagaaagaagcaaccatttttcatgtgattctcctaatgtaaccaagtgcanacaagtgaagtagacaagtatagatggctagacttctctccttgttaatttcctcatgcacaaatgggcttaaagcaagtaaccaaaagtgtaactgatgaaatagacagaagagtgtggcagtcaaggagccctttacccttctgatgactcttcagtctgcagccaaaggcaaaaaaggctatagtattatgcatagccc

SEQ ID NO: 241 - DNA, 374 bp, Oryza sativa
accgagtgcagtgtgtatctacctacttctcaattgatgtggaaaagttttgcgagttcaaaaaataaaaatctttatagcacaattagtgtacatggccattcgctatctccactacttctacgattaattaaacctggccatgaccaataactctttttagaacatgattggttaatccttaaaaaagagagatattagagagaatttatttcgtatttattatagtggcaaattattattacttaagggcatgtacaaaagtagagtccgatatgagctctacgttatttagagactaacaatcctacaacagttagagacaatatggttactaatcattaatatatcaaaagactctttcttactattat

SEQ ID NO: 242 - DNA, 239 bp, Oryza sativa
  unsure (1)..(239): unsure at all n locations
actcacttccacaaactttgggctcgaaattaatctaatttttgntagaaccgctccaagataatggtgttttgaggcctgaataccaatcccaaacgtgtatgactttatctcttggtttttattgacccaaactgaccttgtgaagtataaatggattttgagaaaggccttgatttgtccccaatcaacttctttgatcattcatgccttctttatgcttgggctctttttattac

SEQ ID NO: 243 - DNA, 374 bp, Oryza sativa
  unsure (1)..(374): unsure at all n locations
tgctgggtgtttctcaacgtacaaactgaaatccgtgcttgcttagagcgtggaatccagcgtacttctccaactcatgatgtctattgtcctattcacaagacgaagaatcatgacttctcaagctgcaaggtctttctccgcgccatgaagacgacgcctcctaaggtccggcagtcaggaacctctctcgaggatacaggcaaggaacaaggagtgacgttgacctcggattgattcgttggagtaatcgacatcaatccccacgagccatcggtccttcacttactcgaagattgtggctcgtcatcttccagtacaccacgcgacgtgttngccatcggtgggactagcacatccgcacaggctaacgc

SEQ ID NO: 244 - DNA, 444 bp, Oryza sativa
  unsure (1)..(444): unsure at all n locations
agctntngcctgtaaaggaggaggctatatttttggttaaganaaaatcaaactacccataaggtgaacttgatacagcaacagcttgtaatagtttttcagggacattaccagtttggcacaatttccacatatacaaagttttgatctaacacattatattgctctagacattctaatattctttttttgaatacgcaagagaagtgcatatcatttcattaagagaaggagagaataggaagggagcaatgcccaaaaacccgattggaaacaggctgaaaccttcacaacacacgcaaaaacctcacctccccagtgttatcgacctataaaggaactccttatgcctatatgccctggctagcaagcacatgcctcaaaccatgaagagtgctgttgaatatgaagctcatgcaccatatacagtgtaaacaggactac

SEQ ID NO: 245 - DNA, 406 bp, Oryza sativa
  unsure (1)..(406): unsure at all n locations
ctcaagctnggatatcagtttcaagctaccagtgcttggacagcagnattattagatgtttaccactngcaaaaatgcgngtttaattaacaatgctggtaccccatcaaggatttataggcactactacagaaaaggatatgtgtccgttgccaaccacatatgggtgccgaatttggcaacaggaacctctttgagttctctcaaatgtgccggtttaaggtcctatgaatgaaaaaaaaaaaagaccggctcgatgcatgcatcgaataagtccccttcaccccaaccagatctgattacacttctaattacatttaatccaagaaaatgcaagaacacttataacacaagggcatctacatcacacgctatgagaggggagggaaggcgctacccccgggtg

SEQ ID NO: 246 - DNA, 427 bp, Oryza sativa
  unsure (1)..(427): unsure at all n locations
agctntcatttcatcgaattaatgttttttattacgagcggcaaattggacactgaattgtaccactaatctgtctgaattgtactactaatctgtcatatcagtcgcttcatatatgattgtctactacaatgcaagttgtttcaagttttctttctcaagagataattagtctgaaaagttatgtgggattactttgctaagtgattttacagtttgcatatctctatctacgctagctttaggaaaagctcgaagtggtagattctatatcgtgtacnanaagaaatttcaggtggacccaattaattatgtaatcttttatacaataatactatgttttttggcacatctttttttttaataaagaaagtgcataatgtgatcttacaatggtcactgcatttggcttatattgatgaaaaaa

SEQ ID NO: 247 - DNA, 290 bp, Oryza sativa
  unsure (1)..(290): unsure at all n locations
tgcttcgntaattagtttgttggctaatatgtcaagattatgaagatgtgtcatggaagctgcgtcgtgtattatgagttgactgaaagtacacgcggcgacgtgttcttttcttacagggcgcgctgtgtcttgtagtattattagttgactagaaagtacacgctgctttgccgcgtgaggcctgccagtggtttcaaatncaccccgcacctacaccaacccaaaaacaactacactagcccacccaatccaaaccaacccacacaatacacgcgaatcaatccaat

SEQ ID NO: 248 - DNA, 438 bp, Oryza sativa
  unsure (1)..(438): unsure at all n locations
agcttacatgttatcacaagattttataatttgttgaaactaagaaagaagccaaccaaatatataattattaaagaaaggtggaaaaaaattaaaaaaatgtatacagaccttatttttattggattttaccactgctaccaggaccttgctaggtttggttacttgtctatttctgagaacatcatcatcaaaatcatccaacatatgcaggtatctcataattattaacaaaaaggcatttaaaagctaaaaccatccaaatatattaaatgtgtcgtttaaaagagaaagagatggcacaactaatgactcacctatgaggagttgtcctggtgtttgaaaccttctcangcttcaactgcgtgaaattatagagcccttttcttcacaggttgctcatacttccaacatatcaaggctctgtgagctgatatg

SEQ ID NO: 249 - DNA, 397 bp, Oryza sativa
  unsure (1)..(397): unsure at all n locations
tgtggaagaaactccattctatggctggtgcacgcacttcttctagagcaaatcgttgcacgcgcacacgcaagatcttttcgtcgagcctcttacgcgaaaacggagctgccacgaggcaccattctctttgtgatcttttggatcgaattcgtattataagatttgcttttccaaattcaacttaagtacccaggggcttggacatgcatgaaagttattgcatatattntctgagaagagaacagtccattaccccatacataagtccaaacattcttatcatcagataatagaatcagggggtcagcttcactcatggattcatattgctggaaagcttggtcagataaaggcagaagcaaaagctgtgatatgcttttagtagaagttatgc

SEQ ID NO: 250 - DNA, 442 bp, Oryza sativa
agcttgtactgaattcttttacttaagctcctatgaatgtttaatgaaatagtttgaaactgcgtatatatgcccacatgcagcactggtaggacagtgattcatttgttttattaggtttgatgaattccttgatagatgctacactacttatttcattttgctgctaaaagtcaggttcattcgaatatcctgttcaacctcattttctattcgctcagttgtttgtacgtactaactctgaaagaatatgcatggtgggatggtttaggtttgaacacttcctttcattcaggacttcatatatcgatcgcttatattttactaacctatgttgaaatggacatatggtgagtctctccgacgaccaagctgaaaggtcactactcatctactatcttatctcccttaatataagggattttgacactttatttgcact

SEQ ID NO: 251 - DNA, 383 bp, Oryza sativa
  unsure (1)..(383): unsure at all n locations
agcttaactgtntaagtgtggtgatttcaattctgacctgtaaatggtcctctatttttttttacagccgtggaaacaaattcttatgagaaagcccattttgccctttgtgcttcagaacatcgagcctacaggacgatgactccacacggatctgacgaccggagctcagatgatgggaggagctggtcaagggcacacttcagcctgcaagtggggtgggtcgacccgttaggtccgtggcccgaacctaaatttgtggcactaataggttttcgggccggcccatattttcttaggtgacaatgggtccaggagtcagttgaccctagggggttttgggtcggccttgttcgagcgctccgcttgctcgcgttcacatg

SEQ ID NO: 252 - DNA, 256 bp, Oryza sativa
  unsure (1)..(256): unsure at all n locations
gcttactgaaattactnttatatgtctaagaagctattgagtgaaancattttttttttatatatatnacaaaagtgagttgtgattttgcatcacaatataatcctatgagatcttgttgtaaagatttaattcttacgaacacaaccgtataatcggatcatacatcggataaatagtttaagagaacactctattctaaacatacgtgaaatgaatatattctttacttacttgatggggactagtactacag

SEQ ID NO: 253 - DNA, 385 bp, Oryza sativa
  unsure (1)..(385): unsure at all n locations
agcttaaccagtatgagatattcagtgatattttattatggcatgcgcaatacatatcgcttgatagtcgttaggtggatccgacttgtgtgtgctgagggttctatggtttgggcatcttgagcgtcggttccaggaatgaccttcaaagattnggtcatatcagcaacattcttgatagccgattataaccttgtttttttgttcttcgatagactgtaggagatcggctaaccttttgtgctctagatccagttcagcattgcattcttgaagttgtactaagagttcgatcttgccagcttcaaagccgttaatattggatattgatcgggcctccagataattgattgagcttgggcttttctttatgaacaaattgacc

SEQ ID NO: 254 - DNA, 448 bp, Oryza sativa
  unsure (1)..(448): unsure at all n locations
agcttggaccttggatatagaaaagggagcttattttaataacacacttttgtacctcaccattccattaccactttgatgatttcagttccaatataggatgaaattgtgcactcgtgcaatagcgtgttggagctcttacatctaacatttacgccaataacaaaacttaggaagacacttcatcatgctgggagaggaactctattatacaagggtacacttcgtggacagcctacatgataaaacataccacagtaaacaaacagctttatatcctttaagtactcattaatgtaaacatacctttcgccctccaaccaagtcataatgcgcataatgagggccttcgggctttccaaanaccttatatgtcaccaaatgctgaggaattaacttcaccgtttctgcaaatacaagaaaatgttgttgtgatatgtatttatga

SEQ ID NO: 255 - DNA, 316 bp, Oryza sativa
  unsure (1)..(316): unsure at all n locations
actcaagcttttctctagtataactttacatcccactgacccactctaccagnnngaaatagtgttagcctatcacgggcaatgaaacacttgatgaattgtcttgaatctttattctaatgcgccctagaaattagctagctataggttcaattcttcgtagtttgaaccatagcaaagagcccaagatatattaacacttgccagatcttcttgtttttttttaaatggggtggtccaactctagcccaatatgtatgtataattcattccagcaacgtagagcctcaactaatagatacccgattgcccattt

SEQ ID NO: 256 - DNA, 229 bp, Oryza sativa
agcacaaaggcacgacgaagggctaatatatggcacaattaaatattcagaagatgatgtctcaatctaccattccactctactaaacttattccatatgaattcatagatgttaaatacttaaaatgggactgcagtgggtctctgatggtagcttgatagccataacgaaaagagagacataaataatgaattcatgcagaggctacaaccaactgcaaataataag

SEQ ID NO: 257 - DNA, 332 bp, Oryza sativa
  unsure (1)..(332): unsure at all n locations
caatactcaaagctgccttcngaacatcagaaaatatactgtcagagacaataatctatctgttacggcaacaggatttctgctagtgactaaaataacacaaaaaagaggggcttctagtaccacatctggtaccatactacgtttactaccattggcaccaatgactcctacgagtacaagagatttagtacctctggttaatgggttacattatgcatccttacactaccatgacattggcacctaaaatgcttatactatcccgggcctctaatgtgaaatcctttttaaaattgatccctccctaaaaaaaaaccatcctaacttta

SEQ ID NO: 258 - DNA, 342 bp, Oryza sativa
  unsure (1)..(342): unsure at all n locations
agcttggggagcggattgactgagactgttcacttttaatgcgcngcgctatctgcccgcgatgaacatgtgtaacctactcagccatgcccttttgtggaggctctaagcgaaatgacggagctgacgcatgagctttagaaactgttgcatgtaaagaaaaggtttcagacactggtgcatccgcattctgatgtgctgacactcaagactatctctcactggaatggtgtctacttttggaagattctgatgtgctgacgctcaatattatctcttactggaatggatatacttatgaattttggctaacattaattcccctctacacaagattgaagc

SEQ ID NO: 259 - DNA, 361 bp, Oryza sativa
  unsure (1)..(361): unsure at all n locations
actaagcttgtcgtnctagtagcttattgcatctagagaaagaactcttgtgtgttttggggtgctaaacaaattgtcaacttgctaaaaactaattaatgaagcatacattatatgatgatggctgggttggtattgccgttgcatcttctgaaggtaaagtacacatgacatttgcttcatctaagttttctgtcaagttcatgcaaataactggaactcgaaggttacattttggtcagagtctgaacaaagcagcaagctttgagtgtttattcagacagattattaaaccatatatctggatatttttctctttctttttctctaactaaccttgagctagtagtatcattatttg

SEQ ID NO: 260 - DNA, 445 bp, Oryza sativa
  unsure (1)..(445): unsure at all n locations
cggatccttaagtcacctgcagctgcagcttacaagtgtgagttgtggntgttctttttctaatncttaaggcacgtgatatctactaaaggagttgctgtggaccccgaaacagtgaccgccgtcgctgattggaagcaacccaagacagttactcaggttcgcagctttttgggtttggcaggatactaccggaggttcatcgagaacttctccaaaatcgctcgacccatgacaaagttgttgaagaaagaagaaaaatttgtgtggagcccgcaatgcgagaaggcgttccaaactctcaaggaaaagctggtttcctcgcccgttttaatcttaccggatactcgcaaggacttcatggtgtactgtgacgcttcgcgccaaggattggggtgcgtgctcatgcatgaaggtcatgtggtagcctatgccttacgctagc

SEQ ID NO: 261 - DNA, 158 bp, Oryza sativa
  unsure (1)..(158): unsure at all n locations
ccttaccttaatcttcgcaaagctgattngacgaccgacactggcaagcagcccaaacgacgcaagcgcccagccaggaacggccagcgcaaattaccatcgagtggcgcaaccttacgacaacatagcaaagaaattccatggcaaagagttttaat

SEQ ID NO: 262 - DNA, 344 bp, Oryza sativa
taacgtcttcattagttcaaggttgtacacgcatgcattctatactttatacaaatttacaccccacttaaatcccacttacacaccacttacacatataattactgtgtaatttttagacttacatatgtaattgtgaaacttacattataaatacactaaatttacatatgtaatttatggacttacaatgtaaatacatgctaattattttttgatgaaaaatatgacgtcacaaatatagctactcccttaaattaagaaaaactaaaacaccttactcgtggtcaggcaccaaaaggactcacacgagttggtgcacaagcacaactgcgcactgctgt

SEQ ID NO: 263 - DNA, 363 bp, Oryza sativa
agcttcccttattagtgtgagtgacggtgtcttgctcttattcacccagactgcgacaaacgtgatccggaccaacctcgcgggagggaactggatgtgctccgtcttctcatcgagcacaaccctagtttccgcgaatcttccgcaatggagttggagcatcgccgatcgtcgtaaccacttgccagaagccatcgatttgggggagagaaaatctttgggggcgtagagaatcgctcaactccttgtcgatcggtcgattctggcggcggagaaattgggaaagaaaagcccccgaataaatgaatggacgtatttgctaaccacaaataaattatgaatacaatttgtctatgcgttctt

SEQ ID NO: 264 - DNA, 375 bp, Oryza sativa
gcggcaaattggacactgaattgtaccactaatctgtccgaattgtactactaatctggcatattagtcgcttcatatatgaatgtctactacaatgcaagttgtttcaagttttctttctcaagagataattactctgaaaagttatgggggattactttgctaagtgattttacagtttgcatatctctatctacgctagctttaagaaaaactccaagtggtcgattctatatcgtgtacgaagagaaatttcacgtggacccaattaattatgtaatcttttatacaataatactatgtttttggcacatcttttttttaataaagaaaggcataatgtgatcttaaatcgacactgctttggctttattt

SEQ ID NO: 265 - DNA, 368 bp, Oryza sativa
  unsure (1)..(368): unsure at all n locations
gacacttanaaactcaagcttgcttcgntaattagttggagggctaatatgtcaagattacttttatgtgtcatggaagctgcgtcgtgtattatgagttgactgaaagtacacgcggcgacgtgttcttttcttacagggcgcgctgtgtcttgtagtaatattagttgactagaaagtacacgctgctttgccgcgtgaggcctgccagtgtgtttaaatccaccccgcacctacaccaacccataaacaactacacttacccacccaattcaaaccaacccacaaaatacacgcgatccaatccaatccgcaagttgttctccacaagcaacccattggatctacccacagcctgtttggttggg

SEQ ID NO: 266 - DNA, 398 bp, Oryza sativa
tcttcaccctgtgcccaagcttccggccaagctgcgtcaagggtcccttgcatggagttctattgtggtgtttgaaaccgagaattaaaatatggtcaactaatatgtattagaaatattttatttaattaaagcggtattttttttctcttatatttcaacatacattttatgtggtggaaaattagtgagtcggatgagtggatcgatatgtgggctaatatgggtcgggttgcgccaattttttctcgaaatcaatcggtatatgcaggtacttgaggtcaactttaatcaattgcatattggaaccaaactcaaagggagttgtggtctaatatgatcaagaatggtatgtcatgaggtgtgatgtaatcatgtaaatgtacatgatggacgga

SEQ ID NO: 267 - DNA, 238 bp, Oryza sativa
ctatttggcgctcaaagtgttttatgtctttgttgtgttcacgatgaaggattgattcatgctacaagaaggaatttgtctcaaggtggagtttgttgagttgtgatacaaatttatttgcacttaataaaggccagcggagcccccgcgaaacggatcggtatcccttttaaggttccaccatatatatacctcatgtaagccgctgtgtggcgatattaactccccaaatatagtg

SEQ ID NO: 268 - DNA, 442 bp, Oryza sativa
  unsure (1)..(442): unsure at all n locations
caagcttgccttatatgcagctcatttcttgtttgttcaaacctgcgtcatgcagatattcatttcttactagcttacctgaacaaaattgcctaatgcagatgttcctctgttgttataggctatagtttagctgatgaaacttgcttcgcgagggacacactattctttgcagaattgcagtctttgaaaaaaaaaatgatctacgcgaaccttcgagtttcagcagttcaaacttgctcctaaagggtttacaaatgcaatggaggctaaaaaaccgcacccctgatcggtaattgtagttaccgaanataaatagtacaacccagaaaaaaatagcaaacatttaaattttagtttgattttcgcttgattttgtgttcaggaggtctcacanaccagaccagcatcgatatgtctactgtgaatatttcatttcata

SEQ ID NO: 269 - DNA, 255 bp, Oryza sativa
caaaatccggagggacatggacgaaacggcacacgagacacaactgagtgtgacccccataacaagacccatcatcatcatcaggttgttacttctcttaaacctcgccaagaaatcaacaaatcgcagccccgatttctacctagatccatggcacaaggacgtgggagaagaacatcgcatgacgcaaagattgcggcatcttgacggtttgagggagccaatacacacacacacaccgcgtgacacatcgca

SEQ ID NO: 270 - DNA, 443 bp, Oryza sativa
  unsure (1)..(443): unsure at all n locations
agcttggcatttgttagatgcagatggaatttgtgtttctcctggcactgtacctcaaacatgtaaagcctgtcgaggtgctggtgtggtatgtatcctttgacaatcttttccccgagtatgccacatattgatatttatatatttactttaacaaccttcaaaatgttgtcattgagtgcagatattcatgcagcggggtataatgagtatagaaactacttgttctaggtgtggtggaagtgggaaaattgtgaaggtgcatttctgctctaattacatatttttatatatttgtttcttgaagattctatagttcttcatgataaataaagtcccatctgtcatggctgtctttgttcaacaatntcactcagtggcggacccagcacataattatagctatggcgaactttctaaatgtacttagtaccgaaacattt

SEQ ID NO: 271 - DNA, 407 bp, Oryza sativa
  unsure (1)..(407): unsure at all n locations
tctctgaaaatactggtgtgcaagaatagggacaaggtccanaatcttctttaataacattataatgtgaaaatnggaagtgtttcaatgtagctttataacacaacttgtattcatataaaggcaaatgacaacatctgaacttctaacctgattgagaaaatgctttcatgagaaggaatctaataaacgaaaaggagagaagataaccttctctgatcatatcaacaaaagctacatttgcagaagtgaacggttataaaatcataaggaggcagtgatttgcagagtagctgtgcacgtattaaatattttcagaaatctgaaagttgttgagtgatctataacaatgtagaacccccatttgcattcctaccaaacctgngcctagaaattttgccttgaac

SEQ ID NO: 272 - DNA, 417 bp, Oryza sativa
ctgctagctgagataacagtgcagggggacgtcttttttactttctgctgcgcttctacttcctaagactgattaaaggagggacacaaacgcacactctgggaaagagagggaaaggactgtatgctgaaatgagactgggccgcaaatgagatgacttttcctaatacggcccgaaaaggaaaaggtgaatattaattctctcccaattaatctaatcactgaaatgatctttgatttgataaaaatacttccagtgcttcaataatttcaagaataatcctgagaatacttggacactctaagtcttaacaagattataactataccatttaatgttaattcatatcgggggaattacactgctctttgttgatctgaattagaatatgactcggaacatccccgatattcctg

SEQ ID NO: 273 - DNA, 409 bp, Oryza sativa
  unsure (1)..(409): unsure at all n locations
agcttgaatcaaggtgaagaaggcgagcatgtgtttttctctccgatnaatctagctcacccaagaatccaccaaagtatccaacgagatcaccccaccgacaacatcttaggaaacatcaacaagggagtatccactcgttctcgtattacaaatttttgtgagcattactcgtttgtgtcttctattgaacctctaaaagtggaagaagctcttaatgatccggattgggtgatggcgatgcaagaggagttgaacaatttcacccggaatgaagtgtggactttggtggagtgacctcngcanaatgtgaatggcacaaagtggatctttcgcaacaagcaaaacgaggccggtgtcgtgataaggaacaacgcgaggttagtggcgcaaggggtcacccaaatcg

SEQ ID NO: 274 - DNA, 302 bp, Oryza sativa
  unsure (1)..(302): unsure at all n locations
actcaagcttaacaatggttacggacgaacatttgagttganggatattatgactgaatatcgaccaacctacgaggaattaggttgcctgttgttttgattatgaagaaacatgcacccaaattcgcctcgacgagggcttgaacttgggtggtctgggcgtacatccacgccctcgaccaacttatgtcaagtcaatttttgtgtgtgaaaacataacctttgtattttattggttattcacatatctttgctattgtaatttgttgtactgaagcgatgtcacggaaagtttatatcta

SEQ ID NO: 275 - DNA, 396 bp, Oryza sativa
agagcccatatatgtaaacgacaccgtatgccctcaagaaagaccctatcataaaggcaaccaagtaaaatcccctataatcatataccctagaagaacaaagcctaatataaggcataaatacccccctcaagccatgtaatggggggatccccaaaaaatgtctaatcaaccaaaacagacgtcctaatttccaacctgtagagagagccacgtcgttcgacgcgacgcaaccatcggtcgacaacaaaaactacgcaaggaaatagaaagtggaactctatgaccagaacagactctcaaatgcctaaggtggtgacaagcgagtatgacacaaatgttaatcccaacggtaagcctccctgcatattaactaacaagagagagagtactcaa

SEQ ID NO: 276 - DNA, 241 bp, Oryza sativa
  unsure (1)..(241): unsure at all n locations
actatgacactcagcttgttcgtgcggctttgagctgacgctcttccttctttttcgncctctgggagccaaccgttcttgaggtacttcacgaacggtgttcgccagtcctctgggtcttcgcccagttctgcctggtcgactgccatgatgtccaggctctctgtgggcacacttggtgcgtacaagacttctaagaggatgcctggtgaatgtgggcctccactggcagcggattttg

SEQ ID NO: 277 - DNA, 445 bp, Oryza sativa
agcttcctctcacagagtgcagatcatattttttgcgctcaccacttttcaccatttttctctcgaagctggtgctagagccagcgataaaattgtcgcccactctcactctctctcctcttctcactcatccagctcaacactgtagctgacgtgtttctcctatcgccagtccagcttgtactggtgtactcgctctaataaatcctctagtaatagtactgcgtgtgtcagacaagtaataacacgccaagtggcaacgtggcaccctcgtttacttacggtattagtattactgatcttctgtcgtttagagtaccacaaactaactagaatgtatcgaaacaattcacgaggatacggaacactggaagagctgcttgaagtcatcacatgggcgcaattaggcatccatcataaacctgtataactcagtgcattaatc

SEQ ID NO: 278 - DNA, 181 bp, Oryza sativa
ctgcccattgcaaaacgaatggcgttccatcaattggtgttcattgccgatatccaacaacttcgttgatatccaggtttatcttgtcagactgtggacaagagatatcattagaagatgaattgcaagcataacatgacagaaacacaaatggatgtgactacaacctgaaaagtgtaag

SEQ ID NO: 279 - DNA, 409 bp, Oryza sativa
  unsure (1)..(409): unsure at all n locations
agcttcgatagatcataccatagctacagttattgtaatatgaagtgaggtggcagaactaagggttaatcggtcatgtgggccacgctggtgaaagtaaatggagtggtctttactctagtaaggttgagagggtacaaaagccaactattgtgtaacaagaggatagaaatgaaacagagaatgggctctgtttacagtctcctccctcctctcgatccccaatttcctcgtgtaagccaatgcatgcctattcctttgacctatgtaagcttattcaggatataacacacgtggcaggacacaagtgggctagactgtcttttatgattatggaaccttgttttacggganacagcaagaacactaccataaatccataatatatgaaagaaagcttgaaaattga

SEQ ID NO: 280 - DNA, 389 bp, Oryza sativa
tgattagtgtgactgagtgcattgttattaatgcgtcttttgtctacaccatttgtctcaaaataagttcacttttaaacatgaatttgaatatatctaaattcatatatatattatacaagtgtttttttataggatgaaaggtgtatgcattactggcgaccggattaacttgcaaatgctttgccttaatttgagctgaatattggctccagctgatgaactcattgtgaatgctatccctactatagtaccaaccctagcagaaaaggattaaacaacattgaattctcagcccaaaaggtgcagcagagcatgcatggcaacatagcacttgagtcctatctacagcggccgtcatacatgtacagatgtactgtacataacat

SEQ ID NO: 281 - DNA, 403 bp, Oryza sativa
agcttgcaccaatttgtcacctttgttctattgatggagagtcctgccaacacatcttccaagcctgcaccttctcgcagcaagtttgggtgcaggttcaggctcgtttgaccctctactgctcgccgccgtcctcggactttgccggctggtggctcgctgcccggcaaactgttgcgaagatcgatcgcaagacgtttgacgccggggtcatcctcgttacatggttgatttggaaagagcgcaacgcacgggttttcgagggaacggcctcgtcggtcacgcagttgtgtgcgaccatgtgtgatgaatgggaaacttggaaatcagcagggctagttacctcgttgaatggtgctgcagtgccagctttagaaagattacagaatttgtaatttgcttt

SEQ ID NO: 282 - DNA, 256 bp, Oryza sativa
ttgtgagtgacctaagattgtcggtcagcatagcttttcttaagtgatgcggaatgctgcttactgatgatctttcaaaagggctgggtggcacgtcattgatagtcggcttatgccgtgccagtgggctctcgccacggtcactgttagctttccgcttcttctggtgaatggccttcgccgcaatcgtggcaggcttttgggtggctgtatgcggtgtgatatccttgactaacttgaactgggacaacttctg

SEQ ID NO: 283 - DNA, 406 bp, Oryza sativa
aggaaatccatgcttcgaacttacggaagcatctacatcgtctggaacatactgactccattgagcaagataatgaatctgacgatgaaaatcatgctctaaaagaagatgctacacatattgacgatgatgatgatgatgcatgatgaagcggtttagtttttatattctgtatttcccagtcactcaaatacttcctttcatgctgtaactctagcgactatgagttcttatacctactttatgtgtaaatgataagcgatattcgcctgaacctatatccggaccaacagagagtcatttggatgaataagaaagattctttattcttaactaatgcatggcaatgaaatagataatgccattgattcttgagaggacaaagcagaactggtagtgtctcact

SEQ ID NO: 284 - DNA, 333 bp, Oryza sativa
cttctattgcataatattcagagatcaaccagtctttttcgaccaaaaagcatctccaacatttgagactgaattttggaatgaatggacatcactgaatatgctctaatgccactgtacggggaatttaaacacacatgcagaatcatttcagattctgagaacagaataatcttggtattcttccctcaggataaaggattgtgaacattacctgaacaagagttatttcttcagagctgtcactttgacctggctttgaactcacttgccaggcacaactttctggggattcttccctctctactatcctaagtactcaagatgaaaaaa

SEQ ID NO: 285 - DNA, 157 bp, Oryza sativa
ctctgctgcggcacgtgagcacttgagttctgctcgccaaatggcctcttatatataggcagacagaactaacattgcatgctatgctgctctagcgcaagcataacgaacctagctagctcggagtagcaaccttcaaagtgacatggtatatgct

SEQ ID NO: 286 - DNA, 256 bp, Oryza sativa
ggcgtacacagtgaccagcaccgagaggagttccggtgcaccccgcaaggaaagacacacacacgcgcgacagtgcacataagcacaaactaccacatgagagtcccacagaaggcgacaccactgaagacacccgcctggcgggtcaaccaatggctgccccaccgtaaagcccccacctcacacatcaagaaaccactaggcagggagactgcctccgcccaactatcaagtccgccacggccatacccacacg

SEQ ID NO: 287 - DNA, 417 bp, Oryza sativa
actcaagcttgagtgcatcacatcatccattgtgattcaggtaaattgtctattggtgtttagttcagttcaattgcattctaaacggcttataggcttgctgcttgtatggcccaacaaaagtaatgaaaagtctaatctactgggtttgctgggaagtcattaaatcaggtaggaaggtagcccgcacacatgcgcgggcatcttatttaatgtgtctgaaattttattacgaatttttatgattactctattataaacatgttctttgaataatttgcttgggggttctttgagtgctagtatttctttctctaattaccactgtagtgtatgaattctaaactaaaattacttaaaatcattgtagtttaaaattacttacaaccattgtagttttaaaattacttaaaacca

SEQ ID NO: 288 - DNA, 278 bp, Oryza sativa
caaaaacaaccatacaaaacaccgccccaaaaggcacggcacacccaaagccagagcgaagagcaacaataaacgaccggcaaacacacaccaacagggaacaaataaatctatccacaaggcaaaaccccaccaactccacgggcaaaaacactctaggccaacatcgctcacacgtgaaacaataaatactcaaagccaacaccgaaaaacaagactgaccccggccgatagcgccacagcataccaacaaacacaaaaaaacccaaaaccaaaaa

SEQ ID NO: 289 - DNA, 387 bp, Oryza sativa
agcttatgattagccctagctgcgacagaagactgaacatatgtctgttacttattataaaccctttcacccaattcaaaagatctgaaactgcgtttcttgtcagccatatttttcatgtgttgctgggctccgttaaagtgctgctgaatcaatgaatgcatcagtctacgctccttgagccaaacttgtagttcatgaatagcacaatcctctgaatgaattccaaaatacctgggtgggtggccatataaaacttcaaagggagatgtattcagtgctgagtggaatgcagtattataccacaattcagctaaatgaagccacactgcccacttataaagaagtgcatgtgttaaacatctgagataaatctccaggcactga

SEQ ID NO: 290 - DNA, 444 bp, Oryza sativa
  unsure (1)..(444): unsure at all n locations
agcttaccatgttntcttacccgttgggtttattactctcgtaataatcgatgtgatggttggatcaaaggatgagatcaatcgagtagtactaagcttgtactattaattaagtttgtacataatggatcttcccacatggggtaatattaagcttgtactactatagtnttacttggactttacgggttaattaattatagtttgtttcatacttacatcatgtgtgatgatgaatcgctgtgttaattaatgttgctttcagcttaagcttagctcattagggaagggagacatgaatagtcaaatatatatggagctctcaacgtgccgcacggaagctacacaatacatatacagatagggtcaaacatagagaaatttgataggtcgacactttcttcggtgatcaattattttgattggcacttataaaaataacat

SEQ ID NO: 291 - DNA, 345 bp, Oryza sativa
  unsure (1)..(345): unsure at all n locations
acgctcaagcaggacgncgcctatgcgctggttaccatctgcctttctaacgacgcgcgcctcgccttcgcggggcatttacagcgcaaggctggcaataagctcgcctaccttgccgctgcaacgagggacggcgccaggccgtctcgccttgtgctcggacgaactcgacggatgtggaggtgaccgggctgctgagtgagtcggcggctccctcgtcctcccccgagaagatctgatggcaggttcgagcgacaatgatgagacggctaggagtggcacttgtcggtcccgcgcgcacgccggctggatcggcgctgccccggccgactagaacgacaaaga

SEQ ID NO: 292 - DNA, 370 bp, Oryza sativa
agctatagctgatttccttgtctttgttctctagtgccaagaagacatgccagaggaaaagatggaatattggacaatgcattttgatgggtcgaagaggctcacaggcactggagctagggtcgtcttgatttccccgactggagaaagattgagctacgtattgtggatacatttttctgcatcccataacatggcggaatacgaggcgctactccatggattaaggattgcaatctctttatgcattcgccgattaatcgtccgtggagactctcagttggttgttaatcaagtcatgaaagagtggtcatgtctatatgataatatgaccgcttaccgacaagaggtatgcaagctggaagataat

SEQ ID NO: 293 - DNA, 313 bp, Oryza sativa
  unsure (1)..(313): unsure at all n locations
cggctttngcttagggcccttgataatgtttgaacccctgaaagcaaaagnatgcttgaaggtcgtcgtgctgttgctgcatcatgttgttgatgttggtgaattgagcatcaacagattgttgccattcttgcgtttgagctatgtgttccatcaagtcatactggatctcccccgtctgcatatcaagggggtccattctcctagtgatttcacccaagttgcaatgagaggaactcgagccccattcacttggacatggagggccaccacttgatctgggagggtgattatacccccaatggatgtcatt

SEQ ID NO: 294 - DNA, 437 bp, Oryza sativa
  unsure (1)..(437): unsure at all n locations
agcttgcaaattatgtctgtgtggtatatcttgctatcgagcttgatagcgttgtacttggcgaaccggtgaacactntccctgagctggtgtcagtgatgtcgctctcaacattgttggcgccgttggattttccggtgatgccgatgatcttcgaaccaaccttgatgaagtccatgccaataaggtgagcgatagggggtttggtgagctcttcaccaatgttgaagatgctatgtcaatgcagtgtgcacgacatagccgaagtggtcattgtggccatcttgcaagatcagctagaggcgtaaaaaggcttcttggtcctctaatgatggtagagccgctgatcctcatgcattggtgttaccatctgccacaaaccagagtcgccaaagtttgttgtctagcattgaaccccaaacaactgtgggactctg

SEQ ID NO: 295 - DNA, 312 bp, Oryza sativa
  unsure (1)..(312): unsure at all n locations
ttcttgacgcttactccggctaccaccagatcagcatggttaaagaggactaggagaagacaacattcatcatgccattcggtgtattctgctacatcaaaatgccgtttgggctgataaccgcgggaaataccttccagcgcacggtccaaggggcacttaatgaccaacttggacacaatgtcgaggcctacgttgacgacattgttgtgaagacaaagacaagcgactcattgattgatgacctccaggaaacgttcgacaaccttctgacaatatcgcctcatgctcaacccngagaaagtgcatgtc

SEQ ID NO: 296 - DNA, 346 bp, Oryza sativa
  unsure (1)..(346): unsure at all n locations
tctgncccatcaatcacttctaattcaaatttatctcttttctacccttggccatccttccatatccaaccatgcatcatttaataaagggcattcgagtcttttttcgtaaaacttaatccatgcaaaacaaccaactaatatgagacggagggagtatatctttcctttaataaaacatgacaattaaaagcagctatgacatcaaatcagaacaacccactaacctcttgcacgctgtgcacgtgcgcatgtatacgcacccttggtatgccgtcgaaacctcacgccgccgtccggcgtaacgatgatcccctgcacaaccaggcggcgtcgtcgcgccatg

SEQ ID NO: 297 - DNA, 435 bp, Oryza sativa
  unsure (1)..(435): unsure at all n locations
tgtgatgcctaanaatgggaccataaaatatgcttgattttaatattngaaaaggcacaccaaggcaagcaaagtggaaagacaatataaatgacactatctccatctaaaacataaatatgtcaaagcataactcttgaaaatttaacctgtgccttaattcaccggtaaattttaggcaaactctatcaaatcgacattaaaaaattcaaagagcattcggaattttacccattttaaacagaattggaacccaagaaattacagcacctctcaatggaaatgtagttcaatacaggtaactatatgacccaagtaaactgcagaagaaatgaattcttttacacaaactacacacagaactcacccaacaccatttatctcactacctatagctgaacgaattcaacgatcacctgactcacggaaacccgc

SEQ ID NO: 298 - DNA, 443 bp, Oryza sativa
  unsure (1)..(443): unsure at all n locations
agctcggctttccttctgacatggatgcattcttgccaaccaactcaccctacacatgccacttgctatgcattccagctgattcttaattagtttagcagatgcagggtaaaataattaaaagagctagctttactgtaagtacaatattattattatacaggcactttccataggtcaaacatgctgcttgcaaaagctaattaattatgatatacaacttaattatttaatcaatcccagaaaactttcttatgaatcattgcctgaagtggaaggtagaattaacctatataataatacatagaacgtcacaccaaagcgtcacctgatgatcatgagttatatataaattagtactcataaactcttaaaattccaaccatcaattttatattaattnttttataaaatctaataagttgacgatattgtgatagtac

SEQ ID NO: 299 - DNA, 428 bp, Oryza sativa
agctggtgggccgacagatttattgttattttatgaacgggccaaatgcatgatctgatgcctcctgtcactgacacgtgtcggatggattcgcaggggttactaccggtgcacgtatcgcaacgcgcaatgctgcccggcgaccaagcaggtgcagcgctccgacgccgacctcgccgtcttcgacgtcacctaccagggcgcccacacctgccaccaaaagcagcgccgcgccgccgtcgccggcgaccaaccgcctccgtcgccgccgcatgccgacccgagcgtggagctgcttgcaacttcatgcacggcctgaaagtggagaccaacgggctggcttctccgccgccgccggcttcgacgacgacgactaacttccacgacgaccagcacttctgcttcctctcatgccggcgttccacgcc

SEQ ID NO: 300 - DNA, 385 bp, Oryza sativa
  unsure (1)..(385): unsure at all n locations
taagttagctaatgggctatacattattatgggcaaagttaacaaaatgtaacatttaaacgaagtaattgcttgagccagtgatcataatcaaatttcgcttaaagcaacatgcactctctcaagactaaactcaatatcactgacaaaagtacgtgtataacgtgcgacacgtaagattgaaccaccaacaaaaaagggggataaagtagaagagtcacgaaacaaatcacggaaagtacaacttgtgcaagctcccgtataacgaacatcatatgactntagcacaagaacgggagctatatccanagcaagaaatgaccatcacaggtacggactangcangtacaccccaagaaccttgcaacatttcaatcaataatgc

SEQ ID NO: 301 - DNA, 301 bp, Oryza sativa
caagggtctgaaccacacacacggcgcttttattttatctttataacaatgataaaaacaccgtgcatctcacgtgatatccgtattcattacttggggtacaccgttatgaagttgttgtccagaatttgttgccctgtgggaaccctcatgatattacgccccaacacataaatatgctgattaatttacctagtactatatcgaagtatggcctctcttatcagctgttgcctggtggaggagagcttgctctatatgagaagaaatattttgctctgcgcagcagcccatgtgataa

SEQ ID NO: 302 - DNA, 163 bp, Oryza sativa
tgcttctttgctccctcatgaaatttctttcagtttacggtgactccacgaggattctatgggtctgggccaatcgaaaatcttttatgaccagaagattgatatcctttggtagactcaccatactaaggttagaaagaactttcgaagtttgatgacctga

SEQ ID NO: 303 - DNA, 172 bp, Oryza sativa
cgcggaccccgacaaaacaaagagacgaagccagccccgaccccaaaacccccagacgccaccaacaccgaccccgcacagcggaacgcacacccaagccaggaaacaacaaccaccccaaccccgaagagcgccgaaaacccccaacccggacagaaaacccccaccacaa

SEQ ID NO: 304 - DNA, 458 bp, Oryza sativa
  unsure (1)..(458): unsure at all n locations
tgaggcatgcaagctntggatcctgctttgtgcataggcagcgcatgagcctctttgtttggacgccgngatggacgtgatcaagccgcgagtcatgggtcacgatccaagtatattggcgtcactttgtatgtttctattctgtcaaaaaaaggagagaaaaaaacctcgaaaagctgcaatcaattcatgcagcaccaaaaactctgtttctgctgtctgttcgtctacagtattgtgctctacgtgctcttgagttcttccactatcaagcgaggtcatccagtgttcacaagccaattgattaggggtttcctgacaattggtatcacagcttggtttacggcttggactcgtgatccggcgctataagaagcacttatgccatggcgatacaagcttcccgtgccgtttgtttgagtccctagcgcacctctcatggaggttcagctgtcgtg

SEQ ID NO: 305 - DNA, 352 bp, Oryza sativa
tactttcttgctttaacctatagaaataattgaattccagttcatacttgttttttcagtccataaaatggacagacattctgaacgcgttaaaatccgacctggcgtgcaaatacatagtataaagtctacggaggtccctactggtagcacgactctattattaaaattatcatcagcaaaaataatcttaatagccgatctataatacctactgctaatataaaattttattctgcaaccaatagtggaggccatagcatagatagacatgatgctctagattataaaatatgaacgatctaaattggttctattaacattcttatattaatggtactgagatcaaagg

SEQ ID NO: 306 - DNA, 466 bp, Oryza sativa
gcacctgaggctgcaagctggtgggagggagatgctcttccccactgagtaacttgatcacattgcatatttccctttccaaactacatatttaaatttccacattgcatcttataaaacaaaaacaacataaaaatttgcaaaatagaaaatactaaaaatataggttagattttatcatgctaggtaagaaactgagttttcttgttgaaatgatgaatagttgctctgttatatatctcttttatatgggttcacgctagagtactctctcaaagattgaaaaaaagtagccacatattatccgggaacctgaggtaagtgggctgcacttgctgaactaagtctaggttgttacaagatatgagagagtaataagagctgctatgatcccgttctaagtttgacttaaactccggatgtttattgtccaaaataataaactatgaagttccttattaatata

SEQ ID NO: 307 - DNA, 481 bp, Oryza sativa
  unsure (1)..(481): unsure at all n locations
ctattaggacctatgatactcagcttanacagganagctgacacaagccatcagggagtttggtgcatcatggcaggccatccaacttaagactcgtcaatctatcaagcctcacagatgcttttgatgtcatccactttgggagctgccaaccaaaatatcctctgatgtaaagttgttctaagcagtatgaagggcacaactcatcaaaaacctccttgattcgtcgctgctcgtctatagaaatgattccttcctctttcaagaatccatcatctctctgcctatcagtgcactctaaccaccatatggcaagatgtttcttggcaccaagcatggcctttgcagcggaagagctggcagatacattctccaaaccctttatatggagatccctgagctgagaaagaggtcccagctcctccaaactacaccactcatcttttgatgaactgctacccatctgagctggaaacgagta

SEQ ID NO: 308 - DNA, 418 bp, Oryza sativa
agcttgcctctgaccatgactctggtgacacctatgttgcttgtttacaaagctcatttcaagttggagcagattgtggagttgggatggcttagagactgtgcacaggataagagagctgtggaggtggaggagcaaaatgaacctggcaacatatatcacatgctgaggaattagagaccatgaaaagaagaggctgcatcatacatgatggttttggaaaaggcaagggacaagacaatagccatatttgcggaagaggatttatacaatgaaagtgctcaggcagaagtggtgaagctcaaacagatggatatagatatggagatggctctgagagtacaactataagaacattatatagcccagcagaattaacttgataaagatgtaacaggagggatgatagatggtggaa

SEQ ID NO: 309 - DNA, 415 bp, Oryza sativa
taaatactcactgaacaaggggaggacctacatgatgaaaacaagttccgatgggatcttttcgcctaacgacactcaaaggcgaggagttcgaccattcctggaacgtcgcctcccttaagcgcttttatgtctataatgggtggcacccaaatcgccaactcgttaaaatgtacatactgtcatgtaaacctctctgcactatgtaagctctttctgcaagaaaaaaaatgaaaaacagagaacagaaaaagaaaataaatactggatgtaggactattatccaccatggaggcccgaaccagtataaaatctctgtgtcctgcgccttcttattatttcttcttcgcgtgatagataatttgtggaaaaacctcaaagctagcgcctgatcagcgaaaaatgccattggggc

SEQ ID NO: 310 - DNA, 252 bp, Oryza sativa
taaaagaccgaccagtgataaacgaggagagggagcaaagacagccgaaacgcacgcctacaaacaaccaacctttaaagagagcggaaagcacactgaacagcgcccacgcaccgaacaagaacagggctaagcgacccgacgaaaccagcgggacgtaaaaatgcaaaccgaagggaacgacccgccttagacggaagcaacccggaaaaccgagcgcgaccaaacggaacgaaaaagacggtcgacaac

SEQ ID NO: 311 - DNA, 316 bp, Oryza sativa
  unsure (1)..(316): unsure at all n locations
ctgatggtcttcctctgattgtgagtatatcagaatgtcatcaatgaacaccacaacatacttatccaagtattccatgaacactttgttcattaagttcatgaagaaggcaggtgcattggttagaccgaacgacatcaccgtgaattcatacagcccgtatcgcgtggcgaacgcggtcttagggatatcttnctcacggatacgttattggtgatatccggaacgaagatcaatcttggagaatacacgggcacctttaagctgatcgacagatcatcgatccggggaagagagacttgtttttgatgtgact

SEQ ID NO: 312 - DNA, 379 bp, Oryza sativa
tgacatctgccaaaagagtagctgtggaccccgaaacagcgaccgccgtcactcaaaggaagcaacccacgacagtcactcaattcgcagctcttaggttcggcgggatactaccggagatttatcgagaacttcccccaaaacgctcgacccatgacacagctgttgaagaaagaggagaaattctgggggagcccgcaatgcgagaaggcgctccaaactctcaatgaaaagctgggttcctcgccagtgtaaatctcgccggatactcgcaaagatatcatggagtattgtgaagcttcgcgccaaggaatgaggtgcctgctcatgccagaacggcctggtggaacctatgcctcacgccaactacgaactcatg

SEQ ID NO: 313 - DNA, 453 bp, Oryza sativa
agcttcgcagagccctcattgatggtggcagtgtttctcaatatcctcttcgccaagaccctggatgatatgcagatccctcgcttcgagttgaaaccaagcaatgcgccttttcatggagtaattccaggattatctgcaactccactcggccagatcactcatccggtcacttttggcactcgggaaaacttccgcacagagaatatcagctttgaagttgcctgatttgaaacagcataccatgccatactcggacgcccggcgttagccaagttcatggccgtcccgcactacacatacatgatgatgaagatgcctggtccccgaggagtcctaaccctacggagtgacatcaagcaagctgtcacatgcgacaaggagagttgtgacttggcccaaacccgcgagatggcatctgcccgagaggaaatccgactggctgcaaccacg

SEQ ID NO: 314 - DNA, 443 bp, Oryza sativa
atcaaacaaaacataggggaatcatcgttgagcatactattatcacttaaatatacacgtgttaaacataacatcaaatgtacccaataagagtctgaaacgtaacgatatatagtactattgcgggataagtacatttgacaattctaaactcttcactttatctaaaactcacccctaaacatcaaaaacacgtatctgacaacaccctcgccccttgtacaaacaaaaaatggttggataaatattgctaagtgctaacctgttatgtggaaaagactgcatgtatattttataacgtttcctaataagctattcggtagattaattactatggattggttacactcgatatatgtgcatggataagtacacttgcttctttaacctagcctattggaagaaaaaatactgcaaagcatattatgaaactatttgatctc

SEQ ID NO: 315 - DNA, 453 bp, Oryza sativa
cagctttaagagcattctatgcagtattaagatgtgttagaatgccacgcccataaacttcctcatttattccataggattgtgaaagaattctatcagtctaaactcacagcaggacttggtacaggtataaattgtattacctagatgcaagctaatcggttggctgaaccaaatcttgtttaatgtgatgcttaatacaaaaaaatccctgaactccccaaaagatttccttgcatcagattttactttggtctaccaccaaggcagtaagttctgaatgcaataaacactgttgtctcttctgtggggccatggcttaacttttgcttttgttacaggatatttattttatgtttctgcattcctttgaaaacctgggttcttttaacacgattcttacacgacttctgtaattaatgccattcatgtgtttaattatatatttctttc

SEQ ID NO: 316 - DNA, 216 bp, Oryza sativa
atataccgagtcttcgaacatgcaatccaacagagatatatatgtatagcaacacctatatattattttattaccaacggtctaagcatataactagacaatcaaaatcctccttatattgttgaatgtacgaggctaataaatcatgcagcgctgtatgatattattatcaacaaacatcaatatcgaatgtaataatttggacttacatgttaa

SEQ ID NO: 317 - DNA, 460 bp, Oryza sativa
  unsure (1)..(460): unsure at all n locations
agcttggcctgtgttcagctccgtcgcgtccatccaacccagcatgtagttgaagatgagctcctgatgaacttcttcccgtgggagcctcggaggccttgccggagagctgtctgtgaggagcccggccactctctacgccgtcgccgcctgcaggttctttctcctgaccttgacggcggcggcggcaaccgtgaagcgacgatggcgcggagatgaagcggacgccaataaggcgctacacgtgacgtgagtatcgacgccgcctacgccggacagtggccctgcgtagcgccgggacgatgatgcgatcgtacgcaacgaggatggccatgcgaaatgacaagacatcctgtgggcagcattggacgtacgggtagtgatatgtcctanaggcaatcattgagatgattatatcatatactatgtnntatatattaatgggtatgtcccttgaaat

SEQ ID NO: 318 - DNA, 393 bp, Oryza sativa
  unsure (1)..(393): unsure at all n locations
nngggctggacagaatgcaactgttgctgtcatgagttatattggatacgatattgaagatgcaattgtaatgaacaaatcatcccttgaccgaggttttggtcgttgcattgcaatgaaaaagtaatgttatactccaaataataatgttcttttactttcattgaggtgcttgagggaacatgcctgtagtattgctgtattcatttatgtaagtgtatttggttatcatcttgcaggtacactgtgacaaaggagaagtatgaaggtggttattcagacaggatcgttaagccccagagggataaagatggtgctctgttaaaacagaacatgcgggtataaatattatttattctagtcactgttctgagattntcttatgcctagttt

SEQ ID NO: 319 - DNA, 336 bp, Oryza sativa
  unsure (1)..(336): unsure at all n locations
agcttcaatatcaatatctttgcattttacatatggttcatcgctcgggacaatttttgaacaagatggctcgctagggagagagacactattctttaaggtttcgaacttctcttcaagagagaggtatgctttgtccaagccatccactctctcttgaagttgagcgttcgccacctcaagattagcatgagactctttggtttgcttgtaaagctgtaccaatgcctcatttttctctctctccttagcaagctcactcttgagttcatgacaccgctttttctcacgaatgagcaaaacatcttgcctctcaagtgtngcatattggtcctc

SEQ ID NO: 320 - DNA, 363 bp, Oryza sativa
aagtgaacatccactgcagagcgacgaaaccacaactattcgaatagccgagctcgcagctattgagcaccgggacatgtatgacacttggctagactcaaaatactttaacatgcgcgggaagggacactgcacgacgactattatgctgaaggagccactccctgagaggcgggaatgtggacgtcctcagaaaaccataacgactcaaaggcgggaagctatccctgggatcacaaaggatggtggacagaacccgcattgggaataagaacactgcgataaaaacccgaacaagccatcctagggcttaagctcgtgaaaagaaaacaaaactcgcttgcgcaaagaaccaaaccaacc

SEQ ID NO: 321 - DNA, 428 bp, Oryza sativa
acacaaatacttgcttccctgaaatttcagagacgaatgttaaatgaacgagccgagttgttgctaattaggaccaccacttagtaagtagtaaaaaagctacaatatgtttggggcgccggacaaagaatgtatccacatcattcttttttttatcatgctaaacggttctcctccttacattatatacaatcgactacttgtcgcatgtgttgagatagcaacatgtgcaatttaatctcatagaataataaagtaagtcatataaattcctaataatcaccaaaaatgtgcatatcttcattaagaaaacaaaaccattacattcgttttctttaatggacaagaggaatattcatattaataatcctttcacagcaagctgccattaataaagtgtccggaatctcagtcgcgttgccatcata

SEQ ID NO: 322 - DNA, 453 bp, Oryza sativa
  unsure (1)..(453): unsure at all n locations
catgccagctggctactatgtatctatgtatggacaaagagaaatacttttagcacttgtgttaacttgtgaccatgcacatgcacttttttagcacttgtattttgcacaagattgagatttaaaaatttagctatgcagaagcagtggtactgtagtagtaccgttactaccatatgttctctattactgcaatttcatcacgatgttactaanagagtgcagtaacgacctataatattggcagtaacggcccatatttttcgcagtaacatgtcgtgttactatatcgtgttactgcagttctgcgataatgttactaccgaatcatagtaacaatgtatgaatttctacagtaacataacgggtgtgtgttcacaaaatttgaacagattttaagaaagaaaacatatctcaatcaacagtgtataacggaagggtangaaattgtat

SEQ ID NO: 323 - DNA, 387 bp, Oryza sativa
taccacactgctcatgctgtctgagaagaccacacctagctcggttatcaacacaaggattgttccagcaacatatgcagcccatctgaaccagaaccaagaatgaatatgcatgacaagttatgatttttatagagtaaaacaaacgatctttcttacttttgggatgggtcctgagagaaatattctttggccttatcataggatattggtttgtcaccatccataaaatcagacaggtccatatcaaaggttggtgcacgattactcaattcagaaccaaatgatacctgtacagacatatttagtaagaagatcccagtcgtccaaatgagctgtgaagcatccaactaaatatatgctacatctcttggtggcaaatgaatt

SEQ ID NO: 324 - DNA, 436 bp, Oryza sativa
agcctctcctgtggaatatatccaggggagtatcattttttattacatagattgcttcacgttctcgaagttaatttgactgtgtgccgaacgagtctagttagttgggttgaacaggcagactcacaaggtgtaccatcaagtccatgaacttatttccagagggagatgctgatcaaaaccatgtgggactatgatcttttgttatgcgaatggacgagttttttcttatgccaaggatgcaacgctcatattaattattttaaattcagagctcctgttttgtaaccaatgcatacatacgtcactgttttttattcaggcatatgctataatgcccattaagattctacattcagactagtataatggaaagaatagtttcttcatgacaataccttctaagttccctctccttttgggggcgaattttatt

SEQ ID NO: 325 - DNA, 427 bp, Oryza sativa
  unsure (1)..(427): unsure at all n locations
tcactctcgatctactcctgcaatccacagtaaacagagcttattctttctcgatataacacattgtggtgcactatgagtctgaagactgtccctaacgtcccacaggacgcatagttcattatgggatccagtgagaattccatcgaactgataatgnggtactagaactactacataactatacaactatgtgtactgcactggaagcacatatgctcttgggtagatcagaaggtaacacaagagagatggatcgatctacagtatgagccaataccaaatcgcattgaatttatctgatatgaaaaagcgcattgaatcttgatccatgcaaaccatctcgaccttctaacctacgtaatggtcacaccatctatgacctctttactcaagtcttgccaaaggccgatcacagggaacatgg

SEQ ID NO: 326 - DNA, 441 bp, Oryza sativa
  unsure (1)..(441): unsure at all n locations
tcctttaatgaattaatttccctaaccaaatatagcaacaattcgactattggcgacttgataattcccatcggccgattctaggactctaaaaacgatactgactctaagccgatgatgacttcggggcttatcaaatttcaccgttaacaagatgatcaccgatgattaaaattgatgacgcagagcgacgaagatggtaaatctaatggttntattttatttgatcgaggtgttggacgatcaaattttgtctagacttatttatagttttgacatactatcaagaggggttatgacctaaacaaagagtttattaaaatgccatattagatcatttgcattgtctgaccgctagacccaagccggtctgatcggcatgtgttggctggtatgaccagggcccctctgagccagttggatgcccttggcttaacgatc

SEQ ID NO: 327 - DNA, 457 bp, Oryza sativa
  unsure (1)..(457): unsure at all n locations
agcttanatgcatagatccaatataaataatatgtgaacaacatgtatctacaacatgcacaataaatgtataggatntgctccccctaaatatatgcatacaaataaatatacaagagatgcaagtgtatgcataattagagaatgatcaatgggggtttatcctatacacatagagaaggcatatgtagtaatgatgtagaccagcataaaacacatacattcatgatttccatgttcttaatgtaaatgagattaaataagatacaactcgaataaacgttagtctcacacttatataacaataacatggaaatcatatatatgaacctatcaaaaagtatgagataagaagtggtacataacgttttatctccatgcatttcatcaccaaagaatgcatatctaccacatctcatcatcgggaaataatctagttgacgactctcatcatttt

SEQ ID NO: 328 - DNA, 415 bp, Oryza sativa
tatcaagtctactttcaaatggatccagccacatgtccatatctgttctggagcggccgcaattgtcattttactcccgactatattctgtccatggtgctgcgtcacctcttttggcccaatgggctgtgtatccatgttgggcccattaggggcgcgtcctatggttggagcacgaccctatggtcgttcttcccctctttttatacctctaatcgccgccaagaacaggcgggttttgatgatagagttagcttcttgctaccggctcgcaacgcgcgtgttggctaaaccgcccgtctgtctgtaatcggaaccccaccatattgtgtttgatagtgaaactttcatctttatctagcaatttcagtgcttgttctacttgttcttgcttgttcttcgatagcttgcaaga

SEQ ID NO: 329 - DNA, 274 bp, Oryza sativa
actgctaccgcacacaaatcgttacctcttaccaagtccttcaattccaacggcatctgttgacctatttcaccagaactgctctagctagaggttcactgcctttatcatgtagaacagtggcgtcacatgtccaaacaatgatgatcttcttagtcccagttctccgatgtgttgcgagctctctgtccaatgcaactacttgctgataacagcatttgttttgcccagagatccctcatgctccactgtatcttcctctatacgatgtctc

SEQ ID NO: 330 - DNA, 392 bp, Oryza sativa
  unsure (1)..(392): unsure at all n locations
ctgatggctggatgaagcggtttattgtcttctgcttggcatcgccctccggaggttgattgcccttggctcggcctggagtacgccggagagagacacaacttcttccatctacgacaattctttgctgaggctgtcggcgcagagaatgagtgctatgatttattgccgagtcaggtgcagcaggaggagcattggtgcattgtttctgctatgggttctgattaacacgaggccttacgggtacgcgcgttgctccagtgaccacaatacgattggaatgtctgcttcgtgtaaattggcggtaatgtggacgtcgattttgccttggttgggacagnttttggagaatgctcttcttactgcagtgtaccaaacatactttcttacct

SEQ ID NO: 331 - DNA, 385 bp, Oryza sativa
  unsure (1)..(385): unsure at all n locations
tatcaaggctggcctacgaatatgggtctacaggtctggttcttgcatactagnttgccttaagaatttgatcaagatattatgttatgctacaaactacattatctataagggacaattgcccttatatctcattttttcttcatcatgctttcaaaaaagtttgtttcatttccctgcctttgactgtcatgagttggtttagtgatttnttaagtgccactcaagtagactcatacttacattcaggacctgcttttacttatgctcactaaattctgtataatttcgaattcatcaaagtcatcacaaaatttgggaccaacacgagggaattatcaatctgattttacagtggagacgtggatggcagggttccagttat

SEQ ID NO: 332 - DNA, 433 bp, Oryza sativa
agcttcggatatggcacgatgctagcatgcgttctgcttggcggacgaatttaaattcgatcgtggatgaataagcattgatctcggcaccaaagtcgatagtgcaacatcctgtgccgttgcaatgctgcataggagacaccatacccgtgctctctcctttaggacaggttgctgtgcagctgggagttgctttgttgatagatggacgatttaaccaataaacatcaaagtcacagccggagaaacgtagtccccacagcgtcaggtaaaaagcatcaagagaatgttcacgcgattttggagataacgaccagctcacaacggatgcatttctcatggagatggtatgagaaaagcgggtgctaacactgttttctgtgccataaactctgtagaaacgatgtaatactatcagcaatttgggtgatac

SEQ ID NO: 333 - DNA, 440 bp, Oryza sativa
  unsure (1)..(440): unsure at all n locations
tatacttcttaacagcatatgtatctaagagacttaatacttctttaaatgtcagctagcatgtgcattcaaacttataaaatcttgttcaattataatataaaatcagatttttttttaaaaaaagacgatcagacaagcgcatgcttatatgcttgattcgattttacaactttcacaaacaacagagagacaaccagagggtttctaatcaccaagtggtgcaaataagattgtacatagtgcaaacaataagggcgttaattntatgtcatgaaagtaatcaatgaatcaacttctctatcgacagggagatacatgtaagaaaatcagaagataacacctcttctcaaccaatcataacaatgcatggcccacctacctttactttttctccaccattacacctcctcattttaattgtattaatttcttaataa

SEQ ID NO: 334 - DNA, 446 bp, Oryza sativa
  unsure (1)..(446): unsure at all n locations
agcttcttgattcacgagatctagcgggcgttatattatggtcaaagacatctntaccctagacatgggcgtcgatatggtcgtaaagctgctcttcagcttagtagccacatccataatttaatcttaggattatttttacagttgatcccgatattttttcatcgtaaacatggggtgttacatcattaagaacccacatataaaattctttcccttaaaagaatgatggtctttgaagcccttatttctatttttaatcttccgagtatgtatgaatagtttgattacgtgcattctaattatgtagagatttggaatgctattcgacaattatattatcttaatgttacactaagtgagatgcttttattatttaacagtcgatatattttaaacaaaatttgaagcactcgtgacaccgggtacacgtgcaggacgacgtg

SEQ ID NO: 335 - DNA, 421 bp, Oryza sativa
tgacgacattcatctgcatgaaaacatatgggactttgctttagttaagccataacggaaaaatgaaaggtcagatcactcgtagacactcaagtcaaacagtatcagaggagcagctctactacgatttcccaaatctagaggacaacttctcctatactaacaccctcaatccatctaaacaacacgacccagtcatagaacacttgattcaaaccttgcaaacaccctcgctgctgtcatacggagcaaatctagtcatggaacctaaccgcgcgtgctaaaaccccaatcgtgcaatcagaaagttcagaaaaaaaaagggggaaatcacaaacactatccctgcccactatctattgaaccactacgtaatcaattgattataaaaaagaggggataaaaaccctaattcaacaaa

SEQ ID NO: 336 - DNA, 391 bp, Oryza sativa
agctggatttcattcttgccaacttggcgatgttcttggcttggcgaccattaacccatggtgtcatccattagcctcatcatagtgggacctattccttttcacatctcaaaggagaacaatagtctcaacaaatcggttgtcatccttcacttgatgaccaaccggttgcatatgaaagatatggatatgtttgttgagttttcattaacatcacaagtgtcatatactcgtatgcaaactcaagtgcaaagatccgatataaataataggtgaacaacatggatctggaacatgcacaataaatgtataggaattgctcctcctaaatatatgcatacaaataaatatacaagagatgttagtgtatgcataattagagaatgaccaa

SEQ ID NO: 337 - DNA, 63 bp, Oryza sativa
  unsure (1)..(63): unsure at all n locations
ntatctgtttctcggttcaaggcattcgaaagaaggatatatttggtggaagggggggnctcc

SEQ ID NO: 338 - DNA, 364 bp, Oryza sativa
  unsure (1)..(364): unsure at all n locations
catggcgatgttcttggcttggngaccattaacccatggggacatccattagcctcatcatagtgggacctattccttttcacatctcaaaggagaacacatgtctcaacaaatcggttgtcatccttcacttgatgaccaaccggttgcatatgaaagatatggatatgttcgctgagtnttcattaacatcacaagtgtcatatactcgtatgcaaactcaagtgcaaagatccgatataaataataggtgaacaacatggatctggaacatgcacaataaatgtataagatttgctccccctaatatatcatacaaatacatatcaagagatgtagttgttgcatattagagatgaccaat

SEQ ID NO: 339 - DNA, 299 bp, Oryza sativa
ctatgaatactcagcttatctgtttctcggttcaggcattcgagagaatgatatatttgtgggaacggggtagcatatccttcgggtatttaatcttatcctacactcctcggttaactatcatggacaattggcgcatagtaatccatcagtatcatcatcaaagctgtactaactattcatggttattcgaccatcacattggactcgtcatgagttaggtttaactgatatcacttaactgaccaattatcgtttgactctttacatacatctctggaactaagcttatacttatg

SEQ ID NO: 340 - DNA, 412 bp, Oryza sativa
  unsure (1)..(412): unsure at all n locations
ttagagatacctgaggcatgcaagcttagggaccatgcctttcattctcatatgtttgcaangnccnnnacgactcaaagcgtgggccacaacgattgctttgcctgggcgattatgaacctttatatcatagttcttgattaattattaccatcgcctttgcctcaagatgagatctgactgggtgaagatatacttcacactcttgtgggcaatgtagatattgcaatggtttccaatcagactatgtctccaaatctttagtgcaatgaaccacagctgcgagttctacgtcaagggtagggtagtttttcctcatgtggtcgcaatagccgcaacgcatatgccacaactattccgtcctgcatcactactcctcctataccttgcttgacgcatacaatatataaca

SEQ ID NO: 341 - DNA, 484 bp, Oryza sativa
  unsure (1)..(484): unsure at all n locations
ttaagccacctgcggcatgcaagctntggcttcttttctcacccacaccttcttcactattttcacctttgatccatcggatcgattcttttgtgagaatggtcttgtctagagttaaatgaatgacttgattntgacttaggtgatcccctccattcttgatcaaatggcataggtgattgagccatccatggcatgtaatacataaaaaagataaccatatagtgacattggatatggataccatggcatcacaaccggaggtttgtatgaagttggtatagntgatggctccaattgctttagcgtttgaccaattctcttcctacgagatgatcttagtctttttgaatcactagtctgattatcaaatcgttgaccggctaatcctttcttgtacttagccataagcatctcanaagtaagcttcggctttttagtcttctgggaactagatgactcatcctttacaactntatgatct

SEQ ID NO: 342 - DNA, 444 bp, Oryza sativa
  unsure (1)..(444): unsure at all n locations
taaaactcttgcagttctgactnttcctagatgcatgcatgacattgcacgaaactgacacaagaaagagaccatggggcatccatgcagagcatacacggctggcaaatgacgttgccagctgatgaatgccaccctagctagcaatactatgctgactcatcattcagggagagagagagagagagattaattacagttaattaatcagtagtcctacctggcaacgcctctgtacttggagacacccctggagaaaccgctgctccggcggcggagggaggccaggtactcctccctcgacacaccctccatcttcgacctctccttctcatattcctccagctgcaataattcacattatcttcagtaataattcagattacacaagtcgcaattgtctagttggtaagtggccaacttactgggagattgagcactgtc

SEQ ID NO: 343 - DNA, 389 bp, Oryza sativa
agcttgagggcggggctgtggcggagacactgtttgtcggttctgcggcgtggcgagctcgaggcggaggcgtctacgtcgtcaccgtggcggcgatggcggtggcggacgcgtggaagtctgggtctgcatccgcgggaggtggaggaggggtcggcatcggcgcgtctacgtctgcggcggcgtctgtaacgagctatgcggccgtggtttggagagagagagagatcgatatcgatagatagagagagagaggggcagctgcggctctcacctgagagatgcatcggtggcttcaaaggcggatgcggcgaggaccgccagactacggcggcgtctgcgcggggatgccctatgcagtggcggcgaatgagacaccgatcggagga

SEQ ID NO: 344 - DNA, 414 bp, Oryza sativa
  unsure (1)..(414): unsure at all n locations
nggtttactttatttacttaccatttactgtgattgtctaactttattcaaattaatccaaaaacttgcgctattaattggataaatgtcttgactccctcctttcacttgtctttagatgccgcgctacaagcctgagtacttgtttggtgttgagggttttgtccaggagttgcgtacgatgtcctttgtcattggatttgggactgcccctttttatgcccagattcctcatgatcgtcatgaagagaagtgccgagtcaaagtcaccttgaacagtaatagtgaagatatcccctcagtgatgttcgaagctggaggaagaaactgcatccatgcatgtcacgaggtggcaaggattgccatatgagagctncgcgatcgctacagtgatcagttggccgacactgagta

SEQ ID NO: 345 - DNA, 435 bp, Oryza sativa
gcagcagcaactcgaataaacgcgaaaccgcacgtattttgacttttgtccaggcctcagttcatggcgcaaggggcctcaagcctggaccctctacagtcgaattatatataacgagatgatatctgctcccatcaatcaaacagcatctcgaaggtaccaagatcttgatcacgatgaccaaatctgttttctatctggtggattatatctagcccagctaaatcaacgatacgaaaacgttttgtgactgtgagaaaccagtacaatcgagaaaccttcttggtggaccggagcaaattctcaaataaatctgcagctagtggacaccacatgcgcatgaatactatctgtcacaggaaaaaaccactctttacacgaaattattcgtcgcattcttatacattctgttagccgcacatgatctctcgacaa

SEQ ID NO: 346 - DNA, 416 bp, Oryza sativa
  unsure (1)..(416): unsure at all n locations
tactggatcaccatcagctcagncatataaatcaaaatcaatattatatgatcttcactcattcattgcatctacaaattaaaatatatatagtgtgttcaacatccttggatgattcaaacactgcaaatattttaatcgcgccacttactgtagcatgcaaacgaacctctatttaaaataactcgtgttagtcttagtctgatctagacaaaccacagctttagttgaaatgccatctcacctatgtagatggcccgggaccgaggcctctctactctttcgtttctcagacgcatgctttcctaattattaaacatcgtgtttttatatcttttataaaaatattaattaagaaaaatcatattcataattaattaatcatatattaatgagttatcacgttttctgtgtgc

SEQ ID NO: 347 - DNA, 409 bp, Oryza sativa
  unsure (1)..(409): unsure at all n locations
agcttagtcatgaccacatctaaacaatggaacaaaatcaaaccaacctgctgcaattgtatctattatcaccatctaaaatttctgtagatgtaaaccgatgaagtgcttcttcaagggtattgatatccccatctatttcaacagtaagatccaaaatgcgctcacattgttctgaactgccttgacacattgtgcattttatctataaaaaggaagaacaagttgaaaagaataaacaatgtaatttcactggatatgatatgctgacactagagtttcagacttggaaaagttgagtgttttgtgaagaaaaccttcgatcgtagatagcccccacatattaactgcaccagtgttgtttcttcaggcagcccataaacacccgttntcttggcttccttcatgc

SEQ ID NO: 348 - DNA, 447 bp, Oryza sativa
  unsure (1)..(447): unsure at all n locations
cctataatactaagctaatatttatgatccttatntctatntctaaaaatatatctatattttttatcatacagatgcaactgatttacatggctataaactccgacatatcataatgagagtggcataattttctcatttttttccgactaatggtagtttctaaccttcaagggctagactaaaggattagagcatcaacaacagctagcatctaaatatacatagtttcatatctggaaatttaggaaattttggtaaaaaaattccaacatattctatattgctcttaataggtcaaaatcctaagtccagattgtttatgcttatagggaagaggttccgctcccaacccatcttacggngagagtggcatcatggatgggaagtgtgtgcgcattcttgtgatggcgatgggaggcatcaanggtgattgcaatcaccatg

SEQ ID NO: 349 - DNA, 365 bp, Oryza sativa
  unsure (1)..(365): unsure at all n locations
atgtgncgggcanncacggagggcgggtaaagtggacatccactgcaatgtgagtaaaccaaatctattcgaataaccgtgctcgcggatattgaacaccgcgacatgtattacactctggctagaccctaaattcttaactcgtggcggatgggaaattgcctgatgaatcttatgctgatggacccacattctgagaggagggaaggtggacatcctcagacaaccatgacgatcctatggcggcaagctatccttgggatcacaatggatggtggacacaaccgccgctgtataaagtgaacactggtgctaaaacttgaacagtctatgctaagttctaagctggtgaaagaaatgtaaaa

SEQ ID NO: 350 - DNA, 367 bp, Oryza sativa
agcttgctgctgaaaaagagtatgtgaactatctctccattgcttcacttgagagtgagaatgtacctttcggcatattgctagggcaatgtaattaccagctcgtgcatactatcatagatgatagatcttgtagtgctctcatagtacaataatgtgtatgagccccatcggttggcctaataagcccaaagcaaaagcatatatttgaattctcaaactttgaacttgaagctgactttaagatattttcaacgtaatatcttctagcattggttcttaaggtgctacgaccaatatataaaagtcttacctataaattaactttattccctaataaggaagtatggcaaccaatgaggcttta

SEQ ID NO: 351 - DNA, 400 bp, Oryza sativa
catgccaccacgaaaaaacacatattgtaatcaacggtaaatgcgtccagctctaattagcctacgtgctgcttcacatgctccttttcatgacgatgacctttgggctccgaaaatggcgaaagctgatgctgtcaactaatgattccatttcttgggataaacccggaagaagtagcacctgcaggttcgaaaaccaagcaacatcacaagtttacaatacaacactcaaaagggccgaattttataactcacggggggtgtaaccataaattatacaagaatagttccaaagaaacccgctgagctcatagtgaataaaaatatataacagctctttaagggaataaataacaaagacgaggccgggctttcaatgggcagccaaaacagaaaaaaa

SEQ ID NO: 352 - DNA, 410 bp, Oryza sativa
ttaagcaccgcggctgcagcttaacgcaatgatcacgttttattatcttctgcccttggatcggcagattagaatgcatctacaccgttggatgaacaaaactcagggtcgaacaggcctatatgaatataccgctacccagaagacccaagtcaatctaagacagcctaatgagggcattatggttcggtgtgtctcatctcctcctcactctctcttagcagagcagcagcggcgtagtgcggcagaccctagttttcttatatgattgtgtgctttcactatgtaacactactcagtccaaatctgtatccacggacgggattcgctctattcctgtctgcattattacaaacaaacagttcgcctatatatatttgaatcacgctctcgatcttaaatattatata

SEQ ID NO: 353 - DNA, 423 bp, Oryza sativa
  unsure (1)..(423): unsure at all n locations
ntgcatgcatgtttcttccgccagggtgtaggacgctgcacatgctaatagttnttctcttagagattgatttttaaaaaaaatctccctcgttgcaaaatatagtaatttaaaagattttaaaatttatctaaaacataacaacttttccaccaacaaacgcttcttaaccaatcataacctttttcatgtttaatttcttcgtcttctcttttttttccttggtcaatcacaaactcgcttcatttaattacacatactctcttaatatttaatatcgtgtatccagactcaaagtttattatattttaaacaaagcgatacctttcatatctacgtaacacactaaaaacctaaagcttaagatgcaagcataacaattattaattactccctctgtttcgggttataagacgttttgac

SEQ ID NO: 354 - DNA, 436 bp, Oryza sativa
agctctagctgatttccttgccgtgtggacctattgccaagaagacatgccagaggaaaagatggaatattggactatgcattttgatgggtcgaagaggcttacaggcactggagctggggtcgtcttaatttccccgactggagaaagattgagctacgtattgtggatacatttttctgcgtcccataacgtggcggaatacgaggcgctactccatggattaaggattgcaatctctataagcattcgccgattaatcgtccgtggagactctcagttggttgttaatcaagtcatgcaagagtggtcttgtctagatgataatatgactgcttatcgacaagaggtacgcatgttagaagacaaattcgatggactcgagctcacccatgtccttcgacataacaatgagggcagcgacagactggccaat

SEQ ID NO: 355 - DNA, 432 bp, Oryza sativa
tcctcatgactacaccgccggcgtagaagacgccttctacgtatgtcttataccaaccttcttcaatgttctaaattatgatatcgctatctccaagataattcatacgtaccgcacgtatgtggatcgatcgatcgattaattgatcagtgctaactaaaagataatgatcaattaatttgtttgagcccaaactaatttgtgcttcaatctagctcataaccaatttaatttgtgtggagtacgtacgttgtaacgattatgaatatggacggtggagctacgtaccctcgctgttatcttgtcgacaatttaatttctttatgcaacttcgatcgatcatttgcgagcgagcatggtgttatcttgctgacgacgtccacctgcaaaagatcgacgtacgtatcagccgtgcactcatctcatcttaat

SEQ ID NO: 356 - DNA, 416 bp, Oryza sativa
agcttcggctgtgcatgggcacgccgccgtcttctttctcgccgccctcttcaacctcgaccccaagaacattgactgggacgactacttctacaggatccacattcccggcgtcatgaagtacgtcctcaacaagtgatccattccatccatccatcatacgtaagattattgttcttcttctacctggctgctgctgcttacaatgaagaagctagctagctagctgattgtatactcgatccatccatccatccaacattattgattgatcaccgtaccgcacgtacgtgttaagttatgcttataattcatcacagaatcgacttataagcttctgctgctaggggtggtgaggtactttatatattgttgaaacaaatcaagtcatcttcgtaaacatttctcttattatt

SEQ ID NO: 357 - DNA, 421 bp, Oryza sativa
  unsure (1)..(421): unsure at all n locations
tgtgattatgaggcggcaactggtggtggcggatccagcgatttttatttgncgaggctaggagactcaccaccaccaacttggggaagagtatagggagggggttacatgtgtcattgaccccttctggtcaaccggcgaggccgggaggcatcgtgtggaggtgcatgagctcacaactcactaattgtggtgacgtacggagtgactaaaggggagaggaacggttagggctaaatgcacggtccataattatcaatatttgttaggtgttttatgtaaataccctaaagttaaatgtctcattgaaggggatagtcattatcaaagatcattctccaaactaaacatattgaaaaaccgggttgcccatacctgacccatctagccccctcaaccaaacatatacttaaaaagggtg

SEQ ID NO: 358 - DNA, 332 bp, Oryza sativa
  unsure (1)..(332): unsure at all n locations
agctntcttactctggatgctgtgtgtaccagtttcttctcactttgtgacttcgatcagtcacttgagtcatacactcttcctagcccccagccttgtcatcggagaattcttcttggaagatatggctcttggacctttgacctgccttggttgaacaagcactgatcctagcccccagccgtgaagttggaaaacccgatttccgattacacggctcggttaatatgcacggcgagaactcttacacgaccagatcttacatggtctttcgtctctacaggatccgacaaggccttatcggctctgggcgtcccaagccgaagttccct

SEQ ID NO: 359 - DNA, 430 bp, Oryza sativa
  unsure (1)..(430): unsure at all n locations
ggggcagacaaattgtctagctcatctgtgcaacttatagatattacgaatggcttctctgagctttttgctatgaaggatacctcagagatcacatgtgtgaagaaggcctcctacctaacctcatctgtaatgaaaaattntgtggttccgaagctagagaaggtgattgatgaagagaggaaagtgacacactcttcattgatggatgagacaganaaggctattcttgatcctcttaaggtcaaagtgaagttgaaggctgaaaatgttgacatatgctatcctcctgtatttcaaagtggagggaagtttgacctcaagccaggtgcctcaagcaatgatgattatctttactatgactctgcaagtgtaacatatgtgccaatggggccagcattgaaattattgctccaatattggcagaaca

SEQ ID NO: 360 - DNA, 324 bp, Oryza sativa
agcttaaggagacatgggcccacatgtcatgtgcatccgtcctggaaaccgccataactatcacaaccactatgaggacccacctttcaggcccttgaccaaatgtggaggcctattgggccggcccaagtttggccgaaccctggcagcaccagctcagctcggcccttcatgtggacactttacatacactcccaataatggatgcgaggcacttctgacaattccaactgccataaccgtcattgtgaggctatataaaggggtcacttccttcactccatcacacactcaagcaagaagcttggatctctctctcagtgt

SEQ ID NO: 361 - DNA, 447 bp, Oryza sativa
  unsure (1)..(447): unsure at all n locations
tgatgtatctgtgtccatgggtaccggctgtgaatccattgttctctccctgccagcgatatattccggagagacgctccggcgccctctacttgcagtattctactccaagtagaattaatctccaccgtttattttaaagggtaaattagtaaagtgctaaaaccgaataggggtaaatctgacacttaattnttttctcatttgtgcgttctatggtcaagcgtcgctcgatccctcttcatcgaagagcagagtcgctctccatcaaaaaggagagcgcacggaaagaaaaagaaaagcaaatcgcgagggccggccaccgccggcgcttgacatcgcgttccatagatngttcttgctgtacgtatttggtttcattcagcttgactgttcatgtgaaattaaatatattagctatatatctgaatatacacacgatggaca

SEQ ID NO: 362 - DNA, 311 bp, Oryza sativa
gataagcattgactcacttgtgaccaatactgactgaaaggtgtagatgcattggagcatatatggctgcatgcggtagtgcattgttgtaaaaactttgacccccaggatgtgcctattaataggatcagcgaatactccattgtaccaacttgttcttgtgtgccccattcgcagctaccgaattccattttcttgtaatgctaaatactaatctgctgcggttcgttaaataatgatctgttgggaagggttcatgggatattgttatgtcttatgggaaaagtttgaagagtattcacttttgtact

SEQ ID NO: 363 - DNA, 345 bp, Oryza sativa
gtgagggaatatctcgttctcttgactcacattagcaaatcatgctctgctcactgactcacagttgacagttagatatacagatctaatatgagatgcatcctagcttaaaacgtcatatctctgaagaatttgaagctttgcctcgctaaatgactggcacatggactagtggtatgacatcaaagaggcataatcctttgtagaatggggcttgaaatggagctctactacgcgcacaacatgctggcaccgtcacttttgatcgcgaaaagctaatgcgcgatggaccgtataaaagatcctctttatgcactaatctctgtatagcatactatagcatca

SEQ ID NO: 364 - DNA, 437 bp, Oryza sativa
  unsure (1)..(437): unsure at all n locations
agcttatccagaagtgaccgagttcaatgaggatgcggcatggcatattatcatggcaaattatccctataagaactttatgttttccttttatctttaggaaagtttctttnttgtcctaaaagaactagtatctccccatgggtataaatatgtacacccggggtcattataatttagctctcgatcaataatactctcggcgcatcgccaccctcttttctgaggtttttacttatcaaccgacgaaatttggcacctgacgcggggctgcatctgttcagttcgatctccggcgaatgggtaactcctacgttccgccggtgcaggcaattgtcttggttacgttggtgtcgtttaaggctgcatcagtacattcgacctcttggattgctccggttaggatgatatatttgtctgcctatntatcatatgtc

SEQ ID NO: 365 - DNA, 448 bp, Oryza sativa
  unsure (1)..(448): unsure at all n locations
tgttgtatatagtgtatcatgaaacacctggtataccatggtccttgatgtatcatgatacacctggtatctcaaggtatcatttggtacctcgagacatcattcggtatcctcaaattatcacctacggtacccttgaggtatcatttggtaccctcaagatatcgcccgtggtcctcgaggtatcatgagatacactcggtacctcacggtatcatttggtacgctcgaggtaccatgatacatatgataccctcgaggtatcatctagtacgctcaaagtatcacctacagtatcctcaaggtagtgcccgtggtcctcgaggtatcatgatacatatgggttatacatggggatncttttaggtatcaggtatgttatagtgatacatttagtctctatgctctatanagagatatcnagtgantcaaataaaacaacacaaag

SEQ ID NO: 366 - DNA, 467 bp, Oryza sativa
  unsure (1)..(467): unsure at all n locations
agcttgcataatgttgataacgtctccttgcttttataagcgtgctggtcgacgaacaatatcaaagcgtgattgcagaacaccaaatgcacactcgacatctttcctcaccccttcttgcctcaacgaaaatgttttatcttccgctgattgaggggcattaactgtcttcacgaatactgcccattctggatatattttatcggcaagatagtaacccatgtcatattgatttccaattacagtatagtgtaccgtaagagattccccttttattgcttgaattaacagtggtgacttgtttaaaacgttaatgtcattctgagaccccgcggtaccaaagaaagcatgccatatacgaagatattntgatgccactgcttcaaggatcatagtangaacaccttgtttaccacttgtaaactgacccgcccaacctcttcgacaattcttccattggcaatgca

SEQ ID NO: 367 - DNA, 448 bp, Oryza sativa
  unsure (1)..(448): unsure at all n locations
cgctacgaggatgatacttcttgatagttggtgtaacacttttatttgcaggtcataaacatcgntaaaaggaacatttttatataacaactcaacagatatgaagggaatatttaaagtcctaatgtcaaattaacccacttactatgaataaaataatatatctgcaaaaaaacatctaaagttgacaactaatgaactcagctggtgcacattatattgcaccagtattaaattctccacgagtttatcattatagtattgcttttacaatgtatagaaactacgatagtacacaaaggaaaaatatggaaaaaaaagaattggattatgataacacgataggcagtcattttcaaggttctaaaactcagcagctagtattcattcaatcacctcactgtggaatgcatatacaggaaccagccttgtacttggcattatactc

SEQ ID NO: 368 - DNA, 426 bp, Oryza sativa
  unsure (1)..(426): unsure at all n locations
agctntagcttcacaggctcacagctacactctttgtggctattgttgcaatggcagncgtcgccgtcgccgtcgtcatcgcgctcctcgccgccttcctgacgccgctggccgtgtacctggcgaggagggcgtcgccgccgccgccgtcgctgcgcaacctgccgccgggctccctcgtcctgccgttcatcgagcagagcctttccctgctgcgcgccatgcggcgcaacaccgccgaccggtggctgctcgacaggatcgacaggtacggcccggtgtccaagctgtctctgatcggcgcgccaactgtgctcgtctccggcccggcggtgaacaatgtggtgttacaccacgaggcgctggcgcccaagtacgctcggagcctggcggcgatcatctggaggaggaacatactggagctcg

SEQ ID NO: 369 - DNA, 431 bp, Oryza sativa
  unsure (1)..(431): unsure at all n locations
tccncgtcgctccctctcgcttttcccttactcgccgaactccctcttgcttcncatcgctcccgcgccgtgcaaccacccgccgtcgtcgtttacgctactccggccgacgctagccgccggtaggatcgccgccgcaccgcgccgtcgtcgccgtcgggttcgcgtggccaagatccaccccgatcacccctcctttgtcgaggtccgtcgccggaaagccgttcccgtcgtgcgacggtaagggttgccatgttcgccgccttcggccagtattcccgcctcctatggcccctctcttcctctctaatctctttcttttcggtctttaggacggcccggacggcgtcggccgcgtgtcgacttacctccgtcggttctcgtcggcggtcaccggcggccccttcgggaggaaactcctccctttcctt

SEQ ID NO: 370 - DNA, 462 bp, Oryza sativa
  unsure (1)..(462): unsure at all n locations
agcttatgccattntcaatccaatcgnggattttatgcctgttatacctgnactctattttctattagcctttgtttggcaagctgctgtaagttttcgatgaaatctttactactctgtctgccaaattgaatcatgtattcattctaaaaaaattcgaaaaatggataagagccgagaagtcttatattatgaaccttcgattctaaaattcaaattcttctacattgaatgtatagctgcagcaataaatttggatcagcctttctactccctgcatctacgttgagcaggtatctttaggtaaccgcacaatacctaacctaatttattgataagagtgcttattataaatcaattcttgcaatttttttcaaaaatcgatttttgcatttttaggtgtcaaaataaacaaaacccatcctagtggatttgtgtggtaaggaanaacgggttatctat

SEQ ID NO: 371 - DNA, 459 bp, Oryza sativa
  unsure (1)..(459): unsure at all n locations
tcttccaagcatacggctttctagatgtatatgacgatctctagacagatggatcttatatgaatcgtatgatgaagtaccacatgagtggatatataggaaaggaatccaaatctgccgaatcgctcatgttatgatcttctacatcctaggtctccgcgttccgtcatctggcttatgttcttcatgtagcattcagatcgaatgactctatgaaattacgtcgatacttctacatattatgggtaacgtaggagacatccctattttcccccgggggtcttaattaccactgcttagctttcaattcgcctctgaccatcaaattaaatgtgaataacccgtcctcctctctttgaaacaaggggcgcttccggatctgtgcgtgcttcanacaatattgtcttctccatattaccatatctctagagtcaataattgtctatgaggaactactgg

SEQ ID NO: 372 - DNA, 421 bp, Oryza sativa
  unsure (1)..(421): unsure at all n locations
agcttgcaggggcatgggctgctgcgtcgtcttctatcggagacctgtccgggctcntagagtttccatcactcagagagaagcaacgcagccttaccaagttgctaatgctaggactatcaaggtgttcttatcataagagagtacgacctaccattcaattttacaataggagatcccttctccgatgagtataattgaaccactgttggatttattttggggagcttataccctttatcgcagaccaactcaactgtacaatagcgccaaaggactctgtcggtacgcttgggtgaaacaaatgtttgatgcgatgacaaaatggaggctccgttggcttgcatcaatatcttaatacaatcctacttgacggtgctggaccaggaacttatctggtgttactacaacatactacctt

SEQ ID NO: 373 - DNA, 450 bp, Oryza sativa
  unsure (1)..(450): unsure at all n locations
tatgcatattctctnttttctttatgagttacagcgtgtacttaaacatttaattatctatctatctatctatctattatatactaaaagtccattaaacatcctataaacgctattaagccaccacatagcgctcctataatcgctcctacatcgtcacgtggcatttaattatttagcggtcgagttttactaatataccgtggatctattattttctaccattagagttatttatgttaatagaaagagataaaagaagtgcccgcatagcattcgcctgttgcgaacgtcttcgatccgtcgaattcctgttacctaatgagcaatgctacacgtaataaatttatatcctaattagcggtaattagcactcatcagctaattagtactgtgttattagcatacgtacgtgttattaagacatttcagctccatgcatacaaaagt

SEQ ID NO: 374 - DNA, 353 bp, Oryza sativa
  unsure (1)..(353): unsure at all n locations
tgacacatactacggggctaccaccttgcgcctctgtttttttctctccggcaacgacgtancggtagccacgcatggtgacggagtcccactcgccggcggtggacagctcgcgctcgtacgtcatgtagtcggccacccatttggtgctctcggagagcatggatcgtctactggctagcttgaatgacaggatccgccggccggattttatacgaccatgacgtatattgtccacaaacgtatctgaaatcctagcctgcaccgggtgataccatcagccaacccacccacaaagagtggatgaacttgtcgaagctgaatcttgttcacttgtcggtgtctgtagccta

SEQ ID NO: 375 - DNA, 441 bp, Oryza sativa
  unsure (1)..(441): unsure at all n locations
cggacccaagcacctgggctgcagcttgtgtctacctggcccttttaaattgtatgtattncgtgcactcccatatggccatatatattctccccataagtctgctattgaaatctttggagatctcgtgacctcatcatctccatgtccaatgtggattttctctctctcttctctatcagagtaactgtcgcattacttaacctatgaagatggttgtattctgtagcgatcgggcttactcaaaaagtaaaaagcacctgtcccttgtgattatgtcattgtttgtatatctatgcagattgttactcttaagccgcacaggctttatagatttgtcaaatatcagctattgctacatgtttgcactttntaagagaaccagtggtctattgaaatatatatagtatgaagaataacagtcgacaaagaaaattttgc

SEQ ID NO: 376 - DNA, 450 bp, Oryza sativa
  unsure (1)..(450): unsure at all n locations
cggtttcatttccagnntgaatatgaggaggggcttgtggttctttgtggccatccaccaattgaacaatggaggaagctgatgtatgctgctaatacaaagaacaaggctgctcgtccggagagttaccgcgatgagtgggacgatgatcatcttgtggcagaagcagcacaagatttcaagaaatacttgtaaaatctcaagaagatttcattcaatgtacatgattgcaaatttgcaatgcagaaaacatcagagaataattctgtacacccaaaatctcaattcatgtctggaatgggcacaaatgctcgtcatcagatagnngcgttacttgggtattatgtgatcatttgatgcctgtagattgtaataataacctgaagcataaacaagagaataattctgtgcatgagaaaagagatacctcgagtcttgaacggatatgct

SEQ ID NO: 377 - DNA, 444 bp, Oryza sativa
  unsure (1)..(444): unsure at all n locations
ctgcagctggtggatgtgcaaatgtttaataatacttntgacgacctgattgtcattngggacatgctcattagtccttactgttgacatccttctattctcattaattatactacttttatcaccttcacaagcatgtaggtaaaatgattgttatgtactgatattttgtccctgatatattctgtttatgattttatcaaagcaaggtgtatttctgaaacattatgataatgtttgcaagttaccaaaatggacaaaattctatttatggaccacaatgttgcaatttttttttctgctgtatagcaaactactcatgtgattgatctatttgccactagcttacataaatatcagttcaatcctcattgcttcgtcagaatgcattttgaggcttgataatgttctactgatgatatgttcatgctgatacatacgtat

SEQ ID NO: 378 - DNA, 437 bp, Oryza sativa
accataaaaccagccgaagagcggaccaagacgagggggcaacttattgttattctgacagcccggccccgccggcctatcactttgacatatatacctaaaactacctttatctccattcttcacggtgctacgctaatggtctgttgcacatataccatgtgcgttggctcctggcatatcaggattcagcacaattctaactggagacctcaattgtctgtcctgatcctctgcaggacgattgctgctgatcaaatagccactctcaaccattgcagcctgcattacctccttcactgccatactattgctgtccagtgaacgtcctatactaacaacagctgtcgccgactgaatgtggtgtctgcctaagactggacataaggccacaacacgggaggtggcgaaaatcaactggatggtgcttggcatgc

SEQ ID NO: 379 - DNA, 398 bp, Oryza sativa
cttctcgggttcttggtctctgcccgaggcatcgaggcctacctctataagatacaagctatagagcggatgcgcccctcaacaagcttagggatgtgcgatgcgtcaccggctgcatggccgccctaagtcggttcatatcgaggctgggagagaaagcgctacccctatttaagctcctcaaacgctccgggccgtttatctggacggaggaggctgagcgggccttcactcagttgaaggcgtacctcagatctcccccagttctggtcgccccggagccagatgagccgctgctactttacctggcggcaaccccgcatgtggtcagcgcggcgttggttgtggagcacgacgaggacaaccctcaccccgcgcattcccactctgtgtcgact

SEQ ID NO: 380 - DNA, 429 bp, Oryza sativa
  unsure (1)..(429): unsure at all n locations
tcttctctaacgttgaatgaaggtcagaaaagagatattctttatgtttctcaattagaaaataatgctttacatgattttactaagaaggaaattaaagatgcaattcttcaaatggaacgtaataaagctttccggatggattcccagctgagttctatcaagttttttggatcgttattaagcccaatttggttgatttatttaaagatttttatagtggcagtttacctctttactctcttaacattggtactattatagtattgccaaagtgtaaacaggttatgtacatgcaacaatataggcctattngtatactcaatgtcaggttcaaatattttactaaaggtgctacagatagaacttctggagcggctcacaatgttattagttccacacagacaacttttatacttgagaggaata

SEQ ID NO: 381 - DNA, 72 bp, Oryza sativa
cccaccccacacacggaacataagaaaagagcaaaaagcggccgtggctgatgaactgaaccgacaacacga

SEQ ID NO: 382 - DNA, 341 bp, Oryza sativa
  unsure (1)..(341): unsure at all n locations
ntatttctcccagttgcaaatattgcaatcctaaactntagggtacgaagaacaggattaaggatcttttagtttgtaaactgtgtgctatatatctaccaatcatggggacagagatacacatctgtgcatgttcttgaccaggcaccaaaccaagcggatcggataatatccatgagaaatcaaaccaaaaacaaacaagtggattggattgttgccacgagagaatcacacctaaaagttggagatacaaatctcaactatacaaatcacacctaaaatgaagaggcaagaactcacctgagccgagagaggggatagacgatgcgtgccggcgccgc

SEQ ID NO: 383 - DNA, 443 bp, Oryza sativa
agcttaatcgctccatgtattgataatatgttgctacagtaatacattcgctaatgacggattaattaggcttaataaattcgtcttgcggcttactgacggattctgtaattagttttttattagtgccaaacaccccatgcgacatcctatataatattcgatgtgacacgctaaaactttacacctctggatctaaacatcccaacatgtactgtcatatagacagtcccaaacattaggggcccttggaggcctctataataagcttattcgcgcgtccgtgcaatggatgatgtttgcctataatatttgttcatgtgcatagtccatatatggaatgggggtaggcaatgcccctgtgttaaagataccacgcctgagtatccacgtcgatatagagtggtttgtagccgcccagaacacacttgcttatatgtagc

SEQ ID NO: 384 - DNA, 458 bp, Oryza sativa
  unsure (1)..(458): unsure at all n locations
ntgagtttagcaaactctactcttaatttgtaccattgcgtggcattattccaatcaaatactagtagaaaacaactcctatgcttacaaaaaacaggacattccaaggcaacctacctattcaggcgcgcacgtcgatgtgctatgctttacattgacatgtccagcaatcttgtcctatcctgttccaagacggtggcaatatttgtcagctaccgattgggcaggggagcacagctacctcctgcctcatcggagacagaaacagagtcgtaacccatcaaaagcaaagacaaaatacacttgtcgagaactcttggtttgtttggtttctcttcacgggcaacggaatcttcaaggtgtcattggcagaatggcaggcatgctaatttgttcacaaagtctctaattcatttgacgagttagcgtgtatactagcaatcaccctcttgatatct

SEQ ID NO: 385 - DNA, 429 bp, Oryza sativa
  unsure (1)..(429): unsure at all n locations
agcttattgcagcccttgccgcggaagccgtcttcgttccatccttgccatattaaccgncgtcgagccattcgctgccagatctatcgccggtcgccagccccctttgctgctatcgccgctggtggcctcatctccttcggacagatctatgagagggaggggagaggagtatgaaagccagcaccgctgctccctctgttgccgtcgcggacatcgtccttgatccccgccagcccaatccgggagagagatgggaggcggnttcatcgcngttgctccattcatcgatgctcccctttctccacctctccatccctgccctttgccgctgaagggatttcttaaccacactacctagaatataacgtccagcaacggcacaaaaatattactggtctattacgattaccgatatggtctgccagc

SEQ ID NO: 386 - DNA, 264 bp, Oryza sativa
gaaacgccctcatttttgactatgtccaaccatcacttactatctggaaagctgatttcaaggaggatttcactcttcttttgcatagagcgaaggaggaggacacacctatatatcaaacatggagcgacaacattctttaatctttccccctttgtaaataatttttgtaattttgctgtaactcctatctatatttaatataattaccacagtaggagcctctcctactgtttacagtcaaaacaaaaagtacaacatgtc

SEQ ID NO: 387 - DNA, 454 bp, Oryza sativa
  unsure (1)..(454): unsure at all n locations
acctntaattggagcaagggtatagtgcactttcnttatattncggncaancaacatattatgactgccttttttttatcatcatttatctgaaaggctgaaacatattatgttcaaaacacctggtatttttttacattttttagtacaacaagaaaatcaagttcctcagctttttgtgaaacactttgtcctgaatgatggaggtagcatcagttatggaattggtctttagaaaatgatggtgtaaggtgatctgatttgttcattgagtaatcgtgcacatgtaatgtggcatgccttcctttataattatgaagccattcttaacaacggccacaagtttcgaaagctgatagaaccaaacaggaatataaaagtgaatttgggcacaagtatggactgattcttcatatacttggaatggttggcgtgcaattcttcatatactatg

SEQ ID NO: 388 - DNA, 440 bp, Oryza sativa
taagaaaacatgctctactaatgactttcccctatctgcgttgtcatatcctcatgaatatattattattttgttgaaaaaatgtgttggataaaaagtataattaggttcaagataaatggaagttcattttaattagtaagaaaacttggatggatacttgttcttttctcgattttggatcatattttttgacagcaacgctaagcaataaggcatgaaactagctacgtaagtgttgttggcttcaatgttttttttcccgtgcctaccaaccctatctttgttttgtttagccccgacttgtgtttcacttgtaccaactacctcacgtgtaaagtggattatgcaataagagttcagtagcacctctctcacgtgcttgttgctaccagcaccggtgcctaccgcctacctagtggttgccctgtgctgatgtc

SEQ ID NO: 389 - DNA, 367 bp, Oryza sativa
  unsure (1)..(367): unsure at all n locations
agctntactgtgtgacaccgtatatgatgcattgttccaactcctaaaaagataagtaactgcggtataaaaggattttaaggtattgggcacttgatcacgcgcactttggcctaagcaaaaagtgcctaagtccctaaaagaacgtgacaggccacacctgaaaatatgggctgcagacatattaggcctaggccaaaaaatatgccttctacaccctttaaaggatgacgcatgtgacatgctcccgagtaacaaatcttctgggtaatatagaccaagtggagctcatatgaatagcttctgatctgaatgactatcccttatgggatactccacaataaatataataattgaatcccgactg

SEQ ID NO: 390 - DNA, 450 bp, Oryza sativa
  unsure (1)..(450): unsure at all n locations
taagcagcagnttccagcccatttaggaatgggctgtgatctattgcctgctangactaatgtacttaggtgatcagtccattctacaacatgtggcaaaagctatagttttgtgaacttgggagcttttattaatgaatacatgcttgacatatattcatcaattgtggttgctcaagatataccctcgtggtctaccacagtaagtgttcctatgtaattatttgtgtggtttgcttagtttgcatatgtctttgcatcatgtgctctctgatctatatgattattatttcctgaaaaatttaacaagtaccgtagcaccagaagttctctttatgaatgcatggagatgttattttggttatcgaagatttggttgggattatttatacatttattgttatttggcgttggttaattctgaactaaatcgtacacaaatcttatttg

SEQ ID NO: 391 - DNA, 404 bp, Oryza sativa
  unsure (1)..(404): unsure at all n locations
agcttataccgtgacagaactctgagatgagatgattcaatactgnaaattaaanagaataaattatctacaagacctatagctaattggctaatcactaaacacctgctcttccttgcagctagtctggctgcccacatgcagacacaacgcctgccgccgttcgccgcacttgcactccggcgccggatgtaacacccctccgagcggcccttgttgtttgcctttacgtcggcactctattgccggaggtcagatgctatgaagggaatgagcacaggagatagtgttagacccttatctgacgtcaaccaggaagatgttggtgagaagactgaagctgctgatgacgaggtccaacagagctgagtgctgatgctgagcatgaagcaatcaaagaggag

SEQ ID NO: 392 - DNA, 324 bp, Oryza sativa
  unsure (1)..(324): unsure at all n locations
accacttaaacaangggaacaaagagagaccagtttcaaccaagcaaaggaaaatccatccacatatgaacatataaacccgtgaatgtaccaagaaccaaagagactggaggcttacaaataagccaatatgagtatgtgtaacaacaatgtgatatcacaaaaaagcagagcagacacaaacaaataacctaacaaaacatacaaagataaagacaaccaaagcattagctaaggctcgggaatgacggagcgcatatttccctactagccacaggagaacattacctgagggtaaaccagcaaaaattttgtaaaagatag

SEQ ID NO: 393 - DNA, 368 bp, Oryza sativa
  unsure (1)..(368): unsure at all n locations
agcttgatccgaaggcattattcactttttcttaaactttattacgcattgctgccttccttaaaaaaaagataaaacccaaactgcaatgcgaaacgcacaaatttaacatgaaaccaaaaactctggaacaaagttacaaaattctccatcaaacaaaaggacacctatggaagggtgaagattacactacagtacaagacctcccttgcaaagcanaacaactggtgctccctccgttttaaaataaatntattttttatccattcgacacatcaataaaaaaaaatagagtactgttattttatcagatccaaatataattattctcactttaattactctaaatgtanatatattttactttc

SEQ ID NO: 394 - DNA, 440 bp, Oryza sativa
  unsure (1)..(440): unsure at all n locations
tataattattaatgcttgtgctaatgaggattaaatctgtcttctaagggactgcctatacatttgtcgacaaaattttcaccaaaaaattgacagatgtaattataatataatcgtagtgtaattacactataacttatatgtaactacactgtaacttacatgtaactacagtgtaacttatatgtaagtgtcacataattttgaatcgttagatctattacacgatttgttttggtgaggaagaaaacaaatcatagcacacacatatatgaaagaatttgttcccacgacctccattttaccgaaataacatgttacggagagatatttgaaagttacatacaagttacactatangtacagtgtaattacatacaagttacagtgtaattacactacaattggactgtgaatacatacaaggtacagtgtaatta

SEQ ID NO: 395 - DNA, 442 bp, Oryza sativa
  unsure (1)..(442): unsure at all n locations
agcttgccgnatgctgagttctcgactattttctttaccaagctagactgcagatggcaccatttgaagcactgtatggacggaggtgtcgtactccgctcttctgggatcagacaggggaacgccatttgtttggtacagaagttttaaatgaggcagaagacaaagtcagatctgttagggaaagattgagaatcgcgcaatctcggcagaaaagctatgcacacaaccgccgaagggagctcgttttccaagtaggggattatgtgtatctccgtgtcactccgctcaggggagtacaccgtcttcaaaccaaaggaaagatgtgaccacgctttgtgggaccatatcctgatttggaacgcatgggtgaagttgcataccagcttgagcttcccttcaacatgcttggcatccataatgtgtccacgtctctcacttg

SEQ ID NO: 396 - DNA, 456 bp, Oryza sativa
  unsure (1)..(456): unsure at all n locations
tataaactaacttagagtatggaacaggtttaaatttgaaattgctatttctgccgggagcaccgaaattaccgaaatttctaaaattttggccgaaaatatttgaaatcttgactgattttgaatgaatttaaataaaatttgaccaaattcacaaaataatgtaaaacaaccaaaaatttcgggcaagatatgagcttgtcggtgggggcgaaattaccaaaatttcacaaatttcgaaacgaaatttcaaatcctgattggtcatcaactttgtagtaagatagaataagtagctttgacttgatcaagtttatataaaatttaagcaacatttaaaataccaaattagttgtattaaatgtaatattgaatatatcttgataatatgtttattttgtattaaaagtattgctatatnttgttactaacttgtgcaaaataaaaaaaattact

SEQ ID NO: 397 - DNA, 339 bp, Oryza sativa
agctacttcttcatacatgtccttatactaatctctctctctctctctctctctctctctaactctaagcttgtggctaatctcaaagctttacctatataggggtatataaaaccacagtcctagctaaacaaaaatagattaattatccaattaagtacgtgacactcgaactccatcatcacaagcctacgtagctactgcgactaaataacctttcgcgtgtacaaaatgtctcatctgccgtcgccgatggccgccgccgtcgctgcggtgggcgtcgtcgactgtgggaggacgagaaagcgggcggtgcttcccaggctgctgacaagttct

SEQ ID NO: 398 - DNA, 411 bp, Oryza sativa
  unsure (1)..(411): unsure at all n locations
nnttggagntgtcttgagctatcttctgaagctttttatgttaaagatcctctgaaagacaattgaacattaagtttcaatgcaaatataagaatcaataacagggaagcatttcttaccatttttgtgcttcttacaggtgaaaaagttggacttgtatgcagctctgaagaatataacatgcatctatgccaactatccaccaaggacaactgcagttgtaaaattttcagccaacttccagctgtcaggtattggagaaggctttactcgatgcttagatatagtcattatggtacctgtttgtggtggaaaatggttggagtgaaaatcaagaaaatgaactacttattactgaagcattatgagatataagaagtatggatggaacaacgatatcatataccatca

SEQ ID NO: 399 - DNA, 454 bp, Oryza sativa
agcttcaccctccaatgtccatatagactgaatacgctgttttctcttcccaaatccaagatatctacgaatgccagttaaatcctcagcttcgccgtggactgagaagaataaacaaattaaagtgtacaatgaacttaactataatgaaggtggatgagaaggtcagaactgcacatcccactactatgtagcagtgcatcctcatgcataaaaacatatattgatgaacaaagtctaaatgctaaaagtctaaacacaacacatgaaacaccaaaccgtataatcaaatgtgcttaatagaacggcataaatataattcaatagattgacattatacgtaaccaatgtcataagggaccaacgagaagctaaaattggaacatgtcatcttttgtaaataaaataacagaacagctaacatcttcatgtaaaatctatggtcttataacat

SEQ ID NO: 400 - DNA, 416 bp, Oryza sativa
  unsure (1)..(416): unsure at all n locations
ngccgcttatctcatctaagttcagaggcgcaagcacatcatctatcactgctctggctaggaacagtcccagctcatctgaggcatccaatatatcaagcgcggtatcttctgcagattcaagaagcattatgaaacccttgactatgtcttctgttgagaacaattccatgcttaatgaggatagaagaatcgaagccatctctttctccctgttattgcgcgccatagcaatagttataagcttcttaataaagacagggttgtactctggagaaccaagctctttgaggctgcgaataatctcaggtacatcatcagatagaaaggactcatgaatcataaaaacagcctctttcttgtacctgctcagcttttcatggtcatcatcttggacatacgcattggcacctaca

SEQ ID NO: 401 - DNA, 455 bp, Oryza sativa
  unsure (1)..(455): unsure at all n locations
acctgaggcatgcaagcttcttatgaaaatgtgcctcgactgatattctccattgtctataggaataataatacttactatgacctacatacanttacatcggctgatgattgaacaaagagtgtgctgcaaagagcctttttctcattgggtgcttgcatcaatgctattgtgcattgtcgacctgttctatgcatagatggaacatttttgacaggtaaataccactggcagtggtacctgctcgggctaccactggcaggagccccagttggtcccgtggacgggtgttttggctggaaggaggatatcaccgtgcgcttcgagcacgtgatgcgccttccacacctaggaccgcccaacacccttcctccgtactctaccgtcgggcctagcaaggcttggttgctttagttcactgtaagtaaataacttggtattatcatacatgctta

SEQ ID NO: 402 - DNA, 446 bp, Oryza sativa
taacgctctatgcttactgatcaaatgcagagagcgaatcgtgatcttatggccatgccacactggacacagctgaccttgttcaaatacgaccaactgcatatcatgatactttcccactgcagttagtacgtggaaatcctccaagtatttcccatttgcgtaagatcggttgtgctgtatacataccgatctcaccaccacaggataccgctatgggcccatacagggaagaggggatctatgtgggtttcaaatctccgtcgatcataaagtatctataacccttaacaggtgatctatttactacccagttcactgactctatctttgatgaggaacattttcctgcattagggggagacttcaagtaccacaaagaatgccaggaaattgattgtgatgcccagcgtattccagccttataatcacgtctactgaaactg

SEQ ID NO: 403 - DNA, 459 bp, Oryza sativa
  unsure (1)..(459): unsure at all n locations
agcttgtcttgaatcaacctcatgatgtagggtgattaatacattccctgagtgaatggtcctttggagatagcaatctctcgcattatgagagacacaatgtctaactgacgaccctgaatgattgcatcgatgacgtgccaagccaccctcctaatgtcatcattgttgccaatgcgagggaggataatggctctcacaatcatgttaaccacactggggatagtcctcaagccggcaaccttcccatgtgtgtaccgtgctccatcttcatagaactgagagagatagtctatggagaatgaattgtgagtgtgctcctcatgcaaatcatctccaaaatccaagcgaatattgaggagccgccggaactaccttcgagagatagaacactagagggtgtcagacatncacttcatctcactatatgtctcagccacccacactgtagcataaaac

SEQ ID NO: 404 - DNA, 447 bp, Oryza sativa
tcatgatggcaaagccaaagaggaaggcatataacatggtgtattctactatcaccacggccaccacccccagccagctatgcttgaagtcgaagtagttctccacgaagattttcacgggagtgccatcatccattggcgtcataatgtctccaaactgcgaggcaaccagaccgtacagcgttcacgcgacagggcatatccagcagtaccatctccaccagatcggaactttctgagcacatgggtcacgggaatggaaatgagctatagaaatgatgaaacgaaattaaaggctgggtcataacgatgacgacggttaccggtctggggatgatgaacccggagaatacgttccagatgccatagaaagccgatgagacgattgacgcgacgtggtagctttgttgtatgcccacagccatcatgccatagaatgtgaagtat

SEQ ID NO: 405 - DNA, 398 bp, Oryza sativa
agctttagagaacaagaggtttcagcattgagtgtactgttattatggaccattgatatatcattggttgccaagaaacgtgcttattcataagctattgctagagaagattctaagttctaaataaccataaggaagacggctaactttatgagaacaaataagcaaaaaggcttattttcaagctcattacaggcaagtagttgtaatgttcaaatcattaaaagacacttttaagcctgtggatgcagcatcagtgttatatatataatattaaataagtttacaggaacataaattttgtaacagtaaaatacgaccgacaaagtctcgggttgtggtgcatactttagcatggagtttcttccaatgctactgaacatcatatttcttcataa

SEQ ID NO: 406 - DNA, 422 bp, Oryza sativa
tgaaggagccagagatgaagtcgccaatgccgctacgccactcgtctcttgcgatgtttttcaataacaacggtctgagttcacttgatgctgtcgaaatcttcgacaagctgagagctactccggatacatattttaagaacatcaaagaagctgggagtatgggaggaggcctagcgctggcgatgaccaagtccttatacccgaaaattgatattgatgctgttgacggctttgcagacgggacaagtgaagaggccgcccttgacctcatcagtgatgcgcaaaaggctgctgacaagatagccgctgatgtagttgagagattccaggacaacaatcttaagccgactgagtctgataattctgatgatgaaagaactgagtctaattgattgtggtttctgatgataatgatgatg

SEQ ID NO: 407 - DNA, 348 bp, Oryza sativa
  unsure (1)..(348): unsure at all n locations
agccttgngaatgngataagggtcggatgtgctcatcttatcttctatgggcattctcactatgctatgcaagtcacatataacccgaaagataccaatacttttgctagtgcttcacttgatcgcacagcaaaggtttgcgatattgttccttacatttgcttggcatagattttgcatttctaacatttattggtctggatttgaatgtggtgcccttatttaatttcaggtatggagtcttggttcccctgatcctcaattcacattagatggccattcaaaacgtgacaatagtgttattactctactggtggtgatcgcccatacctaattacaggctctgat

SEQ ID NO: 408 - DNA, 308 bp, Oryza sativa
  unsure (1)..(308): unsure at all n locations
aaatactcagctgtcggattatttatcgcacatgtcttctaataaggatttttttattgctaattatgaacaacatacctgtgcctttgtttagctagctactgctacggcgctnggctatgcacatcctttcggttttaggtgtaaaggggaagcggattttcatccctgaaggagatatcccctctttattagtatgtcacttaaatggatatgaaaaaaatttaataaataataagaagatgtattaactttccctttactgatggccttaactgtaccgaacaaaattctttttggtagctacg

SEQ ID NO: 409 - DNA, 339 bp, Oryza sativa
  unsure (1)..(339): unsure at all n locations
tacaatgtgttcacatcttggttgctacctgtatgtcaacacagtttcgcttatattattggtctttcacaaaccaaagtttgcttctcaaatatctcgttattatagtatatgaccggagaaagaatgaatggctacgccacgctacggcnnaccggtgtattaaaatctatgttatcttttggatgagccttaagattntcagacggttgatgagtagtcagttgaaaagaatttggaaaagctggatcttcatttctggctactggcttccggttcgtattttagattatatctttacctattaaaaaattaaaaatgattccgtactcatcgtat

SEQ ID NO: 410 - DNA, 425 bp, Oryza sativa
ctagttagaaatttcagaatcacattctgaggacaaatgggtctatattgctttatcgcattagcatccttaatttttggcagcagagaaatcaccctataatttatcctatcactgtctaaaatacctctctgaagatcatcaagcatctctttgatcaaacccctaaattcaggccaaagtttcttatagaaacccactggaaaaccatcaagaccagcggcagtatttgttttcatactcttcatgacatgatcaatctctgacaactcataaggtttcatcaagctttcattatccccctcattcaaacttgacctgtcagcccaaaccccctgttccaaatgaatggttctcaattcttcccttccaaacaactgcttgtaataattataaatatgagtctgtatttgtggaaatctgaa

SEQ ID NO: 411 - DNA, 452 bp, Oryza sativa
  unsure (1)..(452): unsure at all n locations
agcttgacttgttcagnactactctattcgctctcataaatncangcacatgcatgcacacggctagctcacattcttctgtcgcattcctagctgcttccgtagcgcatgacgtcaaacctatagcagccgggtccggcgccgtctattgcttctctctgttcgcaatttcgcaggcgattcgatccaaaagttggttccaaccgagtcgaaacagggacagaaggtaccaaatcttcctttaacaacacgacctgtctgctaaatgaatattcggcctcaatgattgaatgtcgatctgcctctggcttgcaatcgtgtcgaaaccaacacttcgaaaataacgtctcgtggccgcgtagccgctagcttagcttgggatcgatgacgacacagagtggaacacgcgaagattacacgaaaggcgcgctctgcctccattacacgtaagt

SEQ ID NO: 412 - DNA, 307 bp, Oryza sativa
  unsure (1)..(307): unsure at all n locations
tgacggcggcgacaaccggcggaggggggggaagagggattcttttgttatgccaccacggatctantcccggcggtgagagcatctacgcggattctggaactttatgctagcgtcggattggactgagctactcctaccgaggctggcgacgtgtgggtgctacagaactcgagcggcgactgtggctagcacactacgatcgacggcaacggttggtgcggcgccggttaactaccgggagtttacacgagctactaccgaaagctaaggggaggaaaaggagcgaagaggaacaacacgggga

SEQ ID NO: 413 - DNA, 417 bp, Oryza sativa
agctttccaacaagtactcatggtccccgatattccttctagatcagcggctaggtctgttagaaattgatgctgacatgaggcccgaatccgaatccaaaacgtgtagaactttatctcttgtcttctatggaccaaaagtgacatgatgagatggaagtggacttgaagaaggcctagatatggtccccaatcaacttctttgatcatcaatgaattcgttacgctcggtctctttttcttctcccaagcaagaacctctgcaaacaaaaacacaggaaactcattgtgtagcaacgtttgttcaaatatataacatgtaaatataatgtagaacatatgtcaccttggttgataatacataaggattcatagtatatccaactagttgggccttatcatcttcccttttgataa

SEQ ID NO: 414 - DNA, 452 bp, Oryza sativa
  unsure (1)..(452): unsure at all n locations
tacaaccacactgcgctgggcttagcctacaagttcataatatctacccgcccaaacagcccacccgcgctaatacggcaacacataaggctggctcatgagtcatgacactntccatgacatccgagcacacaaatagacaaagacaagtagctaactaaaaagatcaagagatagtacagataattctctttactcgtcatcatggatttattttccttgatacaatccagttacagcatactactacaagaggatactgagaaacaaatccatctccccatgaatcatgaatacgaaaatcatcggaaataaatcttctctacctgaacatactaaaatacttctcactatttggtttccagagtttgggattgacctcgtcaaacttcggaaagttagttgtgtttaacctgtgccttggagcgagccgagaataccgttgatattgg

SEQ ID NO: 415 - DNA, 403 bp, Oryza sativa
  unsure (1)..(403): unsure at all n locations
agcttcatcacttgatacatgcacaccaatgttatatacaaacnaaaggtgataatatacatatgaattcttctcactgtcgaccttcctaatgattaattctgacaatcatcattaattttccacttcccagcctgttgtctaattcagatcataaaataaggggagcattagttatcgtatagaatgctttatttcatatactgcacttgaaattaaatttcaacccttttaataaccagctgagacaattactctgttagctgtgatttttcaatgtaatactgacgcagtttgctgggaacaatgatttaccgtgcgtgtgaactcacaatgactgcgagagctgacttcatttcaatcaacgatgcgactgtggatgcctgaccaaataacttctact

SEQ ID NO: 416 - DNA, 377 bp, Oryza sativa
tacaaaagagaagagaagagctatgagagcgcagacccgatctctttctgaaggctccagactcccgatttatactctattcctattccaccaactagatactactaaactaaacttgagagaaatgagagcccctgagcccctgatacatatgtaatacatcgtaaaatctaatgcgagagccaatctcgttcagcgttatcgcacgacgctgggagagacgctctattgcgcgcgtcatcgcggagtccatctgcgtgggcctcgcagtcacatgcgtggctttctggataaggatcgagataaaaccactccaaccgcacatcacacgtaattcttgcttcaaagagagtcatagagagagagaggatggccac

SEQ ID NO: 417 - DNA, 350 bp, Oryza sativa
ccttaagcaccgcggctgcagcttgagggcaagtggcgattgcgcatatttatttgatgaagaaacgaccccaataaaagtttgttttttgacgagttctacaactctggctctggtgatctttccatttgaaatcatttattaaccctcattttttgtttgaaggtgccaaatttgaatcgccaaatgaactttatttgtaaaaggaccaacataatagatgcagaactcgatgagacctacaattttggtgttatgatctttgctttgaaacaccaaaatcaacacaaaaataaatttaagtcctcataatttgtaactaaaagttccacatatatgaacaattttta

SEQ ID NO: 418 - DNA, 376 bp, Oryza sativa
aatgccaaatactgatgagaaattatattgtgttttcatactatagacgtgctctccttgagaaatgggaacatcttaaacaacgcgacaaaactgttagggaggacttttatgattttaaaatttgtatcacttatagtggtttacaagaatctaatgagaacacaatgaatagattttttagagagcttaattttaatattcaagctgggcttgttaatgtgacatataatcatataggccaattgttcatgcttgcttgcattgttgagcgcaaaattttggagaatccaatagagcaacacgatatgcttgtgccctctatcactgatgttatgcaggaagttcaaaaagtttcaaaaagagaagaacgata

SEQ ID NO: 419 - DNA, 452 bp, Oryza sativa
agcttgtgttgtgtgctgttgcacatacccctgttagaagcaacatacaggtagtctgtatgacaagagtctttctccacgagtggcaactctgcctccagctgctgcacccggagcatgagcccatgccctcgtgcagatgctgtcatcacctcatcgtacagaccatggaacacctgtgcagcaaatctgcacacatgcaatgggacaatttgatggcatcatgatttgcattatgacatgatgatactaagattgccagaagttctagttatgttgccgtgtggtgacatggaatctttactgattatagcaaaatatatcagttgaggcttttaattagttggtgtatccaaaaatagccaaatcattattgctcataaagtgaaaagaagagtactcgacacatgtgtcctatgtcctaacagccatctggtgtaaggctaaatggg

SEQ ID NO: 420 - DNA, 445 bp, Oryza sativa
  unsure (1)..(445): unsure at all n locations
tccatcacgcgaccatgatcaatgtataattggaagatatgtatttctatacgtngattagatagcaggccaagtttaacgagatgggaatggatttccatgatagcatagatatttgaacattttgcacaagccttgagaaggagcacatatgttctgtaatcagggcagaaagcagtgaaacgaagcatactgttgtaatctgtcagtgacttttccggagatcctttctccanagaagctcggaggatggcattagtgtatggaaagatggctctaactggatatctcctcaaacagtttgtgtaggacattgtgcaaataagctttctcaatgcgatcactaccatgcagacacaaaataggctatntcaccaggcatgtaagtgataaacattntctgcacctaatgttattcaagaatacattaacgagacaacgatac

SEQ ID NO: 421 - DNA, 352 bp, Oryza sativa
agcacctgagctgcgctgccacaatcagagacaaacagcctttatataagaaaaaagtcgctataagccatctgcacactgagtcttgacagctaaaagaagatgaattatgcacagacgtaccaagactgccatattgacaataggaagcaattaatttcttgggaaaagttacgttctaaagaaaaaagtgaaaggggctaataacattgaaattatattccatactgtcactgaaagacttatatattgcaggaaaggtaacttcaaattaacctgatcggacctagagtaatgtctgtacactgctacgaatataggaaaaactcctgcgtgagatgtgagagtgcat

SEQ ID NO: 422 - DNA, 372 bp, Oryza sativa
  unsure (1)..(372): unsure at all n locations
aagctancatgacgaagcagtcccacagccgacacaggcggaccatatgccgctttaggggtcccanaccaacaacaggtgaggtcccaaaccatactgtgccaggaagcccagggagggatctctccgacaccaccccgacgaatccacatggagatccgcatcatggctcccctgataagctaggtactcactcaagggtggcccattccaaccatgagggcctacaaggcatatggctcgatgaaatcccacgaatcgcgacacaagtgccgatcaggaaaacccacaacctgaacctccaccgccgcaggttcacaattcatttacaccaagcccgcccaatgtcggcatccaacactgtgtaaaccc

SEQ ID NO: 423 - DNA, 456 bp, Oryza sativa
  unsure (1)..(456): unsure at all n locations
agcttgcaccatgtcaggagctagacgccgtcgtcgctcctctatgatcctgccagnnaagctaatagcagagtccgatgatatagtagaaacaggaacagtcaaaacatccctagctaatatggaaagaatacgatatgggtggttgtgcttatgccaccagttaaggaaattgaagtcattatcgtattggttgacagtgtcactgttaagataggcaaacaactcagatgcattcatgttagcagtataagaaacagcctgaatcaaagcggtagcagaagttctcctagaaaatgcaccagcaccaagtccagatcctgcactggcaccagcatcaccaagtccagaacctgtactggcaccagcaccaaatacagaacctggactggcaccagcaccaaattcagaacctggactggcaccagcaccatatccagaacctggactggcact

SEQ ID NO: 424 - DNA, 434 bp, Oryza sativa
  unsure (1)..(434): unsure at all n locations
tattagttgggatagatcctgtcagctggttccagctaagatccctgataatgcatgtgaggattagtttagacatctatagatttatctcatgagctcatgttctagagaaatggttgcacattgttaagaaatctttctttttggaagaaaactataactctaaatttcttcaacaaaactaattggttgtgcctaacaacagaggctagagatgtaagccattcccgttatctttaagaaaattattctaaacttcttttttgaaggaaattaccaatttaaccacagagcaactgtcagaaatagggagcattaagtgccatatttgaagtagcaatcagtgataaattgataatgatgttaagatatattgattgcaaaattaagatggtagtactttcggcatgatntttactgtactcacaaatagt

SEQ ID NO: 425 - DNA, 456 bp, Oryza sativa
  unsure (1)..(456): unsure at all n locations
acctgcngcatgcaagctcggattacttccttgttggtatgtgctaatcatatatttcttatttaccttntctttctccacgtttggtggaagactgttaccaaaaggccttgtgagaacaactataagtatccgtttatattgttcacggtagatgattcaaaaaagtctatgcttgactggcatacacggttcaacataatcaaaggagtagctagaggacttgtttatcttcaccaagattctaggatgacaataattcacagagatctcaaagcgagcaacatattattggatgaggggatgagccccacaatatcacatattggcatgacaaggatctttggtggcaaccagcatcaagctaacactagacatgtagtcgggacatagtgagttactattgcactacttatgactacaatactaactttatatactcggagacacttaaat

SEQ ID NO: 426 - DNA, 352 bp, Oryza sativa
tcaaatgcagacctgaataccgcactccacatcttgctcaagcagagagatatcgatatacctcacaacacgccaacctctggcaaccacaagttgaacttggaaagcggcatgatcaacaccacgaacatcgcccagttaatacacacgacaacctacagggtgcgtaaaatcaacatgcatacgaccgcaaagagaatatgttctctgcttgctacgggccaatgatatatcctgaatgagaagaaccaacataacatctctgcaagacattcccggcaatcgccaaactcacaaacctacaaactcttatacgatggacaaagtcatacaacataccccgccacaagcc

SEQ ID NO: 427 - DNA, 295 bp, Oryza sativa
  unsure (1)..(295): unsure at all n locations
acctgaggcatgcaagcttntgttagctatgaggacattatcaggcatgctaaatttttattcaaantgcatatcgcaagaaatcaagaattgattctattataagcaaaagctcaatccttttcagttttccaaatattggccaaattctctatgcaaacaagatcagaatatatacatacgaacagctaatattcttgatgtcaactagttctaagatgaaaagagtaattcacgactaatacaaaatattaataagggggaaagggcctgatgctgcaatattgaggatgac

SEQ ID NO: 428 - DNA, 449 bp, Oryza sativa
tgtaggcagctatagtgacttgattgtgagctatttctaatttattatttcagatgtcaaattgattagctgatcgagatcactggttttgatttgaccaaacaagctacagtttgattctgttgcttattaagcttggatggctgtaaaatgcaaattatggtacgttacgcgtaagcccttaatcagaagtagtcaaggacaaaacattgcttatgacagttaagacagatatatatgatacaagtttaccatattcaccacttgtggacacagagaaagtgacaagcagttgaccattatttatcactgcaaggaccatattataattaataatcgtcactgtgctcagaaagtcacactgtgtgcctgctggtgaaagatccaaaaatgacagtaatttaacccaggttgctggtcatacattaacgcagtggtcagagcatgtt

SEQ ID NO: 429 - DNA, 398 bp, Oryza sativa
agcttccagagacgagaatatgcatatctcattttatatcccaccctctcgacctctactaccattgggtctttccaccggagcacaggacgagcaacatcggctgtgtgagtcggcagggggatgatgaggactacgcgtactgggacgagtggctggcgaagccaatccacgagcgggtggcatggcaaatgccgtccgcgacggagctgtaagatgccggggtgacgttccacgccaaggggttgccgtgcagcctcgtcgacgtcacgatcagccagcgcgactgcgtgatggagatccccaccgtggataactatgccaactcacgccatgctcgccaaccttggggcgtactacaaagccggcggcgcgtagagatgcagcggtctatagcc

SEQ ID NO: 430 - DNA, 455 bp, Oryza sativa
ataaaactcagcttctcgacgagatggaatcatcaagatggaactccttaaatacatcatcacgttatcttatgatatcctcactttttaccttcttgtgcatagctttgtgccacgccaatcatgttgttagatgagctctcctccttacttgtgaataggatctacagcttttaggtttgtacttgcttgattgttactatgtaggtcaaataatccgatctcaagttggacaatccgatccatatgactctctaacctggtatcagacaatccaaccctttatagttgtatcttccgcattgcctattcacccccttctaggcgacatcaaggacctttcaatatgtccacatgtcctttaacttcatgctaattaattgcattcacaacgactagtcacggcgtccctaccatgacccaaatttctatggcgactatatgtcaatgatggt

SEQ ID NO: 431 - DNA, 437 bp, Oryza sativa
  unsure (1)..(437): unsure at all n locations
agcttgcatatcatgatagtatgaagtaacatttctggtatcttgctttaaacattgcagtttgttgaacaaaatgtcagcataatacatgggaacataaacatctctgaaatatcgtttcaggtctttccaagattgtggtattttgttatgcctacaaagatgtttccaatcattagaagcatgtttaattaaaacactagaggcacacataaccttttgtttctccgacaagacatgcttttgaaattcactatcaaccgctagctcccaattaatgtaagcacgaggatcatagtctccctcgaaataaggcagtgcagatttgatcttacctagaacatcatcacttacctcataatggtcatgttgatcccttctcatgtctcgacgaagatgtcgatgttgagcgcagctatccncaattatcttgcgta

SEQ ID NO: 432 - DNA, 446 bp, Oryza sativa
  unsure (1)..(446): unsure at all n locations
tgtttatgggcatgagggctgtttaccataggaagttagaatctgtttgagaagaacggaattgcaagatgattcgacagccaatgagtattataaccttatggccgatgagagggaagacctggttcaatcgcggttgcgagcccttgcaaaggtaacaaggataaggaacgagttgctcggcattacaataattcggagggtgagcttgtatggaagttgatnttgccaattgggactcgggataataaattcggtaagtggtcaccgaattgggaaggaccgttccaaatctataaggttgtgtctaagggagcatacatgctacaaggactcgatggagaagtctatggacgagcactaaatggcaagtacttgaagaaatattacccaagtgtttgggttaacgcatgattggctgatgttgccgatacatgatagccgat

SEQ ID NO: 433 - DNA, 59 bp, Oryza sativa
gacactataaaaactcatgctgcctgcagtcgctctaaggatagcgggaccgttctttt

SEQ ID NO: 434 - DNA, 458 bp, Oryza sativa
ctcagagacacctgcggcatgcaacttactgctgacaccatttagacgcattgtttcttctcccaaacgggaagtaactgcggtgaacacgatgttaacgtatagtgcacttgatcacatgcactgtggcctaatcaaaaagtgcctagcgccctaaaagaacgcgacaggtcacacctgagaatatgggctgaagacataatacggctaagccgaaaaatatgccttcgacaccctttaaaagatgacgcatgtaatatgctcccgagtaataaatcttcccggtgttgtagaccgagtgtagctcatatgaatagcttctgatctgagcggctattcttgatggtagactccatagtatatgcaccaattgaatcccgactgccgcatgtattcaggggagaacccttacggggagtactaaatagccattctttagcatgcaaaaatacccatga

SEQ ID NO: 435 - DNA, 333 bp, Oryza sativa
actcagcttgtgggagtgagccatgctcgccagtagcatgttttttatcactccaacaacagcaccctcacatgtcttcattatataggccttcttactataccatctggaccaccgcgcatcataccactgctttatatttcgttgcactctctactctatattctaacatggatgaaccacatatacggtgcgatccgtgggcatcgcctacctacataaagaatgtctggcgactacctcaagcctatcttgggaaatactaggctttttctattcccgcgggaaattgacatatacataaaggggttggtctcacattcatcctgaata

SEQ ID NO: 436 - DNA, 247 bp, Oryza sativa
tgcgtgtgtatgactctaaggtgctatcctctccatcaaaaccgcaagtccataagcatgtacaagatgagctccctgtcattctcttccctaccaatcaaccgtccaacttggcaaccatccattctgtatttcaaagcatgaagaaacttgcacggatcacataaggcctaaaggagaaagggagaactccatcatattcataaaaaaatgccacctgacactacccaacacacccaaatcttgt

SEQ ID NO: 437 - DNA, 394 bp, Oryza sativa
ctaaaaaactcagcttgggcttctgagccggcaccagtagcagagatctgatctctgtgctctttacactatacctgcacagatctgataaagatgacatattgagtaatccatttaacagcagatgccatatttatataatacattatgaacggaacgcacataatagcacactttacgattctggaaatcccgcttccttgtatcactctctaaacgtttcctttttgcaccaatgcaatatttgctacggatactgtgcaagacgttcaattgcctaatcactattatcaatttaaaaaatgactaaaggccacgaattatactttgaagaattcgcatctcctcatggtcgaatgcaaagttcttactcgacaggctctactccttaaaa

SEQ ID NO: 438 - DNA, 343 bp, Oryza sativa
ttcatgatcttaacctgatagcagctgataacggaactactctttataatgcatacaaatatgaaagcatgagaggcatgtagcctaactactatggatattttactgagttgacgcacgtttcaaaattccctgttcaaaagaatccaatttgaaacaaaataatgttttaccattaccatgaatctgtcttacacaactacttctcgatgcctaagttcatatgtcatttctttgccttagagaaacaaaggcacctgtacttttcaccgctaacagagatctccaaggcaccgccttggttgtcctgattccaagcagtgcccatgagcacgctcttttc

SEQ ID NO: 439 - DNA, 426 bp, Oryza sativa
  unsure (1)..(426): unsure at all n locations
taaccaagtttatgaaaaagaaagattgtcaataaataaattattataaaaatatgttcaatggcgtaattaatgaaattaattcgatgttataaactttgctacctttctctgtactcgatcaaattaaacctaaagaaatttaagttagaataaacccaaaataattttgcttcgaagttcatgtttgaccctatggctaacccgatcttgcttctctcgtcttcatgcatgattacagccttgttcaatgtcgggcttctggctaggataaggaaatgaaagtctatcccgtaggattaatatcggagaaatatttttttttcctctcttgtaaaatgctttcctaaaattgaaccttacatttattgttaagctttaataacatgagaatgactatttactanaatagtctatcattaatac

SEQ ID NO: 440 - DNA, 452 bp, Oryza sativa
  unsure (1)..(452): unsure at all n locations
agcttgttntacagtccctcccatttcttcaaaggaatccataaataacattaattgatctggtgtgttgagggcaccattggaaatgggaggcatacaggaattcttcgtgccgattgtgccgacgacagctgctgtgaacttccatggtgcgaggcaacgatcgctggcgagaaggccgagcaagttacctagcaccacctgcgaagaagacatatgttccttccattggcagtgctccttctattgtgggcaacgcacaacaaagtgggcaataggcaacagacaacatagtggaacaactcagcagatagtgttgtccggttcagaagggctgaacggatgaatgggtgacgattattngattttctttttataactagttttatgccatgcgttatcacggatcaggtccatataattaggaatagacttggagcccgtacgttgat

SEQ ID NO: 441 - DNA, 463 bp, Oryza sativa
  unsure (1)..(463): unsure at all n locations
tcgcataccatanacatgacaaaggtagtacacatgcacagatgtaaaagaagtgatacccttaccttttttgcagcttcatgaagaggagcaaagcctgctgcatctttcttattcggatcagcacctttgtcaagaaaatacttcacagtaatctcttgtccatccaacacagcgcataacaaaggtgtcatacctagcaagggcattacaaacaagaaatttaatcagataactccaacaaaacgatacaggtagtgttgtggtataacagctttgcaaatgcacaaatattagctgctacaattccaaatatgcaaaggagcacttcatgaaatacttatagctcagactgcatttatatgacatgcaatattaaacaatggaatcattcagaaacaccacttaataagttcatatcaacaaggataatactatagttaaaactatacaaaactcccat

SEQ ID NO: 442 - DNA, 361 bp, Oryza sativa
aaaacattagcacactggcaagttggcaactagtgctatagatcaatggaacagtagtacaaacttaagctgaaaatcaattagcgaaggatcagttcagtgcttacgtttgaagaggtggttctcgaggctgccatgctccatgtactcgtagacgaggaggcggttctcgtcctcgcagcagtagccgaccagcttcaccaggttgggatgccgaagctggccaaggaagatcacctctgcctgcaagcaacgacgttagaatcatcagaaatcaggtagtagtagtagtagcagcgaatcagcagcatgatcactgtcatttcagtggcactgttgcattgggcagcatgattagatc

SEQ ID NO: 443 - DNA, 454 bp, Oryza sativa
  unsure (1)..(454): unsure at all n locations
tatttctgtgctattacactntaataagataataacccttcggttcttccatttcaaaataactntaagtttagacttggatgttcaaaacaatatagaagaaaaaacaccaaagtgtcactcactaataggaaactagtatgtgtggataggtagataggtaggtaacgataggtaaaagatattgatggaataaaaaaaatcatcgaattgtgaattagagcatgatataggtaagttgataaaggtaaacttattttgacacgaggtagaggctaaagtaaagttattttgagactaagggagagttagctagacttaagaataagtagaaactaagtcaaaacatgccgcatatgataattttgagtaacattnttacgtgttgtacatgcatgttgcacatctcacaatattntaaaataattttatgtacatctaagtatacacaaca

SEQ ID NO: 444 - DNA, 329 bp, Oryza sativa
gatattattagctatagaacgcaccgtaacaactagcatgtgacgctctatggatacccaatggctcaaacaatgagctctggcaaaataatgtggatcaatcttgattgaacaattatcatagatccatcctttctcgcacggaccatgactatcatttaaacgatgatgtaaactgctatttggaagtcaatagtcatcctcgacacataaaagaggaatgcatacaatgggtggtgatcggatgatcgtcaaatttacacatacactggagctgaccaactattactaaaaaactactgtaaaacactgttgctattacaaaacta

SEQ ID NO: 445 - DNA, 451 bp, Oryza sativa
acactacacaaactcacgctcgagaaggcggatcacgcataccgctacacacagtggtgaggtattactatttgcagtaacacacctccataaggctgcgattgatatgactattagctgctccaatatttaccaccgttcttgtcatgtaatcctgtatacattcgcgaacataaacatttgttaaacctatgattttcaggacaagaaatacatgctggacaggacatatatagtgactcaaaccgtctgctcttacaagttgccccaacacatggtaatgtagcaaagttagtgataactccatatttttagtaagattatattccgttgttgcctctatatactcacttacaaccgttatatgacttcttgtgtcgtgacacacgaaatgatacaaccaacagtattcacgttcttatgcaattgtcccttgacaatactatatagt

SEQ ID NO: 446 - DNA, 461 bp, Oryza sativa
  unsure (1)..(461): unsure at all n locations
acctgcggcatgcaagcttggacctctggaagatgggcataccagtctatgaatgtatagtaattgccactacacaaaaaatcgaagtttgcaagtacatgggagcacaagtagagatttctgtggacttcttaactgagaaagaatcatgggaactttgctaattcaaagcaggagtttctgacatatctggaacagaaaccgtggaaggaaaaatagcgaaaagatgtggccgtttacctcttgcactagatgtaatcgggacagtcctgtgtggaaaggacaagaggtactgggagtgtgcattgtcagagcttgagagatcctaccctcttgagaaggccgaagtgttgcaaaagatatacatgcccttggaattcagttacaaccatcttgaaggggatgagaaanaatcttcgttcttgtgtgtaacttgttcctggagacacaaatagtaaaat

SEQ ID NO: 447 - DNA, 197 bp, Oryza sativa
cgggccaaaaagggccacccccggcaggaaacaaagagccaaaagcgcaaaaacccccaaacggggaacagagctgaaaaaccgaacccaaaaccccgggacaaacggttacgaccacgcgagaaacacaacacacaacaggaccaggcgggccaaacaaaagacacacccaaggccacacacaacgaaaaaaaagg

SEQ ID NO: 448 - DNA, 432 bp, Oryza sativa
  unsure (1)..(432): unsure at all n locations
tcggcgtttntttccacccctagagcagaaatgctctctcttaccaagaatgccatgctctgcaaacactcgtcgttacaagttttcaatggaacctcgccaaacttttttctcccattnttgacctgagagcgcacactctctgagcactatcacaagattagtacagctaattaatgttcattcaatatcggataaagacacataaccacactcactcaggaccagctcttcacatgctgcagtttgcaggcgataaaccctcccttgtaccgaagtgaacgagcactattgcacgagtacttagcctgtgtctatcgctttcggcccgttccaaacgctcccgtccaagcaataagactagaccgtgctgagatataacaccattaattaatggaagtatttgcagtttaatgcagcttgaatcttatc

SEQ ID NO: 449 - DNA, 455 bp, Oryza sativa
  unsure (1)..(455): unsure at all n locations
attacgaacatgaagccagggtatgttatagaacgatctttgtttatgctggnttantcatatgcttaggcggagaagcgtgctttgttgtatagcgataggtctggttaacaacctgctacattgatgggcagcatagctacacatagtcgtgaagactaatacggatagataccagatcaagtttctgatcaactcagagcacagtataatcagatatcacgtcctatagctattattgaactttattacctccgcatcgccaacactggcagtatgatggacaatggactcatcatcatcttcaccatcctcttcagtttcttcatgtccagacaatgtattgtaagtgccatcatctcctgcaaaattattgtcatagcctgaccaatctcttgaatatcttcaaggtcatttcatctcctgaattaatggatgttaaccatctcttctca

SEQ ID NO: 450 - DNA, 421 bp, Oryza sativa
  unsure (1)..(421): unsure at all n locations
agctttgtcgtgacgcgtctcattgtgtngcgacaatgtctatgtgcagggcagccgcggagtgcgggtaatgtgtacatccactgcagtgtgagtaaaccaaatctattcgaatagccgtgctcgcggttatagagcaccgggacatgtattacacttggctagactctaaattcttaacctgtgtgggatgggatattgcatgatgatttttatactgatggagccacttcctgagaggagggaaggtggacgttctcatagaaccataacgactcaatggctggaagctattcttgtgatcacaatggatggtggacagaaccgtcgttgttaaatacaaacgctggtactaacaattgatcagtcaatgctagggcttatgctcgtgaaaagaattacaaaactggcatatcgcaaa

SEQ ID NO: 451 - DNA, 431 bp, Oryza sativa
  unsure (1)..(431): unsure at all n locations
ntggnttcgatctctcttctctcccgtcgagcttaaagaccattctctattggaatttcatcggagtttcattcaataataaataaagatatcatgcatgtaagttaaatttggtgacatggcaatataacattcacatacatcatgtttgtacaattgtgcagtttgggggctagctagtttcatttcatccaatcacatgcatcgttattaaacgttatgaccaacctataaaatcgtgaaataggttacaagaagttttaacttttattaaagtcaaattgtttcaagtttgactaagtttatagacacatataataatatgtatattactaaattatgttcattaaattaatgattaaatatatttttataataaatttatcttgggtcgaaaatattactctcttttctataaatttgggttaact

SEQ ID NO: 452 - DNA, 301 bp, Oryza sativa
atctgctccttttagtgcttgctctgtctgatgtgaaaccaactcttctggaagcgtgcaaaagtgcacaactgctaacattttttattctagtaaattgttaaacgaggcgctcctggccttgtagtttcgatgataggtcggtgtgttgcaacattccatttgtgctgataaacttggtggtgaccacacaggttaccaaaatatgcgtctatgattacttgaacgctgatattctatatgctaactatgttactaacctcgccaaacgggacaactgactatactacctgtgaatcta

SEQ ID NO: 453 - DNA, 440 bp, Oryza sativa
tgcagtcagtgaagtaagccgccaattctagatggctgttgtcatcatctctcagctccttcctcttaagttccatcctcaggccaagaacatactccctcacaatctcgatcaactctttcacttcatccacttccctcctcgagtctaccacgataagagggatggtatgcaagatgctaaggaactgcctcagggcttctgggaacttaccatctgtggtggccttataggcagccttgagtctgtcttccatatgtgggaacgtgaaaacaagtgcacgagggcctctcacgttaggacttgcagactcgctccaacctttcttaacagcgataggtattatgggggcagttgcaagtgcacgaagatatgagtggctgcccatgtgcaaatatcaaacaggggcttgatggagcaaacgtttcatgcccaactgg

SEQ ID NO: 454 - DNA, 350 bp, Oryza sativa
aacaatactctagcttcatctccgtaagggacacagtgttgacagcatctttggttcctaaatgaccgctcattgatatatgatgtgtgggtgcaataacagccagaaggtttgcttataatacagtcacctctttaagagtgcgcactatcttattgatcaagcgcccttgcgctgataattaacagcgctaatctatccttctaatctgtgggatgtcataatgcattcggttagggagcgttactccttatagggaaacaatcgtaaacgctggggtccacaaatcggaagctataatgtctgcttgaataactaaatcattggtgagaatccattgccccttaaac

SEQ ID NO: 455 - DNA, 473 bp, Oryza sativa
agcttgcatggatgtactacatttcactactgtcattatcatataagtagactgaaatacaaatccatgtgaagacttgacactctaagaaagcacacacttatataagaaacttctcgtcctaaagaaacatgtagctgcagattcggacgatgaacgctatcagacgcaattgatcactactaagcaactgaagtatcttttttgagataagactattttaagtatggtattatgcacagtgaaatccatgatagtttatactttcaccgataaaaacaccaagagacatggataatttcagatgcaaatcccgtgttaccgcgccaatatcaacacattataattatgaccctgatactcgacagtcatgaaaataacttacaccccaatacaatgcaatattgcgattactatgaggtctacctctatcatggaatatctgatatcatcacacgattctatactccctc

SEQ ID NO: 456 - DNA, 337 bp, Oryza sativa
  unsure (1)..(337): unsure at all n locations
tctaagacanattaacttcagcttcagntagctcatgttgttttatttccaaccttaataagccttctgggtcaaaaggcccaagacaccatgctggagcatcagctcggagaggacctgcccttggtgagctaaatgtacaatcctaatcaaagataattgcagttcacaaaaagattcagagtttgcatggtacaggttaacaaaacaaaatattgcacttgattacagaaggacaaatattgtacatctgatcattgcaagattacagtttctatctttgatcggatcccaactggctgcgtgtagaaatgaatgattttccanaccaccctat

SEQ ID NO: 457 - DNA, 435 bp, Oryza sativa
  unsure (1)..(435): unsure at all n locations
agctntgccgacgatggtccgtgcaacagcatgattaccacaaataccagaatgtatatccttcagcaattgtctcccttcctccaaagatacacaacgctgcagtattcctgatggacttttcttgtacagatcagcttcttgaataatgtaaagcctgctgcgcctggaaatccgctcggcttcattattgtcttgagggagttcttgtttggtcaaaaattttatgagaggttctctccagtcggcttcaatcatgcttacgccttgagtatccatggctacagttgtctcttttctgggcacggtcggttcgtaaagatgttcgacgaacacatctgaaggagctgctttccgtntgaaacaaaatttggcaatctgtctgctgcctcattgttatgtcggaggacatgggtgagctcaactccatcgaat

SEQ ID NO: 458 - DNA, 358 bp, Oryza sativa
  unsure (1)..(358): unsure at all n locations
tagccatgcttagaatggncttccttgtcattatgggctcatttcanacatgaaaattgattnttaattaatctggacaaaactttaatacttgtgattttgataaataaaatggtggaaaacatggattctaggtttgggcctcaaatggtgcacatatggtgattagttgtgtaccgatagggggagagtgcgcccaaaccgacctaaggacttcactcaatatcagttcatttcgtatacagtacaaccacatgtgctaatatgggatagcccaagcttagtaaaatatttattggttaaccttacattcctgtatggcggtgtgtatgagttcggataactcanaagaactttc

SEQ ID NO: 459 - DNA, 480 bp, Oryza sativa
  unsure (1)..(480): unsure at all n locations
agcttctcgtattggttcatgagcttggtgacttctttcgacaacgctttcaattcaactcccgcagccgaagccaagcctttcgcgtacgtgctttcctctagtagcttctgggtgcgagtctctagttgagcttttacttcaatcagctcacacaccttctgcttcagctcatcaatctcaactgactgaaggacaccccccaaaagaagtaagttaaatgtgcaaaccaaccaagtcatagagaggcagcaccataatgaagagcaagaatgcttataacctcatatggtacaagcagagatcatnttgagtcatatggtgtaaaaataagacgctgcaataaatgtttttgaaatctacagtatgcaaagaatatgagatagtgctcgcgtggaagtgcatgatcaatgatatcgggatactgcctatcggaacagaacaatntaaactgaanatcttgatctcgcttcataacac

SEQ ID NO: 460 - DNA, 367 bp, Oryza sativa
  unsure (1)..(367): unsure at all n locations
gctcggaagagaggcaaggggtgtttgcaaatctattgtttgaagttcattntgaaaccactaagtgatttatttctttctaagtttgggccgagaagtgacttgcgtctcgattcgactttaagagatgtntctcaacaactcaatatgtaatgtaccgacctcccgggtcagatcattacttctcggctcacaaagccatttcacttgattaaacggctcctagagccttattcatgttctcgaactcccagagtccagctgcccaacaacacaacgatccgctttcacttcggaagccaagtctatgatgcccgcagacattctgaatcacacagattcgtttcttgaccactcaggtcatcca

SEQ ID NO: 461 - DNA, 120 bp, Oryza sativa
actagcttcaggacagtagctggagaacgaaggatcgttttcttcttatcccaacgccgggacagtcccgttcgtacctggctggtacaaggtacactggcattggggcaacccttctta

SEQ ID NO: 462 - DNA, 344 bp, Oryza sativa
gtcacctgcggcatgcaagcttgtcaagttgcacatggcagtttcatactgattctgtaactgttaaaccgctctatttggggagggtcataccatatacggtcaactcgtacggcacaggggaaagaaaaatgtgcgcccgtgcctgatgacctattgatgtcgcaagctaagcaggcttcttgattacttccgttccatagccgtgaataacatctggaccatctggtacacactgtaccctggaccgaagaagctcctcgtaagtcctctccctttgatgggtggggctttgagggtgggctctatctgtcatgaactcagaagctgttttacactagact

SEQ ID NO: 463 - DNA, 405 bp, Oryza sativa
cctatccatgtataaaggtacgaggaaggtgtctttctttgcaactgtcttttaaacgggaatgagggttcccacttcatcggatgtctcgtcgttggtcacacatgacattcaacattgattggaactggatgatcggtgaagtcgaacagtctaggcggggtggctattgacgcaaaatccgttccaacacgcaaaggctaagagatttgtttgactatattgcacgtccttaatattgggttcacggcgtgctacttggaagttgcttcccctgaagtatttatttccccttgattttccaactgcgtgtgcaattttgaccatgatgcaagcaaagtgcaaacaaagtgtattatacacacataattttcttgtagttcgttttggaaacaggatttgctt

SEQ ID NO: 464 - DNA, 430 bp, Oryza sativa
  unsure (1)..(430): unsure at all n locations
agcttgacgcttatgtggcatcagaagtcatgttacaattgaagcctacgagtccagaaaataagattcctatacacccgagtgtcaagaactatttcaggggtatgtctgcacctgccaaggaggccataaagctatcagactatgagcgaacacttaagaaagcaacttctggaaagtccaaaccagtcccttagcttggagagcaaccaaaccatgagatcgagccgttggtgaccgatgaagaaattgggatactagatnttattaatgacatcgggctaactacggatcaattgctacgaggcgcaccaatcgaaaaggcggaagtgaaatacatgtacgaacatggtaaacacgtttgtaagcctgagcaactgtcagtcctaccaacacanatgtaccaatatcatcaactgtacatggagat

SEQ ID NO: 465 - DNA, 444 bp, Oryza sativa
  unsure (1)..(444): unsure at all n locations
tcatgatgactgccacgcatgggtagtcctgagattgcaattatatctattaattaggatattntatgtaatttccttagagatattgttgggcaaaagtctgccgtaaagacttatggtatattagagtttgttagagataagagtcgtgtccaatgtggacatattttgtaaatctcgggtataaatagacctcgagccccatgttatcaaactaacacacgttcaatacaatctcggggcatcgccacccttntactttcattttgtttcgatgagttcttgcttttgggttgagctgcatcgatttccatcttcaacaagaggtaaaacttggtatggtggcttgcgttctctggattaatgcttccatcttcatgatactctaatcttgttgctataattcggcgaagtatcatatatcttatataatctccggccata

SEQ ID NO: 466 - DNA, 375 bp, Oryza sativa
  unsure (1)..(375): unsure at all n locations
cactgtcccacagtctgctcatctctcttgcactcacatttcaccctgttatcctttctttacgggtaatactgtgaattatttatttataacgatacactatttttaacaaaatatacttaaccaatagcttaaaaccacctatctaagtaatgaagatatgtcgtacaagctatctatttgaaaacttagtttctgaagtgtggagcanataatacatnttccataatccatttttaataatatgaaatgagtttgatatntaggaataattttatagctatagttatctttcttgttttagccatcacaaaaagagcattcgaaaattgtgaaatcatgtgactaagaaaacgcccacaatcatcctaatta

SEQ ID NO: 467 - DNA, 269 bp, Oryza sativa
  unsure (1)..(269): unsure at all n locations
agcttatcttactgcatgtgggaaacgatagatatctattaatgcgaccacagtgctcagcangcctttccggatatgcagcatgcatgcaaaggaccaccatgggatataaaacatatggcggcacatatgctatgcacagcggtcctaacttgttcacacgcgcacagccatttaaaaagacgctcctagaatctcacagtattattacccatggtcgagaacccacacaaccctgcgctaacacctagcctacgatgaatcatacc

SEQ ID NO: 468 - DNA, 306 bp, Oryza sativa
tcttatgataatttgcctcgtttgtcaaccaccattgcccattggttttataatacttactatgacctacatacatttacatcggctgaagatagaacaaacagtgtgctgcaaaagcctttatctcattgggtgcttgcatcaatgctttcgtgccttgtccacctgttctatgcatagatggaacttttattaccggaaattaccgaggtcagatattgacagcaatttgggtgtgatgggaacaaccacgttctacctatggctattgcatttgatagagtgacaacactgagagcttgtact

SEQ ID NO: 469 - DNA, 216 bp, Oryza sativa
tatctcttataatattggagattactcattgctaagtatgaaaaacatacctgtgccattgtttaactagctactgctagggcgcttggctatgcacatcctttcggtattaggcgtaaaggggaagtggattatcatccctgaaggagatatcccctcgctatttgtatgtcacttaaatggatatgaaaaaaatttaacaaataataagaagat

SEQ ID NO: 470 - DNA, 385 bp, Oryza sativa
  unsure (1)..(385): unsure at all n locations
actcaagctntggtnatgggatcctcaccagcgcaaagaagtttatctcttttttatcaccatgagngcgcaggacaatgccaaaaacattntcgacggcagacaagcactctcttctgtgctccacttgaatggtctttttcctctgcgaaaaggagtcatgctcaacatttgattgaacagaatcacctatcaaaaatgcttacgtgataaaccatatttgcaaaaagagaaatcacgaacatgaaattggacagacttcacggcacttacatgagatgctctcgagctgttcggcagcaaggacaggtgggctggacacaggcatatatctaacattacagtctgctagatgtgtcgacaagctctgcatcagattcactat

SEQ ID NO: 471 - DNA, 227 bp, Oryza sativa
cgctgctggccgcatatctggagggcgctctgctgtgggtgaacggtgcaccgatgatgacttatgaggctgcggcttctcacacctttcttgctgagaccggatggcttttcccactgatgtgctttacaataactatgtgcttagattatcatctacacctgatccgttgccttgttataatgctagacaggatttcctttattctacctttcttactctaaaaa

SEQ ID NO: 472 - DNA, 330 bp, Oryza sativa
cgctatccgtgtgtactactacaagttgactttattttggccatctaaaaccactccaatgatgcatgtaagtgttattcaaactttggattgtacaatgtgaagcgcattgtaattctgttctgtacgtagtcttttatacattatgaaccagaacgaactgctcgtaattaattctatcagatcaaagatgtcattctttatctgaaattgaacagctttgaatctttgattgcagatcaaatgcatgcaataataatggatatggatgaattgaagagagagagagagagacctggacgacgtccatgatggtgcgcatgacggcgg

SEQ ID NO: 473 - DNA, 411 bp, Oryza sativa
  unsure (1)..(411): unsure at all n locations
agaagagcatcatcaacagattgggtcccaatcctagattntggggataaatgggtaaaattcatctccaacagattctgctaaaaaattggagttcccttccccaggtttttgggtctctatttgtaggggtgcgcaagccgaacccaatccctcgcattcttcggctttacgctgcttcgattcattcccgcgccaatgtcaccaggtaagcatagtataaaaactcggaccggagcttgacccggcggacctttcggttcaccggtccgccggtctgaccgatgaaccggcggttcaaccgcgattntttacgtatatgtatagtgcatgtgtgctagtagtcacaagtgatatactggcaagatggtcagcgagatgtaacctcaacccacagacctgaggtcgatt

SEQ ID NO: 474 - DNA, 307 bp, Oryza sativa
  unsure (1)..(307): unsure at all n locations
ctgcagcttggtacttattactagcgccactagttttttatacttanccaaactaacccaaaaacttgtgctattaattggataaacatgtcttaactccctctcttcacttgcctttgatgccgcgcttcaagcctgaataacatgtatggtgttgatggatttgtcaaggagcttcatacgatgtcctttgccataggattagcgactgcccctctgtatgcccagattctccatgatcgtgatgatgagaagtgccgagncacaccaccatgaacagcaatagtgaagatataccatcagtgat

SEQ ID NO: 475 - DNA, 498 bp, Oryza sativa
  unsure (1)..(498): unsure at all n locations
gtcacctgcggcatgcaagcttgcattgctcaccggccggaggagacgctatngttggttggctagctacttcctccgactcanaataagtgcagttatacactattcacgttcaacgtttgaccgtttgttttatttgtaatttttttattagtatattntattgctattagatgataaaacatgaatagtattttatgtgtgactaaatattttcaaatttttcacaaatattttaaataagacggatgatcaaacgttgggcacggatatccacggctgcacttattttgggacggaggtagtaattaactagctgtctatccatgaatccgtacgttgtaattggcgtgtgtttcatcgtactatgcttaaggccatgaactgtatgtaataacgcttgtgtggcatgcagttggtcattagtcgatgatcaatgtactgttgatcgcaagctcgttgatatatttcgagtaataatggaaatgatgggttttg

SEQ ID NO: 476 - DNA, 324 bp, Oryza sativa
  unsure (1)..(324): unsure at all n locations
aaccagctatatagacaattccttgtcaaatgagagggactgacatttttaaataacccaagccggaacgcccctggtcagaacttggttttccatgggcatctgcaaatcgggcaacacattttcacctacctgtcatattccaaagaagcactaatttcagaaaaagaaccaatgacanaattctgaccgcatttcacataacaattgaaaaacagattccctgtgacattgatgtggaatttgttttttataaacaactgatgcaggatgtgggaaactgcaaataagaaattctacagctcatcatagaaacccttggcc

SEQ ID NO: 477 - DNA, 341 bp, Oryza sativa
  unsure (1)..(341): unsure at all n locations
gtcacctgcngcatgcaagcttatgacatgtgttacgtaatatgtaatattatcatttcatcatcacctcatatcaacatcacctcacgttaaggagagtccacatataatttttataaatttactacatgcatctatgaggaggaaaacacatatctaaagataagtcttgcgaattatctaaaattaatcgagcatgataaaatcatgggaaaattcatgtaagctctactcaacatatacaacacacagtaattgtggtacaattaataaataaatttgatacctcaaataaataagtcacaccactcaaataatagacttattataaattcttaatc

SEQ ID NO: 478 - DNA, 341 bp, Oryza sativa
  unsure (1)..(341): unsure at all n locations
gctttatgtgtgatttatattanaatgaatttagaggcaaaaattgtactacttgtgccaagttttagggttttatattaaatttcatatctttgtgaatctatagcaactggaattacctcaaaattgtactacatgtgccaaagttgtgcatttttctgttaaacatatattntgttgggtatttcttttattattttccagattttaaaaaatggggtccactggtgagtgagagtaaatatgcagaaaagtccctgaggtttctaggaatataagccgaagtccttatcacatgtttaatactatcttcataaagagtgctccaagtttatactttt

SEQ ID NO: 479 - DNA, 399 bp, Oryza sativa
  unsure (1)..(399): unsure at all n locations
ttttcctggatggtatagaatttccaaattgtagtccttaattaattctaaccatctcctttgccgaagattaagatccgtctgggtaaaaatatatttcaaactcttatgatcggtatagatcttgcaatgattcccaattaagtagtgtcgccaaatcttcaacgcatgtacgactgctgctaactccaaatcatgagttgggtaattatcttcatggggtcttagttgtcttgacgcataagctactactttaccttcttgcataagaacacatcctaatccttgtcgagaggcatcgcaatagatctcaaaatctttttggatgtctggcaagattaataccggcgtaatagtaagcttatgttntaatctttgaanactactctgacattctgg

SEQ ID NO: 480 - DNA, 413 bp, Oryza sativa
  unsure (1)..(413): unsure at all n locations
tatgggactccttcataatggcctacttaagtgttttatgtatagtaaggccctaaaggagtacctangctatcaaagggactacttcaaccatgaaggtcttgggtatgttcctccacctaaaggaaaggtggacaagagtgatgatcaagaagccccaaggtcttagcaactttgttaaggaaaaatgtatccttcctaatgattatgcttctcattgttcttttgatgcatcttatgttcttaggaagaacactagtggtcgtgttgttgctaagtatgttggcccaaagggaaaaaatatttctatcaagagagtactntaggtgcctaaggcacttgttactaacatgagaggacccaagcaagtatgggtacctaaaactagaaattgatctcttgangaatatgtc

SEQ ID NO: 481 - DNA, 446 bp, Oryza sativa
  unsure (1)..(446): unsure at all n locations
agtcacctgcngcatgcaagcttaacattgcgagcgatctaagttgttttcatctttttatcatgcgttgataggttgctcctgcgttctttaatccacagggcatggagatgtancagtatgccccaaacggtgtaatgaacgatgtcttcaagcagttagattcttttagtcggatctgatgatatcccgagtaacagtccaagaagctgagtaactcgcagccggccgttgagtcaaccacctagtcaatgcgaggtaacccaaaagggtctttgggacaagatttgttgaggtcggtataatcgacacacatgcgccattgccccgtctttatccaaaccaggactgggttagccagccagtcgagatgaatgacttccttaatgaagcctgctgctaacagcttcggtaattcctccttgatcgcatcctttctgtcctgt

SEQ ID NO: 482 - DNA, 389 bp, Oryza sativa
  unsure (1)..(389): unsure at all n locations
tcacacaattgtaggatggtgaaaaaaagcctatattctgctgttagacaattcataattaggtaagggaatttggtaaagagtacaatttactctgcaagaaacatagatttatgcttgctaatcccaatagatcatcgagccatcactttcttttacagtagtaacttcgctcaagaaaatgtttgccttttaaaggaaaagggataattntgctctaccaccttgccagggccagagttgtgtgcttgtataagttaaagtcagtttcttttgcaggaaaatgctatgcctttactctctttcctaaaaaatccgttntgggttatgctgttacagtttctcttcatantttcttttagatgttggngcctgtgtaccaactgcat

SEQ ID NO: 483 - DNA, 401 bp, Oryza sativa
  unsure (1)..(401): unsure at all n locations
agcttcgccggcgccaccctgctcccaaacaatgctgtattctctcgccatcaccgncgataccgtcgaggctggtggcagcgtgggcacgatgggcgatgttgatgggaacgggtggcttggtagagacttccacgtaggtgagaaaggtcatgaacacgacggcatggcctagttagacgtatagagaaagaagatgagaatggagggaaaagaggggtaactttggaagtccatgtgttgggtatgttgtgccaaaagagagcgcaagctagcgcctcaattaaaaggggggtaactttggaagttcatgtgttgtgtatgttgtgccaaaagagagcgcangctatcacctcaattatggtgcagaaaatggagcgcatatggagattttcatgcct

SEQ ID NO: 484 - DNA, 378 bp, Oryza sativa
  unsure (1)..(378): unsure at all n locations
taagtacagaatattcctaacgtggtctaagcctgggttgttattcagctcccaactgagntggtcataaattcgtctccattctgttggattcttctcacgcacggacaataggcttccaacagacacaatagcaagaggcaagcctttacacttgttcaacatttgtgtcgccaaattcttcagctcagtgggacattcgtgatttgcttctctcccgaaagctttcttacaaaaaagttcccaagactttccttctgacaaaccctctagtgttagcacacgtccttccgatgcgaattctgcaacattaccaatacgtgtagtaatcagcaatctactttccttaaaaatctgagcaagagctcttgacatatc

SEQ ID NO: 485 - DNA, 311 bp, Oryza sativa
  unsure (1)..(311): unsure at all n locations
agctngcactgtattgctattattggtctgttgtacatatacagcaacacggaacaagtcagacagagacgatatttaccttttgacgaaccgctcagctcatagttggagtcttggagctcggcgatccggtctctcacatcatgctcagatttcttggcaagctccttatcttcccgtagctggtctctggtggattcaagggttccaaggtggggaactaatttttcgagggttgcggtcttcggctcattcctaagatggattctctgcaccacatatttatctttgttcatctanagtgaccgaca

SEQ ID NO: 486 - DNA, 377 bp, Oryza sativa
  unsure (1)..(377): unsure at all n locations
tgttcctcatcttggaactctggaagaaaccatagataaactttacgaaaccaagaaggaggccaggagaacagaacatacacttatggaccggatcgccgagctccaagaagccaattttgaactgagtggttcttcaaaaggtaactctatttctgctcaactcattctgacttgactcagtgactaaatagacattgtccatgttatagtccaagctgccaaaattgtcgagctggaaaggcaagttagtatctggtagtttagacgtggtgtctagattacgggatatcattatttggggttatatattgcggatgagaggtgggccgctgatggtgacagctcantacgggtattcctctgcgcctatatat

SEQ ID NO: 487 - DNA, 364 bp, Oryza sativa
gcttgctgtcttgggaggcttactcccgttcttgccgaccaattcttcgtggcgaatccctttggtgaatgcggcgatgataacgtcgtcggtgatgtccgagatcttgttacgttgttcggaaaatcgtctgatgtaatctcgaagggattctccggatttctgaataacgttgtagaggtcgtattgtgtgccgggacgctcgaaggtgccttgaaagttggcgatgaagtggtcgcgtaattcagcccaagatccaattgtaccacgggtcaatccatggagccaagatcgggcggaatccgctaaagccactggtaaatagttcgccatggctttgctgtctcctactgctgcgcggatt

SEQ ID NO: 488 - DNA, 349 bp, Oryza sativa
  unsure (1)..(349): unsure at all n locations
tatgacatcatgcttagattatgctaaactgctccatggaatatctatggcctttnttactgcttcatgggcggatggcacaccaacacagaaaaaattacaatcttttggaaatatagccaatgcagtgccctatccaccttagaactttcaagctaagacttgatgatgtgagggaaacaaaagggataataatatattnttttgtcaatactgaatatcaacttgtcctccatatttcttataatttatgttctatgaaacaatatcttctttatctccaggtgctgattaaagctaatgtcgatattacataaagtggtaaagtaaactgacactnacctgacaa

SEQ ID NO: 489 - DNA, 310 bp, Oryza sativa
  unsure (1)..(310): unsure at all n locations
ngaccaaaaaaactacaccctctatttactactacatttgctagaagaatggnggntcattgtctgacaaggaaataatcccatttggttggctgtaatcaacaagaggatcatttggacttaactttcattctctctcgggagttctcactggttcggcttgtgactagcacagatggatgaagctgcatgntttgcccctggtatgctggcacttggggcctctggctatgaggagactgaaaaggctgaagaaaatatgaatcttgcgaaagaggaagtcctttaggaattctcacttttgatattc

SEQ ID NO: 490 - DNA, 419 bp, Oryza sativa
  unsure (1)..(419): unsure at all n locations
agcttctctatctattattactgaggtggaaatatgattatctctatcaaatcgatttgcacagaatgacacaaaaggaagccaagaaaattaaaaatttccacccggaatcgctggaaaacgcaagcaaggtaggactatttaagtaggagtccaaccagatgcccaccaagagcccctaatccaactccaaccctagtacatagactagaactacagagacaagcaactcggccgagcaaagaacctgctttattcgtacgaggtatctttgggagggacggaggccgccggcagacggcaacgggaggtcaagggtggcagttggggcaccgccggcggcggtggaaggaggcaaagaagagcatagcanagggaccctggctcagccgctcatggagaggaggagaggaggtgga

SEQ ID NO: 491 - DNA, 423 bp, Oryza sativa
  unsure (1)..(423): unsure at all n locations
gcttaaattgcttcagtccagcaccagaccattggatggaaaaaatcattcatatccagtccttttatactaaggccnttacctttcatgatctagctgacatataaacttgatttcatctataatatggtcaatatgtgttttttcaatgtttacagcaaccacaggggaacatcgctacctggtctcacaatatggattaacatttgttcatatatgtctgattaaaaccaaccgtacactntacctttttgcttttcttcctgccatatgtggttcatgcagtatgtgaataacacaaaggtcaattggaattacacattacatgttagattgcttatatgtcacacatattaataagaaccatactgtagagttccttttgatggttggattcaattntaaacatctccttcaatcata

SEQ ID NO: 492 - DNA, 371 bp, Oryza sativa
  unsure (1)..(371): unsure at all n locations
ttaagtcacctgcggcatgcaagctnttcttcattatcatcatcagattcatctacttttttatcttgcattacgagcaataaaagctagatcaacaacttgcttacctttgctctcatcttcatcttctggttcatcaaaaacttttatgagttcttggattaaccaacgcatacaatgcttcttcttctncttttccttcatgttcttcttcttgttcacgtcatcatctttgactcttccatcatcttccttctttcctcgcccaagcttaggacaatgcgagcgaagatgatcaagtgctccacactcaaaacaacgatacggntctccctctttcctgttcctaacatttttcatagctcgagaaa

SEQ ID NO: 493 - DNA, 420 bp, Oryza sativa
  unsure (1)..(420): unsure at all n locations
agctntacatacatatgatcatcctgcacgctgctatggagatgnngntatattgttggttaacaacaaaagaagactggcacttcacataaaaaaacatgagtacatacctattttattttacggatttggaattaagttggctgagctgcagcaaaaaaaaatgccagcggaattgttttatcaagagaagttaatggatttggaatcggcaaacaccattcatcaccaatacaagtatagaaggacttagctctgaagcagtgtaggctattactgacaaagtcaaaactgcatatgctggttgctggacagcaccatgtatactctctgattgtaacacaagagctccaaatatctccaatgcctaacattgcaaccagactggactgtggtcctaacaacacttcatcactcagc

SEQ ID NO: 494 - DNA, 384 bp, Oryza sativa
agcttaccgtgcatacttcgtgcacaccaacgagtaatatgtcacgtaaacattctacaaacaaatgagaagttcacgtcgttgtttagtcatgaagaatcactcttagcgtaagtaggtccttctattcaaaatagccatatatggcgacttgcatgacaatattcatatgcaccgtaagtcttgaccgtgcacaacttcatgctacactcaactagcaagatatcatctaatgattctagtcacaaacaatggacatctcactcatagtgaatattacacatatctactaagtctcataatcaaagtattacattttagtcgctccacaaagtgaagaagtgatagtttaagggtaaaaaccgtctggagtgatatttttat

SEQ ID NO: 495 - DNA, 382 bp, Oryza sativa
  unsure (1)..(382): unsure at all n locations
tacaatactcaagcttctccaccatctcgctgctagccaagttatggcagctacctcttattatgatcatgcggctataacgttatttgatgacacactttggttggatcaacgtgtgtcgctgattttgctccgccttcttcatttgtgcgctgaggacacgctgcataatgaggctctcatagtgatccgcattttcagccccaatatgctcttcaggggctcattatctacatggcagcctcaagcaagcaagtgtattctcatcgaaatcactagtagacgagtactcaccatcattntttactaccaaaactcgcttgctagggcactcacgctgcacatgcncaaagcccctgcaacggtggcagcactgaacatc

SEQ ID NO: 496 - DNA, 419 bp, Oryza sativa
agcttagatatagatatgggtcatatacatattatattaataaactgggcacacatgagtgaccacgctaaataatctagattcacataaatagcattctgatcttgcatgatccctctcctacgatcgattacacccctaaaaagcttcaaacttttgcctgctgcaggccgtgtcttcttacagatgcagccttccagtacatacagtacatgctacgtacacactcagattaactgcatctgcatcgtatctaataaggggtgtcactagctagcatgcaaatgtagatacaatacttgaacataaatgccatggcaatatgtgctgcagctagctactatagcaatatatgattcgaattcggtgtggctctatcttatattctgaaaagctgcgtatcatatatgggtgtgatg

SEQ ID NO: 497 - DNA, 353 bp, Oryza sativa
ttgcaaccaccatgaatgttctcaatatatatttgctgaaactaaaggtgacttgcatgttactatgtattgctcatatattaatcgtgacaactaccctaggccacacgaagagaagatgatgaaaaatgctgaaaacacaatatgggcagcgtatatagctacgtaagggggagctcggagtttgattaattaggaagttataattttctaagcgaagatatagcctacctagcatttttcgaaagactagtaaggaatatgcaagtgcattataacgggatgtcgagatcatgccaatggaaatggagctaggtgtacatcatctaacctaaatcacactattttttatg

SEQ ID NO: 498 - DNA, 387 bp, Oryza sativa
  unsure (1)..(387): unsure at all n locations
cttaaccgaccgcagcatgcaacttaaananaccatcgcgcgaggaagagtgtatttttttatctaacactaaatatgtgtgatgcactatcatgtgttcattgtgtttggcaaattctatgggccgaacatataaacttgtgtatttgtgaagtgatatatcacctattgattgatgtatcaacttttttcatacgatattgaatgagatgcaatacacgaataaccatccttttataaagataaaattaggctttcccatgtactacatatcaaatatagccagtaattncagaaaaaattagggggcattgtctaggtaaactcttctattatgcaaaagcactcacgctgtgttatgtaatgattttgcataacttaaacatg

SEQ ID NO: 499 - DNA, 471 bp, Oryza sativa
actaagcttaggaaggaggcgatgggccgtctccggaagggctccgactcgtctctgatgctggaccacgagatgtccacgaggctgctccacctcgcctgcaagcacgacgccgtgcagtgcgccaagctcctcctcgagggagggcacggcatcacggcgtcgcccgtggacgccagggaccagctcacgcggacgccgctccaggtcgccgccgaggcgcactcggcccggtgcatcgagctgctgctctccaagaacgcgcgcaccgacctcaagctggtcgatggccgccctcttgtcgcgctcgagatcgctctcttaagcagaaggtgatggtgaccactgagctcacttctcaagttctctccatgcaatggctgtttttctgactgatgttcttatccagagctcaagttaaatggtcactggacaactccattgaagaatctctgtcatctctgcaagaaa

SEQ ID NO: 500 - DNA, 475 bp, Oryza sativa
  unsure (1)..(475): unsure at all n locations
agcttagtgtataggaacttatggtagttgctctgatgatcatcatgcatccaccaaatgagatttggtccaaatctagtgcaggtgcaactgcagaagaatcaatatatgctatacacttgcaacgacgtgtacagtgtactacgtactcttccgatctaaggctgtcaaaaaagctcaagactcacgagcagctcgagctcggctcatctcagactcgatttgagctcggctcaatctcttaataagccgaacccgagcctagctacaagctcgcgagctttgtcgagtcgagctcaaacttctcacgagcctaacgaggtgtgcaactttttccttttatatatgataagtgctactccacctgngctgataatatnttgtcgtntaaagaagtgtgaggtcanactntagaatcttcgattataaatcaattttaaaatatttatctttcaaatatggtgactacatatat

SEQ ID NO: 501 - DNA, 401 bp, Oryza sativa
  unsure (1)..(401): unsure at all n locations
ccatagatactcagctatggtattataggcttatttcaccgnntgtgagattcctcgtttgcgtgtagnttcgaagcccgaagaccagcagtgcgaggatttcgaggatcaagctccagatctcgagaaaggcaagccacctttgaacatcttgagcctatatttgaatttaattatgttgcttgcaaaatattatgcattgataggatcgcacttaatctgtttgtcccgtctgcaaggcagattggcggacctacctagtttgttgcatttgatccttcctttgttaattgatatatcatgtccccttgtaaccatctagttgtgcctcgatattcgtgcaccctgtgcgagtatcgacggtcgcctttcaacttaaaaatctgaaaaacaacttggat

SEQ ID NO: 502 - DNA, 342 bp, Oryza sativa
  unsure (1)..(342): unsure at all n locations
agcttccgaggcccgccgccaccagatctggttccctctatgctctanaccactggatctggagctaattcctccaccgccgtccccttcgctgacgcctccccctcctccaccgccgacgaatacacgcttcccccgcagtcgtcgacgatccgccgtggcgcggaagacggcggcgaccggcgaggagaatgggggccaccggagggagagggaggaaaaagtgaggggaacgagaggatgagagagagagaggggagtctgcaagaacacatcggatttgtacagccgaatcctatgaccgcctgcgaaaataaccctatattttcaacggatataaaa

SEQ ID NO: 503 - DNA, 257 bp, Oryza sativa
atcaaaaattctttctcttaattaaccaacttgataaactcttgttagacgcctcggctagtccattggcttgtgcatagtacggacaaaaattcaacaatttgatacccatgctattggcaaactgaacaaactcatcagaacacaagattgagccctgatcaggtgtaatggtctgaggaataccaaatcgggaaatgatatgtctttaacacagggtagcatctccttatcaaccttttcaagggataagctta

SEQ ID NO: 504 - DNA, 396 bp, Oryza sativa
  unsure (1)..(396): unsure at all n locations
tcgctaaatataacgnngaatatataagaagtgtgttgaatatatngctatatcncctataaacttaattaaacttgaaaatgtttgactagaaaaaaatatcanaacgaacttatgatatgaaacggaggcagtagcatgcttcatagtaaaaatacttttcaaaaccctaataacaactttacaaatttcgcaataaactatatttttatatatgctacacataatgggatggtttgaatctcgtgaatgtgtgactttataagctagttttaagtgaaacttgattagctgatttaagtattaattataatctaaatctgtaaattatgattataatttgaactccgtgattaaaactcacaactgcacttaaaatgggacagagggagcatg

SEQ ID NO: 505 - DNA, 367 bp, Oryza sativa
  unsure (1)..(367): unsure at all n locations
agcttgagtgtgtgtgagagttgagctgcctgtatctattatttgatcggagcgngtatattcttgtgtatgtttcttgtttgctgctaaccatggcaggattgcgcaaggggaaacaagatggtcatgctcaacgtcaacatctacaccttctgacgagatatgacgacttcttcacgtgatgcatatgaggtacatgactataattntgcacaagttgcatgtaagttaccagtctatgatggaaagtatgattccgctgcatacattaattgggagctagcagtagaaaaacaatttgatgagtatgaattttctaatgctcaaatgattaaggctgctagtaataagtgtgccggttctgcat

SEQ ID NO: 506 - DNA, 277 bp, Oryza sativa
  unsure (1)..(277): unsure at all n locations
aacaaaaactttggtgctgatcacgaaatgctattgagctgtatatctcaaaggtaacgtgcaaggtatatgtactctctctcaaattaaataatctttggcacggaggcttacccttacccttaattcccatgagacactgcttctccttgccttgggcggttganagacagaataacaattagagcactaatcacccagtctttattcaacttttattccgaaagttttcaaatgaatttgcgaaagaaatccaaagtcctcatatgattcactc

SEQ ID NO: 507 - DNA, 368 bp, Oryza sativa
  unsure (1)..(368): unsure at all n locations
tatatattgtgaataaagaaatatccacagtattggtcatactctttgcgcacactgcnttaacagatgtgcttaagtccctataagacacatgtgttcaccacacccggaaatatatggcatatgtggtattaaatccaagtaaataaactcataaaggatttaccaaccgcctgaaaaatgaccacaatatataatcagcctaagccataatattggtcaataaaaatgcacacttacgtggcgaaaagcaatgatattgtatctaatcaattgcttaaaaacccaaacagcaccttgacttatatataaaaaagtcagcgggccagctatataaagctttactggttgacaccttttaagatgca

SEQ ID NO: 508 - DNA, 474 bp, Oryza sativa
  unsure (1)..(474): unsure at all n locations
ngcttgctctgccaatggttgatctatcttcttatcttcctccttctctctggattcaaaaccatcctgagcatccaccctccggggaatggcttcgtcccattgttctcctttatcttgacacgacgaggttgagcttgcactgcccacacctttgaaaatgagcttgcacacaacccctgtactctgcatcggcttcaccttattgatcttcctctcaaatggtttcagaggtgaacaacgcagctctgcggagaattggaaaggttgaaaacctgtggccagtttcctatcacactccttatctgagtggccaattaaaccacatatgaagcagaagtgtggcactcgctcatatctcanatcanagtgccgaacgacctcattaccttgaacattgattntaatggctagcttttgtttcaggggacgcttgacaggaagatccactcataagcnggaaaaaaaatcatg

SEQ ID NO: 509 - DNA, 352 bp, Oryza sativa
ttgagttcaatgactcactacgctggttgttgcgcataccttacaagtatttcccatatgtataggtagctacccacttatcccttagtcggtacatcaaagcggtccattgtccatttcctgtgcctccattcttcttaaaattagcccaacatctctcaaactcctcctcgtccatactctcataaattaattttcttagctcatcgagttttggcttacgcacgtgacgactcatattatcctctatatgccaagtacacaatctatggtaagcacccggcatgaccttactgatagccttcgccattgctaggtcgccatcggctattactgattttggatgcacttg

SEQ ID NO: 510 - DNA, 408 bp, Oryza sativa
  unsure (1)..(408): unsure at all n locations
agcttatatagatgtatggtagtgacttatattttatactgaaatagaaacaacgttgaagatatcttatgatcaacttcaaaattaagtttgaaaattctaattttagctttaactntgagttattacggcaaccaataggttataagtaatataggggcatctgatatgtcatctttatatatagatagtactatatttgtcattttaatgcagccttaaatgagaaaagaaaaaaaaaggaaaaggaacgcagatcagagtactactgctgcgcatgttaggaaagagcagcgttttccaccacgccacgaccattcgtttccaatcccataatcacaagtcgacaagcagagactggaatgaaccatcatgagcgcatgagcggcatgcacaaggaccaagtgg

SEQ ID NO: 511 - DNA, 55 bp, Oryza sativa
gttttttggggaacccaaccactttcaaaagagaaattagggatgggctcctcta

SEQ ID NO: 512 - DNA, 481 bp, Oryza sativa
  unsure (1)..(481): unsure at all n locations
agcttcctagaagattcacccanaatcttcatatactgcgactatcagtcaagctcacaaaggtgagttctttcaagaatgctctgcaggacaacatctttgctaattaaagccaacagaactcattaaggcatagccaacctgccttgcagctcatgagagtatatgcatctttacttggagagggtatatatattggtactctcctctagtttattaatggtttgttcttcccaggatctaattcacgggatctccgatcacatagactgggttaccaccatagtataactcacatgggtctcaaacccatctccttcgatgcattgtctatcacatttcgtgatagtcccttcgtgaagggatctgccaggnttctcgctggttggatgtaatccaacgttataagtccggagtttcttaatttcctgacagacttcacatcgtctttcacatgtctagaagaattcatattatcctt

SEQ ID NO: 513 - DNA, 390 bp, Oryza sativa
  unsure (1)..(390): unsure at all n locations
ccagcactaaatgccgactcagaagcaacagttgacacttgaatacataagaaatcacgagcaagtttgcagaggataggaaattctgctttgttgagcttccaccaagacaaaatatcaaatggatctttggaagtccataagaacagtggttgttccatgtaaatatgtaactcggttntatcactacaaattggctgacttctctcaagcaaaaatctttgaaaatgttgctcatgatcatggctactgtcattctcattaaagatatcatcaaactcatcagtattatgaacaggatcagattgaatttgaagttgatgcacatgcatttcagcacctttcttctttgatngtgcacacgcactagtagcataaacatcaaacaat

SEQ ID NO: 514 - DNA, 460 bp, Oryza sativa
  unsure (1)..(460): unsure at all n locations
ttaagtcacctgcggcatgcaagcttagacatagcagagctattcaattcatgcacatttcttctgggcttctggctacacggcactcgtacgaaaattaaaactgaagtanaggcgcatgaattcaattcactatcgggacatgttttctagtaggttcgttggcaaatcattgctagtatatactcctgcgctaaccacctcgccactccacgcaaatgcgagtgcaattccgtactaatttccttatacaattcttgtttcaaaaatatatataatttgcttaaatnttcatcaaataatgcactatagcagactcatactagcaaaataaacagagagagagaaaaaaaatataaccttctgccaatctgcctcccaatcgtccagccattcaaaagcagtaagttgaaagatgaaccaaacacaaacacacacatgagaaaaagagagagagaaa

SEQ ID NO: 515 - DNA, 365 bp, Oryza sativa
  unsure (1)..(365): unsure at all n locations
tactaagcttattttcatgtaattcacaacgtgagcttgagttggctgctttttgttagtcgtcngtggatgatttcccttggagagtgatagaaatagctgttgatttggatgcaataatcttggaaactgcttgcangtagttggtgtggatgagttgcacctcatggttcctgaagaagagtaatgcgttttatgatgtatagataggcatatacaatgtacagagcacttgaatgcatgaagcatgttaaatataaaatataagcttgaaaactatgtaattaggaagctatagctgaacatggatagcgagagctaacctacttttntcttggtgttggtccatctgtgtnggcaatgga

SEQ ID NO: 516 - DNA, 411 bp, Oryza sativa
  unsure (1)..(411): unsure at all n locations
agcttgtctccggccagctgtatcgctccggggtgctccaacccctacttcgctgcatctctttcaccgaaggagaagaaatggcgaaagaaatacaccaagggctatgcggtgcacatcaagccgcgagaacagtcgcctccaaagtgtttctccagggagtctattggcccactgtgctgaaagtttgtgtcgagcgagccaggaagtgtgaaagctgccagtggcatatccgaagccaaaccgcacctcactacgagctgcaacctatcgcaccagtatggcctttcaccagatggnggctagacatcatcgtcctattccctgtggcaagaaatgggtacaagttcgcgaatgtagccatcgaatacttctcccgctggatcgaggccgaccactcngcgcgatcac

SEQ ID NO: 517 - DNA, 393 bp, Oryza sativa
gctgaaacagccacaactacacaatgatgtcggtctgaagtttgagatagagttatgatccaatcatactcctatactccttttgatccacaacttcaccatcttcatccggatccaacacaggagtagatccaatgggtgtagacataggcttgcaatcctccatcttgaaacgccgtaaaagaccttggtgtacttcgtttgatgcacaaatgtgccttgctttgttgcttgatttgaagccccaaaaagtaagtcaattcgcccatcatgctcttctcaaattccatgcgcatagtctcagcaaactccacaaccaaagggtgagatgaacaacccaagatgatatcatccacataaatctgaacaaaaagttgatcatcaccatgctta

SEQ ID NO: 518 - DNA, 351 bp, Oryza sativa
  unsure (1)..(351): unsure at all n locations
agctngtgggcgaatggggggactctttcgcttattgttctcgcattgcnggctcgccatctcgaccgcgatcgatcataagagagagctacagatcatctccccagcagccattntctgccagtgagcttcagttgcaatggagccactgaagtctacaggtaccaaaagaggccaagttgctgagcatatgctntaggttcatggatcttgctcacctagtcactaatgttcctgtttgataagcagcccttctgcaaaatgtgcttcaactcatgatcatccattcacccaatgtcagcttattgggcaggcaaatttccctttatttttaatcccaaaagaagatga

SEQ ID NO: 519 - DNA, 254 bp, Oryza sativa
  unsure (1)..(254): unsure at all n locations
catttgagaagtaccccgnttggcgctttcttgtatagatcgttgccgaccatacagtagatttttgctttacgggttattttctcagcctctgtatcgtcttcgggcaactcctcgcttgtaatgaatttgattagtgggatgcgccagtcgtctgtggtctcgatattggcaacggtgcgttctgcctttgtggcctttgagctaatgtcgggggcgttcgagctaacttcgccgctaacctcttttactga

SEQ ID NO: 520 - DNA, 265 bp, Oryza sativa
tgagacaactaatatccatgtggcgaatgaacctattgctaacggctgttcaatgtctaaattacgccgacaatacctgatacaaccatttgtgctaaacatccaacatatgggtctgatttatttctaacaaactccacgaatgctcgtgtacatatgtatgcaggagaacaaccaccaatgctgtgagagaatgagcataaacaaccgtaatacattgtgctatgatgaactcacatggctttgagctacaatatatcaaatg

SEQ ID NO: 521 - DNA, 470 bp, Oryza sativa
acaaactcagcttcgatgtgcatcgactacaccgaccttaacaggcatggttttttgtttttccccctgccacgcatagatcagattgtcgactccaccgcggggtgcgaccttttgtgttttctaaatgcatactctggttatcatcagattcgcatggctagggaggatgaggaaaaaactgcattcattacccccgtaggaacttattgttatacgacaatgcctttcgggttaaagaatgcaggtcctacttttcaacgtactactcgaatttctttgggtagccaaataggacgtaatgttgaggcctatgttgatgacttggttgtgaaaacacgcaaccacgagaccttactctcgaatctagcggaaactcttcaaagtctccgcaccacctgcataaagctgaaccccgacaagtgcatgttctgcgtgcctgcgggcaagcattctcggttcttgatctc

SEQ ID NO: 522 - DNA, 432 bp, Oryza sativa
  unsure (1)..(432): unsure at all n locations
ngcttactcccctgccctgcatccactccactatttatcacaccacanacgtatctgcggactgcggcgatcgatttgcgaggagaggattcatacgacgatcgatcgctcagaattcagatgaccagcgtgaggcgagcagacaaacgcagctgattcgacggattcataatggcatcatcagttgcaggctcagtgacttctcgacctcctcccgtgctgctggcttgccgatcgcgaccaaataatcgccgcctcatcagaatgttaccgctcctcttcgccgacgtcgtcttgcttgctcttcttccaccatgcgttcatggagctcgtgctctgaatgatgccaaagaagccaaaggtcagccactgttgttaagattcgctgctagttgatctgcttcgtcccgagagtgagattatcgtttgtgc

SEQ ID NO: 523 - DNA, 443 bp, Oryza sativa
  unsure (1)..(443): unsure at all n locations
nggaagtgtgtgtgaaagtggaggaaatgatgttcttaatatgcaggtacgacggntgtcctctntgtgaattgtctgaattgccccgcaaccgtcgtcagggagtaatgtgggacgtccatgccaaacctctgcctgaactgcctgngctgggccctcatggcctggcctccagcttatggactccctttgttcgtccttatctatttctgtgaattttggactgattctccggtattttgatgaagttcacaacccatccttgtatggatacatgtttctctctcactttggtccaattttcctcctaactcctaggtttattacatgcatcanataaataccaacacatatggattatgtgagatttaacacctatcactatgttggatattttattatctagaacttatgcagatgttggcggcatagaattggcattt

SEQ ID NO: 524 - DNA, 453 bp, Oryza sativa
  unsure (1)..(453): unsure at all n locations
agacttgaaaatattgaagattntgtttgagtgcacagtgtgtgcattttatgaaactaatgagactaaataattatagcaaaaaattttgacataaattttgaaaataaaaaatgtaataaattaaaaattttatttgaaattttaataggataaatttttatgttcatccaatgggtaaaatggatatttttatagaaattagatggtcaactaacgggaggagcatggaagggatcaaaatncaaatttaggggtatccttggaagtaagcaaaattcaggggtatagaagggattagttaaaatttcaggggtatagaagggattagctaaaattttaaggtatacaagggatttctctcgtatgttggatagtagaaatccaaatttcatggagaacctgctctacaacggttgtcctaccactcttatgccccgcttcacatgtaca

SEQ ID NO: 525 - DNA, 422 bp, Oryza sativa
  unsure (1)..(422): unsure at all n locations
tctacaccttttgtttcacattataaagtatcttcatgttagtgttctattaatgaagatgacaaagattacaaatcgcatgttccatatgccagtgctgttggcaatcttatgcatggtatgatttccatttgcgcagatttagctcatgaagttagtgtggttagcacattcatgcataatcctggcaaagaacattgaaatgttgntaagtggattcttcgttatttaaaaggtacttctaattntggcttaatgtttgatatgaataaggtgaagatagatgatgttgtttggtttgttcttaataaaaggtctatttccggatattctctntgtgtggntctgctgtaagttggaaagcttcaattcagtctgttactgctctttccaccatagaagcagaatatatttctactact

SEQ ID NO: 526 - DNA, 376 bp, Oryza sativa
  unsure (1)..(376): unsure at all n locations
agctntanaaatgtggacttcatttcttatcttttcaacagagcgagcatcccanaagacagctcatgcaaatcgaaatgtttggcttgtgaaggatataactatcactcaactgtccaacaacaatccgatggcctggaaaatgtagcttgcccacaaagctgatatagctaataacttgaggaagcagcagccaccacgatcccatggcattatcgatgcaatcttagccattaatcgtgatgaaatgagatatgcttcagcaatggtttaagagaaaattcaacttcgtcatatattatacaacggaggttacagttgtacataagatgagataagctgtgatgacaagttggatattcctgaattctctgtc

SEQ ID NO: 527 - DNA, 420 bp, Oryza sativa
  unsure (1)..(420): unsure at all n locations
tgggtctaatgctttgcctcagtccacgcccagatttattgctgatggttctgnnattccatgggaatatagtcctgaagatgctaggtttgaattgtgtagattgattgctaaagaggatcttccaatcagttttggtcaatctcctgcttttgtgaactatattaaggctgctcataaccctagatttgtttctgtctctagacaaactactaccagaaatttttataagttgtttaaggatcgtcgntctgttattattgatcgtctcaattctgctagctctattgctttgacatctgatatatggtctggtcatgctaaggaagattatatgagtgttgagctcactttgttaattctgattggcaattagaaaagagggtcttgggtcttacgcttattgatgagtccatactg

SEQ ID NO: 528 - DNA, 369 bp, Oryza sativa
  unsure (1)..(369): unsure at all n locations
agcttcagaattaaaataagttacttatttcttattattgcatttgacctctgaatntctatctttttatatataattgctcataagatgggaacattgcacatatttcatcttatattatgtctcgttgagaattttgatgttagcactcaaagattgagtcgaaaatgatcatacttcgtaaatatgcaacaactattcatgaggcaataccatacaatagtctataatatcataaccaaccttttattactatataatttcaaaattttattaaaaaacctaccagcattggtaaatcatcattagccagtgtgccaatacgttgtaccatcatgttggccaaaatgttgttgcgcactattggaa

SEQ ID NO: 529 - DNA, 416 bp, Oryza sativa
  unsure (1)..(416): unsure at all n locations
tgctnntgtctgngcgttgactcggctntgagacttaagcatgtatccatgccgtgccgngngccgncaaggcgggttggactattagttggctggtacacgtccaaggcttgaagccaccgtattttaccgtgtgcagaagaactccgtctaagtaaacccaactttatgtaaagggccggtttaaacttgggttcaattttaaatcatattcattggtntgatacagaattaaatatatagatacatttagtttgttacttagatactagtattggtaacatataaaattttttggcacaacataattccatcctactaaatttggtaattctgccaacttaaatataaattgacattcacaaatttttggtagggtcgttttgcagttatggaacggagcaaattaactcata

SEQ ID NO: 530 - DNA, 286 bp, Oryza sativa
  unsure (1)..(286): unsure at all n locations
ngcttgcaccggtgggaaagtaaaataatatttattcgtaatactcgcagaggcaggacactcttctgcatctttcaatagagaatatataagcttgcagtaagatacactttaacacttggcaacatatgtgcatgccatctgataagataagaaaaatgcggcgcaattatgaatttagctgatcaaccaaagaaaactggagccatatatatggcccataatgtagcttaccaggacaccccttaatgatccttttcttaatccaacagttgctcaagttatt

SEQ ID NO: 531 - DNA, 353 bp, Oryza sativa
  unsure (1)..(353): unsure at all n locations
agcttgcattagacaacctaagtncttcgtgacttttntgagtatgaaagaactcaccttgctctatataaatatatatagttcctccgccttgaagtaaagatgaagtgaagtgaagattatggtttcgtcctggttcccagctgtcgcctgtggtgttgggtgttagaccgttggttccgctgctgctgctgttgctggtgtttcctcgtctgtgtcttcggatgtattctcaggctgtcttgagctgcaacctaagttaaggtaaataagtcctctatttattttaaggatttgcaatgattcatatgtgtcaccgtgggtaccaacactatgtcctgtgactggtactg

SEQ ID NO: 532 - DNA, 384 bp, Oryza sativa
  unsure (1)..(384): unsure at all n locations
atcctcgccagatagggcaacgagctcggttgctgtgcgcggggatgggggaggagaaaattcacattcatcgccgtgcccgtctacccagccgccttttgattcgccggccgcctcagacggaggccgttcgccgtgcagcaaagggcgtagtgccgaggaccacgctatggcagccgccgttggacgccgcgatgtaggagttccctcacatggtcccctacgtgttcacgccacatgtgattaatttccaccgataattaagaaaaaaaggattttcttttgctcttggtgggttttgcgtgatacacgatgctactgaatattgataagattgctcccacgatggattggntgtcaaaataattgcacactcacatgttt

SEQ ID NO: 533 - DNA, 240 bp, Oryza sativa
ttcttacggcacgtgatatttgctagaggagtcgctgtggataccgaaacagtgaccgtcgtcaccgattggtagcaacctaatacagtcactctaatccgcagattcttatggttggcaggatactaccggagatctatcgagaacttctccataatcgcttcgacccatgacacatctgttgaacaaagaacacgaaaattgtggagcccacaatgagagaaggcgttccaactctca

SEQ ID NO: 534 - DNA, 374 bp, Oryza sativa
tggatatcagtatcaagctaccagtgcttgtactgcagtaatcattatgtacaccacttgaataattgtgtggttaattaacaatgctggcaccccatcaaggatttataggcactactacagaaaaggatatgtgtcggttgccaaccacatatgggtgccgaatttggcaacaggaacctttttgagatctctcaaatgtgccggtttaaagtcctaggaattgaaaaaaaaaagagaccggctcgatgcatgcatcgaataagtcccctttaccccaaccagatctgattacactcttaattacatttaatccaagaaaatgcatgaacacttattacacaagaacatctactactcaagtcatgagaggg

SEQ ID NO: 535 - DNA, 364 bp, Oryza sativa
agcttcgctatccgttattaaatctcacctgtgctgtttcaactctttgccttctgaattacaaccagaactttttgcaaggggtggaaaccgaatattcgctggcatttattcttgcggtgctgatttcctttagcgtttgcctgctctatatggtgcgcatttatcatcgcagtgaatggcttaatcgccgctggcatttgcaggcgctgacagatccgttaacgctcctacccaactttcgtgcgttggaacaagcgccggagcaagaggcgggcaagagtttttgctgcctgcgcattgataatcttgagtttatgagtcgtcattacggcttaatgatgcgcgttcactgtatccgctc

SEQ ID NO: 536 - DNA, 348 bp, Oryza sativa
  unsure (1)..(348): unsure at all n locations
agctntgcanatcanagagtactggctagctagagagtctcctctcctctcctcctcgaccataaaaaagtatgtactcacgatcacatatctatgtaataacaaaacaaaatgcggttaaatagtagtatcagactagttgctcttacagtagcatgctaagaaaacttgctactcagatatggagtcactaggctctccttgtgaaaaaacataatgtattacaaaacttcaaaagttctgaagatttatgtaggtttgcgaagttctcttaacagaaagcatatatagatcaatacgtgtctatcagaatttataagaaagagtcacaattatttcttaaatcta

SEQ ID NO: 537 - DNA, 459 bp, Oryza sativa
  unsure (1)..(459): unsure at all n locations
tagcctncatggcgtcnagagattggcgcaagggagcggagagtttgattgttgccgtggtgaaagactcctccaaatccagccgaaccagaaccggatttacagcagccgcacccaagggtagccgcctacctgagcatatgaatattaccagccggatcgagagaatatgagcctaaatcgaccacgaacgacctgaatctgataccactgtaatattcgcagcgatgatttcagaaatagatggggattttgggaagaacagaaggggataggaagaacagaggagagaacagagaaagtttgggggaggattagttntcttccttttcattcatgatgtcttccccaccgagtggtcccttgtcttatagaccttacagctaagcaacagcatgagctcgcaggcccaacaacccaacacaactcatgtgagcgcgcaggcccatttcactctat

SEQ ID NO: 538 - DNA, 389 bp, Oryza sativa
  unsure (1)..(389): unsure at all n locations
agcttncgtttccatcattcagcagtggaatgtctatcttgataaaccgtgtgatttgagcctatctatagctagaacagtgtgattctataagctaagcagatgaggcaacaaagaacctaaccgtcctctctgattgacttcatcagaagattcctatggtctggtttacctttcttctttccttgcaaccttggatcgatatggttcattcctgggctatgctctttcaacggttgacagaagagggggacgggcaaggatgatcagactgcttggttcgtcagaggtattaaaaaaaaccttctttttggtcttttctttcttgccgccactttgtgccgctgcaatgagagcgtaagttgcggaattatttctttattcttttt

SEQ ID NO: 539 - DNA, 326 bp, Oryza sativa
  unsure (1)..(326): unsure at all n locations
cgtaacccttcttacgaaagaaaggggttcttattgctatttaatatctganagctagttcgcgtgggctaacgaagtaattcctcgaccaagccgcacaaggaagcgggattgaatcttanggagtattgtgctaacccttacctgtagcgaaataaagaaattatctatgcccggtacacgggtaaattcgaactctctatttgggtaaggtaggttcacctttactttgcaggggttgcatgaagaaaagaaaaataactcccattcggngagtccaagcagtgatcgatttcttttactaattaaatcacttcttttgatct

SEQ ID NO: 540 - DNA, 304 bp, Oryza sativa
gctggcgcacacggatgagtcgagagctgttattcttattctgagccccctacctggcgcgccagatgacggagcattgggctcctcaccgggagaccgcgcaggcccccctatgccggatcggccggggactctgggtgaaaatataagctctagaggtgtggaaggattgcgactatcgaaagagcacaagacacgggcgatgtatacatgtgctggccgctgataagcgtaataccctacatcctgaggtgttggtggagatgtgactgaaggagctacaaagtgtgagacagcctctccc

SEQ ID NO: 541 - DNA, 340 bp, Oryza sativa
  unsure (1)..(340): unsure at all n locations
gtcacctgcggcatgcaagcttcatgggccttactggcccaaagtaaatgtatatgtttcgggtgcatatgctcgaagatgtaggcggccggggtgaaacggtggacacggctagccgcccatggatttgtttgctgaatcgcttcctcctactaatcgcccggataaccacctgacgtttatctgaccgaatcttattgctcacaatatgatagctgtagtagcataataacaagaatataccaatntactaaaggcagattgcccacgctatattattaccacttactaaatggtaaatataataccacacttgcgtttgatgtcaacgacgtaatat

SEQ ID NO: 542 - DNA, 406 bp, Oryza sativa
  unsure (1)..(406): unsure at all n locations
agctntacaaagatgtagtttacatctgtaacgtcccgcctcctctattctctttctacttacatctganagctntcataggtcatagactgccctcacagaccaacacatgtctgggcccacttacatctgatagctttcataggtcatagactgccctcacagaccaacatcccaaattgctccaggccaagcacgcttaaccctggagttctttggagactggcttccgaaaaagaagttgcaacttgttgatatgagtattctattaatcctattaagccctaggccgggatgttacaccctcacccccttaagagagatcgacgcccccgtcgatcaaccctatgccaggaacgtcctctcttggccacgtccatgtgacccccttaagagagatcgacgc

SEQ ID NO: 543 - DNA, 375 bp, Oryza sativa
  unsure (1)..(375): unsure at all n locations
tctatgttaccacactntggctatcatactaacatctaaccatacaaatgctaacaatgaggtatatcaacaaacaagcagagaaatggcagattttgtcctctatcgttctaagctgagatctcctaaaccacagatgcatatcgatgaaacatggcagaaatgatggtctatgagtcccttccaagctatctcaaaaacagcttaaattgacacacgttgacccctcaaactgacactttactaaatgttgcacaatctgtaatttcagtaactcgaagtgataaccactactcaaatcggtgcttactcaacattttcatcaaactgccagataagtgttaagtgggaaaaataccagttgtgccatcaaac

SEQ ID NO: 544 - DNA, 426 bp, Oryza sativa
taggtgtgtcctcatcacctgagcagctacagtctctatctttttagacgtaccaattccatgaacggtacatagagatgagcaccagcggttgggagattatcggagcgaggatcaagaacgccgacttcttacaaggagaagatgttctctggatcaattttaaggatatctacgaactataccagctagacgtcgtcgacgtctctcttctgagcgcatggattttgtacgtatcggtgagagttatatttcttacgttcctttaattagctccttgtatatatgtacaccataaataacaattcctttattgttgtaaaatggagattcaatgggcccgaccgcggcgggttttcgatactggattcatcgaccctcggaatgtatacgtcgaaatggtcaccaagtatccacaggccactg

SEQ ID NO: 545 - DNA, 314 bp, Oryza sativa
  unsure (1)..(314): unsure at all n locations
taagcacctgcggcatgcaagcttancaagaccgaaatctgccactgttgtttctgaattttcttatcaacaagtacattatctgtgtttatatcacaatgtatgatgcattcatggcattcctcatggagataatgtaatcctttngcaacacctagaataacttggaatcttgtgtaccagtccaacaccttcacattattaaaaaggtgacaatctagagaaccatttgttggcaacttttttgacaagtcgacgagcacgatcgcnacacctaaacgccttgcggtgatatggagtcgccaaccacctct

SEQ ID NO: 546 - DNA, 261 bp, Oryza sativa
tttgaggtagtacaagaacaagcgctctggtccaagagcaagcacggatacatatatgctcacgatatgtagcgccgtactgagccggttgcctcatgggagaaaagaaaacggggattaatgtgcagccgtagctgttacacttgcatgggagaccgggatctcgcttggtaatcgttaaactagctgttttgttgcgtgtagattttttacaggtgcatgcagatgcagactctgcagacacatgagagtttaatttga

SEQ ID NO: 547 - DNA, 409 bp, Oryza sativa
  unsure (1)..(409): unsure at all n locations
agctngaccaagacggagagaggggaccttattttgttatcgtgtcattgttgccgagcttgccgcctaacgacacaacagctccgacttcaaatcggttgcatcatccatacctaactcgctgtcaatggtcaagtggcttcaacttcccacgaagaacttcagccaaagccgtctaaacgccacatcctattcacggccaacaaacaaaacccctagaaagagaatgcaacgtgtcatcgttgcccagcttcgtcaccctacgaagcagctccgacttcacctagcaaacacaagcaaggagcgaagattgctcgccgcaaaacaataagtgggactagacagcgaaggcctcatcanaaccaagtactgaaaagcttccaagccaatgcatagaccattaactaca

SEQ ID NO: 548 - DNA, 147 bp, Oryza sativa
attgacaaactagcttatgaccactatctgggagaacacaacaccctcccaaaagacatttttttattattgaaagttatcattagatgatatggggttattcttttatgcaatccagagaacgaaagcctctctattgtgaactta

SEQ ID NO: 549 - DNA, 401 bp, Oryza sativa
  unsure (1)..(401): unsure at all n locations
acctctaagncacctgcggcatgcaagcttgaagcggaggagagggaaagngagataattatgtttataatggatctcaaatcaatgcaagtcaatggcatgaaatattcaatggagcaatagccaaaacttgagagtggaggaaactatctataaccacaaccttatatctacccgttggaaccaaagattccatttttcaaaaattccaaaaatcatgtttgtaaatatataaatctccaaaaacagggctaaaatgaatttcacaaattacaaaatttcattttgaacatatctgaaaacacatcagtaccgaattttgaatntttgtgatttctgaatatttgagagccatcttcagaaaatcgaaatatcaacggagagcaaaacatactttccga

SEQ ID NO: 550 - DNA, 377 bp, Oryza sativa
  unsure (1)..(377): unsure at all n locations
ntagctgatttcctcgccgagtggaccgagngccaagaagacttgtcttaggaaaagaaggaatattggactatgcattgtgatgggtcgaagaggctcacaggcactggagctggggttgtcttgatttccccgactggagaaagattgagctacgtattgtggatacatttttctgcgtcccataacgtggcggaatacgaagcgctactccatgaattaaggattgcaatctgtttaggcattcgccggttaatcgtccgtggagactcgcagttggttgttaatcaagtcatgaaagagtggtcatgtccagatgataatatgaccgcttatcgacaagaggtacacaagttggaaaattaattcgatggact

SEQ ID NO: 551 - DNA, 313 bp, Oryza sativa
gtcattgatgaaccagctattaatgttcttctttctcgtggcggtgcaccaactcaccaactgtgtacttaacacctttatataaagcttggacgtctcaattctctttctggcaccttggtgatctaaatattgtggggctctataaggtgtagaacttggacatctcttccaaaaggtcaaaaactctattgccccaaagacccccgagggctgatgaccctagtacccggtctcctcacatatgataaaccttacgtcgcaagaagaagctatttgtgacggggcttattttacccgtcaaaaactgacc

SEQ ID NO: 552 - DNA, 278 bp, Oryza sativa
gccggagtgacagccaagataaacaacttggatgcttaatgtattgcatgatcatcgaccttattcttgactcaatatcactaggctggtctcctactggcacccttgttattccagggaggacaaccaaggtgatgtctaggacatttggcgaaaatattttcagacgaatctgtttctcagaaacccctttgttgcccccagattctttatccgtttccaactgaaaaacagacaacataatacatctcgtacgaatcacgaaagcataaaacaag

SEQ ID NO: 553 - DNA, 409 bp, Oryza sativa
  unsure (1)..(409): unsure at all n locations
ntgataaaaagagcattgtgagtgttaggtatatggaagattattccaatgcctattttggtatcatcccaagaagcatctatataacatctatttccttccagcaacttttccattcctctctccgatgaagattgctccatatcatcatcctgcanatgaggttgctcaatgtaggaagctgatcattgcctctgctgcaaaacaaacttgagatggctcctgaattttaccctaaaacttgagatcatttctagccttccaaatctgccacatgattgtgaagattctatttaaagtggctttgttagaacagttattggaaatgtaagcaattatgtgagccatagaaacattatcagagaaaatatcagtgcggagataatgtcagaaatcatccaagtgatct

SEQ ID NO: 554 - DNA, 393 bp, Oryza sativa
  unsure (1)..(393): unsure at all n locations
agcttctcctgtgcatgagagcaatatgcagncttatcacatcancacggaaccaatcaaggatgcagtcactagaacaatgccacctatatctcttcagaactagaatgagtagccatatttgtgattttcagttcgctacttatcactgtaaccgggagtttgcagtaatcatgtaataaataaatatattcatgattatgaacaatgagtttgctatgtttatggatgattcatgttgaggatacaatgtaccgatgttaagcaccttccctttttgttaaggcagtgccttgtattcatgtaataagggagaaatgtgtaatacacacaagttctatgaggattctttcggaagatgctgatatgggaatatgtgtataatatgttact

SEQ ID NO: 555 - DNA, 313 bp, Oryza sativa
  unsure (1)..(313): unsure at all n locations
cgcataagaaccacatcacaatcaanagatttgcttatgattttatggaaaacgaatccctacaaacctgtgttatctttgctcttacggaatcgtttaaccactgaatatggtaaggatgtggatgtgtatatgtggtcaagccaagcttcctgaccaaatcagaactcaccaaattgttgtagctacatccatcaatgatcatacgtgcacgacgggttgtgatgacaaagaaaatctgaaacaaattatggcgttgcaacctctcaagctgctgtacctacatgctgagcacccgctgcacaatgatggt

SEQ ID NO: 556 - DNA, 397 bp, Oryza sativa
  unsure (1)..(397): unsure at all n locations
agcttatcaagtctaatttcaaatggatccatgtttcatgtccatatctgttctggagcggccgcaattgtcattntactcccgactattttctgtccatggtgctgcgtcatctcttttggcccaatgggctgtgtatccatgttgggcccattaggggcgcgttctagggttggagcacgaccctatggtcgttcttcccctctttttatacctctagtcgccgccaagaacaggcgggttttgatgatagagatagcttcttgctaccggctcgcagcgcgcgtgttggctaaaccgcccgtctgcctgtaatcggaaccccaccatattgtgtttgatagtgaaactctcatctttatctagcaatttcagggcttgggctacttgttcttgc

SEQ ID NO: 557 - DNA, 435 bp, Oryza sativa
  unsure (1)..(435): unsure at all n locations
caggacctatgatactcagctttgtcattactgcccatattggcataggtgggtgcgatgttnttcaccggaatgaaaaatttcaacaagcaccaaaacatgatttttggacatattggagtgtgttgggtgcattcctggcaaaaagtcacttcgtgattcgcgcggggaacttttgtcaattaatgccaatattgccatatattggcacacgtgttggcgatgcttttcaccggaatgaaaaagttcaaaaagcaccaaaacatgatttttggacatattggagtgtggttggtgcattcgtggaaaaaaatcacttcgtgattcgcgcggcgaactattgtcaatcactgccaatattgccatacgtgggtgcgactgttttcacccgaatgaaaaaagtctaaaagcaccaaaacatgatttttggacata

SEQ ID NO: 558 - DNA, 416 bp, Oryza sativa
  unsure (1)..(416): unsure at all n locations
agctngactgtcttgngaggcttacgcccgatcttgttctcctattcttcgtggcgaatccctgtggtgaatgcggcgatgataacgtcgtccgtgatgtccgagatcttgttacgttgttcggaaaatcgtcggatgtaatctcgaagggattctccggatttctgaataacgttgtagaggtcgtattgtgtgccgggacgctcgaaggtgccttgaaagttggcgatgaagtggtcgcgtaattcagcccaagatccaattgtaccacgggtcaatccatggagccaagatcgggcggaatccgctaaagccactggtaaatagttcgccatggctatgctgtctcctcctgctgcgcggatggcgagaccgtagaccgtaagccacgattctggggtagtggtaccggcatc

SEQ ID NO: 559 - DNA, 430 bp, Oryza sativa
agcttatgacatcatgcttagaatatgctaaactgctccatggaatatttattgttctttttactgcttcatgggcggatggcacaccaacacagaaaaaattacaatcttttggaaatatagccaatgcagtgccctatccaccttagaactttcaagctaagaactgaagatgtgagggaaacaaaaaggataataatatatttctttgtcaatactgaatatcaacttgtcctccatatttcttataaattatgttctatgaaacaatatcttctttatctccaagtgctgattaaagctaatgtcgatattacataaagtggaaaagaaactgacactacctggacaacttcccattttggaatctttcgcatttatttaacaccagatgaccagaactaaagtgatttggctactggtatgcact

SEQ ID NO: 560 - DNA, 399 bp, Oryza sativa
agcttatgggactccttcataatggcttacttaagttcctatgtgttgttagccctacaggagtacctaggctatcaaagggacaacttcaaccatgtaagtcttgggtatgttcctccacctaaaggaagggtggacaagagtgtgatgatcaagaagccccaatgtcttatcaactatgttaaggccaaatgtatccttcctaatgataatgcttctcattgttttgatgcatcttatgttcttatgaagaacactagtggccgcgttgatgctaagtatgttggcccaaggggtaaaaatatttctatcaagagagtgctgtgggtgcctaacgcactttgtactaacatgagacgacccatgcaagtatgggacctaaaactagaaattgatctc

SEQ ID NO: 561 - DNA, 315 bp, Oryza sativa
accccaatgaacggtggatgtatcgatgccttggcaaacacttgcggtacagctgttatcaaatatgtggagctctgggtaggcttaaatatgtagcaaaggaatagcaaatgctcaaaataaataatgcacagttgaataattgtttaaaagcaaatatcgtgctggtcctacgctataacgtactatagacgcgagcctagacacaaaccaatccacaagattacactatgaacaactcatgcaccactctgatatatgaaattcaactcaaacataacaagaatttcccttttctttctttcttccttcttc

SEQ ID NO: 562 - DNA, 393 bp, Oryza sativa
agcttgctcaaaatatttgcagagagtattttgtactgtattgtcttctgtattgggatagacatatatgcccccccagttttacaatgtcaagaacattgataaaaatatgaaacaactaagggcaatataacaatatcggccattgtacatcggcaactctcaaccgattacaacaaaacaactaagggcgatataacaatatcggccatctcaaggcgatgcaaacgcaccggctatcatgtatcagcaatattagccgatcatgcatcaacccaaacacttgggtaatatttcttcaaatacttgccattaagcgctcgcccaaagacttctccatcgagtccttgcaacaggtatgctcctttagacacaaccttatggatatggaac

SEQ ID NO: 563 - DNA, 358 bp, Oryza sativa
  unsure (1)..(358): unsure at all n locations
tgacaagatcctanagaacataaaggggaagatttatggtcttgtttctgctttccaaaactagctgagcttcaataaaatgatagaaacctagctagctcaattagcatccttagtccctacaaatgaaactgggaggattccggggcaacctgactccttcgttgagaatgtcaaggcgatcacgacgaggggaggtaagtccactcgtgatccgccgtatcctaaccctgcangaactaaccggattgcaaaagaagcgccatctattgactcggctgacaaggaagttcaaccagagaagaccatgctgcacgagtactgtgacacacgattgctaccggtttctcaacggagt

SEQ ID NO: 564 - DNA, 329 bp, Oryza sativa
gtcacctgcggcatgcaagcttgtgccataatcagatcgagtgactcattattattgtttcaataaccgaataagaacgagatatgacaaagggcagtcccaatcattcgttcggtacaccaaatgcaggaagccggtaggagccatcagttgctcaaagcagaccaatatgttctctgtcgccaccttccacactaatctggaactactaagcagagaaatccaatctttctgcgaccagtgtttatcggatatggaaaaaaaagatctctgttgatcagaaatcagaaaggaacttatcaaagaaggatattcaatactcacaatgg

SEQ ID NO: 565 - DNA, 447 bp, Oryza sativa
gagaaaactgtcacagcctcgcaagatggatatttttattattctgagcaatacatgaactatttacaagtggactagaatacgatactgaaagtggacccatgttgtggcaccagatggctccgcactatactgcagagaaacatgctgacttgtttcaaatttgtaaatacagcccattctgttcaattaaactatgcctggcatatctcagatctagtgatcatgtaggtagcaagtcaaacattatagaataagaattgtgcactatccaaaatgggaaaacttgtacctgtaggtttcctttttgctgggagatgagtcatgcatcgcaaaatttgaagacacaaatggacttccagatgcacttcttccagcactgctggggctccttacagattcctcaccaaaatcataccctaagtcactctcagctgcatgatcacc

SEQ ID NO: 566 - DNA, 428 bp, Oryza sativa
  unsure (1)..(428): unsure at all n locations
agctngagccgagatcaacacttgtaactattctgttgaaccatgtttatgccgaggtcttgtccatcttttgtcaggactttattctcatcacaagcttgacttcattcttgccaacatgatgatgtccttggcttggtgaccactaacccatggtgtcattcattagcctcatcgtagtgggacctattccttttcacacctcagaggagaacattagtctcaacaaatcggttgtcatccttcacttgatgaccaaccgggtgcatatgaaatatatggatatgtttgttgagtattcattaacatcacaagtgtcatatactcgtatgcaagctcaagtgccaagatccgatatatataatatgtgaacaacatggatctataacatgcacaataaatgtataggaattgctccctctaatata

SEQ ID NO: 567 - DNA, 443 bp, Oryza sativa
ctcagcttatatcgcgttgtagaaaccttgcgtgtatttgttctctgtaataaaataagaattacgtgtaaaataatgcagcactgcaactgaagattgatacttccatgttatatatctcaaaaatgcatttaagcatttaagggccctgaatgaaagcaccaattacaccctgtgctttgagctagataagtagtgccatatcaagtttgatgattctacttcactttatttcatatgtaacctagctttctggcatttaattgatctgtattattgtttaagtgtctttccccgtttttgttaataatgttattttatatttgtattcatgttaaaatttcagcaaagcaagttccgctatgggtaacagccttcctgtagaatcgaaggtcacttttgaagaagagaatgacagaattaagtatgttgtgtcgtctatg

SEQ ID NO: 568 - DNA, 355 bp, Oryza sativa
  unsure (1)..(355): unsure at all n locations
agcttgtacaagatccgccttgatgttgtgttttatatgtataccatgcgatcagcactcccggcagtgaccttgcgattatcaggggaccagctgcacttcaacaggttcttctcaaagatatgctggtgtcctgtgagggtcttgatgttccggttctctggggcgtaagggcgcaagtcccagattttgagctcattgtccattgcattggttaggagataagacccatctggactaagctgcattccggntatcatgtcctggtgtcctttgagatactctgtcacttcattcttacggagatcccaccattngacatcattgtctangccaccagtgaaaaccttatctg

SEQ ID NO: 569 - DNA, 300 bp, Oryza sativa
  unsure (1)..(300): unsure at all n locations
tagtccactgcaacgcgtgcgtgccatatagggctaccacgcttgctttgaccgctgccaccgncgncgcgaatgttatgtatgcacaaccctgccgtcacaatagaagcttcaggataataaggcaaaaaaattctacctctatttagaataaacatttcctaaccaattagtattttacactaaaagtagcactctcttatactatttcctccgtttaaggttataagactttctagcattgcccacattcatatagatgttaatgaatctagacacaatataagactttctagcatt

SEQ ID NO: 570 - DNA, 299 bp, Oryza sativa
  unsure (1)..(299): unsure at all n locations
gcagtatgggcacaggcgcttacggacccttctcaagtctcaacaaatattcatcgggcgaaagacgacacgctgacaacagatatacgaagtactactattcttttcaagataagcagcaggtgcgcttttcttttcaaagattctactgttcctgaaaaaaaatggttgatttgttagtgaaaatccctcgaaaacatacgtaccaaatgcggcatgatggaaatcatgtanaggaggcagaaaaccctactacagtatatcactggtgagtgagtggactagccgataattcccca

SEQ ID NO: 571 - DNA, 359 bp, Oryza sativa
  unsure (1)..(359): unsure at all n locations
tcactcacctatagctggatcagggnggggagtgaatccattaatgatatgacatccgctgccacagnttcatctaccatccgggaccttgccttcaatctctactactgcgtcatctcatcagaacatggctgcattgcatttggagctcgccttgctgaagatccatcaattaattagcgcattgtcaacaacagctaagcctttcctcttcttttctagcgcttgtcttcttgtcgccatggttaatgctgatccacagctacatgtacagagcgtgtataaatttgctgcagcagattgcaaaagttggtgattactaatcgcgctcccccctttattcttgctgattcctttac

SEQ ID NO: 572 - DNA, 357 bp, Oryza sativa
agcttcacaaacatggacgaggattgcttatgtactatggagatccgattcaaatgacgggagctgagtccatacgaaatttaatattccaccgaagaacttctaggttggaagagcaaatccgccataaaagaaatgagagaagaccacgaccttgtgtgtatcatgggtcggaaaagccttaccgcacgctggtcgccacccgatgatctccttggcatggagaacgccgtgcgccaccatctccttcaggttctcctccgtcacgtcggacggcgcccattggccttcgaagctttctttctcttccgccatcgattctcctcgaatgtactgatttgattccagggatggctt

SEQ ID NO: 573 - DNA, 369 bp, Oryza sativa
aactaacgagactaaataattagtgcagaaaattttgacataaattttgaaaataaaataaatgttaaaattaaaatttttatttgaaattttaataagacaatggattttttatcaggagcattcataaaaaaaatgttgtgaacattggtatacctatctttatatgaatgctcctcatttttatgaccttttttaaaaaaaataaatacgtatttttttatttcattatctaaaaatatttttttgggataaataatgcatcgcacaacaaactcataactattataatctcatgcgagaagcttttatattttaataatggaattcatgaaattctttgttcattccagggtaaaatggcatttt

SEQ ID NO: 574 - DNA, 281 bp, Oryza sativa
  unsure (1)..(281): unsure at all n locations
cgagctnggagcaactcttcggtgctcatcatctactcattttcttcgacacattacagagccctacttcaccaaattattatcgccgattatctgctccacgtctataagaatatggtttctcaacacactttcttatatgtaatagtttggaccaactataatttatttctcaaaatatttaatgaatcaagataattaagtagataatctatagtaataatacggcgattaatatgtctcaattgggccatataatatcagtatgactaaatatgggc

SEQ ID NO: 575 - DNA, 352 bp, Oryza sativa
  unsure (1)..(352): unsure at all n locations
agctggcttgcttgcgagaacacttctctattcccacgttctctgcgtgcacgagcgagcaagatgtacaagaataattaatcggcaggaaaacccggacaatctacaggagaagtcaccatcgttcaagcaccgtatatacgtttcgtttcgttttttacgttggaaacacgcattcttcanagggcagatccatcgatcgatcgattatcttatatatagttcatggtgcttatatgcgatcgaggtagcaacgtacgtgttgttttgtcttgtgttgacatatgacaaagcgcctctagatcggaggaagttgtcttccgatcttggcangccgaatgcgtgcatccaa

SEQ ID NO: 576 - DNA, 388 bp, Oryza sativa
  unsure (1)..(388): unsure at all n locations
tgctgatgcatatggcgntntgctcacatttataatgcatatatacatctcacgacggcgcctttcttgtagaattaagcaaagctatgcacatggtcgacatacatgtggatcgtcaacatcaagtcgcattccataaccaagaccgtcgtctctcgctggtttaatcatcttaattacagatctttntttaatctgttcaatgtgttggtaagatgttgacaaattattagcatgggtcggttagcacaaaggcctttcctctctcttctctctctctctctcagatttcaacacctttccacatcgaattaagaaggataatgtaaagtaagcagcgtgtggcagatgaagtacgtgtgttcatacatggagatagctagcaatc

SEQ ID NO: 577 - DNA, 113 bp, Oryza sativa
agcttagccgtcaggtgttgatataacgactttgttttcggagccttgacccacacaatggcgtatgatctacattttcgcgcccgcttttatgtgcacacccagaagatctt

SEQ ID NO: 578 - DNA, 79 bp, Oryza sativa
  unsure (1)..(79): unsure at all n locations
tcaacatgggagtccagacgtgacgcgagttatttgtaccttacttgactcgcaggagccgacacnacagcaagataat

SEQ ID NO: 579 - DNA, 265 bp, Oryza sativa
  unsure (1)..(265): unsure at all n locations
agcttanctngaactgttccttgaacctggaatatgcacccctagtgtacacccgagaagcatgtttctcaatgggcgagctagttaatgtggaaaccttctcctacagntcacgagaaatgacaagcatattataacatgttcagcagaaagtaccatacaccgatatatcatatggaaataattaagacaaaacatacattgtatgtatcatgctcctcagcgtcttccgcttcaatcctatcattgtagagattctcatacc

SEQ ID NO: 580 - DNA, 300 bp, Oryza sativa
  unsure (1)..(300): unsure at all n locations
ttggcttcagaatgcctaactatcatccaaaagaatcagtctggagcacctgaacggtcaatggttggcgctcttggctctgacctaaacttcctggcggctggtgttttggattgctctntcattcatgttaatcgggtaactaatgctgcggctcaacctttaacctcaatggtctgagcaaacaggttgtaatacctaccgctctgtaatcccagagactcttccggaggtactgcttgctgatcttaattaatctatgaaaagctgcattattctcaaaaaaaaaaccttttaatt

SEQ ID NO: 581 - DNA, 400 bp, Oryza sativa
  unsure (1)..(400): unsure at all n locations
agctttgaccagcccagtcctgcatttgatagtattatgaattaagtcgtgagccccatccaagggatcagtctcaattaactaaaccttaaatatttgtttctaccttgaacataattccacttgccactattgtaagagtcgtaaacattacataataaattggagaaacaacagctaaatcaaaggtatccagtgcctgcaaagtgggaaaaaaaatcatgattacatgacaagtgagatacactgaatgatcagaatagcacagaaacattgcaccactcaaggttttttagcatttgtggtaaaaaaaacatatttattcttcaaagactctcaacaactcgaaaatagatcatgatgaagcaatcgagcaaaacatactngcaccatgtaattg

SEQ ID NO: 582 - DNA, 267 bp, Oryza sativa
ggcttaattactgtgtggatttgacgatgaacggcgtctcggactggttggcgctgccggtgtcgccgaagatgatccggccgaggcccgctttgctgaagcacatggagaagctgttcgacttgacgacgccggtgctggcgaggatgctgggcacggacaccttttccatgccgagacccatgatgccgtcggcggcgcgccgtcaaggaaaaaacccttttgcccttgcccgaacccgaacaccacgggagttcgcacggcggc

SEQ ID NO: 583 - DNA, 410 bp, Oryza sativa
  unsure (1)..(410): unsure at all n locations
tctttccggggaaaacatacaacgaacacgaacacggagacttgttcttcttcttgcgtgatccgaagaggagaaagaaagaaagaaacaaacaaagcggctgagataaaagagggaggcccctatttacgcgcgttggcgcgtgtggggggccacgcgcacccaaaccccacccgcggtagcccgtgggtggcgggcggaggtgaccggcangtggccgcgaccggcttggctaagtggcgacgcgcggngggtgtaccggtgttaccggcacgtgcgcgttcgcgcgacngtgtggccgtgtgtggngtttgagttgccgaccttgtgtggtgttgtgttgggtgtggttccgttggctaaggcttaccacatgggtgatgcgtgcactggtttcacgcctttcccgt

SEQ ID NO: 584 - DNA, 274 bp, Oryza sativa
  unsure (1)..(274): unsure at all n locations
agcttgtgtaacgagcgcaggagtgcaagtacttgtcttccantatacatatgatcgggctggcacacgtcgcgtatgcaagacttactgttcgttatctgaagcacatctggggatatatctcttccatcataagtatcatttatatagattcttgccatcaggttaatggattaacccggtacatgtatatgcttaccaagagaccctcgatggccttcatctgagagagagttgtgtcgtaattcatccatgagaaaacaatgatncaatt

SEQ ID NO: 585 - DNA, 428 bp, Oryza sativa
  unsure (1)..(428): unsure at all n locations
ntacaaacttgcaatactgggcgaatactctatgccaaacatgttctatttatatatcgcgcacgatggacaaagtgggcctatgttcccaactataagctctcttacatatatcacttcatctcagaactttttttctctgaacactaaggagggaacaccgatgggccaacaacgacgagaagcataacgatgaaaagaacttccatatacgacgcacggtctgtcacctatcaccgataatggtgctgggtttgagcattaggtgttctatcaaccacctcgttcttcatctcatgaaaaagaatgccggcctagcccatgattaccatgctactagtagtattactatctatcagcattagtcttcatcttctgaaactgggaagcccacataactgaagacgtatctactagtcttgattgga

SEQ ID NO: 586 - DNA, 479 bp, Oryza sativa
  unsure (1)..(479): unsure at all n locations
ttaagcaccgaggcatgcacttacaagnnttgaatatgtggtccattttgtttattctaagactcactctcgctaaattcatgtgttcatgagataaaatactggacaatcggagagaaaaaacattcacatttgaaaggcttaatcttggcccaaaaccaaaagcactctcaaaattgtaataataataaataacttccatcgtttgctctttagtttatcgatcactgtcgaaacgtgaattttagattctaatattagaatcactttgattctttttatattagtttattttagtattgtgttttaagccattgaaatatatacataaaaaaatattcttttaagctgctataagtattaccgtttataattacgctagttgctataagtattacccgtcatatataggcgtaggtgaaactattgaactgtggtggaaaaactatattgtaactatggcatgacaattgtaccta

SEQ ID NO: 587 - DNA, 258 bp, Oryza sativa
  unsure (1)..(258): unsure at all n locations
ggacctgcacctcctcctnacggagctctgacatatgctcatcattttcggtgccctcccagagacgaacgctctctccgtcggcggccccattgtcccgcaaccccctccccgtcgtcgacaccgtggctgcctaccgctcctcagaatacacatgtcgccggcgctatgaaccccctccctgtcgactttttctaaaattcccttgttcaggagagcagcacaaatgatttttttactgatggaccgatctataca

SEQ ID NO: 588 - DNA, 465 bp, Oryza sativa
  unsure (1)..(465): unsure at all n locations
tgcttgcattcatatgtatgaatcggcctgaatacctccaggatgtcgacgttgtatctgcacgttatcagggcagttataattttaacatgctacgaagctatgcatgtacatatgtgtacctccttttcttgaccgctgttcatgccatgatgtatcttctgattctgcagaggagagatgtttatggagcttgggaacaataccttggcttggaacatactgacacaacaccaaanaggtcttatacagccaatcaggtaatcagtgttggctaataatggtttttgcgtacaattcataactggcaagaaataatctgagtggttaagatttaagagtgtaaatatctgtttatatttatatctaagcacatgcatacccatattacgaatgtgagcacacaatgttcgtatatctattctaacaatctgctgtcatccggttacctgatgcgatcaaata

SEQ ID NO: 589 - DNA, 366 bp, Oryza sativa
  unsure (1)..(366): unsure at all n locations
tcactatactattgcaatatgcgctgtatgagctctatactataacgtccaaactacgtgtttggttttccggcgtgcttggtatgtacgtacgtatacaaactgcctatgcgttttatgggtgattcattagtacgtataggaactacctatgcctgttatgagtgctttactaaactcactataataaagttcatatggtttttgtaaaaagttaacttgggtgaggttcacataatcctgaactatgaatgttaacatgattcagaaattgttggtgatgatgtagaaggaagtggttntcattctcggctatttcctgattattcaattgttcatttcaaaatatctatttctattatatac

SEQ ID NO: 590 - DNA, 407 bp, Oryza sativa
  unsure (1)..(407): unsure at all n locations
agctngcattcatatctatgaatcggcctgattacctccaggatgtcgacgttgtatctgcacgttntcaggcaagttataattttaacatgctaggaagctaggcatgtccatatgtgtaccttcttatcttgaccgctgttcatgccatgatgtatcttctgattctgcagaggagagatgtttatggagcttgggaacaataccttggcttggaacatactgacacaacaccaaaaaggtcttatacagccaatcaggtaatcagtgttggctaataatggtttttgcgtacaattcaaaactggcaagaaataatctgagtggttaagatttaagagtgtaaatatctgtttatttttatatctaagcacatgcaacccattttacgaatgtgagcacacaat

SEQ ID NO: 591 - DNA, 188 bp, Oryza sativa
  unsure (1)..(188): unsure at all n locations
tcactatactattgcatatgcgctgattagcccgagaccataacgtncaaactacgtgtttggttttcggcgtgcttggtatgtacgtacgtatacaaactgcctatgctctttatgggtgattcattattacgtataggaactacctatgcctgttatgagtgctttactaaactcactataataag

SEQ ID NO: 592 - DNA, 251 bp, Oryza sativa
ggatctataagcaccgcggctgcagcttacaaagattgtattgtgcaccgtgcattctatccgtcattagcttaactccggggatacttgggtaccacaagaggattgatcatttgtctgcaacgagcgggcggtggtgcttgcgtgagatcttgatcgacattctgccttgtgctgcgtaattcgccattctaattttaattattatattgttctcattgcaactggcatgttcttgtgtttggtattat

SEQ ID NO: 593 - DNA, 381 bp, Oryza sativa
tgaactgtctacgagacaagtattacgatggcattctgttgttcttaaataggtactcctttgaatgatagaatatattcccgcctttgctttatccagaaaatacgtataaatagaagtggtgagaatactaactatgttaaggttcaaatgtggggcatctgagtctcggagatcttctcttgtatagtctctcattttcaccaacgccggatccttggcaatatactctcactttaacagtaagttgttttttttaaaacattttggaacctcaaccctattgcaatattaggtactgcaaagatactcccatatgctttggaatcagtgtgtagaaaattataacatcagtatccattcagctacccagatcgaact

SEQ ID NO: 594 - DNA, 369 bp, Oryza sativa
  unsure (1)..(369): unsure at all n locations
cgctactaagaaccttgattaagtactgtgaaacgttaattgtatatgaaagttgatcattgcattgcaactgacatgactagccaactattatgcttcacgatatctcgttgacattgctcttgcagggtttaaaataactatggaccaaaattctcaagcttggtcacttcagctctgaaaaatttaaaatcctgttcttggtagcttgagcttcatgttggacagctatagtgtacttgctattgttagacagctcatctgaaacacatatatatcacaaatcatcccttgattttcatgttnttaccgatggggtgatctcaatcatatctatttcaattacattgntattttgatcacgtatat

SEQ ID NO: 595 - DNA, 154 bp, Oryza sativa
tgtatgcccggactccaagcagcgagattgagcaaagatccaaccatgctcctatactccctttaatccacaacctcatcatctccatccggatccagtacaataaattgacccatcggtgtggaaaatgacttgcaatccgccatctcgaagc

SEQ ID NO: 596 - DNA, 287 bp, Oryza sativa
tgaactgacattgagtgaagtccttaggtcggtttgggcacactctccccctatcggtacacaactaatcaccatatgtgcaccacttgaggcccaaacctaaaatacatgtttgcatcattttatttatcaaaatcacaagtattaaagttctgtccagattatttcaaaatcaattcttcatatttgtaatgagcccataatgacaaggaagaccattctaagcatggctaagcattatagtaacctagtgactccaaaatcatatataaagtggtataagcata

SEQ ID NO: 597 - DNA, 154 bp, Oryza sativa
attcgccttatgtagaagcactatctcatgaagattctgataactctgtataatctgcattttgaaaggcacttgatctttgcctgtgaccttcatcaacataaaacctacaacagagttatcggtggatgcttatgcaatttagaggtgttgc

SEQ ID NO: 598 - DNA, 329 bp, Oryza sativa
  unsure (1)..(329): unsure at all n locations
aactcaactatatattataaggaacacttattttttaactttttngataacgagcagcctaaggatttgctcaaaaatcacataacacagtgagccgcagtgtttctagtgtgaaaagcagtgcaatgaacaaatggcctatacccccctgaaaatttggatagatgctacacccatgggggagggatcttatatatagctgagtaaatcatgctatgagatacacaaaacaaagtcttgagataacagctataactataatactttataccccaatcaaagaaacttgagacaccattagtggccctatagagaaagataaagttgat

SEQ ID NO: 599 - DNA, 293 bp, Oryza sativa
tgaacatatttgtattctagatgcttctgaacaaacacatccggtttattacccaatattcttcagtaaaagaaataaagaaaatgtccaccatctgggacttatatgatccttatgactgctcatgctacctaagaacaagatatttttgttaccagtgtttatggatggtgaagaaatgttcaaaaggtgttgccaagggctcatcttcccgcatttttcatatattcatccgaacccatttgtaacgtttaggtacaaattaatgtataaatgttactaaacagttgctt

SEQ ID NO: 600 - DNA, 368 bp, Oryza sativa
  unsure (1)..(368): unsure at all n locations
agcttatttcagtaaatatgtagcttatccttatgatcaagctgataattcacaacaatcatatgcagtaatctactacaaattaaataagacctttggcgatgaaggtcatgtacaccattgcanttttttagataatgaaaaaacctactattacacccgggacatggcatatgcatgtatacacgcatgccgtcatagtatagggcatgtttggtttgaaactctaccaaaacattggtagtaccaaaccttgggcaaattttggcactaccaaattcttgatagtatagatttggctccactctattgatttggcaaaaattggttccaatccaaaatgctaacatgcactattcaaaactact

SEQ ID NO: 601 - DNA, 397 bp, Oryza sativa
  unsure (1)..(397): unsure at all n locations
cttaagtcacctgaggcatgcaagctcacctncgtagggagccagcagcatgtatggtttggttatgtgccaaagatctgccatgctgggccttgggcctgttgggcctactangctgcgcaacggagtaaatgggccaatagagaggaaagcgagctgtgctggtctggaaaaagtgggccggcctgtaagagagaatgaaaagatgttcagggggttggatcaaaggagtggatggaaagtatgggccacttgagaagaaagaattgaatgtggcccaagtgtgatatccttaaattaaatttgggactttctataatagtataaagggccgggtgtgtataatttaaatatgctgcatacaatgtccatggcacataaaagtgcctcctgagtc

SEQ ID NO: 602 - DNA, 367 bp, Oryza sativa
  unsure (1)..(367): unsure at all n locations
ntaggaagagatgggttctaagttgaatttcagtaccgcttatcatccgtagacagacggtctaactgaaagggtaaatcagattttggaagacatgttgagagcttgtgctttaaacttctgtggaagttgggataagaatctgccttacgcggaattctcgtacaacaacagttaccaagctagtcttcaaatggctccttatgaagcactatatggtcggaagtgccgcactccgctgtcgtgggatcagaccggagaacgtcaggttnttgggaccgatattctgagggaagcacaagagaaggtaaagatcattctagatagattgtgtatagcccaacctcgtcataagaattatgctgac

SEQ ID NO: 603 - DNA, 355 bp, Oryza sativa
  unsure (1)..(355): unsure at all n locations
tataggttatattggataannnttggataatctaatggatattatatttctttgggaactaataaataaccaaataaatattcaaatcaaacatttgaattctcaaaaccaaaatatattgattacatcttaattcaaatccaatcccattcacttttgcagataagcccctacctttccttgctttccctttttcttccttatatctctgttctcagccgccactattcaatgtccgccaaccgttcgatcccgtctactgcgtgcaccacatcagttctggccgtgccagatacgcacgtgccgtaccggaaccgcaccttctatccctcagttgcgtccgaaccccacccta

SEQ ID NO: 604 - DNA, 298 bp, Oryza sativa
  unsure (1)..(298): unsure at all n locations
ctttattgaaatacggaagagtttattatatatgtnttgcatangngggagaccccggccaaccctgtacgcccgaagggggtgcggtgttggcccgagcccgagacctgacacccgacccccactatgggtagaagcgacgaatgtgttccatgttccacgggttaagcagctctgtgccgtcgtccgtggccagccgaacggagcccggtcgggagaccccgatcactctataccgacccttccacattggtgagagcttgctcagtccaacacccgtttggacgctgcgtaagac

SEQ ID NO: 605 - DNA, 423 bp, Oryza sativa
ggatcttaagtcacctgcggcatgcaagcttgctgggggggcgcaggcgctctatatctcgtatcttctcggcgatggcctcgatgcctcgggcagagaccaataacccgagaagcttgcccgcaggcacgccgaacacgcacttatcggggttcagctttatgcgggcagagcggagactctcgaaagttttcgctagatccgagagtaaggtctcttggttgcgcgtcttcacaaccaagtcatcaacataggcctcaacattgcgtactatctggctacccaaagaaattcgagtagtacgttgaaaaataggacctgcattctttaacccgaaaggcattgtcgtataacaataagttcctatggcggtaatgaatgcattatttcctcatcctccctagccatgcgaatctgatgata

SEQ ID NO: 606 - DNA, 323 bp, Oryza sativa
  unsure (1)..(323): unsure at all n locations
tgaaaagtggatgggttnggagacanactgattatacaggttcatgccttcttattcaagaagtaataccctactcctgtccggggtggaaaccgccgagtgtattattgaatgtatgatctcaaagagaattggtgtcccaagaaggactcggaccccttcttatataggggaaggagtctgtattacaaagtataactcatatccttatcagattacgagattacaaattaaatacaatcgtaaccgactaaatctcacgatatttccttgacgtacaagttaagaaacaaacccgagaacaaataaagatatctatctat

SEQ ID NO: 607 - DNA, 328 bp, Oryza sativa
agcttctccggttcttggtctctgtccgatgcatctaggccaaccccgagaagatacgagctatagagcggatgcgccctcccagcaaacttagggatgtgcagtgcgtcaccggttgcatggccgtcctaaatcgtatcataatcaggctgggagagcaaggcgctcacccttatttaaagcttcctctaaacgctcctgtgtctgtttatcttggaccggaaggaagcatgaacagtgcctctctgctcagtatgaaggcatattctcaactcttcctccggttctagtcaccctccgagccaaatgagcacctgctactttactt

SEQ ID NO: 608 - DNA, 160 bp, Oryza sativa
  unsure (1)..(160): unsure at all n locations
tcctcgagggttggcagctggctttcattaggattttggatgccagtatatggccacctgagttacctgtctctccccatttatatggaatgtatattntgcatgtaagcttgacctcgcctggctggacctatagatggccaaaaggcccgcccagcac

SEQ ID NO: 609 - DNA, 229 bp, Oryza sativa
tccggatatgcttcgcaaatcctactctaggtgcttcttttctaactcccgcgacctcctctttttcttcgacgcctgatgataacccaaactcccaccgaagaccatgtggggaactcacctccctcgtggcccaagcttgcagagccaatcaccgcgggacatccttccagtggagctgcgttggacatatgcgacgcgtcaatacgctgcttctgctcttcttttc

SEQ ID NO: 610 - DNA, 391 bp, Oryza sativa
gatcacgaagaggaggctgaagacttgcagcaagcggtgcgcccttatgtgatggccctatccccaccgagcttttctttcaccgcccctcctctcgttctattctcggatgcttcttgcattagaggcattcttttcgtgtcgatgaatgatagttaagcggtgtcttcttgaccttgcaagacttttcatcgaaaaacactcttcttcacttttctcgtaatatccttgccaacatttctcgttctctcgcgtgtatcactcctcccatcttctttgttcccggctatccctcttgagcttgtgacttgtgtgctaacgtactttagatgtactacttttggtattatagatggctatgtagcgagctgggctatggttctgatatatc

SEQ ID NO: 611 - DNA, 316 bp, Oryza sativa
ctatcccatactagcacatgtggtcgcactgtatactatttgaactgttattgagtgaagaccttaggtcggtttgggcacactctcccactatcggtacacaactaatcaccatatgtgcaccacttgaggcccaaacctaaaattcatgtattccatcattttatttatcaaaatcacaagtattaaaggtcttgccagataatttcaaaatcaattgtttatatttgtaatgaacccataatgacaaggaagaccattctaagcatggctaagcattatagtaacctagcgactccaaaattcatatataaag

SEQ ID NO: 612 - DNA, 368 bp, Oryza sativa
  unsure (1)..(368): unsure at all n locations
tacccgatgacctgatantttttatgttttttctcacaattcctgtcgaatgttngatagcaaatccgctatatatagaaccagttcttttcattttttaattttttttgccaatggttatttgcttcacgcttcttaatacacgatttctcaagtaaaaaaaattctgctgcattgattaataaacctacaaagttgtgaagttcatttcttacaatactataatttatttgcgttaatcaagtaaacaatacacctcaatagtttataaaaaatacatttcaaacaggaccgtataacttccaagaataaccgttgatggcacggactatgatnaggaaatttcagtatatactaagtccatattc

SEQ ID NO: 613 - DNA, 418 bp, Oryza sativa
  unsure (1)..(418): unsure at all n locations
agcttcagcatattcctgtttctttgtgtatgatcttaaccttctttcaccgaaacctcgtcttgtcaaaaatgagttcacaaaggatccctcttggtatccaacataatcacacatttttaggagctggtcaagatctgtcactgagggctggaacctctatacagttagaatggatgaaaagctagcagtgtaactctgcacaagaaccagcaccacgaatcaccagattaccacaacaattnttgacaaaggacttttaataattcgacctgtgcatagtataacagagatagtatgttattgaagaagtactatgagaaaatagttaaacctcttaatactgcatcaaatatagcctactagttgagcctctaagcactaaccatgagaaaatgtcaaagtggagaaagcaaat

SEQ ID NO: 614 - DNA, 243 bp, Oryza sativa
  unsure (1)..(243): unsure at all n locations
agcttttatcattctggcatcgagctatnttttcgcangacctcccctacagtatcgtcaccgcagtatagtttaaccaccaaattcgggatggattggtgtggttcctctacgcctaggacaccagaatatcgaaccatgaacgaggaaaggcatgagagaaatattggctagtaattgtgaagccccaattcttgactggaagggacaccaaaggcctctgccctccctctctatctatcc

SEQ ID NO: 615 - DNA, 283 bp, Oryza sativa
  unsure (1)..(283): unsure at all n locations
taacacctcttatttgactgtttcactattttgaaatacgtatttatatccaaatccaaaatgcaaaggtcgtcttattcaaaacctcaatcatcacatcccctctctcccacttcacacctcggaacgcactgttcttatagagagaaaggggctttcccatcttcttaacccgaaatgaaatggctgaggagagggaggttccttttggggggtacccccgggaagagatccaatggagacggngtgggcctgtagctcaaaggattagagcacgtggcta

SEQ ID NO: 616 - DNA, 313 bp, Oryza sativa
  unsure (1)..(313): unsure at all n locations
tgcagcatgcagcttaatngnaaatctttggtcgaggctatagttattgcatgcttgcnatattatagatgggctcatcttctttttgttgaatcacatgacttgatatgctatatgtatgctaagctcttgaacattaatgaccataattcctatgcttgatgaaatcattgtcaaaaggcggagaagagatgtgtcttgggagaagaatttccgaattgttgaaaagagcatgttttttcggtcatgagggacattctttttttaaaaagggggagaagtttcttttggctttttagcacgatgtgtacat

SEQ ID NO: 617 - DNA, 410 bp, Oryza sativa
cgggacatgatcgaagttcgcggcttgaaagatatgtccaaggtcatcaattctagggcccactttgtgatccgcacatttgcttcgcgattatgaagtatgttcccgagtggaaacgatgtgaccaccgtgaccgagtggccttggaagtagtgagatagtttcctgactggtatcaaaacaccatataatagcttttggacctgaggatatcttgtcttggagtcggccagaacctcgctaacgaagtaaattggtcgttggactttttgaatatggccttcttcttcacgctcaacaaccaggactgtgcttacgacctggaaagtcgccgatacatataacaacagcggctcttgagggtgtggtgaagctaatacccgtggagtggtgagaagtgttttgaagtc

SEQ ID NO: 618 - DNA, 539 bp, Oryza sativa
  unsure (1)..(539): unsure at all n locations
agcttctctcttgctgaaccgaaagacatctcaagagattctgctgtcttcttgcattcctaanaatgtcggcatatctgtaactgttaacggtcccataagagaggtagtatcaaattatatgaacgtaccaacatggagcgcattgctgaaaggaataccaagcatgcagaaagaacaacctatataagacagcaactgtcagcaagagtaatgttccaaagctacgcactatcaaattaagagtatacattggcatgcacaagtgagaatggaatcaaaattgttaatgagtacacttgtcaacccattttctgtataagaatattctttaataaagcaaatatatttgattcaacacacaactgaattaacatgtagatcatggtacacaaacagctcgatatattcaaattaacaccaaccacataaccagtaatttaagactgtctacttgactgaatgtctagaatcatatacaaaagctccatgccgaatagtcaatcattgcatgagtgcgttcagaatcaaaataacac

SEQ ID NO: 619 - DNA, 239 bp, Oryza sativa
gctgtgctcatggaccaagctgtctgatgtgcaatgcccacttgactgaaatggctcacaacagcaatgcccacacaaagcaagtgctgcaaactgagtcagaactagcagcacactggatgatataatcttcagtataaagactttaccttgaagaaggatggcatttgtatattgaaatgggcctgtattggtatttctgagttctgacttagactgtcttgcatctgtgtgctctt

SEQ ID NO: 620 - DNA, 360 bp, Oryza sativa
  unsure (1)..(360): unsure at all n locations
agctcttttggacgtcaggccacattgtgccttattccgtctcatcttcttcctcaagccccaaccaaacaagagtaaaccatgcgtagttgggggggctggatttcaattgaggggaactctgagccaaaagtatttctccatgcccttcaaaacctcaaacaaaggctggcatgcaaattggttctatgtacaaaaccccgagcctgcactccccgagtactcctgtctccctccagtttatcaggactcttggaactcacttccaatgggagaggaagccgctcangcgcttgccctgatggaccgtatgctgaagctgaaggagcaaggtctgcaaggagaacagatcacccggca

SEQ ID NO: 621 - DNA, 448 bp, Oryza sativa
  unsure (1)..(448): unsure at all n locations
ntattgtagatcatggatcggacatggatgtacaacacgaatagagcttatccaacgttcttgaaggaagcagccaaatttgttgagctcacaaaggcacatgctgcgagggagaatttgaggagcattttttgcccatgtaaagtttgtaagaacgagatcttgctgcaagatccgaatgaagtattgtcgcacattgtagaacgaggatttaagaagggatacgagatatggacttttcatggtgaagccggtggtcgtaacgaagagttagatgatttatgttttgatgatgcagaacaatttataatcgaagacatgtcttagggaaacatcccggaataccgtggctcangtatagagaatgaaggtattgattctgaactggaagatatgttgcggcacgttgaaccagaggtcctaactggtacaagacgcggttggacaa

SEQ ID NO: 622 - DNA, 345 bp, Oryza sativa
  unsure (1)..(345): unsure at all n locations
ggcggggcggcgggagcataagcggagagcacggngagagggtcatgtcggcatcnatgactgaggacggcgaanggatggcatgctctcgtacgccgccgtatctcgccttgcggaggaggaactccgnntcttcttcttcttcttcttcttcttcttcaaaggcgccgccactgaagcctctccgtagtgtcgcggattcttcggtcgccggcttgagcttcctcaccggcaggaggagcggcttctctctttcatcgcccttgccggtggtgctccctgcaccggcatcggcaacgacgacgaggggatcgtctgggaagtactgagagctccacgcctgga

SEQ ID NO: 623 - DNA, 452 bp, Oryza sativa
tgggagaggcaagaaggaagatgatggtagagtcaaagaggatgacgtgatcaacaagattatcatgaaggagaaggagaagaagaagcattgtatcaagtggttaatccaaaaactcataaaagtttttgatgaatcggaagatgaagatgagagcaaaggtaagcaagttgttgatttagtttttattgctcgtaatgcaagttctgatgttgatgaatctgatgatgataatgaagaaaagcttagttatgatcaactagaatatgctgcttacaaatttggtaagaaacttcaaacatgttctattgtgcttgatgagaaagatcatactattgagattcttaatgctgaaattgctagactaagatttttgattcctaatgatgataattgtcaatcttgtgaagttttattctctgaaattagtgctctgcgatatgtcaattctg

SEQ ID NO: 624 - DNA, 311 bp, Oryza sativa
  unsure (1)..(311): unsure at all n locations
agctngcttcttgctatggctcaatgtggggatcncatccctggtagcagagaaacgcttgccagtcagcttgctgttgttgcatcatggtgttgaagtttgcgagctgtgcaccaacagactgctgccgttcccgtgactgtaccacatgatcctccaaggtgtgttgctcattccctgcctgcagttctaagtgtatccatcctccggatgagttctcccagatcccctcgagaggagactgagcaatgcatcaagaggatggaggtagaccacttgaactgaaggagcccgagtatccctagtgcagc

SEQ ID NO: 625 - DNA, 442 bp, Oryza sativa
  unsure (1)..(442): unsure at all n locations
cgaatcaacaatcagnattcatgatttcgaatgatttataatgaaacatcttcaacagcacatacggtgaagaataaacactaaacacatataacacatatacctattgcatttatcactctctctcacataacctttagcacanaacaaccaagaaaattttttaaccttttcttttcttgagcctttttgctcatatttttatctattattccgggtacgtccctgtcgccaagactgtttctatggattcggcacccattattttgctcacatcgaatacgtccttgtcgtcaagactgtttccaagcattcggnattcattnttttcatatttttattctctgttcacaatgagcaattaaagtgatttcacgaataacaattcaataaagcatatatatagagcatttagaaatcanaccacatgctagcatcaaca

SEQ ID NO: 626 - DNA, 494 bp, Oryza sativa
  unsure (1)..(494): unsure at all n locations
atccttaagtcaccgcagctgcagcttntcttagattatactgtactcaaatttgtgattatttggntaatccattctaaaagtataacggttgaccttatctactattatcgtgatcatatgcaccttacacatgattnttataacaaaattaaatgccaactacacatgaaaggtagtgacgtgaggtaccataaacataacaatcatagcatcaattcttttatcttcgctttattagcaaacaaactctactgtacacaatgtctttctaatatggagtatcatccattcaacaaggggtaaaatagtttatgtacaaatctggttctttaagaagtgttagcttctgtgtagtgagttattcctaataggaataagaaatggagggaaaacaccctaagtgatcttataatcttttttttgcggggactatttatatataatatatatacaatttcttcttcttctcttatgaaagaatgagcctcaca

SEQ ID NO: 627 - DNA, 442 bp, Oryza sativa
  unsure (1)..(442): unsure at all n locations
tgagaaaatatttcctccttctttctttgatgtgatgctacacctggctgtccatttacctgaagaggcaatttttagaggtccagtacaatatggatggatgtacccaatagaaagaaggttattaacattgaaacggtttgtgaggaacatggcaaggcctgaagggtccattgcagaagcatatgttgctgctgagtgtttgactatttgctcgaagtactttggtgatgatgttgagacacgacacaatcgggagggcagaaatagagagcgtgttgctattgtgaaaaaagacctatctgttttccagcatggagttgatcttcttggagcaccaagtcttacatatcttgaacatgattgtgaaaaaatggtttggttcgtgctaaacaattgtcttganggtgagccatatattgagtatgtcatcgcatctact

SEQ ID NO: 628 - DNA, 555 bp, Oryza sativa
  unsure (1)..(555): unsure at all n locations
ctgcagcatcaagcttatactgttggaaaatgatgccattatgataaanaaacaacaagtataaacaaaagcttattacgtactgtggggccagcaagcaatgatgttccagagtctgctatagctgaacaaccgctagcacaaaatcctgatagcagcaaaggtgtaacgatgtgtaagattatntctcatttagacagatcggatatgaaaaacaagagtcagtacctgtggtctttcctccaatcaggacatcgcccatctcaaactgcacaaagtcaatgcaaacattacatcaaatgtcgaatacactacagaacttagcagagacaggaccaacctgccaatatcccttctgagagactnggaacatatgtatggtgcccttgtagtggctaggatccattcctccaaacacaatttcaccaccnttctcttcatcagaatgacggttgaaccagaaggagaanacaggctcactgacaagacctngctctaccatcttatacctgtgaaatatacatatcattanggactatggatctgctatattat

SEQ ID NO: 629 - DNA, 435 bp, Oryza sativa
  unsure (1)..(435): unsure at all n locations
ntcttgtccaatcggntcggccggtgacgcaagagactcgactttacctgtgtttgtgtgtgcagtacacgaatacatgcgtgcgtggtcgagcgcgttgggacaacgtggctcacgaacaccacaggctatacatcccggtgaggtaccgtggcagttgtcatgcatgcagcaactgacgccgcccggaagcctgatctgatctgccgacgacaacgcgaaggcgagaattgagtttagaactactagcatcatcatttcgtacaaggtttatgcgtaaattatttcttataagcataagtatatgttaaatgatgggctataatgctagagtgacgtatatatatctcatggctcgtttggatctaaggcgctccctgaaaattcttatcatttaagagtatntaatanaagttatgtataaaactacctgga

SEQ ID NO: 630 - DNA, 400 bp, Oryza sativa
  unsure (1)..(400): unsure at all n locations
actaaccctttctccaganaagagagagagagagagagagagaaaagctngactagttttgtatgataccatcaaagaatgaagtggctattctntcttatctatcaaaccctctgtgaggccactagaccaacgcccaatagcaaaagaaattaatattttcatttcttacttaagataaagtcactgtattttatttaatgaatccgaaccactaagagacaagataaaaatcaaaactagagaggcaaacaaagtaaactctaatttgaagtaaattatactaaagctgtgggtttatatattctgcaagttaagattatgcaatgtgcaagcttaggtgttaacaatcaagaaatgttcaggtgacatgacaaatagcagaagtgattcttagtac

SEQ ID NO: 631 - DNA, 478 bp, Oryza sativa
  unsure (1)..(478): unsure at all n locations
agctctggacctctcanacctggatgaccaacgcctactctattttctcatcncagacagcgacgtcttcaccggcacccttgacatggatactctgaacgaggcactctctagagtccttgttgactattacccactcgctggtaagttgaaggctagcaatgaacacgatggcaaactcatcattgactgcaaatcaaagggggttctctgtgctgagggaattctgnccggcctcactgctggggacttcatactaaggcatgccaaacctcataagtcttggaagaagctgctctataaagatgagcagagctttgtgtgcacgccaccactagtgcgacaagtaagtactattatatagttacttccattcatataattaattagagaagtctatgaccataccttatatatttatcatacgatgcagatagtctatatatggtcatatatatttgcttcgcattttgatact

SEQ ID NO: 632 - DNA, 344 bp, Oryza sativa
  unsure (1)..(344): unsure at all n locations
agcttgcaccaattagtcacctctgttctaatgatggagagtcctgccaacacatcttccaagcctgcaccttctcgcagcaagtttgggtgcaagttcaggctcgtttgaccctctactgctcgccgccgtcctcggactttgccggctggtggctcgctgcccggcaaactgttgcgaagatcgatcgcaagacgtttgacgccggggtcatcctcgttacatggttgatttggaaagagcgcaacgcacgggttttcgagggaacggcctcgtcggtcacgcagttgtgtgcgaccatgtgtgatgaatgggaaacttggaaatcagcanggctagttacc

SEQ ID NO: 633 - DNA, 389 bp, Oryza sativa
  unsure (1)..(389): unsure at all n locations
ngattagtgtgactgagtgcattgttattaatgcgtcgagtgtctacaccatttgtctcaaaataagttcacttttaaacatgaatttgaatatatctaaattcatatatatattatacaagtgtttttttataggatgaaaggtgtatgcattactggcgaccggattaacttgcaaatgcgttgccttaatttgagctgaatattggctccagctgatgaactcattgagaatgctatccctactatagtaccaaccctagcagaaaaggattaaacaacattgaattctcagtccataaggtgcagcagagcatgcatggcaacatagcactgtagtcctatctacagcggacgtcatacatgtacagatgtactgtacataacat

SEQ ID NO: 634 - DNA, 392 bp, Oryza sativa
  unsure (1)..(392): unsure at all n locations
agcttattcctgataggtccgagatccatcggtttcttgatgatttgaanataatctggaatattcagcttaacagcatcaaccggggagtcgaatatgttactacatttctgagtcatcagctttttcagaatagcatcgcattgcttaaaaatcgcatcctcagtcaacaccgtggaagcctcaggtcggggctttgtaggcaagaaacgccccttggcaccacggaccacatggttaccacgctgtcccttcttacctcgaggggcagccgaggacgagagcgcgggagctctattgacagggacagggacagcaaactccggcttcttgaggagattccggaccgaatcaagctctgtgcggaacctcttccggagatagcctctctc

SEQ ID NO: 635 - DNA, 294 bp, Oryza sativa
tgcccgcaggtacaccaaacacgcacttatcggtgttcagctttatgcgggcggagcggagactttcaaaaggttccgctagatctgagagtacagtctcttggttgcgcgtctttacaaccaagtcatcgacataagcctcaacattacgccctatttggctacccaaagaaatgcgagtagtacgttgaaaagtatgacctgcattttttaacccgaagggcattgatgtataacaataggatcctatcggggtaccgaacgcacttatttcctcctcctccctagacatgc

SEQ ID NO: 636 - DNA, 473 bp, Oryza sativa
  unsure (1)..(473): unsure at all n locations
gacccggatcttaagcacctgngctgcagcttgaagtgcctagtgctgccaataatatggtattcgtaatacataaatgtaggagggtaaaagtgaataattggtttatatggtgcagacgaatcggtgatattgaaaatggaagctcttcttcactggcattcatcagtaacatgacatcattgagcatcctgtatgcataacttttcatccacttaattaaccaaattaatgctcagaatattgatgtaatttgaaccaagctggttagatcttataacacataacattttatttttttgcaggaatttgaggaactgtaggatatctgataatcttgcatcattagacttttcaaagtttgcgagtttaagcttactggaagcattntgtttctactataaattgtagtcaagcatcttttgtgcaatatattttanatgtatggcgatggaccatacattgtctaatga

SEQ ID NO: 637 - DNA, 211 bp, Oryza sativa
  unsure (1)..(211): unsure at all n locations
cgctagcanaaccggagagaacagtctgaacttgaatgcacgatacctgacagtttgtttggggctgatgttgttctgaaaagaaagagatacccctgtgtctaactctgatgcacacttagaattttgtcagatatacatactatgaaaaggaacgctcatgcngtgggttgacacaaattggaatcatggtgagtatcatggtaacaat

SEQ ID NO: 638 - DNA, 408 bp, Oryza sativa
  unsure (1)..(408): unsure at all n locations
agcttgcggtgaccacgtcgacagtagcagattggtggcttgaattggttnnggtacctggttaaggcttgaactaatctancacacgaagccctcgccgccgccgcgatgtaacggtttccctcgttgtcgtcgtcactgccgccgccaccgtcgctgcgccgctatcgccagcaccgcagccgcctctcaattaggaacatgtcaagaaagatggaaggagatatgcatacgtttgttctgtttgtcgagttaaaaaggacatgtgattggaacaaaanacaanagctatctgtggttctctataaaatgagataggtctttcatatcacagctgatgtggcaattttgctaaggtggaatagcaacgttacacatttttttacatggctacttttgcaccatgag

SEQ ID NO: 639 - DNA, 477 bp, Oryza sativa
  unsure (1)..(477): unsure at all n locations
tctatgacctcacctatttctatcggntattcatggatccatatgctggttagtccacacctggaggccagatattgtacttaagtgggcaagtggatgacaggacaatccataagtatgaaaaagaagcaaaggacaaaagtcgagagagctggtaattagttccctcgtttaatgcctcatagaatcttgttttgtaagttagatccatatttaaatcataatcaagaagaaaataggtaacatatttctgtagtagagactatttgtatgccacttgaccaaatatgttcctgctgctcacaaactctagtgaaaccaaagtgagttcattaaaaataacctttatagcaatcttcccagccgtgtacaggacgtcttggtgaaattatccctttctatcttccatcctctcttttatccacanattctctttgtattacgtccatatgcacatttgactttctctatattaat

SEQ ID NO: 640 - DNA, 342 bp, Oryza sativa
  unsure (1)..(342): unsure at all n locations
cggaggncncgaacaagaggcagacttagcaaagcaatgcccggcactcgcgcggcgaggatagaccatccatgaagaaagttgcggagaagctcgacaggctggctaaggtaatgcaacactcatggacgcaacaaaatactgaagagatggagagcttgctggaagaatcttcttacattataagctcacgagcctcgagtacaggaaacttcagcctccacaagaaagatgccaggacctaccatcacggcgttaagctggaatctctctgctacccacatacatcatatcaccatatgataccgcgatatatctgatcatagttatcacctaccctac

SEQ ID NO: 641 - DNA, 462 bp, Oryza sativa
ctatcctaatgaactattgaaacaccatacttcttggatttggacgggctgttattcacagtccaatgataaaacaatccactgatatttttgttccaaaaaactttaaaacggttggaactcggaaatgataaaaaaaggataaatattcttcatcatcttagccatgctgggccgggtttttgcaggcccgtccgaggctcggtaaaagttccgctacctttttgggcgacaaaagtacgtcttaccccacacgaccaaattatggcctaatcacaccaaaatccactcccttccaaaccctcccatcaatcactcctatagtatactcgtactatactacactctcatctccccctgctcgttgtcatgctctcccattccatggctccatccatttcgattcccaaacagccgcagctagagctagagctgagctaagctagctattttcacgtgtca

SEQ ID NO: 642 - DNA, 409 bp, Oryza sativa
  unsure (1)..(409): unsure at all n locations
gcagcagctcatacgacaaaaaagacattattattgagcttcgaccactaacaccaagtgcaaaccaagaggttttgtgaccttattatctttttggtacagtaaagacccagccacatcagagacaccagagcaatttactaaccaaacaccattatgcctggacatcctcaggaggattctttagtcaccctgaactatcagatataaagaagaaatggcatgtattcttagcaggcatttatccattgtgactctaagcatccttgtcttcttacacatcatttactcattctagatctaaacatcccataatgtttcttataatctgcatactgggactanacagaatctgactacataatgtagttctcccacaactgacaatgtgtcatcatatatgaatcta

SEQ ID NO: 643 - DNA, 484 bp, Oryza sativa
  unsure (1)..(484): unsure at all n locations
cactactacaaactcaagcttggccgatccttctgcaaatataattntcggggctggtgctgatgaccggtacactggtgagattcatgtgacgatcattgccacagggtttccacaatcctttcagaagtcccttttggccgatcccaagggtgcaagaataatggaggccaaagaaaaagcagcgaacctcacctataaagcagtggcagcggcgacggtacaaccagcgcccgccgccacttggtctcggaggctcttttcctgaacacggntcaataagaaaactagtagtttgtgtaccttagattctcatggaattactgagttggcgctccaatcaagcttctatgtgttattctttttggatatgtaaacacttaacagttacacatagtgattagcttcacttttattgtatgtatcatctagatgaaggtgaggtcttcaggagttcagcagccgtcacgaacttttattgtat

SEQ ID NO: 644 - DNA, 423 bp, Oryza sativa
agcttcacactatttctcagctggcagtaagatgtactcttccaagaaaaaaaacatgtcgttttgtagccagctgcataatgtctagcctagttttaacctttttcacacacatatgttgttacatttaaagaaatagttaattgtatttttttggggggcggatccaagacctggtgaccccggacgaccgcccgagctcgtgcacttcaagctagcagtaaaatgtactcttccagctaaaaaaacattgtcgtttgtgacccactgcataatgcctagctagttttgtttccacatttaattaattaaagagataattaattgtatatttttgggagcggatccaagacctggctagtggtaccttctgcaaccgtccaactcatgacaagcacataatgtatagcttcatcctgatgt

SEQ ID NO: 645 - DNA, 473 bp, Oryza sativa
  unsure (1)..(473): unsure at all n locations
ttcggtattcgntacaagtcactactcttcttcatccaagaaatataatttataaaatcatctaaacacctgtaagcaaaataaaattatttttaagagcttgttcacttttgtgtcaaatcaattttatcaaaatttattatgttttaatgctaccactttttggtaccgctggatatgttcaatatgatgtcttctaaaattttataatgttttttcgagataaaatntttgaaactctctcaatttgttaagatagtattggcaagatcattttaaatttgttaccatactataaatttagtacattcaaagtgaacaatgtctaactccatagacatgtgggccatattctctctcccaagagtcagcttctatgctgaatgcccaatacttttattaggactgctaacaagatgtctataatgtatagaaaattcacactgtggatgctctttatataaatactcact

SEQ ID NO: 646 - DNA, 497 bp, Oryza sativa
acgcgctgcacttcacaacgcggggcgacattaactgcctcccttgcacgccgctgcagaagagctttgaatgctggcggggacagatggtgtggagaccaagacaaatacaactttggagagtacaacggagcatgagaaacttgactgatcgcactgacatgcgtttaatatgagggcaaaagcctgcatggcatggaaaaaaacacgatctcgctgtgagaggcttgtaagatatacctcacaatgacaggtttaagggaggtgctgtactggttcaatctgagcggaaattctgcttggagatgccaaagcgtgtttactattggtgtctactgacatgtatatacagaaataacgccgacataccaacaaagcagcggatttgtcaaatcaggaattattcgttacttctggtgcgagacgacaccttatggggggggttgaactactacccggggatgtcttattccaatttctagaacaaaacccgaagt

SEQ ID NO: 647 - DNA, 382 bp, Oryza sativa
  unsure (1)..(382): unsure at all n locations
cgccacattggacctcangaataacaccctttcaggaagtgtttcttctggtaattatcattaatcattaaacaaaaacagttttaatagaaaatgaagagtttaaccatggtgtcatcagtaattgtaattagntagttttgtgtttcatctgagtagaatccattgattattgtacgcctgaagaaactgaacgaggggtttcacttccataacaattcaaagctctgtggagctcactttgattttctgaaaccatgcgcaaacggcgatgaagacgataatgaagaacgcagtataatggctcgtacacctgaatcaaccaatgtcaagccactgcaagctccacagactatgaatgtgaacagagactgcgacaatg

SEQ ID NO: 648 - DNA, 448 bp, Oryza sativa
  unsure (1)..(448): unsure at all n locations
ggaactctaagcgaccgcagcatgcaagcttaatagtatgatggcctgtttattttattaatgtcgcggctacaccgtattaggaactatagatctatgtctcaagctatcttgacctatcattctcgatagaaaattcccgtgatagtcaatgtggacgtaaaatgcaccttcaattcgtgtgatgcacaaccataggatcaccttctatgtcacctatgacatcaaagtcctcctccgccgtancaccaactattggaactcgtnggtaacgaaaatctttcttactatcatgtcttaagcagggcaaggcaatcatggcacacactcgcgcctgtgaagtgacctccattgatatcgtgcatagtaggctttggcttaattgtgtaatatccacagagcctagctcatttctccacagtcctctacttgngaatatactctcgtt

SEQ ID NO: 649 - DNA, 377 bp, Oryza sativa
taatattattatctactcgagaaaaatgtgatagcattatgcgatcgatactctaacctttaagttgagaaaacaacaggctaattaagttgtagcttcacaagaactacaatcattcagaaagaaaataaaggcattcataaaatatttcggcgtgctgaatatcagcatgtcaattaactacggtgactacgtacatatgtatataagcataagttgactgtcgaaagtgagacaacaaagaatcacgaccacaaccccaaccccagaatgcataataattatagcagattagatccacactgtccttcatgtgatagagaaaacgtattagtaccaaattatgtgacggatattgtatgacaatggcggtgcat

SEQ ID NO: 650 - DNA, 389 bp, Oryza sativa
tgaaattatgctgaagcttgctgaaatttatgttgaatatttttggttggtgatcgtatgctactacggactcaacttataaattttattaccaatgttacgagaactaaagaatttcttggatgtaaagatcttgcaaaggttgctgaattaatggctcagactggaaagaacagaacttatcacttggtgtataggctcattgagttatcattgatacttccggtggcaatggcttctgttgagagggtcttttcagctatgtgtcttacaaaaagatttgcgaaacaaaatgggggatgaatgactaaatgactagatgatttgttacactgagaagcagacttttagaagtattagtgatgaaaaaatcatccaacactttgaag

SEQ ID NO: 651 - DNA, 493 bp, Oryza sativa
  unsure (1)..(493): unsure at all n locations
tctanatcgactgcagcatgcaagctaanngaatcgagaggcagatgtgtttatactagnatacactataggttcagccgatatgatctttatatatacccggtgggacaatttgttctgctaggggccgctgntgacacatggaccaaaaaggagttttctggttatagccgagtatacatgaacctacagggtcgcacgcttaatgggccggaataaggggattggatggagatccaatatgagcttaattcggatagggatccgaataggagtcctacaagccttggaggcccgagtgatggatcctatatattcgtgaggggcgtgaccggcggaggcattgcatcacgtgagataccctanccgacagtatccttctcaagcaaaaccctaaccgcgcccaggtgctagcacatctgcgcatggcgttccgtccatgtacgtgtggatactggtagagtcgccgctggattgcagtcctgattgacgt

SEQ ID NO: 652 - DNA, 438 bp, Oryza sativa
  unsure (1)..(438): unsure at all n locations
tgtgctggccnagctgcatgcttggtttgagaccgttcggtctgtataccttggatggctaggctggatgggccgatgcataccttcgctggcattgacttgcatttttttgaacatcctgagtttgcttgaatatgtagaggcacttattaccggcttaccgccaaaacttgatgacacaccaaatctcgtggatacattaaggttagtgacaaaataaatacagcatttatcaatacctcatatattcataagtatttaatgagtacaaaatatcacttctagcatattacgggcgtcaacaatgctccatgtggaactaatctgaccaaaccacaccatgggttacatcactagcaagagcaactactgagctacaatattacatatcaagtatgtgtagatgtgtggggatccttatgtctatctccagcaatt

SEQ ID NO: 653 - DNA, 473 bp, Oryza sativa
actcagcttattattaaaaaactattgctcgtcctagaaagctcatgttctgtactcttatcatccccgctgacgcagacgaggcgaaatataataactgttcaactactccatgcacgacttcttggcaatttgcaaattttctcatgaaaccccggggaaagcaagcaaccaaaactaacacaccgcgtagccgaaactccattgaacgttgacttgaaatcatcctctactcaccccactgattttccactgagtgagtaaacgtcagaccaaatactccgtcacagtgtcttgtcttatgcaacactatacttgatcacgggtcatagctttctcatcatttggagacggtcctgtatcgcacggcataatgcatacacacgaacagagtcttgatgtaccagtcatctaaaacaatttcttaccgtaccgagaggtatcgataccttcagatatattctattggacta

SEQ ID NO: 654 - DNA, 353 bp, Oryza sativa
  unsure (1)..(353): unsure at all n locations
taacctaggataagatacattcgaccccctttgattcaaaggggcccatataagaaaaaaatcatatcctctttaaatcaaaggattttatataggagattataggattatgatcctatacaaaatttttctatgtggctatttgattcaaaggattaaaactttccaaatcctatgaaaattttatggaatggctcattgcatataaattttggagaaaacatagggatatgaagctttcctatgaaaaaattcctctgagactatctctctcatccgattcctgtgttttntctgcgatccaatcaaacagtcattcatgtgttgttcctatagtttacacttgcatatct

SEQ ID NO: 655 - DNA, 296 bp, Oryza sativa
  unsure (1)..(296): unsure at all n locations
tcgaggagatcactgncgacttcttactgtcatttcgccaatctacacattgggggatgcgatggnggcacactctacgagaggagaatgatatggaacctggtgtaagaacgtacgctacttgattccgtggcgattagctactgttatgcaatataaagtcaattgcatatcataaactacaacactagctagctatatgccacgttatgcctgacacaacatttttgtccataagccttctcttactggctacgtgtcggagatagtctgaccgtgtgcagggcgatgcatct

SEQ ID NO: 656 - DNA, 415 bp, Oryza sativa
agctttacaagaacagagactatctttataaatatgtccaaacgaatagctatcaacattactcaaatgcagtataattaaacaaagcagcaggcttctgtgtccactttggtaacagagatatggagttaccccgagaaaaatgttcatacttcaaacgttatttattcttgctataaaatattactaccacacagtttctagtggaatggcagatcaacataccatcgcgtctaagacaaatctctggaatatttttcacttgatcattaatgctgccattgtatactctggtttcaatatcaccctcaacataaactgccgaactgagataaggcaagaacaaagacagcaccaaccacagtaaaaaagaatctcaagccatagaactaagaaatggtatatagttgtatac

SEQ ID NO: 657 - DNA, 248 bp, Oryza sativa
agcgcggcctggaacacggtttgccttgagagacccgagatcgccaaatcgcctctcgaaagctgagtcggcacgcgattttgcgacgctgccccacgccgaacggtaaactctggaccggcttcgcggtcagaaactacgtgccagaaaacagccgttctatgcgcaaacacacggggttgacgcggcaggactctgcgacttgagattcgtctggcgggcgaggcacttgcctctgctgaccggag

SEQ ID NO: 658 - DNA, 481 bp, Oryza sativa
  unsure (1)..(481): unsure at all n locations
gcttggtccccccttactccatttatagatttctggtgggctatttatgactattcatcgtgtgcaagttgataactatggtactttggatcactttgtgcttcaccttgatcttgttntgtcacaacatgaactagtgcaaggtgttagtccccccttttttagctttcttgaacatcttgaagcttatttctggtcatgcgggtcaggctaaagtttcatcttgaagtttgcctgaaatcttcaagtatatttgtataataatatactgtgtaacattagttcactgttcccgtattaattgcactgttcaagtatatcttaagtgtaacattagttcttagctgtgttaagagttcactgttcatttattgcattattcatcatttagtactacattaaaccttgacatatacacagttgtaccaattaaacctactgcatcgttngaaattccgttggggttaattctaacatcaca

SEQ ID NO: 659 - DNA, 439 bp, Oryza sativa
  unsure (1)..(439): unsure at all n locations
tatatggntataaaagtgtaaaaagattaccatacaacttatctttttaaagctgaggcactggtggtggcgagacatcttcttcaacattttatcgttgagtgtgctcctcaatcacgacgggaaagaaggcaatttagaagcattctcctttgttgtgtgttttcgaaaaaggagatgcaatatctccatctttctttttgctcttacagcactacaatttaatatcacaatgcatatgtttgatggtattttgtacatatttataaaatataatcacttgtatattgtgtgttaatggttgattgcagcacgaaacacgttaattagcaagctaattaaatgattcatgcatgcatgtgcgtacagaggtggcctgacatttgggacggtagatgtgtgatgtgaattccgccctgtatgcgtacgcatatatata

SEQ ID NO: 660 - DNA, 547 bp, Oryza sativa
  unsure (1)..(547): unsure at all n locations
gcttgtcatattagatatctggcctagaagaaaatagctaagcatgaatttccacatatcttttatggaaaaaaaaagaacatatggcccctaatcgttgacgcaagtatataccttatacgtcacgtgattntactagctatgtcatgtgagcacattcttaggccaatccacttggcacctgtacagagagaacaaagcccgcgagactgaatcaacaaaaggacaatatacatttgcttatgaattattatgttaagagtaaattgcacgcatgatgcaacaacttggcaggtgggtgcaatttgatgcaataacttgaaaaatgagcgttctagtacaacaacttggcaggaatgtgcaatntagtataagaactttataagtgatcgtataaatataacaacttgcaaggtaggtacgaatttgatacaataaatgaagaagttatgtgacaacttaatttattaaagcatttnttatataaattcananattcanatacttattttgacatatactagcgtggattatataaaatattata

SEQ ID NO: 661 - DNA, 235 bp, Oryza sativa
  unsure (1)..(235): unsure at all n locations
tacactaggcaaaatccacacttgggcggtatacattccatatttccagcaccagcagtatatttaaaagtatgaatcttctggttcataaaaaaatacaaatttttagctgacgaagccattataatattttaactggaagtcgcttaagcctcttntgccttatttatattaattcaggtgaattctgctgctgagatcatctatgaccttgctgatccaaatgcttatctga

SEQ ID NO: 662 - DNA, 497 bp, Oryza sativa
  unsure (1)..(497): unsure at all n locations
aactcaagcttgattttcgctgagctgaaaccattntcatgccaaaaccccttatcatgttctgaaaaaaactgaaaaacagttagagccaacaaacaccattttcaccaagtcctatgctaatcaaatattccggaattcatttcagtaaaagctaacttacaagaagttttaagatcagctgctagcacacttcatgatccaaacaaccacttcagtgttaacgcatggctgatcagttattagagcatggccaaatttaatccctaaatcttcatttacgacatgaaaatattctttcctccaaccaataacctatatttgaattcttaaaaaaaggggtcatttttaaaaactaccaacaaaatggtattctcatctctcctcatggatgtttgatctcctacagtgtggagtgtgacacgcgacgtgatcttgacaaaaaccaactcttaaaantgtaatatngtgccaaacaatataaggtgcgtaatatt

SEQ ID NO: 663 - DNA, 427 bp, Oryza sativa
  unsure (1)..(427): unsure at all n locations
agnctatttatcttcttcagtatgacagtatgattaataatgctatgaaagtcgcatttacactagtcattgttgtgtgaccacaaattcgttcatgcgttggtccacatcctccctaaatggaaaatgaggaaatgattagttttcaatatttgtaagttaaacaataagtagaaaaaagatgggattgcataactgctatatgagagggttgcatgctctacgctagcgaaacaaccgggactacccaaatcacatctatttatagcaattgcataagaattcctcaacgaanaagccggccaacgatctacatttgcaatgtgcgtccattgcctggtttctaaccccaggcgatataaatagatgtcgtccacatcctccataaacaaaacatgatgagggtgataattnttattatataagt

SEQ ID NO: 664 - DNA, 381 bp, Oryza sativa
  unsure (1)..(381): unsure at all n locations
tcatcactagctggatctggcagtgctcacgcctttagcgaggatgtctgggcacagcggtggccagaaattgagggggggatggtgggaagaggatggggatgcaccactaattcagattcgtcgggtgccattccctccgtagagcttgtcgtcgccctatcgttcgttgggagaaaatgaggagggggcaaggggcggggtggtgaccncatcacctgcccttgcacacacnggtgcatcgcgttgcatcgcgcgggcctggccgagcagcgaatctcacatctagcgttcctgctcatcctggctgtgggggctcttttgtatacgctcaatctgtcctggagtnatgagtctgctaccnaacagatacccactgca

SEQ ID NO: 665 - DNA, 514 bp, Oryza sativa
  unsure (1)..(514): unsure at all n locations
agcttgcagnaaagcggnagtagcatttggttgtctcatctatgatcaccctaagattccaaccactcgctgtgtaccaccacacacaaactttgtttactgcacacttaattgcccttttacccatgcctaatgacctaatcttgtgaccttnttgaacgctcatagccgaactatagctacaagacagacaagaaaaaggtccacatggagagattccaaagactctgctcagttaaatttctccccctatacatgctactccataaatcccaaaatataaaaaaattaagttgaatttgacaaatcctacaaccatgagtctatacagtctcttgaatatactccctccggactgataatacttgtcgttntgaataanggtgaagtcacactttagaatatttgttatcaatcattnttaaaatatctatctntcacatatggtgactacatgtatagaatagtcttaaaatgtactttaataagatcatatatttgtaatattttatac

SEQ ID NO: 666 - DNA, 432 bp, Oryza sativa
  unsure (1)..(432): unsure at all n locations
tttcccatgaatganatgagtcattcaatgggagtttcatatgattttgcgtatgcttatcctttgttacagaggatcaagtatgattattttccataagattttaacactttaaatttcctctattttttttctttgttccaaaggaatccttagaatgtcatatgctaccgaatcccacaagaatatgagaatcatacatatgaatttggttgatttccataaaaacatataaattcggaaggatttctgaacattcaacattattttttcactagctggcgtaggatagaatctaaattttgtgttcaggacaaccatgtgttccaaacaacatttcatacaaaattcatttgctttctacttgtaatactattagcatatgtatagcgaattggtgagctcanatccctctctcaaatggcatgtata

SEQ ID NO: 667 - DNA, 327 bp, Oryza sativa
  unsure (1)..(327): unsure at all n locations
tggcgacaaagcngcatagccgtgatgaagcgaacacaagtcggcggcaacagaaacaaaccggtaccgaatacgcgcagccgtggaggcgaacaacccagtcagtgtcagatcaggtgaccagcaatgaacgagatgaccgccatcgtagtggtagcggtataaattagccgttgaggcgagggcactagtccacatcngaagagacgactatcgatgaagacgattagggcaatcaatactggcanaatcatgcagccatggttgtgagaaaaccactcggttgaacacgttgacagcttgcattgagcgtgatgatgcctattt

SEQ ID NO: 668 - DNA, 381 bp, Oryza sativa
  unsure (1)..(381): unsure at all n locations
tgtgtggcggctcgtaatatggatatctgtgatcatatcacattaccgctgaataccaactcttcattttgataatgcgcaacatatgtttcagatagaacttcggtggcttttacgggatggccttgtgatatggtgaacgaaatttggtctaccgttgaccaatgcaatactgttatggagagatggcatgcaaaaattacacggttacgacagcatcttacgggctggncaaaacatagtagtggcttatatagacacagaacgaaaaggactttatataagctggatttgctagataaatatgcagaacatatccttttgagtccggaagaattggatattagatcggtttgtaggaatagattatgctctattcta

SEQ ID NO: 669 - DNA, 377 bp, Oryza sativa
gcttgaattaattaacctgcatgtgcatattcccgtcacgaacgaatcaacattagcattcaacagaaatgcagcgatatgatcatcgacatgtgatgcgatcgcgaatcgattctctgaaaaaaagacagagatcgatcgatattcgacacgcacctccgctgcgggaagatcttgggcccgttctcgaggtagaagttggtgaggtcgccggcggcgaatagcggccgccggtcgtcgtccggcgccgccagcatggacgtgatcagcgccccggtgctcgtcccggcgatcacgtcgaagtagtccgcgatcctcgcctccggcccgtccagctcctgaattaatcatcaccaaattaatcatcatattttttt

SEQ ID NO: 670 - DNA, 435 bp, Oryza sativa
  unsure (1)..(435): unsure at all n locations
tgtggggatcgtcctgcgtggtggagacagcgcggtgcaccttatactttctccgtcccaaaaaaacttaatttctgggttttcatgtctaacgtttgaccattcgtcttatttgaaaaaattatgaaaaaatttaaaaagataagtcatgcataaagtattgtttatgttttatcatctaacaataatgaaaatactaatctaaaaaaattccatataagacggacggttaaacgttgtacacgaaaatctaagaattgagttcttttggaaaggggagtatgccgcaaggcggtggtgacatggcaaaatgacctgagacagcangggtcagtgatgcaagaaaacagcagcatggctcacggccttgctgtgcctccagcaatcgacgtgtggggagatggtgggagtttgggagcaagttgggcaccggtg

SEQ ID NO: 671 - DNA, 524 bp, Oryza sativa
caggctataccttctttctgaccgctaacctgccggacgcctgacctagatggcttttgactcaggcatcggctgtctgcaacgccacgacgtcccgccggccgacgcgagggcctgaccatcctgcctcgcacaccttcttcagcgttcatgtcgacctgtccgccgcaccacaggtgctggccatctacgcgcgctgcgccgtcagtccggcactcgctgtgtaacaagccacagacggcacaccgtgcgtcatgcctcaccggatggcgccgggtctcctctgggcgagactcgcctgcaccggacggcccaggaccccggcccgaactccccgcgcctgactacgcaacgctgcgcccagactcccagggcgcagaggcgggacgacagccctacggcgctgcctgaggagccccgacgagcgcccaactgcgattcgtatcctagacctgacctgactgctgaggaactgacggggcggccgtgcgagtacatattgttctgacgctttcgccggcgac

SEQ ID NO: 672 - DNA, 292 bp, Oryza sativa
  unsure (1)..(292): unsure at all n locations
agcttcttcttcttgcaagctagaagagagatatatgatagaagcgagaagctagctagggagggatcttggttgattangtcatgagtggcatatgatgattcttgtatacggctttgtgtttgtgggtgagatcgatggatcgatgcatanggaatggggctagcaatagcttacatagggagaggaataatggacgaagaagttgttgggtgtctcatggtacaaattgtggggggggggggggggggtattcatcatatttaccttcaccctctatttaataatatgt

SEQ ID NO: 673 - DNA, 412 bp, Oryza sativa
  unsure (1)..(412): unsure at all n locations
tctagaattctctggtgatacactcttatatataagtgatgactacctgtctttataacncataatgagtctatgggcttggttggtgtagtaccctaccaaagtattggtagtgtcaaaacttaaggtatgttctggcattaccaataatttggtatggtagcattttatgtgaatggatttggattgataccaattggaagctaagttttatattatagtcaagaaagctctagaattatgccagattaatcataggcattaccattcacttggcttcaaaccaaaccattacattcactattcaaactactaaacaaattggtagggcacattttggcatcaatccaaaatagccctatatccatcacctgattggtttgatgtctacagcatagtggtacattctgga

SEQ ID NO: 674 - DNA, 435 bp, Oryza sativa
  unsure (1)..(435): unsure at all n locations
agcttcaggaagagatgggttctaagctgatctttttactgcttatcatccgcagacagacggacaaaccgaaagggtgaatcagattttggaagatatgttgagagcttgtgctctatatttcggtggaagttgggataagaatctaccttatgcagaattttcgtacaacaacagttatcaagctagtcttcagatggccccttacgaagcactgtatggtcagaagtgccgcactccacttttgtgggatcaaacgggagaacgtcaggttttcgggactgatatcctgagggaagcagaagaaaaggtaaaaatcattcaagaaagattgcgtgtggcccagtcccgacataagagttatgccgacaatcgccgcagagatttgagttntgaagaacgagattatgtgtatcttcgtgtcacgcctcttcg

SEQ ID NO: 675 - DNA, 382 bp, Oryza sativa
  unsure (1)..(382): unsure at all n locations
cttacctgaaagacctaacaaaattactgaaaacacaaaaaataaatatgcatacagttcaggtgattccttatcatagagaaaaggtgtctccattatgttccatctttcattagttgaatacacctttcatgtattattcctatacctcttgacgccactcctcgcttttaattgccttatcaatgacatcttcagtaagaataattntccatgtaggtatcacgttgctaagcttgcttaagattgttatcacaatgggacgaggcttcatatcttctacaatctgaatcgaaggtaacatcaacaattatattacataatgatcaacttaatatcgtgtactaatacactatttcaacagacaattcttgtgaacata

SEQ ID NO: 676 - DNA, 435 bp, Oryza sativa
  unsure (1)..(435): unsure at all n locations
agcttaggcctgatggacaattgnaagtcattggcaggctcgnggccaacggttatacccaaaaagaaggcgaggattnttttcgacacctactcaccagttgcccgtttgaccacgattcgagtactacttgctctggcagcctctcatggtcttctcgtccatcagatggacgttaagacagctttcctaaacggagagctggaggagatctatatggatcaaccagactggtatgtactagaaggttaggaggaaatcgtgtgtaaactattgaaatatttgtatggccttaagcaagcacctaagcaatggcatgagatgtttgacaccacacttacatctgctggctttgttgtgaacgaagttgacaaatgtgtgtactattgctatggtggnggagaagaagtgatcttgtgttatatgtccatacat

SEQ ID NO: 677 - DNA, 463 bp, Oryza sativa
  unsure (1)..(463): unsure at all n locations
cttaatatttaatacttgattaatcttgtgctaatgacttgttacttttcgtgtgccctggatatgctaagtcaatgagctagatcgaacgaaggctaagtaggagaaaaaagatattgacgtggtgtgaaatgaatatatttgatgttcaattttctaataatatatgaatagagtaaacacataatacataaaaaatatttctgataaatttataacatcatttttccatatcagtattttttacaagagagagtgagtaattcttgaaattctacacacacttgaagttgtttttattntggaaaatgtaagtctaatttaactatcacataatctatactttcaatttatttatattttttatgggtgttttgatgacatgcacctaatttgaatacaactcgaaatagcatatatttgtacaactcanagcatacgtgatattagtttacattattag

SEQ ID NO: 678 - DNA, 491 bp, Oryza sativa
  unsure (1)..(491): unsure at all n locations
tgcaactgctggtggggggcgaaacttcggaaattttgtatacaaatttcaaaccctgattgcaagacctatagggttcagtgctccgctaccatggatggatctcagcgttgaaggtgaaatgatgcatgtgctctgcatangaacaaaaacctctaggactgatgctccacgtatttcttttctgtagcatcttcagaattagtattntttaacctagtctttgattgctgcatttgctctatgatctggcttgacttcgctggtcaactagcgcacagaagttgagtggttcacacaatatttgttatgataaggtgctaaaaatatcttgaccagaacaagataacagtcgaatttccatgtgttaacaaccatatatacataactgacaacctaatgtacgtagatcaccaattcaataaattacagtaaaagtattacgacactatgtgggctaatcgaccgagtttaataaaacttctattatc

SEQ ID NO: 679 - DNA, 411 bp, Oryza sativa
agctgagaagcgtgatgattactcgagggagaccccgtttacgtctttataattaacaaaccctactatataaaccaatggaaaaacaaggcctggacacgactccatggaattctcgaagacaaaggtcggatgcatcatgtaccaaaagtaacactattacttgctcaagtagtttacaaactttttctccatgttaccctgaacttataatcttccgatctgaagttaattctgaataaatgctgtaatgtcaacatcttgacccgctcgacgaatagaaacgattgcctgaacgactgaagggccattttaatcaattctcttttggaaaatccactacacacggccgaattacttgcaagcttgcttttcgagtagctaactagcacaaatattcccatcaaaata

SEQ ID NO: 680 - DNA, 176 bp, Oryza sativa
cgctacttcccggtagggaactctccgcgtcttgctaccgattatgcgatgtatttttacgtggcacatcactgcataaattatgttatggacgtcctaatgacaaaaactggatttataaatctgcactttacaacattgtgctgagcactctataaccgttttgtgcgtatata

SEQ ID NO: 681 - DNA, 436 bp, Oryza sativa
  unsure (1)..(436): unsure at all n locations
ggcaaggctgaagcaacttagcgctaataacctataatttcttttaaatatnacaaactttcacacaaaatgcatcagttccattgtattcttctattttatctgcataagtataatttgtagttgacgttcacgttggataagattatttttgttttcttaatacgatatattttttatataatataactttaataatttattgctacggctattagatatgatttacaaaacatagtaaataatatacaatattatttaaaatatatattcttattataagtggggggactgatgaataattcggttatgctctactgattaaaactctagtatcatgaaattcagaagatgatttcttttacataatgaataaactaattgctgcatctgagataacacaaccgcacgccattattacacagtatttctatat

SEQ ID NO: 682 - DNA, 517 bp, Oryza sativa
  unsure (1)..(517): unsure at all n locations
agcttatgcatatgcccatataagttgctacatttaaaactagtaatcttgggcccatacctcacttggtgggatgagcctagtaagggatggtggcagcctagccaacaaattgtcctcgggatatttctctgccatatatgagaccataaaactaacttatgaaagcattgacattactggagctggttccttgttcattgattgctgatatattcagaaaccttccaccataatagtttgtaggagtaatggttggacccatgcctctaactctaccactatgatcctttccaaacatatctaacatagctggttcaaaatcagcttcagtgagttgttgactatctactctnttctcagccaatttcatgtatacctcattctacattgganaaatcatactcttagcatagtggtatttgttgacaaacagtaananaagatatgttagtaccattttttcttgagtagcatcagtaacatatctaccatcttttgtcttatggcattcatc

SEQ ID NO: 683 - DNA, 368 bp, Oryza sativa
  unsure (1)..(368): unsure at all n locations
tatctcttacgctccaggaatggatcagncagaacattaccttctgctcgcttcgaccgncgccgactggtgtttccgcctacacggctggcctttatgccgccgttgttgggcgtctacgtcttcaccgaccggccgcctcgttcgccgccgactggtgcttccgcctgcacggctggcctttatgccgccgttgttgggcgtctacgtcttcaccgaccggcttgccttcgccgccgccgactggtgtttccgcctgtacggctggcctttatgccgccattgttgggcgtttacgtcttcaccgaccggcttgccttcgccgccgccgactggtgtttccgcctgcacggctggcctattatgcc

SEQ ID NO: 684 - DNA, 333 bp, Oryza sativa
  unsure (1)..(333): unsure at all n locations
agctntccatagagtccaagaacgccaatattttatacctgagtcaagagatatcaccgttntactaacagtcagttgagctgaaaagtgacctgcggtctgaccgtgggccttaagccggtctgaccgggtctgttagccggtctgaccggcgtggtaaggccggtctgaccggccccactggtctgtngcactggtctagttgttggtggcgatacagagccggcagagccgcaaccggtcagaccgaaccgacggcggtctgaccgagccgtggacggtctgaccggccactacactgcgatcagaccggccaggttgagtgggctcaat

SEQ ID NO: 685 - DNA, 455 bp, Oryza sativa
  unsure (1)..(455): unsure at all n locations
tgggtggagaagaattcgccctctcgctccttcttgtagtatgggggaggtgcggcctgctgtcgacctccataccatcaaccccacaatttgtatcatactgtaattggagatcttcatctctttcttcaacggcaggagggagagatacaacagttggatggggatgcgaccgcggcggacgagaagttggcgctggccttggagttatattgatctcaatactgtgcttgggccattgaataaaggtcccacgtgcagccccaagggtcagaatttcgtcattatgagggtgcgggatagtgtagccaacccaatcgggcttcactaagtccacctgaactttggcattgccggctagcagttgcgccccatgcactcgggtctccgaggtangcttgaacgcttgaccctttgcggcatgaattgcaaatcctgctgtcaccctaatgact

SEQ ID NO: 686 - DNA, 519 bp, Oryza sativa
  unsure (1)..(519): unsure at all n locations
ctcgaccggatccttaagtcacctgcggcatgcaagcttgacttttttgcaatgtgtctctccataagcggttatactatactattatgttactacttgtctggtgtatgtatactattatgttactacttgtctgttgtatgtactacaatcatatcacgatgttaatacaatgcgttttactgtatttttgggtagtgttactgcataaacacgtggtaacgtgtaccttccgtgcagtaacactnttacttttgtacattaataagtatatggttagcatcaaagacttttaacctatatatttttgtttcaatcctgatttactgtaattcaccataatattattgtcaaaagtgcagtaacgtcatatacatgcagtaacactatattggagggaggagatcggttntcttgatnagagggaggaagaacgcgttcttgaggaggggagtacgtagatgcattntgaagtttaaacctncacatgcagtaacactatagcatcattgtgaaaac

SEQ ID NO: 687 - DNA, 450 bp, Oryza sativa
  unsure (1)..(450): unsure at all n locations
agctggcgcacacggaagagtgcgagagctcttattacacacgctgagcccnctacctggcgcgccagatgacggagcttgtggctcctcaccgggagaccgcgcacgcccccctttgccggttcggccggtgactctgggtgaaattctaagctcttgatgtgtggaaggatngcgacaatcgaaagagcacaagacacgggcgatgtatacaggttcgggccgctgagaagcgtaataccctactcctgtgtttttggtggatctgtgtctgaaggagctacaaagtatgagccagcctctcccttgttctgggttccgaatcccggaaagtccagtccagtccagtccagtcccccctctaagtgggcagggcgctctttatatcttaaggggtaccacatgcaccactctcctcttttctgtgggacttaccctccttttcataat

SEQ ID NO: 688 - DNA, 334 bp, Oryza sativa
  unsure (1)..(334): unsure at all n locations
cgactctcccatcttgtttctttcattatctacaccatcggagacaaggtttgccgcatacaatataggcacagcagccactgactcgttgacttcaaccgctggctctacgctggaatttacactcttgtcaaatgaaatgtacaatccaacaccctttctaacactagaaactactgctatattgtcaggcctggcatcaactcttggtggatggcattcatctctatggccctgtctccagtgagatatctggacctcgaggtactgcaaccataataagggaattactgangtagcacattggttatagaacagataacatacatattat

SEQ ID NO: 689 - DNA, 416 bp, Oryza sativa
  unsure (1)..(416): unsure at all n locations
nttatgtgcgtgaacatccatcatatattcagatcgcgacatttatacgtactaccatattgatttggccctttcagagttgtgttgcctactaacgatcgatcacccctgaaactgaacacgtacgtacgcaggcgatcccgagggaggcgaagcagtacgagctgggtgaagcgcggtactacgtggtgctggtgttcaacgccgtcctgtgggaggtcttttttttgggcgccgtcggcgtcatcttctgcgtgcacacgctgctcgccgggatcatcatcgccgtgttcatcccgatcacggaggtgctgggcgtcatcttcctccacgagaagttcatcagcgagaagggcgtggcgctcgtgctctcgctctggggcctcgccttctacttctacggcgagtacgccgac

SEQ ID NO: 690 - DNA, 469 bp, Oryza sativa
  unsure (1)..(469): unsure at all n locations
agccttcttccaagcatacggctgtctagatgtatatgacgatctctanacagatggatcttatatgaatcgtatgatgaagtaccacatgagtggatatataggagaggaatccaaatctgccgaatcgctcatgttatgatcttctacatcctaggtcttcgcgttccgtcatctggcttatgttcttcatgtagcattcacatcgaatgactctatgagattacgtcgatacttctacatattatgggtaacgtaggagacatccctattgtcccccggcggtcttaattaccactgcttagctttcaattcgcctctgaccatcaaattaaatgtgaataacccgtcctcctctctttgaacaacgagcgcttccggtctgtgcgtgcttcaacaactntgcttctccatataccatatctctagagtcaataattntctatgangaactactgaactcaatcac

SEQ ID NO: 691 - DNA, 304 bp, Oryza sativa
tggaaggttttgaaaaaaagatttttttcttgttttatcacgccctacataaatccactggaggggggcatactcacaccaggctgtcaaactatgacaacgtaatcgcctttaaattacatctggagtccttggatccaaacgttacacaccgacaagggaagctggggaacaaaattggtaagcgcctacgtggtagaacccccataaaggatttaacctggacacccatgggcggaagaaccccttgtaaaacccacccgggttctcctggaaactcaaagaaaattgatgtttttttccc

SEQ ID NO: 692 - DNA, 494 bp, Oryza sativa
  unsure (1)..(494): unsure at all n locations
atacaatcaaatccctactgtgacaatatattggatttaactaagaaaatttataagctgaaaatgatacttagtactttgtccacatttctcaagtcgcaattgtcattctccgacttccaaaatacaccaaatgcatgttcaattgtcattctggtgtctgcattctttgcaagcacaagtgttatattaaattgagcaatctcacgctnttagatgcaataagataattctttgatggtcctgtttggtttcgggctaatattggctattacacaaagaanaccaagtcaaaaaacttgacattaccaaaaaaaaaggtaaccagtctggtaagtatgtcttcataaatgaactggagagctaatgtggcatgttacccacaactttcgcgaaccaagtgaaagataaatgtggtaactctttgcataatcgtcaaatcatcatattaatctgcatgtngctttgactggtaatattatagtanaacatac

SEQ ID NO: 693 - DNA, 481 bp, Oryza sativa
  unsure (1)..(481): unsure at all n locations
tgtcggtagtcttaaggacgagcgagtgatttccaagagacgagcctctgtcctcggccgaactcacgagaaggggggtctcacgactcctcgctattgaggatctttcctcgatagtatcgatggtgttgatgtcctcatcactttaaattcgatgcatcgagtttggatggcttggataacgtatcaattatcccacattctctcttttttttttctcatagtacaatctatttgtatttgtaactcataggtactaaatctaggaagacaactagagtgttagaaaagatatatcaagccaaataaactgtaatattacttgtgagctgataaaatagtgattaaccaatctttcattatatttgtaggtagaattaaaatagaattcatatatctctactatataaaaactgaaaatgttttngcccggattttgatacgtcatccgtatttgagtcggntttaaagtcattccctt

SEQ ID NO: 694 - DNA, 155 bp, Oryza sativa
caaatcttacttacaagttacggacgtcctctcgtccgatgaatctacagactagtgctgttgccaatcatgcctgcacaaatatgacagcgaaattgatatcacacccctgtatgtgaacatccctaccctttgacgtcccgagcacctattgg

SEQ ID NO: 695 - DNA, 440 bp, Oryza sativa
  unsure (1)..(440): unsure at all n locations
agcctggcatacaattgatgttcgcggactttctctatccagacngagatggtgctgatggtcttcctctgattgtgagtacaccataatgtcgtcaatgaaaaccacaacaaacttatncaagtattccatgaacactttgttcattaagttcatgaaaaaggcaagagcattggttaaaccgaacgacatcaccgtgaaatcatacagtccgtatcgcgtggtgaatgccgtcttaaggatatcttcgtcacgaatacctaattggtgatatccggaacgaagatcaatattggagaatacagtggcacctttaagctgatcgaacagatcatcgatccacggaagagggtacttcgttttgatggtaacttcattgagagctctgtagtaatgcacattctctntgtcttgttttcttctcacaaaattacaagaca

SEQ ID NO: 696 - DNA, 483 bp, Oryza sativa
ttccgtagatactatttctcactaagaaatcctctctactcgttgtctatgtttgcttcgcgtccttggatgaacatggagaagagctgagcacactctttccctatggaaaatcgataccttggaatactcccaggtgaagtgctacatctttctctgatcttcttcttcctctctttctctgttcatcttcttcatgttctctctttctcatgcgtgtgctgcaacagctagatagcacgtacagtggctagctggaaggacggccggacgggcgagtctaactgaggggcgtggtgcggagagcgatcgtcgggcaagaccaagagaagcgtgggatgcgtgcgggcccatggcggcaagtcgcgcatgctggaatggtctccaacgtgcaccgacgacagcggcgggtgtgctactactacgacccaggcccacctgcgtcgccatggcgcatagcctcgtcggcttctatggcatgct

SEQ ID NO: 697 - DNA, 397 bp, Oryza sativa
  unsure (1)..(397): unsure at all n locations
ctataaatctcagcttatcaccttccttgctcacacgttcttgctgctgtcggtgattgtggcatatctcccaacgggtacgtctcaaattatttcacgaaagaagcaatctttcatacatggagtgaggagatatatggtgtccggatctcangatcttacacaacgctgagtgcccaagttttttatattccagatccatctaagttaagggtgaaaaagggtcgacgccaaactagacgcatcaaaaatgatatggatgagtcaaaagcaggtgggaggactttacgctgcagcaagtgtgatctgcgcggccatacttacaaganatgcccgaagaatgcagaagttccaagcggcgcagatgctagtccatctggacagggcaagtgatggt

SEQ ID NO: 698 - DNA, 429 bp, Oryza sativa
tcaaaaggagaaggaggagcagaggatggaagcatggcagtttttatgatatctgatgaaaagattagccacagtgacaaagcactggagattctacaggaagtccttcaacagaaggaactggagaatctttatctgagaaaccaattgctggtgtataaacacaagctattggatgttggtattgatgagtgtgatattgcagacgagacgataactaacaatataccattatttgaaagcaaaaccgtggagaatctttgtcgtagcatcaaaaggaatttctctctgccaactttgcagatgaagaaactttttgccgaataggacaccgacagaaatgttgaatcaacaaagagcagattatgtggctctgtttgtaatttgagtgaagatgaattgaagcatatttcttgaaatgctagtgac

SEQ ID NO: 699 - DNA, 560 bp, Oryza sativa
  unsure (1)..(560): unsure at all n locations
ctctctctttgtttggtctctgtttgcgtgatttttctctgaattttctggcttgcggattggcagtgtccttgccatgtcctggttactattactggttctccccgtactattcgacgaaaatgctgcttgttcggaatgatatcctgtaactgttacgtaccttgttacggtcattgagtttgcatatgcattcatgttgactttgtagcctacagtcattgaagtttgttgagagagattgtgcgtcctggttgtgagatattcgataaattgtgatatttgtgctgctaatttcgacctcaagttgctgcgcanattgcagttaactgattaactcagngcctaagctttattatagaacagttctttctgttggactactgatttggcctttgtacagatttgttcaaagtggtgagaattgacctgttaattccactggcgatattctcatggaagttgctgatgtactgattgtctatacatactcaagtgactactgaaccctatatgtcacgacaatggatgcactagtgattgcctgtatgtgtgcgtgc

SEQ ID NO: 700 - DNA, 421 bp, Oryza sativa
  unsure (1)..(421): unsure at all n locations
ntatgtgcgtgcatataccaaccagacatctctttccaaaatatgatcctcacaaatgaaataaattaacctttggcaactttaattattttcgatgaagcagcttattgcaacctaacctcatcattctgcaagtagtactgatgatgaagaaaaactatcagcagatccatttttatatcctctctggatcttcatgtcaacacctcgatgccgctgtcctatgagtacccaagaacagtattcccactgatcatccaacctactaaaatagtgcaaatctgtcggcagaaagggccactcctctccagcaactccaagaaccggttgtacaacgccgcggccattgtcgtctcctgcatccatcggtcgcttcgacgtcttaacagaagttcccattaccatcataaactagcttatc

SEQ ID NO: 701 - DNA, 523 bp, Oryza sativa
  unsure (1)..(523): unsure at all n locations
agctnttgcctgtagaggaggatgcttatattatggaaaagataaaatcaaactacccataaggtcaacttgatacagcaacagcttgtaatattttttcagggacattaccacgttggcacaatttccacatatacacaagtttgatctaacacattatattgctctagacattttaatattctttttttgaatacgcaagagaagtgcatatcatttcattaagagaacgagagaatatgaagggagcaatgcccaaaaacccgattggaaacaggctgaaaccttcacaacacacgccaaaacctcacctccccagtgttatcgacctataaaggaactncttaagcctagatgccctggctagcaagcacatgcctcanaccatgaagagtgtgttgtaatatgaagttcatgcaccatatacagtgtaagacatgactaccatttctaacatgcattgagtattctactggcctacattcagaataacatgatccagaattagcaaacatactactat

SEQ ID NO: 702 - DNA, 481 bp, Oryza sativa
  unsure (1)..(481): unsure at all n locations
tgctgnngttttctcaacgtacaaactgaaatccgtgcttgtttagagcgtggaatccagcgtacttctccaactcatgatgtctattgtcctattcacaagacgaagaatcatgacttctcaagctgcaaggtctttctccgcgccatgaagacgacgcctcctaaggtccggcagtcaggaacctctctcgaggatacaggcaaggaacaaggagtgacgttgacctcggattgattcgttggagtaatcgacatcaatccccacgagccatcggtccttcacttactcgaagattgtggctcgtcatcttccagtacaccacgcgacgtgtttgccatcggtgggactagcacatccgcacatgctaacgcagatgcggagaaccagacgggtacgccggcccagcatctcggcaccgtcaacgcaatactgagagaagctccttacaacctgtgcttaacgatgatctcgcacgttg

SEQ ID NO: 703 - DNA, 373 bp, Oryza sativa
  unsure (1)..(373): unsure at all n locations
cgcacactctcgagggtacggatgaagtggttttctctttggcctacgcggagggatctcaatcgcattattggaaccgggctcacgcaccacctgctaaataaagcccccgcattataaacgtttgagcatgccatntcaagattactgttaccaattctgctntacaagcgcatgttatatatatatagagaaaaatatagcatcggcagtgtagtaataaatcaatcagattgatcaattggtacatgaaggattattatatcacctctgagaaaaacttctgggcatggctccgaatttggacaacagtccttgtgcccatgtgctctagagaacagactggacaaatcagacatactactcactgaac

SEQ ID NO: 704 - DNA, 464 bp, Oryza sativa
  unsure (1)..(464): unsure at all n locations
atatatgctatntaccgcggatgctctggtgctgagtatatcatgagattatgacagtgcggaccatctactctacttgtgcagacgtagaaatcgcgattactagaatggagtcattatgtagagactctgaacatgtgaattggaatggtggctacgtgctgctatttgcggatgacatttcttgtacactattatatctatccatttttgcagttaatagcacaagggtaccctaacatacttgtcactgctggcttacatggtacgcggtctttccatcttgagtatcttgtgactggctaattgaggcatctgcacgagtaactaggtcgtacgaaccatatcctcgtgtgatgtactcggaaccggcgaaatatgtcggacagctaatggaactgaaaacggatgacaatcttcctgtattcaagtgcgaacttggcggctggcacttctcacaatcg

SEQ ID NO: 705 - DNA, 332 bp, Oryza sativa
caccacgtgagaaaacaccgtgtgaagatgatatgaatgtagcacatgcactgtctgttacgacacgtgatatatagttgattctattctgctgatggtggtggacaacgcctatcctatttggtgactaacatgctagtttcagaggtcaatgagacatcgatgcatgaggttgtgacaaccaagtaaagtgagtgtcacgcccagaaatttccgaatagatttccaagcagaatgtgcattaaaattcccgtgcaagaccggccggtgtacacaaacgacaaagttgacatacagatgcacggtttacaaacattatacatgtcttacat

SEQ ID NO: 706 - DNA, 300 bp, Oryza sativa
  unsure (1)..(300): unsure at all n locations
tggcatgaagcctatcactggtgtgagccgcgttgctgacactaatagcacgagtgtgagcttacgacagctcttatctagcctatctaaatagatctattatatggattgctgatgatgtctgctatttcttttgccccatctcacatcctttatgtcatctaccaaccggatgtcttcatgagccctacatgcgacacctatgtcatttntggcgaggccaatatcgaagacctgagctcgcaaatgcagacccatgctgtatagcagctcaaggcgccggatctgagcaccatgctc

SEQ ID NO: 707 - DNA, 337 bp, Oryza sativa
  unsure (1)..(337): unsure at all n locations
ctgacactgaccattctcatattttcatataattttcttattaactcatcaccgagctgaaaattcctaattattctactgactacgcaacacaagtttgagaacacattatgcaccacaatttaaaatactgaattttcatcttcttctctaagactctaagcagcacatgatcacactgatgctgaccttaaactttcctactcttttttccatctagagaagaacaagactctggcgatngaggttctgagttctgactaagacatcaatcaatcaagatctctcttgacatctagatacattatatatccctgatagctgataagttggcaca

SEQ ID NO: 708 - DNA, 281 bp, Oryza sativa
gctcctgcgacttatgaataaagcgaaaccacgccctcagaagaaggtacggggcggacaggcgagagcgcctttgcgcccggtgaagcggaaagcaccgagagcgccacgacctcacaggagtgggtgcccgggcagggcacacgccacgcgatcgggggaagaaaacgaagaggaaagaatgtgggaggaagcggagaagcacaaatacagcaaaaacgaagaggatcgtgccatgagagacaactattagagcacatggcacagccttcacaccgact

SEQ ID NO: 709 - DNA, 455 bp, Oryza sativa
  unsure (1)..(455): unsure at all n locations
cactaccgaaaactcaagcttaccggaacaagaagcggngggctcaggaatctgcggcaagatccctggttctgtcggcataaccggcgtggaagagctcgaggccgtcgtcgggtagaacgcaggtgccgacgccgacaatccaggcctcggggagcgcgcaggtgccaacgccgacgatcctgctgggtcgaacgaagtagtggaacttgcggaagagcccgaggacatcctcgcagaggtaagcagaggcgccattgccggcgagctccctggaacgcccgccgtcgtagccgccatggacgaactcgaggccatagacgggtcgaacgtctgtgccgccgccgacaatcttctttgatcgggcccggtagacgccgtcgtggaagaagagcacgaggacatcgacgaagaagctccctgatccatcgccgaatagctcgccgtgcagcgac

SEQ ID NO: 710 - DNA, 591 bp, Oryza sativa
  unsure (1)..(591): unsure at all n locations
agctctgtatagcttgaaacaagcacctatataatggtattatatgcttaaaaactttttgcttgtgaaagattnttcaatgtgaaagggtgacaaaatgctttctgtccttaagcatggtgataatcaacttttcgttcagatgtacgtggatgatatacatcttggttgttcaactcacgctttggttgtggagtttgctgagactatgcacagggaatttgagatgagcatgatgggtgagttatcgtactctctgcgaatgtaaattaagcaaacacctcaaggtactcttgtgcatcaaacgaagtatacatacgatcttntgagacggttcaagatggagaattgcgagccaatttcaacaccaattggttctacagctgtgttggatcctgatgaagatggtgaagctgttgatcagaaggagtatagaaatatgattggatctcttgtgatctaactgcttctaagcagacatacaatttgtgtgtgttgtgtgacgtttcaacttctctcgtcttncatcgcaacagtaaacaatatgaggattgaatatacactgattcgatttggatctacttatctcta

SEQ ID NO: 711 - DNA, 436 bp, Oryza sativa
  unsure (1)..(436): unsure at all n locations
gctataataattagttgatcataggcggtgagttgaagttattttggtttctggatagggaggccgacaaaaagtggaggagataaggacgcaatggtgttggacatacgccacagctagggttgacaacccaaatatggggttggtgacaaccatgagaaataggaacgatgaagccagcaccaatatggaggagtgtgcggagatgagccatgtgggtggtgacatgcctgatgggcaggtggatcaatggggcaccgagcaagatggagtgatcccacaaggagactcttatgcagcggcacaccgagagctcacggctgtgttggtgcttcacaaccattgtctcttcatcagagccgcatcactatatcccagtggccaaagacacattgtgttttcatgaatgtggtgagcccnanggaccataatagat

SEQ ID NO: 712 - DNA, 337 bp, Oryza sativa
  unsure (1)..(337): unsure at all n locations
ttaagcactgagctgcagcttccaatncgaacacacccggcgcctgctgttttcttcttcaacgtatnctcgatcgcgagatcccccgcctctactactactagtctccacagatttcgtatcccccacaaaatcccaacgcttcaaacccagcgagtcgcgccgccgcctcgtctccgatcgcggcgcacgcgcagatcgctagccctgcctgcagcatggcgtccgcggcggcggaaggagaggaggcccccatcgcggcgttcgcggtgtccaaggggggagtcgtgctgaagaacatatttctcaacgcgcccncgtcgccgctgtctgtgga

SEQ ID NO: 713 - DNA, 479 bp, Oryza sativa
  unsure (1)..(479): unsure at all n locations
ctcagcntttcaccttngcctgcaaatctgtgacctggctctctagtgtttcagtttctactattgaagctatatctatagccacagcctggtcagaatcactttctgttccaaagctagagcttacaccgtctacttcagacaatgcagccagcttttccatctcaaggaaatcatccatcaggtcaatctcaacatgattgtttacaacatctcttgagctggcactactgatcttgaactgatcaagttcggctatcatagccgacgcccatgaatcagaatctctcatttcactgtcaacagtcagcatacgctccccactgtcagactggctatcactgagagattccatgcaagcattgttaggcgcacgcctagaatcattggccaaggaagttcttcgtgtcagatggcgcagcttacggcattctgcctcaacccngcaatcttttcacactgtccaatgctgttacttg

SEQ ID NO: 714 - DNA, 495 bp, Oryza sativa
  unsure (1)..(495): unsure at all n locations
agcttaatcacgtttagtggtcacagtgctcgttataacaaccaaacagacaagtgttcaggctgtctgagcangttaaatttatcatcctatcagatagctctcaggcacctaaatttttcaggcatgttagtgagggcatcaaccaaacaggccctaaaaacgtatcagcggcaagcgtttcatttcatttcaattacgtatagcacagtgtccaagctcgcgaaaggtaaccttgcgcgagcgggcggcttgttggctcggctcgcggcggatggttggagcgaacgccactatgggcatgcaatgcaagatagagacgtttctctgtctctttataccttcttaattgtaaaaataaacatttcgactatgntaattttaagatatgagacttttggctagtctaaatacaccgtcgtagtaaaataacaaggtcacgcccgtctaaataacgtgataacagtatttgatcacatcgatctgactggaaca

SEQ ID NO: 715 - DNA, 397 bp, Oryza sativa
  unsure (1)..(397): unsure at all n locations
tatggtccangctcaagctccacatgaactagagctgagcttaatctgagcctagactaaccttcaagcgtggaattagtctaagtttccactcggatgaagctcaagcctgcttgagctcggctacacatagctcggaatcttaccacgaccgccgtggtgatgatgcctggagatgtattatcctgcagaccagcaggggagtaccctgctgccctggtcacactatcagctcacagaaggagaaatatagagaaggagcatggagagtaaacaggcggcttgcaccggtatgaataatatgatgcgtggcatactggcatgcaactaggatgcattgcacatagctagcattactgcactagccttgcgcttgacattgaagaattgacaactt

SEQ ID NO: 716 - DNA, 392 bp, Oryza sativa
  unsure (1)..(392): unsure at all n locations
aaacaaattatcccattgttactgatattatcaaaactaaagtggatattacttagtacatccaccttgaccaccacagtagaacatgatatcctcaaatgggcgcctgataggcatttcttggattcaatgttcaaaaccatctgtgtttggatttaatgtgagatcaatcgtataagaaaatgtgaccaatccataagacccaaccgaggtcaaaattgcatgttgcgcacaatataattgtatccacagactagctaacatacataaactacagaacaaaactgcagaactacagtgctaaaagactggngaactggtcagataacaataccattggataaagctagtgtaaaagatgatggtacatatcacgtaacatggaaattcaa

SEQ ID NO: 717 - DNA, 424 bp, Oryza sativa
  unsure (1)..(424): unsure at all n locations
ntaagataaacaaatcaagatacaaaacatcacattgtgtgttatataatctgagctcagatattaagatagaacagttgatttactgacccaagaataaagggaccttgccatgcatgctgtgatgaggcagtggatggcaaagttaatcagtatatactctagaaatgtgatgttctgttctcatttcatactgcaaactttcaggcttttctccccacctattcttcacttgatattcangaattgcagaacatttggtattcaggaaacacgaaagatttgagcattcaaacaaggggacctttccgctacctccgatctgaactcgagtttctttcatctgaagctgtcactttggtctaatctttcattgttcatcatgtttcatgataagagtangacagaagattcatccaaaata

SEQ ID NO: 718 - DNA, 462 bp, Oryza sativa
  unsure (1)..(462): unsure at all n locations
tatactatataannatataaataacttcattntagccatgtactgaatttagagattntattgaagagtcattcaatctataagctgtgggtcaagtatagacatgtcctataatatcgacatatttagaatacggtaattaccatattataagaaacggtaatttccgcaagaatacggtaaatacggaaacgatcggtataacaacaaaaccatttccgntttcatttccatattttttaccatttccatttttgtttcggtcgattaccatttccatatggctcggccggtagaaagtcgaaaacgaacgccggtcggccggtaattaccgttaccgttttcacccctatccacaaccataaggatccacacaggccgggttacgggtgatctcanaggccttgaactcatatcgaggacatataactcatcgngatatcatcttttgaattcctctat

SEQ ID NO: 719 - DNA, 403 bp, Oryza sativa
  unsure (1)..(403): unsure at all n locations
actgttttactattttgaaatacgaaaaagatccacatccacaatgcacagggcgtcttattcaaaacctcaatcatcacatcccctctctaccacttaacacctcggaacgcactgttcttatagagagaaaggcgctnttccatcttcttaaccccaaatgaaatggctgatgagagggacgttccttctggggggtacccccgggaagagatccactggagacggtnggggcctgcatctcacaagattagagcacgtggctacgaaccaccgtgtccgnggttccaaatcctcctcgcccacagcctttcaaatgggaagggcctttactttccccctgagggtaggataaccatgatcgcgacagcggacgtaaagctatngaactcgcgtatgctct

SEQ ID NO: 720 - DNA, 416 bp, Oryza sativa
  unsure (1)..(416): unsure at all n locations
tcgggctatttggcgaacaaacaacaggcggatttataacttatttataacatatacgggggagactccgtatattaggcataacaagcgtttcgctcttgtagagtacataattgcattttgattgagttatttttctaacggaaaaaggaacacgacgattcaaaattctttattattcggactttccctaacacagaatacctgcttgtattcacactctcaaatgaaagtggaagaaattcgactgtcatataatatcttaatagaaatccatgtaatgatcaatgcgattnttggattctatattattcgcatgtctagaatcctaccaagagaatacacctcatttttatgtaattgaagtatgattgacgaataatagataaacataatactggttattattgtcgcat

SEQ ID NO: 721 - DNA, 477 bp, Oryza sativa
  unsure (1)..(477): unsure at all n locations
atgcaagcttggcttcaaactggtcggaaagagttctctttctatctctctcagcttgcacttgtggatactctccataaggtcccctcttgttgttgagcatgttacccttgaccttcatttacatgtcatggtataatacatagtatgcttgtcaatcttcttggcctcccggcacctgtgcagcaagcgcctcaagacgctttttacattctcctcatccacagaatcttggtgggagtccaccctccctggaacccctatgattggctagtactacctccgtangtataagactttctagcttgcccatattatatagatgtaatgaattagaccacatatatatataatgtgggaatactaaagtttatatataaacggagagacatgtanggaccattatggctgatatttatcactaaactcatatcaagggctcttgtttgtaatacagtatcatcatcaataactcga

SEQ ID NO: 722 - DNA, 438 bp, Oryza sativa
tgcagcctagtgtgcaaagtagagagcccaatggagagaatctattgtatcccgagaattgctttcctcctagcctttcgtaccacgtggggtcacgtactaagcaagccaaaggcaagaagagtaagaatcagaagagaaaagcaccgatgcgaactgaagaagaagtacgtaagatgactattaccagcaccgaatggcctccagcagggataactattcctagacgtcaaagaggaaataccttccgaggtgcatgacagttgacccagcaccttctaagccatggtggcagagtatctgatagtgaagggtcagatcaagtctcctcggatgatgaagatgagtctccccgacatctcggcgaggaagagatggaatcaaaggcatgcacccgtttgtggagaaatggacacgttgctagcatgtgtctcacac

SEQ ID NO: 723 - DNA, 437 bp, Oryza sativa
  unsure (1)..(437): unsure at all n locations
agcttaaatagagcaaactaattctgtatatgataacaacattaatcacccaaataaaacaattagacatgtaattgaaaatctgttggccatcttgcttaaacatgtgcctgcgggtgcgtgtggcatatatctctcacttgtatgttgtggttcttttttttgacatagaanaaatatccgtgcgttgtaacgagtaaagaaaatcataacaaatataaaaatattatatgattaaggtttaaatttacatgatatgagctctttaagaagatctattaataatgaaataaaaaaaagttcaactgaagggacctaaagtgaacttattccatacggagtgtacacgacgtccatgaggcggcgcacaagtgtgggcggtctgtgaacaaaattggggacaacttaagggacctaaagtgaactctctccatgtg

SEQ ID NO: 724 - DNA, 405 bp, Oryza sativa
  unsure (1)..(405): unsure at all n locations
ccctcgctatggacagaaagaatatggagaaggagatggcttctgccctgctttcttcactcagcttggaacttttctccactgatgacatcatgaagggattcatattgctcctgcagtcagcagaagacactgccctcgacattgtggatgctcccagtgaacttgccctcttccttgccagggcagttattgatgaagttctgattccactgaatttggatgagatcggtaacaggcttcgccctaacagcagtggtagtcaaactgtccagatggctcgtgcccttcttgctgctcgccactctggtgagaggatactgcgttgctggggtggcggcactggctgggctgtataagatgcgaangacaagatcgcacagctccttgaagaatacaatactg

SEQ ID NO: 725 - DNA, 430 bp, Oryza sativa
  unsure (1)..(430): unsure at all n locations
actcagctttatcccttattactctgatcgtctgacggatctaccgattagcgaggaactacgaaacccttcaacaactacgtatttacatcagngccatgctttttttttctaacatacccttctactacactactactcaatctaataggtgcaatctaatacgtgcagtataaacaaatatgatctgttggatcttatacaataaacggctcgcattcactcaaaggtactctaaaaaaatccattaagatgccctggatgcacgaacctctctgcaaattgctggtggagcatacaaatgaattggacgggaaagggaacatgtgataggatgaaaatgaaagatagacagagagaaggaaaaccactggattattctggaggtattcaccccgatatttttagatgatggactttacccggatag

SEQ ID NO: 726 - DNA, 422 bp, Oryza sativa
  unsure (1)..(422): unsure at all n locations
acatgccacgttgcaggcgtatctgngggcgcacgccatggtgataaattgtttgcgagccatgcagcatgatggacaaggagcaacatgtgtcgttgactaacattatacaaagtagcgtagatgcatcttcacatagggatcaacttacccttcgttcccattctaattcaccggatgtgagtatttacctttcgctccatttggataggtcgaattcaggattccatcatacagtcgattgtgaaatgtgaaccacgaattgttggtgtgattgcaataatgggatcctttacctgcttcttccatcaataatgaacagctcgtttcaaaaccctgtgctcaagaacacacgcagttgttgagtgcataggaccttgtaactatttctcccaccccatatattgcactcatgatcttgt

SEQ ID NO: 727 - DNA, 352 bp, Oryza sativa
  unsure (1)..(352): unsure at all n locations
tcacaaaccagaagcanactgttctgacaatctgccccttgactggttcaatcacaagttcctagcctgattgcctgaattcacaatctgaactgctacagaagcatgaacaaaatttcgaaaatctcaagttcatagcctgcaaaatcatgctgttttgaacttntgctaanctgggngatgaactgatgatagaagaaagggcttacaggtacgtgagctggccgagctggccgatgctgctgctcaatgttccctgcaggctgacgcttgacagccttctgcaaaacaagagacatccatggcacgatttcagaggaaggcccatcacatgatattggtggtaggagga

SEQ ID NO: 728 - DNA, 461 bp, Oryza sativa
  unsure (1)..(461): unsure at all n locations
agcttatttagcccatacttggtgacgctgtagacaggattactcataccaatgagtgattaattagtatgcctacttcctgttttactcctaataaatatgggtntgaggcataccaaatcataacctgctcttggtttgagtggccatctcatgcaaaagtgaagctaccaatcctgagttcgattcttggtggccacatttttttgcatggcactgtggacgcgtgactgttggcatgcatgcactntntttcangcgttcatgcgcgcagtcgccgggaaagatatttcactcgcgcgctgctaacanatattttgccaagtgcgtttgcctgcaataactcatatattggcgctgggttgcagcagaatcccctttgccatctncaatctattatgctgtgcaatactagctagttngacgctccaacttcctacatactccatcttgttaacatg

SEQ ID NO: 729 - DNA, 424 bp, Oryza sativa
  unsure (1)..(424): unsure at all n locations
aagcttaccaacttannaaacaggacactaactcataatatgggtattgagttcttaannaaactcataatatcgcaacgaaacccggacgctctacatgtgcatcacgttggaccgccgcgatcttataaacagggccaaagntcttctgtacagtactaccggtctactccacggtgtcactgtcaccccagaaacctagtaaaagggaagaaccgccttgctttagtttagggctattctaactttggcatttttgtattaaaaaaattgtcatttttaggagccatagaaagaacttggttattgccagaacttttggaaaaaaaaaaaaaagattagcccttcgtttccgtactaccaaagctatacgctatagaatcacatacagtaaagaattagcaatgccaatgtcttagctaac

SEQ ID NO: 730 - DNA, 280 bp, Oryza sativa
attgcatctattaaccaagagattgtatgtaaattctttacagacaaatgtgggtaaaagtctgtcgccaagacttatggtatcttagagattgttagagataatagtcgtgtccgatttggacatatcttgtaattcttgggtataaatagaccccgagccctatgtaattattaacacacactatcaatacaatctcggcgcatcgccacccttttacttttgtttgtttcgatgagttcttgcttttgggttgagctgcatcggtttcgatcttcaa

SEQ ID NO: 731 - DNA, 494 bp, Oryza sativa
  unsure (1)..(494): unsure at all n locations
agctttaactgcatatatcggtaaatatcagtgctggcgaaaaagtttctgcatgtttataatatatcngcaaacacatatagatgtacaaatcgtggctcaaggttagcctatttgggtcaatattatttctgcttgttgctgcacctggtgtcataatgtaacagggggttgagctcacaaacagacacaggtttaatcctaagatgcccacaacagcttattaacttgcgcatgtttctctactgaatacatgaaccgcaatggaaatcaggatatacacccatcagctaatagcctcgcccataanaaggcgatggaggcatttcactttcaattagaataggtaaaaatgtagtaaacaacagtatacctagtgcaagaacaaccaagactaacccatgcaagctgagaagttgaacctaaaatgaatcatacattatgaacgaactgtcatcaccaataatatattctctacgagcatcacaatatgc

SEQ ID NO: 732 - DNA, 371 bp, Oryza sativa
  unsure (1)..(371): unsure at all n locations
aaagataactggcttgagggactgtgcctaaaagacattgctccaaacctcttcaagctggcaaagagaagaaacagggatgcttttactgcgatcgctgaaaatgattggcttcactctttcangcagatcacggatgttgaaactatccacgagcttgtccagctaggaggacttctaagccaaattgccctgactgaaaatgaggaggataagactgctggacaaggaacaacactggagggtatactgcccaaagtgcatatcggtttcagttctttggatcacaacaggaagcagtttttctcttanactggaaggctaaagcactcncaanacaaagttttttgggctggctcatattacaccag

SEQ ID NO: 733 - DNA, 391 bp, Oryza sativa
  unsure (1)..(391): unsure at all n locations
tcaccacaaaatgactatggcaagagttgctggtgaatacatttctatggcagcatcggaagcccttttgcagccaggctgcactaaactttattgacaaaatttgctacagaaaatccagattntgtggcctttcatgtangatacttagaaaacttgtggttgttgggcacccgaaaaactgataattaattatgggataccgtgaccattgttgtattattttctcttcaaacgaagatggaaatgggcagatgtttgtaggcaccgtggacgtcggcaccgctacgcaaattctattgttttggagaagtgatcagggggatggagagcggcttgggtatggttcanacatgacccaattatggtacaagcacccccctcccccgcg

SEQ ID NO: 734 - DNA, 423 bp, Oryza sativa
  unsure (1)..(423): unsure at all n locations
agctttatgcactccttcagagcagatgaaatgtgaatatttgtnttaagngtctttctgctgtatcctctgatcttttcgaggcgtctctcagtgggtcaagaatgcataattttttttctccatatcaaatgcgtatagagaatagtgcagtggttgaagtaatggaataaatatctgcaaattaatattgacattgcaaaagttagtggcctgaacatttgcacttgatgtactgaatttttcaagatgctgntaattatcaaaccaggtggcaactatgtacgtcatatggtatcagggagtcatctctgaatgaggggagatgatcctctgggttccactggtcatcaccagctgttgcaaacatctacagcgccatattgtgttaaaacacaccatatntaagaattanaatagtct

SEQ ID NO: 735 - DNA, 408 bp, Oryza sativa
  unsure (1)..(408): unsure at all n locations
tcgtcggcccggagccggaggcgtccagccagcctgtgggcttcngtgccgtcacaccggccaccttggcatccgtcctcaagatccaatctactgtatcttttggagctttgagcccagcccagcacaaaatattcgaagagctcgctgctgggcccacgcggcactcttttgtgccgctgagcaccgggacccaccttgatctggccggatgggaccacccatacaaaattctctcccgtactttgaactcgattttgggacaggataggtggccgtgcatacggtccccgtcctttgggcatctgtaccgtacggctctcacgctgctcctgatgttcattaaggcactgatctactgcaatttctgcagaagattagtacagtactattacctgtntcagctta

SEQ ID NO: 736 - DNA, 526 bp, Oryza sativa
  unsure (1)..(526): unsure at all n locations
agcttcatcatgtgaatggagagcgagcagatctccgtcatgctgaactagctggacgaatcanaccattaaatgatagacaactactaacagcgtcaatggaactgcagagcatctttcgcatgtatatataggcgcacaaaggcaattcagttcatcagctcaagcacctcaaccagttcagtcatccattctgtcttctctgcagatactgagagccaagatgagtagcaaggttcttctgatcagtggtgtcctggtggggctcctttctctgagctcatgcacgagcctgngagagttgtctgaacagaagacctactcttctactactcagtgtatgtttctatccnccataccttctgtgcaatatgccattattatattcgatctaacgtgggtgatgtggcgatcgtaaagaacactgcatatagcatctatttagtatatgcaaatacaacaataactaaatatgcagagcaactaaaaatgtagtgctgactcactggtaactccgatgtactat

SEQ ID NO: 737 - DNA, 449 bp, Oryza sativa
  unsure (1)..(449): unsure at all n locations
tctctatggaccccttctacgtcatagtgtacgttatgcatcttcatgatccttcaatctcttatactctggttgcgtttcagcttcaggtactcttccgctttcatacatcgggttgaccatgtcgatccatgaagtaaaagcacacatccttggattcccctgaacaatcaatcaaattagataatgggaaataattggtatgggagcgcgaagcaaaatgtaaattantaattaagcatgtgacatacaacgaagttgtcatctatgttgggacagacgaagtaccgcctgccatatgtatcttgtgagaaggaacgtgcaacctggcagcgttctctacaaccgcatttgggacgatcagaccatttaggtatacctaatggatttgatctccacgttatgctagcggactgaacatggcgctcgtactccatccatgcttgaat

SEQ ID NO: 738 - DNA, 375 bp, Oryza sativa
  unsure (1)..(375): unsure at all n locations
cttcacaaatatacgcaatgaaagctatgaggaaggacaagattctggagaagaaccatgctgagtacatgaaagcagagagagatatactgactaaaggtgatcatccttttgttgtacagctgaggtactcctttcangtatgcatttatcatctctgtgtgttctttggtgtcaagctatcatgcatgttatatntttcagtcttgtcccacattttaaacccagtatttacttggcagacaaaataccgactctaccttgtngtggacttcataaatggnggccatcttttcttccagctctaccaacagggtttgggtanggaatttcattacatatatttatgtttattcctatncgcttgcatgaaca

SEQ ID NO: 739 - DNA, 358 bp, Oryza sativa
  unsure (1)..(358): unsure at all n locations
cgcatcanacacctaagttcccgtgacttgctgagtacgaatgtactcacccttgctctatataaatatatatatatatagttcctccgccctgaagagaagataaagtgaagagaagattagggtttcgtcctggttcccagccgtcgcctgtggtgttgggtgttagttcgttggttccgctgctgctgctgttgttggtgtttcctcgtccgtgtcgtccgttgcattctcggattgttctgagctgcaacctaagtttaggtaaataagtcctctatttattctaacgattgctatgattcatatttgtcaccgcgggtaccagcactatgtcctgtgactggtaccgagatcg

SEQ ID NO: 740 - DNA, 472 bp, Oryza sativa
  unsure (1)..(472): unsure at all n locations
agcttgaatatggaagattaattcacctccttcttttatgtatctctgnctcaactctgataatgtgtcacctacatctaaatatacaccaacactcgtgggaattattataaataaaccataccactatattgcatgttttattctttcagatttatgcacgtattgacggcataaatttcgcatttagcagccatcgacagctgtgttatcccccttttaagcctatttaccttattntatctaatggattgtgtgatattcatggaaatttggtgtattggtgttttattgtttttgtgtgcttgctatgtcatatgcatctctactcatttcattatcaaacattgctgcaccacacggatgagaactgctggganaagctgtccacatttattcactcgtatttgcatgcctacattaagggggagctctccacatnctcttttcgtcagaaataatatatattcat

SEQ ID NO: 741 - DNA, 348 bp, Oryza sativa
atggacgtcctagtgccccggccgaagccgccaagaactatgtacgtcacagcggttgggttgtgcgggataatgtgcctgtcagtacggtgtactggcgaagaataagggcacgcggagatcatgagagctttgtcccagattcggagaaagagatgctgtggaccacaatgctcgagacattcacccttcctgcgggtacagaggacaaagtgaacaggtggactctgaagaaaatggcagaacagtttcagagcttcaagggagatctgtaccagaagtatatactgaaggggcagacaccgaacttcgacacattcccaaagctaagggatcactgggacgagt

SEQ ID NO: 742 - DNA, 332 bp, Oryza sativa
  unsure (1)..(332): unsure at all n locations
tggcttaaatggattgatgagtattggatgctccaacatccttgcgggccctacctatatttggctgaaagctctcagcccaataagtgagaccatgggctttggctgaaaaaccttggcccaaacagccatccgatgaggcccctagattattataatttagataatctattctagaaccgaatgaatatattttgggagaagggaatatctcttatttctctctattagacaggaactcggtgaatcacatcaatattacatcgtacgtacaacttttgagtagagagtaatataatcaaatcaatgtactacctacatncttaatctat

SEQ ID NO: 743 - DNA, 383 bp, Oryza sativa
  unsure (1)..(383): unsure at all n locations
cctatataggacgcggcactcgcaaatgatatgaaaatacataaaccaatatatgataattctaatacttatgaggccaggaaaacatttatattgtattatatgggttaaaaaatgttgtattcaaattactttttacaaaaggaaatgaaatttaatgactgaatccacttgaacatccattntacctcatactgcaatattgcatacttcatcggctgaactgacgaacttatcgtagtagagcttatatcttttcgatgaaataaaacaattatgcaatatttgatgcatganaaccgtaacgaacaagctaactccatggtttttctcacaaggattcatcacgacagtaccatactaagtgaatgatgtacaaaatc

SEQ ID NO: 744 - DNA, 504 bp, Oryza sativa
  unsure (1)..(504): unsure at all n locations
gcttctattgattcatctatcatgtttatctttctcatgtgttgagaaagggtataattaatcaactattcatgaatctcatttcctcatatgggaggtagcatcacgtcagccactcaatttgcatgacgttagtcctgaatctttgtattttaggtgactcctgtttatttttagatatgatagtaatctccaaatttccatcaataaaacgcatganagataaggactgtgtcgagtattttcagtatttntcatctccttgccccatagatntggaagttagcttttgatcaataataaactgagttttggaatatcacgttacagtagttgagaaaaaatacatataaaaccattcaactcatgcctctgcaacaggtaacaagcttgctctttgcattaaccttatcctattntgttcatcatgcataaatatgatcctcgtttctatcaagcacttatgatggtgtttatatgagatctcanactctcaatgtactc

SEQ ID NO: 745 - DNA, 472 bp, Oryza sativa
  unsure (1)..(472): unsure at all n locations
tcagaatcaccccatccaactttttcctatgcatctcgtgcatatgtttttataaaataatagcaccttccattatattccttcctttcaaaaaggcggtctgtgaaggttttatgacattttgtgctactagactgaccctgtttgtcataacctttgtaaagactttaaaactcacattaagtaaacatattggtatgtactgttgaattttccttgcctccttatttttaggaagaagagtaataattccaaaattcaaactctcgagagaaagattgcccccatggaagtccctaaagactgccgttaagtcatctttaattacatcccagaatacttgataaaactttcccggaaaaccgtcaggtcctggagctttattgtgttccatttganaatggcaattttgacttcttcagaaaattctcttgtaacatttcattntctgtcaccgtcacctgtggtatat

SEQ ID NO: 746 - DNA, 246 bp, Oryza sativa
tcagcggtcaacataatgtacgatggccgtgactctttcaactaacgttcgatcatttcgcttatttaaaaatctatgaaaaaaatatggaaaaatataagctaagattataaatttctccatgataaaaagagtcacacacaaattaataataggtatataaaatttcttaaataacataaaggaacaaatggtatggtaaaaattaaccactttcgattttttacgatagacgaagtaatatac

SEQ ID NO: 747 - DNA, 229 bp, Oryza sativa
gccggacttacacgagtcactttcacacgtttaagtttacatttacaggctttaacgtaaagccctgaggtttaaagaccatgcaacctagttacttactcagctccgtcgattgctatgttagtcatcacagatttaatctcaactacaaatggacagaatctattcccggttaaaccgtacttaaccttactaaaaggaaacgctcctttaaaaggctcgttgggct

SEQ ID NO: 748 - DNA, 477 bp, Oryza sativa
  unsure (1)..(477): unsure at all n locations
ntatgttcggcgcagtactaatactggaacttatgagcaagaattgctctatctatcaccatctactttagacatatcttctgaaactttgttcaaatccaaaagtccagtatcttcctacaaattagtgaattaggaggagctctttgtgccgaaaaagaaagagcagggcaatatttcaaacttgcattcgaactgcgaaatatttatacaaaggaggagagatcaagataatgcagcagggttggttatctaattggctagtcaaacatgagggtggtcatagatctttgggcttcgatcatcgaggaatagagactttgcaaataaaagcagaggattgggattccattgctgtcattttatatgtatatggttacaattatttacgttcccaatgtgcttatgacgttgcacccggtggatctttagctagcgtgtatcatcttacgagactacagtatggtatagataacc

SEQ ID NO: 749 - DNA, 363 bp, Oryza sativa
agcttgcaaaggctaaagctcaaagttcactttgattttctttatccgaagggtctatgggtgtgcatcctactgagtatgatcatgatcacactaaacttttgaatgcccgcatgataattctacatgattacccatttagaattggtgagcataaagggtttaatgccttgatgaagaggatgaatcctatctatgaatttattggtcgcaacgccataaaaagtgaatgcatgaaattgtatgaatctgaaaaggaacactctaagaaaagtcttatggaggctgagaccattagtttaactaccgatatgtggacatcaaatcacaaccctcagtatatgtgtttggcggctcaataca

SEQ ID NO: 750 - DNA, 364 bp, Oryza sativa
tccgtgctaaccaactctcatgcgtggggagtattaccatcaaatccaatcgggaaacccggattaggacagaacaaaaacctagctagattccgagcagcagcagcagcttgaccgctacaaaacgccgacggtgccgccgttgttcgctagcaccggaatacgcacggctccggcgagcgatcgcgactccgcttgatccgtcacgccacctccaactccaacttctccgcttccaaatccgcactatagtagaccactccagcgggagctccggatgcaaccgacctcgaaacttcccccgcgtactcgtactccacaaaccaaaaaaaaagacacaaatccccatttcacagcacacaca

SEQ ID NO: 751 - DNA, 377 bp, Oryza sativa
  unsure (1)..(377): unsure at all n locations
gcttgcccgcaagtacaccaaacacgcacttatcgggttcagntntatgcgggcggagcggagatttccaaaagtttccgctagatctaagagtaaagtctcttggttgcgcgtctttacaaccaagtcatcgacataagcctcaacattacgccctatttggctacccaaagaaattcgagtagtacgttgaaaagtaggacctgcattctttaacccaaagggcattgtcgtataacaataagttcctatgggagtaatgaacgcagttttttcctcatcttccctagccatgcgaatctgatggtaaccagaatatgcatctagaanacacanaaggtcgcaccccgctgtggagtcgacaatctgatctatgc

SEQ ID NO: 752 - DNA, 270 bp, Oryza sativa
ctggactctggggttgcactatgactacatgcttgagactgtgctcctcgtggcttgagatacctcttgcgagctgcttctgccataggatcaactattgacagtaggtaaaccaccctgccgcactcattgtgaagatcagagagctccttctggatctgggcaatcttgtgatgtgctgtagaacagctgaaactactgagggataaatagtggctagcattgcactgatcataaatatgtgaaacgagcataccgacatgcctcatt

SEQ ID NO: 753 - DNA, 443 bp, Oryza sativa
  unsure (1)..(443): unsure at all n locations
cgctgcagctggttcccttaccgagagttggtattgtttgattctgcagtcgctccctcccagctttgagccattcataatgtatttcagcatgaacaatctgaataggaccttcgcagaattgcatgggatgataaagacttgtcacgtcctgataaattcatcccgaaataaaaatcattttctaaaaggaataatagaattaattaaaatttgaaaagaaattggcaaacactaaaatacgtacaagaaaatttctaatgtggcccggagaatatttgtaaattctccttggctaaaatgaccctcaaatttacttgaatttcagagcccggcatatttataagcacaacactatgatcaagttattaaaagacactcanaataatctcttctccttggcaagccagccaaagctcctctctccctttttcctgcttccg

SEQ ID NO: 754 - DNA, 459 bp, Oryza sativa
  unsure (1)..(459): unsure at all n locations
ctcaagcttcacaccgctgaaccatgtcacaagcgccgccgagcgcggtttttgtcactctcggaactnctatccaaaactccaaacgcttacatgtgtgttaagccctcgtccaggaattaaccgaggcacacaatgacaatgtgatcatagagtacaaataaataactatntaatactcgcagataataaaagattacagaggtggatagttcctctcaaaaaaaaataacattctacgcaacggataaataaaacgataacaatctacggaacagctatggcgactccactccacaggcatcttaaccaagaacaagcctaatcctccagatcatcaccttcactgagacacttctcttctgatgaatgaatatcgcacgaatgagcatataacatactcaacaagccacacagcatatatgcaagtgcacatgataacacagaatggcataatat

SEQ ID NO: 755 - DNA, 410 bp, Oryza sativa
  unsure (1)..(410): unsure at all n locations
agctttcctcataccagatgcgctatttcttctatatgccaattcttgttgccttattaccttctatggactgaagatcaccccttcaccagttcgtcaccatttgaggcccataactccagtcacagttttctaagcattctcttcacacagagatctccttttccatttggccttcataccatactttcaaggctgtnttaatcaaaggatttgtggagaaatttcataggaatttaaatcctatagaaaatctttctatttaatcatctgataggaaggattggagttttccaaatcctatgaaatttctatgaacctcatcggttacccatattccctaataagccacaagggttattanggaataaaaattaatctataagtcaaacttttatatatntgttcat

SEQ ID NO: 756 - DNA, 475 bp, Oryza sativa
  unsure (1)..(475): unsure at all n locations
ttatttggttntatntctcaattatacttgcgtatggaaatttatttntctttccttntcctaaccaccagttgcatattttttttaggaaaaactatcacctttttaataatagatctaatctaatggtctaaattaacgggtgcaccaacttaagagaaaatcaacggtgagattatatattgccacgtggcggattatgagtgtttgtagaaacaccatgtgacggcttatgagcgtntgtaaggagtttaatggacttttaaatataatatattagtgccgtgtacgccgggcatgcatcgtcttgcanaaagaaaacaaaactgtaacgactatgcccatacaggaccatgtcttctttccttttaaagtgctttacagcttctttagaagaggatatacaatgaagaatactgatgcgatgaatcatgctcctttcaccttcctgtgttattgattgcatgagataatc

SEQ ID NO: 757 - DNA, 325 bp, Oryza sativa
  unsure (1)..(325): unsure at all n locations
tactatggagggctactgtttctgatggcttatcacatcattgcttactcgggtttcacgggaaggggaaacacgttttgcgctctatgatctatgccatttgctaccgattacttaagctactgcctcattttgcattgatgtggacaatacatgggttataaggttacagagttcagtttctctgtgtttgttacctgtgtgggacttggcatgctattggtgtaatttttcactttgaattatgtatggataaaataacggagtacanggacgagagcgagaggatggatcagtgatctcgccttcatgactcttcaatctc

SEQ ID NO: 758 - DNA, 411 bp, Oryza sativa
  unsure (1)..(411): unsure at all n locations
ctttcgactcggacttgaaatatttcaaagtgaatatttgaaacttttgactcaagaattttttgagttttcaactcagatttcaaaatttgaactccaatctgaaaaatttcatctgaagattttttttgataaaattcacttgagatttgaaaacttttaactcatgactttcgattgagatttgaaaattattaagtccaaatctaaaatactttcaacttgggaatataaaactttcaactatcgagttgaaacaataaactaaaatgtgaaaactttcatgtgaagatttatntcttttgaaaattcaactgagttttgaaaactttcaacttgaatttgaaaactttcaactcagatttgaagactttcaattcagatgatctcatcatgaccaacatgggtctc

SEQ ID NO: 759 - DNA, 438 bp, Oryza sativa
gtatttgaaatgcgttcaaatggggtgaacttccctccgccggccattcttctcttatagaggtcccataggctataactgccatatggggtgtggggacctgttaacgaccatatttggtaagatgtgaaccaggttcaacattaggatcgacgcgaattctatgataagatcgattcgaagaacagagtatgcatcggctgtgaaggtatctggctggagtgtacattggctgggatggatcggacagaggataatcgatacagccgatggaggcaatgcaaccgattacgatgaagacagcttcgaggctgtttatagaatctgtcacagtgcttcacaaggattgccacgatagagatcaagctctcggtttggcaattgttcaattaataggatatttatgtaattccttaaaatattgttggcaaagtctat

SEQ ID NO: 760 - DNA, 278 bp, Oryza sativa
atgatgagtgggatcatcggttgattgatggggtgttgcttaaatgtgtgagtgccgatcaagccatggttgtgatgggtgaggtacatgaaggaatttgtggtactcatcaatcggctgataagatgaagcggctgctctggcgttgtcggagatatgggtccggggatttgcgaagtgtggggaatctaccttcctatcctgctgcgtgtgcgtacagactggccctgcccccgagcacgcgaaccggtggagcagccggagggggtcggcggttc

SEQ ID NO: 761 - DNA, 474 bp, Oryza sativa
  unsure (1)..(474): unsure at all n locations
atcaatcccatctattaattatctctgcgggtgattcccgcaacaacagcgaatcattggatcctgcaacaatggcgatccacatcatctaatcgaattctgcaacaacagcaaccctcatcgctaggccacgctcacaggattcgcggaagtccttaagcccgttggataaagccattaagaaagaactactaagctagcatgtcccattccaagtcatatggtcgacacgatcgctacgacgcttgcataccttacagcagttgttaattaaccttatgatgttaagcatatacagctgactacacaataaccaagttcagactgccaattattaagatcaccaaagaactgatccacagatccacatgcacaatattaacattcaaaaataaatttctggttttctatgcaatggtgagaagtatataggtngcaaatattngaaataactaagcaatatgatcaagagat

SEQ ID NO: 762 - DNA, 402 bp, Oryza sativa
  unsure (1)..(402): unsure at all n locations
atcttaagtcacctgcagctgcagcttcgaagaacattgccaatttttggcttgcaaaatnttttaaggctaagaatagctataataatccaaacaaacctattatggctaggcactagaatttgaattgttagcaccctgcaaaaatatttgggaatagcaccctgcaaaaatatttgggaatggtgccatatttgtcaataaaaataaaattttaacacgtatgtacatgtaataatcaaatattacaatatttaaatctatatatttcgaatgtaaatttcagaacttacaatataaatagtatcaaatgtttacagtgtattttttttctaatactcaatgtatataagatttgagactaggaattattggttaccggtgctgatcaacaaatgacgt

SEQ ID NO: 763 - DNA, 353 bp, Oryza sativa
  unsure (1)..(353): unsure at all n locations
gggtatacagtccagtgatgataagctatggtgattgtcatcgtaccgtgcatatggtctatgaatagattttccatatgctcagtccataacctactttgatcagcaggagctcaaataccatatgcaggatgcttgtcatacgcactttggatccaggtatttcagtccagtttacagatacttcagccattgggatcctgagatgctngcataggtatacaagctcaacatcaaaacaccacctggttacacgccaaaaataagacaggaattgataaacagaagcatgacaatatttagagaacataacaacaaagggtaccttttcatctgatatttgaaaaaggttc

SEQ ID NO: 764 - DNA, 407 bp, Oryza sativa
  unsure (1)..(407): unsure at all n locations
gcttcttcgctcaccaatggtcgacggtcgtggctctcacctctctccgaacctagcggtgacgaggggacanaaccccgccgtcggctcgcaccccacatcctcctcttgccaaatttgtgctgggggcggcgctcggggaggtcaaaatatccgtgacttcgccgtccgccggcgactggggaggacggcgagactgtgcgcgtcnccgcctcgtctacggcgatggcggcacgccccaaggcgcgctccaggctgctggcgcgctcctgcgtcacccgcctgtcgtccccgatccaaagactccagcccgacgttggctggatgacgtggccgacttggtcatgacagcgcatcggcgcctacgcgccggcgggcagtcctccgccaccgaggcctctggcgct

SEQ ID NO: 765 - DNA, 182 bp, Oryza sativa
  unsure (1)..(182): unsure at all n locations
tcagcttctccataaagaactngagatggcattaacttctgatttttctttttctgttgagccactgagacaaggacgtttacactaaactacaaggaaggagtgaccgcgtctcgagagatttctcgtcactggttcagctgagaatgacgtggcaaatgtattattcactgcaatacttt

SEQ ID NO: 766 - DNA, 449 bp, Oryza sativa
  unsure (1)..(449): unsure at all n locations
gcttcanatcggtgcactagttctcatgcgtcttttatagtagntggccagaagaagccttgtctgaaagcttttccgacgagagtacgtgcgccggcgtgtgatccgcanatgccttcgtggatgtcaaggagaagagtttttccgtcgtcggatgatacgcacttgaggaggacttccgttggggccttcttgtataaatcgttgctgatcatacaatatatcttggcctgacgggatagtttctctacctctgtgtcgtcatccggcagctcgtctgactccaagaatctgattagcggggtgcgccagtcgtctgttgtctctatgttcgcaacgacgtttgtgaattgtgacctctgcagctccctgcgagatgctggtattggctgtggtgctttcgtcgtgcgtgtccttgatggatggttttgtcagaaacgtccaaaacg

SEQ ID NO: 767 - DNA, 450 bp, Oryza sativa
agcttcggcttcatacaactgcaggtacatccaccatccgccttcaagacacattcctgcacggcttgcttgcgatagataccacgcctgctcctatcaacacacattatttcataccgatgcacttgtgtgccttgagcaacaactcgatgtctcccgtgccttttgattttatcttccatgtactttgtcactacgttgccaaacactatgttgtcatcggccatggacggaccaattttcttgtatcgatccctaaagtacgcttgcgtgccgtgaaggatgaattcaacaatagcaaccaatggaagtacccgaactcctcgcattacccagttgtacacctctgccaaaatggttgtcattatgccataccgagatccatcggtgtcgaacaatagagaccacttcttcttaggctcattctcaatccactgagtgaaatttctg

SEQ ID NO: 768 - DNA, 453 bp, Oryza sativa
  unsure (1)..(453): unsure at all n locations
tgtgcatgcttgtcacgttggagtaaaatatggtaatccctccgttttatattataaatcgtttattttttaaattttttttaagtttaactaagtttatataagatacctactaatgtttttaatacaaaacaaatgtattatcaaaatttattcaatgttaaatgtaatgaaactaattttgtgttgtagatgctgctaatttttttataaactcggtaactttgaataagaaaaaaatcaaacgacttataatataaaacatagatatcatcatttttttaatgaacagttgggaaatttccatatttataattttcactatttagtgtcaattttaatgcgatgtcagattttatacgaggctgacagaaattaagaaaatcaaactttagaaatagtaacaatacataattatgttattatttctatattagttntgtgaaaatacgt

SEQ ID NO: 769 - DNA, 438 bp, Oryza sativa
tccttgatctggtggtgttagaacactgctcgcatgttattaaatatccggaagtagacttgtcttatgattaattgatttttttgcagcagtatcaattatttatatgtaagttttctatcgtacaaaccacaattttcatattctatccaaaattcaaatcaatgcatgatgcatcgtttgaaatgattggatgcaaccatacactgcatattttagttgaacctactatgataaacactatgcatgtgtgctctgcagctaaacaagattttatttagcaacgtgcaaaataaaaatgaaatgaaaaaattctgccaaatttctcaaaagaatgcatactatcagcagatatgatgattagaattcatatgttttaatcagagaagcagacagatggaacataacagaacagtcagacaattgaagaagtccata

SEQ ID NO: 770 - DNA, 324 bp, Oryza sativa
  unsure (1)..(324): unsure at all n locations
ctaaagaattgaggttnttatgtgggcttaacaaagaaattcaggacatgcttgattgtcaaagatatacatctctttctcatttgttacaacttgcttgcaatgctgaaagtaaaatagaggaggatatgaaaaagaaacacgctatgtctttgcctccaattactaactatntgcaggaagtgcgtaatcacgaaaaggaggagagagatatgaaagagccaccaattccactgttcacactcaagttcgagacacctccatcatctaaagaggacatccaaggtaaagtaaatggtactgaaattaatcaaggtgagtgca

SEQ ID NO: 771 - DNA, 221 bp, Oryza sativa
gactcctgcacacttcgtccccttctcctccattgctccatggcgagagagatatgcccttgcgaggactgcgaccaccgtccgtgcaaacgacatgagcacaaccttgcacgttcagtccagcgcgtacatcctcgactacggtggcgctcggcttcccctcctccgttgccgcgagccagcacgctgtcgctgccgctgacatggttcgcctccgggaa

SEQ ID NO: 772 - DNA, 403 bp, Oryza sativa
  unsure (1)..(403): unsure at all n locations
gcttcatctcggcaacggcaatgcggtgaggtagcttctacctggcaacggcgacgacgactgtgngcgagctcgttgattggttttttttgctgtgaaattgagctgaaaaatcgattttggtttggattcagttctgtttgcaaaattttatgctggattgtacgattggccaagggatttagcggtcagccgagattgaaatattttttgtagtcggacaatataacttagccgcctgcgaaccaccaacgaaaatctatttccgtaggcggctaatctccgcttgtaaaaatactctattntcactgacctttagttgcaagtggcgcggtcagccaccagcgaanatcgattntgaccgcctgtgattaccctttntctagtagtgacttatcaaatc

SEQ ID NO: 773 - DNA, 425 bp, Oryza sativa
  unsure (1)..(425): unsure at all n locations
tgcattaaacacctaagttcccgtgacttgcttagtacgttagtactcacccttgctctataaatatatatatagatcctccgccctgaagagaagataaagtgaagtgaagattagggtttcgtcctggttcccagccgtcgcctgtggtgttgggtgttagtccgttggttccgctgctgctgctgttgatggtgtttcctcatctgtgtcgtcagttgtattctcgggctgtctgagctgcaacctaagttaaggtaaataagtcctctatttatattaaggattgctatgattcatatttgtcaccgcgggtaccagcactatgtcctgngactggtaccgagatcgcggtttcgtaggaagcggttcgcgccgtttatcctacgacacgctcctatcangtgcacgtgtacggcggtatc

SEQ ID NO: 774 - DNA, 412 bp, Oryza sativa
  unsure (1)..(412): unsure at all n locations
agcttttgctgaagaaaggaacacactaaatttttttctatgncaatattggttctctggaacatgaatattagaagattgcaatgaatttagtcaattcctcacctaaaagtgtttgagcatagtctgaaccctcggagggatcaaatagtggtccagcaccgagtgcgttagacagagaatcatctaattcaccaaggtagtaaaacaccttggaaacaaccaatgctgccaactgcctctggtcgaattcctcatcttcatataagctctcactgtaacaagtatataacattataaaataagtaaccagaaacacttcatgcttaatagagaagtccttgaaaatattaagttctaccaagttattaagtgacaatgaataaagaacataatttccagaaactataat

SEQ ID NO: 775 - DNA, 466 bp, Oryza sativa
  unsure (1)..(466): unsure at all n locations
gacctataaaactcagcttaaaggaggaacttgaatcgatccatgacaaccatccttttagaccataatgcttcagccaaccttgtatgccattgccgaggaaaatcaaaaatctttctcttgattaatttaatcaggctcttgttagatgcctcggcttgcccattagcttgcgcataatatggtgaagaattcaacaatttgatgcccatgctatcggcaaactaagcaaattcatcagaaacaaagattgatcattgatcggttgttatagtctgaggaatcccagatcggtagataatatactccttgacaaactgtattgcatccccagaatcgactttcttcaaaggaattgctttcacccacttggtaaaatagtcggttgccaccaatataaacttatgccccttgcttgaaggtggattgatctgaccgatcatatcaattccncaacctctgaacg

SEQ ID NO: 776 - DNA, 467 bp, Oryza sativa
  unsure (1)..(467): unsure at all n locations
atgcaagctttgataccacctgatgaaccctgaattcctctcgacactcaaggctgttgnnggccgatctttcngtgagttgagataactacgatttgggagaaacgttgatgatccgactacaatcgtacaagacgttgcgttgcaccttatcgatcgatacacctctccgtgggtatgttgatttgccggtgcagatcaaccctattcctgcgagctaatcgaagaaacaagcaagaacaagataaaagcaatctgatattgcaaataggaattgaatacaaatgataagttggtgttccgaagaacaagcatatggacggtctatccgacacgcgtgctgcaaggaagtagcaatggaaaaactttaatctaataaaacccgagaaaccctgaaggggtacctatctatttatatgggtgggaggatgaccatggggtgcaagggtcgttcttcatctggatgg

SEQ ID NO: 777 - DNA, 430 bp, Oryza sativa
  unsure (1)..(430): unsure at all n locations
ntacccttaagagtagtggtcttttgtttagttagatcgttgtgttagcttgcttgcttaagttttgtttgtgtgtgtgtgggttttagcgtatggagtatatcgagggttgtgatataaccatactagtttcagtgttcagtttagtgttaaaaaacaacctacttcacatcaataaaaaaaataaagcttagtaaaaagtctattctattttgagtctcctatctactttctcttccctttctatctctctcttacctcctacctaagagaatgaattaaaggaaaggaagttttgtgctcaacggtgccagtggtttaaacaagtaaacatttaatatactncaacctgttatttcagctaaggaacaatgtgtctggatctccaaataaaattcatccagatgctgttgtggataacacagtctgt

SEQ ID NO: 778 - DNA, 480 bp, Oryza sativa
  unsure (1)..(480): unsure at all n locations
tgagctgcagcttaaaagcagccatagataacacttatattgcccatagcacaaatntattccatcacatgtcanaatagagatcattatattctctctaaatagcaaatatggggtaaataaatgaataaagttcagaagtgaaacaacccttgccaaagcccgccaaacaactatgcattccaacattgtgtacattattgagctcagaactaacatatgaatttcagtcgatataacacatgaatctgtcatgtattgcaaactgaaatgctaattctgtaactccaatccaatatgaagaatcgatgtttgttggtgacaagagcgaagtggtatttaggagcaaatataaacaacttaaccgggagataagcaacaacccaagcgtagaacctatcaagaatatccttaacctttagctacatctaccttccagcacatctngaaaagntgctcccanggtgtacactggtggat

SEQ ID NO: 779 - DNA, 427 bp, Oryza sativa
  unsure (1)..(427): unsure at all n locations
tacatgagctctngacgagtactactaacccatgtccgtattgtttattttaaaagttagctattgaaccagactcatttgctccgaaacataactgaacataaccacgtcttctgtctttgcaatacataggacaaacgtatcagaatcaggcaatcaggacactagtaaattgaaagcaagtttacagttgtaccaacagataccgatgcgcaaacttcttaactgcataagctctccaagctcgcgactaacttgcaacttagtgttaaggagatgagttattgactgtgtatggtagccagccaatctgaagcacgcaattacagaatataccaaatcctangatgaatttgctatgcggactgcggtagtgtagaacatgtgagcaaacgcatcagaaaatgcagacaacaaatcaattctt

SEQ ID NO: 780 - DNA, 478 bp, Oryza sativa
gcagcatgcaagcttcaaaacaagccaagataacacatatagtgcctatcattatttactccatcacatgtcaagatagagatcactatattttctctaaatagcaaatatggggtctataaatgaataaagttcagaagtgaaacaacccttgccaaagcccaacaaacaactatgcattccaacattgtgtacattattgagctcagaactaacatatgaatttcaatcgatataacacatgaatctgccatgtattgcgaactgaaatgctaatttcgtaactccaatccaatatgaagaatcgatgtttggtggtgacaagagctaagaggtatttaagagcaaatataaacaacttaaccgggagataagcaacaacccaagcgtagaacctatcacgaatatccttaacctctaactacatgtacctttcagcacatctgaaaaaattgctccaggttgcacactggtggat

SEQ ID NO: 781 - DNA, 477 bp, Oryza sativa
  unsure (1)..(477): unsure at all n locations
agctgtggattgaataggtttaaccagagagttttatcatcttgtgtgcttgnggagtggccttgacaagaacacctgaacaaccagagattccagtactgttccactagataatgataacaatgctgcagctgttaatgtgtgctaccgctagctcttcccccctttttttttgcaggcctgcaattntaagtctctattgctcactgacaaacactcacttataacaaatgtctgatgatggggatattcttgttgtataaagtctggtgaggacttgtaggacagaggtgagaaataaaaagtgacctttaaaactaagtataccagcacacattcatggctcttttgcatctcatttgctgttttctgaattttgagtacatcgcccttcttttcctcgtcagcttaagccttttcggagcgatctggctggtgtacgcaactcgatattgaaatcagtaccgtgagtcaact

SEQ ID NO: 782 - DNA, 454 bp, Oryza sativa
tactcagctatccttgcgaagtcttgagcaatgatcagcacgatttcttgttgttttcttttatctttaccatcagatctgtaatttgtcgacatggccagaggccttcaagacaacttcaggagtcacacatgggcagtccacctcaagcatgccctgctccaacacgaaatgctaagaaggtaccaaagtcgacggtaagtcaatgatgtatgcataaatactacattctcagaatgtaacacagataatacgtactagaatgatgcctttggcacatgctgagatgtacatctatggagaatctagtactaaaaaaaaatttcctgttaccgacagtgatgataggggaattatttcacatatatccgagtaacaccgggcactaaccattctccactaataacacttacagttacactagtttctattgatatgtcactgtacccacata

SEQ ID NO: 783 - DNA, 362 bp, Oryza sativa
  unsure (1)..(362): unsure at all n locations
agctngagggaatctgtgatgacttggaggaggatgcgtgctccacggcggatggcacctccctcgcgcggcaggtgctgcgtcttcttgttttttttttgaaacagatcaattatattgacctggctttgaaaaaaagcccaacaaacaaccggtcttattaaaaaacagaaaaccacagttcaccacacaggcgtgctttcccatgaggcgaaggtaagggccaactgacctacacagttccaaatcttcaggcaatgaatttgttttcagttgtccaatttttcccagcggacagataccccttccttcaagatatcctggctcctccccttttagcatgatacaccatttctgaacaa

SEQ ID NO: 784 - DNA, 446 bp, Oryza sativa
  unsure (1)..(446): unsure at all n locations
gaacactcaagcttgcatangaaccacatcacaatcaacataatctgcatatgagccaatggaatacgaaaccctacaaacctgtgttacctttgctctttcggaatcatttaaccactgaatatggtaagggtgtggatgtgtacgtgtagccaagccaagcttcttgaccaaatcagaactcaccaagttgttgcagctacctccatcaatgatcacacgtgcacaacggttgttgatgacgaagaaaatctgaaacaaattatggcgttgcaacctgtcatgctgttgtacctgcgtgctgagcacccgctgcacgatgatggtcctgtagtccgttgtgtcatcacgaccaaagacttcgccatcctcatcatcaacttcttcttcccccttcttctcttccacgtcagaggtggtgatgtagccatcttctgtagcaacat

SEQ ID NO: 785 - DNA, 473 bp, Oryza sativa
  unsure (1)..(473): unsure at all n locations
agctnntttagaggaaataacatgcagctntattatacttctttaccacgcacaatgctttatgaacaattactttaccttgctatgatgctcccaaagctccaatgctaagtgtctatatgttgcaaaaatgtgttgtatacagtgaagactactactccagcgtgaagtcgcttaaccatatcagcacctcattcctcttttgataaggaagaacataagagagtttccgaattaaaaaagataacaatgaatgtaaaactgaaaaaaaggaactggaaatgtaaaactgaaaaaagaatgaactggaattttgggaaaggaagcatgatgataaaatatcaactttccaacacttaatcataanataaacctcattagttagtcttacgatcattatagtgaagtacatcaaanaaactacatgtcagcttaaacaataagggacagcccanaaagaaacataccattat

SEQ ID NO: 786 - DNA, 402 bp, Oryza sativa
  unsure (1)..(402): unsure at all n locations
tgtaatctttgaggaagtccatttcgcaggcagataatttattgctttatcacggngagaagaagacactggttgctgtccaacgacaacttcgcgttcaaaacactgaatatatacacacggtcgtcgacagcaacttgccgtacgtacactggcctgaaaaaatagcagcaaattgaactcagagaacaggttaattacacggtttgtactgattcaaactgaagaaaaattcgtgccacgcgctttaccccgcttactgcttcctgagcagagctcatacggttaagagttggcatcatggacagtaagtctatgcattattatcaaactcagtacaattttatttcaatttggtttacagtaaatacactgcacaagtacgatgtactctgctagtac

SEQ ID NO: 787 - DNA, 435 bp, Oryza sativa
  unsure (1)..(435): unsure at all n locations
agcntcctaacctgcacatggtgcacatatgttttcttgcctacncngaggattgaattaggccatgaatggcagaaataccccaatatatgatgtatggaatcacaaagacgcatggagcataccaaacattaagtgcagtgactaaagtcagctcatgatcaggaacaagagaccttatataatcaaggtcagtgagtggaacaccgtacaatctttccatatttaggacacgctttgtgctacagtggcgatacacaaaaggggctttggcctgcctgtcaaatcccattgcatcgatgtacctctgaaaagcctcaatattcatagcctctttcctgaaatcaacttctttaagcatagattcctctatatccttgacaattcctacctataatataaaattctgagcataacgacatctcttatatattc

SEQ ID NO: 788 - DNA, 468 bp, Oryza sativa
  unsure (1)..(468): unsure at all n locations
acacataaaactcacgcttcatatataacatgctttacgagacgtgaactctttctgtattataatcatgngtgcccttcttacgtacgtacgatgctattntgctgaaaatctgcccaatgttggctgaacacttcatgagctagaaccatgatgatgccaatgcagtcattgtccctgagtccctcatcctgaaaaggtcgcactcctcaaacaaatattgctagataggagtaggctccttggatgtgtgacaacccctatcctgagccattgatttaacatatgaacttacgggtaagattaatcaaacaactgtcgctttttaaagatgtttgcaaacaacatatgtgcatatttataatcaaaccatcacatatatatctgcatgccttacatggttcagcactctatgctgaagacaacttctntcacgacacggaacgggcaagttcacagatcaatcaa

SEQ ID NO: 789 - DNA, 295 bp, Oryza sativa
  unsure (1)..(295): unsure at all n locations
aatttgagctatgcatgccacttggcggaggacaatgtgtnaactgtgatgggtataggttgccgagagctacatacgcaatacatggagcttagcaatgccaagcggaaaatgagggagtcttccatagttggacatcacgaccaccagccgttcctatcgtcggctgcctatataactataggctttgatgacctcttcgaccttttcaagatccagaagttggacactgttcttctataatgctactccttgtaagtcataccttctatactcgtgatatgactggactata

SEQ ID NO: 790 - DNA, 449 bp, Oryza sativa
  unsure (1)..(449): unsure at all n locations
tccactcactcattctttatatgtaccataactctgtgttttgtttgcttgngngctgatcagtagaatcgactggtttctcaacacgttatcagcacgagactctaccgagctaaaaaggtaaaaagaacatgtcggacatagcaaagaaggaattcgtcgagcttgccttggatggtagtaactacctcacttgggcattggacgttgagattaaactcgactacatgggtctcgatcatactattgtgctgcccgaagttggcacggtggagtctacgaatgccgagaaagcaaatgcatttcatttcttgcgccaccatctccacccagacctgaagttngaatatatgaccgagaaagatccactggtattatggcattccctgaggatcgctttgaccagcaagggtcaattgtgctcccacaggcacaacatgactggatca

SEQ ID NO: 791 - DNA, 190 bp, Oryza sativa
gtgctattttttaggaaaacatccctttaatataatctatctatggctaattacggggcccaacttagagaaacaccgggagattaatatgccccggcgttagagtgttgaaaacccatggacgctagacgttgaggagcaatgacttaaatatataatatgcggccccggctcattctgcaaaaaaaaa

SEQ ID NO: 792 - DNA, 394 bp, Oryza sativa
  unsure (1)..(394): unsure at all n locations
acctgtggacgaaattcatatatataacggctaggtgatatcatctaaccggtactcacaagtttgaactagaaacctgccaggaggttccggacaaaagtgccaggaacttccgggcagcacttaagataatttttgcaaataaacggtgcccggaagttccggccagaacctccgggtagccctctctgtctcggggagaaaatcatttttcaaaaatgattccaaaaaatcttttgactcatggatatgactaagagcactttgtataccctagaaccacacttganacccctcttaatagtacgggttttcctaaactcaatttcgaaagtgaanaacctagtctaaccaccttcgatgattnttgacttangaacatttgaatgggggg

SEQ ID NO: 793 - DNA, 420 bp, Oryza sativa
tcggcaacactcccctgtttcaaggaatctcttctagcttgctcccaatcaaccaatgacttcaaaatactcaccaaacactgcaatttgggttttacgagtgattaacattatatacactaaggacaaaaatatcttagcaatttggataacagtaacctgaagagatgagcctttcacagaaactgtttgagaagatgcggcagtgtttgtatccgcattttgagatccttgtgcaatccttgagagtgcactgacctgatagtgatacatgttcaatcagatatatcatgtggagatagttagaagagatactagttttctagtgtaaaaataaaattcattgtgctcaccatgcgttcaaaaaggtttggcccctcagggcacaatcataatttacaaacatgtctgcaagcattt

SEQ ID NO: 794 - DNA, 378 bp, Oryza sativa
  unsure (1)..(378): unsure at all n locations
tacttctcgacaaaagagcgcatcgttgaaattagtgtntttttttctttttcagaatccctcccagaaatatcctggtaagacacttaggtattataaccctcactataggagatgntttgtcttattaattaaccactcactatgatatatacactcaccacttaatactcaagtagtagtagtaaaaagatcnttgaaaggaaataccgctgaccttgattaattgcggaattgacaaactagatttggtccagttggaacaggatcgagttgtgattntggcaggaactgaagtgacaaaaccatcgtgtttggaatgctcataggaatggaaacaaactccaggccggaattgatggccatccagagaatgcg

SEQ ID NO: 795 - DNA, 479 bp, Oryza sativa
  unsure (1)..(479): unsure at all n locations
gcttgtaaaaataatcttgcaatagagattgtgcggaaactgtcaattgttgcttcgcncnaccacttacattacatgacaataaatattntaccctcaaaaatgtggagtggattgccaaagaaatgtaaccacatattactagaacacaaaagggacagaagagaaagaagaacataaccccagtagtactagttagctcctccgtcactcccaaaatgtaagcagttcattaaataagaaaaggttgggattgattgagatgaggaagtagttggaagaattaactgagagatggttgtgagttgtgattggtttatatgaggaagtatgtgaaaaagatgatatattttgngacaaattctgaacgctagaagttgctatatgttgggatggtaggagtacttagttatcaagtactgtaactgttcaaccatcaaacaagcctatatcaatggcatatgctgtttgagagatac

SEQ ID NO: 796 - DNA, 408 bp, Oryza sativa
  unsure (1)..(408): unsure at all n locations
ttggatccaaaggtggctatgtgttttattgtatgggctcgaggcaagataaccccgcctccagagggacgacagggaggcaaaatggcatgtgggcaatggtggcaacatagtacagaatgaggaataaagcgtacatggaggcagggacctcatcggttgcccatgagctaggaggagtccttgtagagctcgtcgataggaagtggtggccatctcgcttgagcgacgaataaaggacgcagggtcacttttgtcgatatgaaaataccacatgtaaaaggaaatcgctatgtgtacgatataattaatatgattctcatacaatcttgtcttgcatgattattgattggtccatgaaaacatgtanggtcacatgccacaaaaatgtgatacatcatacgctca

SEQ ID NO: 797 - DNA, 417 bp, Oryza sativa
  unsure (1)..(417): unsure at all n locations
agctgtggcgagnatcagaacacggcggaggatgtttccgtctcctatatgccgcaaccgccgccgtcggtgtgcacgaggagcgtcacctccgtcgcgctcacgacgcatggagatggcggcggttgctgccgcgtgccgctctccccattcgacgcgtactgggcgcgctgctgctcgtacgccaccaccactgttcggagacgtcgtccgtgcactcanggactccctcaaggcgttgctcccggcgttctaccgcttcgccggtgcgctagtctactcgccggaggaggaggaggggtcgctgtccatcgtcgtggaggccgaggcgttcgcggcatctgtggtgcgcttgccgcgtgggatgatggctggagggctagggctctactattccatccaataccacgggacggc

SEQ ID NO: 798 - DNA, 465 bp, Oryza sativa
  unsure (1)..(465): unsure at all n locations
actcaagcttctggtgctccatgtgctgctttttcagaagcattccgtgcaagtattctaggtgctcagctcggagctgagggtggatgtactactctcctctgtatgtttatctaatctttacgccaaagcctcttttcaggataaaattcatttttagattactaggcttcaattctgagtgtgttcaatgttcatgatattcttatatgagcttccataaactactctattttggtggtacttcaagtcctacatgaaaactacttgttcacattgntgatgtcttatgttccactgttcactcatcaaaccccgtacagaatgatgttcttagctctgagcagaatgtacattttgtttcttcaggtgcaaatacggcgccttccatagcctgttatagcaatggtattatcatcactattgtgtttttcccctcatttaaccattctacattagtactac

SEQ ID NO: 799 - DNA, 473 bp, Oryza sativa
  unsure (1)..(473): unsure at all n locations
agcttaagataagtactntcatctgatgctggatgaagcctttatgacgtantaaccacagtggcacaatgctctatcctcagtattgtaagatgagaaagggcttctagtccacccaaggaagacaacctgttacattcaatgattctaatgctctccaatttagacatccttttgaaatctgatgcatcacgaagggagatcaacatgtggcaacagaccangcttaagacagtgagaactctgcaatgttcctcttgtaagaacccatttagagaaaccagaagattgcaagactcaacattcaaaatagagagctgtgactccaccaaagaaacacgtcttcgccccatatgagtacacatggttggcagacttgacattccaactctatctatgtncaaatacctcagactaaaaggtaaactgggtagctctgacaggcccaggcaattcttcacaacanaagtgat

SEQ ID NO: 800 - DNA, 465 bp, Oryza sativa
  unsure (1)..(465): unsure at all n locations
tactaagcttgcatcaacaacaacatggggatggaaccaaataatcgttattgttcttttagcctgtgcatcaacatctgtcccaatacgattgtgccacgaggaatcccagcggcaagcgagctacaagacaacggtgtgagattccgagtgaggggattgagtgagcaggtcaaaatgtttgacgcgacatttcacggtaagatcattaggatccctcgttttcagataaatttcggctccaagatcctactggcaaacctcttcgcttacgatcaaatcaagggagaaccagctgacaacggtgctgctgtcggacctgtgacaagctacgtggtgctcatgaacgcgctcatcaacaccagagaagacgtcgcggntctccagaggaagggcatcctgnacaacctgctgtcgaacgaggacgaagtggcctncttcttcaacgagctcggcaggtgtgcg

SEQ ID NO: 801 - DNA, 470 bp, Oryza sativa
  unsure (1)..(470): unsure at all n locations
agcttatatttccttgcactcctgtctgaatctttaatatttctcttctctgaatatcntgcaaaagtaaagtatttgcactttttcctatcagaactacactggagacaaggaaactcttggaaagtgtgagcaggtaaaccttcatgcatgtttggactcttcttttgttatatattgatttgtttacacttatatttgatcagaactattgaggctataactgacaaattatattntgtacattcctattcatctcctccgtctgcgagattttctagagcttatgaangtgccgagggttgaatctaagcttaagatatttgctctcaagattcaatttcaatcacaggtcatacactgttgaaatattgagttattatctccgtatctgagatgtccatagatattcactatcccccttttcatttccctcttagaatagggatgttagaaagaaattgctgact

SEQ ID NO: 802 - DNA, 357 bp, Oryza sativa
ctcagcttaggaagagatgggttctaagctgaactttaggactgcttatcattcgtatacagacggagaaaccgaaaggtgaatcagattgtggaagacatgttgagagcttgtgctttacacttcggtggaaggtgggataagaatctaccttatgcggaattctcgtacaacaacagttattaagctaggcttcagatggctccgtacgaagcactgtatggtcggaagtgccgcactccgcttttgtgggatcaaacgggagcacgtcaggttttcgggactgatatcctgacggaagcagaagaaaaggtgaaaatcattcaagagagattgcgtgtggcttactctcgtcat

SEQ ID NO: 803 - DNA, 330 bp, Oryza sativa
  unsure (1)..(330): unsure at all n locations
atgtacatgttttacttctagatcttcatgatctggggcattacgcatttccacatcttcatattgagtatctactgtaggtaaagaattgctaccctccaacacattccttttgaattcatctctttcctgcatagctgtctcatacagacccataaagatatcattttcttcatgcatctcgtccaagtgaaagtgcgaatctgtcaattcacttcttgaaaanatatccttgtgattgcactcgccatccattatcttggagtccgatacctcactggatgagttggctgctggcaaaatagtgcactctctggcttgtcatctggc

SEQ ID NO: 804 - DNA, 442 bp, Oryza sativa
  unsure (1)..(442): unsure at all n locations
agcttcgagagatacccgcgttgggagatattctctacaatcttatctttggcgggcaagggaccttttccccatgccctgtcaatattttaaactctgaaaataacttttctctattaatacatatacggcaaagcttttgtcgatgttttaaaaaattttattgctgtttgtgccatgagaattaaccacttcagctactagctataaaaatatgaagtagaagaagttgaataagccaatgggttgttttcttcattttgagtaattagaaaacatgtatgtttttattcaggattacatatcttcaggtctatttggcacagtcctgttgtatccccaaccaaaatttcatagcacgatatacatgacttgcgacatttttaccttattttatcaactggctcgattagctgattntgtcaagactcactcacataat

SEQ ID NO: 805 - DNA, 330 bp, Oryza sativa
  unsure (1)..(330): unsure at all n locations
aactaagcttcactggaaaactctaataagacagaaactgtagttttcactttctaaancnaacccaccaaaatatagcaaatggtaccgccatttgtaatactaaatattggtaaggttaaaaattaccaccaagtaaaaagccccacgtgcctatataaggaccaatgtcgcgtgacaattataaatctatctttgctagggtgcgtgaaacacaaacaacacaagacacttgacacggggttctattangagtgccaaaacaatttgagctcaccgttttggattccactaccgatttaaactgcattttcagatatagcgtgtgaa

SEQ ID NO: 806 - DNA, 459 bp, Oryza sativa
gacctatgaatactcagcttgtcataagatactcagctcgatacggacgcgacatgttatattatctatcaacaaggcagaggtcgctacgtctctttatctgctatgaaagcgtgatgaacgccctttcttcggccgcaggcctggtgacgaaaaagccgtgctcaggcgattgtgcccggtctgagccggcacaaactaagctgacgaacacaatggtctgggagatacacttaactccagcgcatatctaagagttgatgatgatgccgacgtgccaattagtgtgatcctacaactgacacgatatagaaataacatgtgacacagcctatcggcttacaagccgatggatgcattgtagccgatgtctatagggatttgagcactcatgtataagaccaatgtacacgatgatgcacagacaatcggctgatgatgatgatgttataaaacaat

SEQ ID NO: 807 - DNA, 399 bp, Oryza sativa
  unsure (1)..(399): unsure at all n locations
acttatgtcactcaggcacacgaggatcataaagtctgaaggaaaatataagttatttctatgtgaccaaatctagatagttaagggaagcacaaaaatataataatgaacatcatgggattcatggacgggacacgctcattattgatgagaataagaagaaattgcagagtacatccaatatagaattatacaaaacttcctacatcaaatagggtccagctatttgttttcattatgaaggcttacttctacatggcatgctngttcatcaaatatcaaacgaaaagctgatgtacagactacacaaagcatctgccacatgaacattagtcctagtgcacatagcggatgatgcggcacacaatagaatcatgaggtctactatacaatatacac

SEQ ID NO: 808 - DNA, 439 bp, Oryza sativa
actaagcttaccacctcaactctggaatcgggacaagttcttgggtaggctcccagtaaggccattgccatcaaggaagaggtcgttgagcagcttgcactgaccaaagccggccggcacatcaccagagaaggcattcgccgagaaccgcaggaccttgaccggcgaagcgcatagcgcggtgacgttgatgccgccggagaaggcgttgccggtgatatcaagaaccgtcaggttcggcgcaccggggaacgcggtgtgcggcccggtgaatccggtggaggagacgttcaccacctcgatcgccgggaagccgctcgccgggaacgcgccaacgaggccgttcgtgctgaggtcgaggcgccgcatgcaccgcatgcgggcgagctgtgccaccggcacgcctcgaaagagttccgggagaggctccggttggaga

SEQ ID NO: 809 - DNA, 161 bp, Oryza sativa
acaagcacgtgggcaacatatattagcagccttacacgatctatagaaaaatattctacgtgaaaacaagaccttcatttcaataggagaaacgcgctgcaacgtaataacgaatttactaattttgctctacaaaaattacggtggaaccacccttttaa

SEQ ID NO: 810 - DNA, 424 bp, Oryza sativa
  unsure (1)..(424): unsure at all n locations
gacctatgaaactcaagcttacgtcgtggcagccatcctgctggccgtgtgtcgcgacttcttcgccgccgcccgccgccgccgtcacctacgaggtgagcaacgaggcggcgagcaccgccggcggccatcggttcgaccgggagtacggcgccgggtacgccaagcaggtgctcgccgccgcctcctccttcacctggagcatcttcagccagccgagcgccgccgaccggaggcccgtcgacgccggcgtcctcgccgtacgcgacgtcgactgcatcgcctccaccagcggcaacaccatcacgctcggcgccggctacgtcgccagcgtcaccggcaacgacttcaagacgcangtaattaatagactccggctcatccatgttgactgactaacatttgaccatgcatactataccct

SEQ ID NO: 811 - DNA, 319 bp, Oryza sativa
  unsure (1)..(319): unsure at all n locations
nggaatcgtgtcaaaagagggagatgagaggtttatctatattgtggagcttgcttgggagtgaggagaacctccatggcatccaatgagcatattcactctccttatgccaagtgtccatttggatgatgggtggagcgccgaaaacggtcctaaccgtcattaagaagcaattatctaccgaactggactcgggccggtgcgaacggcctctaccggggatcagccgaacccctgagttcggctgaacccgatatagctctgtttgctacacttatcgacccggacactcattttaggcccctcaattcattggtat

SEQ ID NO: 812 - DNA, 369 bp, Oryza sativa
  unsure (1)..(369): unsure at all n locations
agcttcaggtntatttatctcacacttgcattcatttctttctgtttctggtccttgacttggtctgatgatattgattntcgtagtaccagaaatataatgctgtgtctaagttttgatgaatccatttagcatcttgaattttcatatacaccttacttctgcttgtagactgcacatgaggaatctaaagcggctacacaagcaagggacatgataggtgagtacttaccttagtatatttaaccttgtctaaaaagttcttgtacacttttgataacccactttacctattgttgatgcaacaattattttgtcatagcgattcaacagaggatggagaaagatattgatgaagtggggaatatc

SEQ ID NO: 813 - DNA, 444 bp, Oryza sativa
  unsure (1)..(444): unsure at all n locations
gatgttntcataatattacacatataattatttcataatntatgcatggtaattgagcaaccaaagttgtgccctttttacttaattagaaaagatatataaagacattcttttgtaaccgaaagagtaattgctcaataaccagcacaagaaactagcactgtacctgaatcattggagcacactaagagggtgtttagatacatggtaaagttttagtgtgtcacatcggatattatatagggtgtcgcattggatgttcgggcactaacaaaaaaaaactaattacataatccttcagtaaaccgtatgatgaatgtattaagcctaattaatctgtcattagcanatggttattatagcaccacattgtcaaatcatatgaagcaattaggctcaaaagattcgtctcgcatattagttataatacgtgcaagtagttat

SEQ ID NO: 814 - DNA, 486 bp, Oryza sativa
  unsure (1)..(486): unsure at all n locations
agcttaaagaattacaaattatattgctaattatatctntatgtggaatcacatattggtcggcacatattaaaaaatttatatgaacaatatgttgataacacgtgcaaatatgtgcccaaagccatcaataagaaagttttatcgtcgaattttttattggattgtgactccatgccaatatcaaacacaactcactattctcgctattgatttgttgtcgaattaaaaattattaaatggtgaaaaaaatataattaagactctctcttgatacttagtaattcataatttctaaactaaattaataaaaaaactccaaagaaaacaacagtaaggctttagcgtgaattaaaatcagaatacaaagaataacataatgcttataaaattaatagcaatagcccgtgcaacgcatgggttgtcggctagtataattagcaatagattgtgagcccatacattcccgattactcgttgttcttt

SEQ ID NO: 815 - DNA, 456 bp, Oryza sativa
  unsure (1)..(456): unsure at all n locations
tataaataggtatatttctagatttgatataccacaagctgcatgatatgcatgctttgattatattaaaattntgaatgcttcatgagccaaagtagaccaccatatgcgagaaacgagaaaaaaaaactcatctttttagaagcgacttgtgcttcacacatatgccacagttgtctgacacaagcccaacatactcgttgggggataactaattacatggtaattatctaggatggactggattgggttcaatgcctcccagaccatttaattattcataatgcaacagattatgtatagatatcatcaacataacccggccatagctaatcaaatggtttgataggcataggacctactgtcagctctaacgagtactgacttagctaggttctatatttctatntattcggcaaacttacttcatcgtagtcatctagtgacaaaaacacc

SEQ ID NO: 816 - DNA, 320 bp, Oryza sativa
  unsure (1)..(320): unsure at all n locations
agcttgtcgtccgctatcgtgtggcactgtattcttcagacacgaggggatggcgcctgatccgtgtgtcacagttttggtgtgggtggaacgtgaggagctgcggcatgctaccgcgctgctcgacagctcagactcctcctgtctngggaagttatcgacaaagcccagcctgactatggcttccagagaaagggcaccatgtggcatcagcctctatggccactccggctctgggatggtggctgtagagacacatgctcgaggtgagatagattggtgtcgacgggtgcttgcggtgggagcacataacagataga

SEQ ID NO: 817 - DNA, 160 bp, Oryza sativa
  unsure (1)..(160): unsure at all n locations
acactataaaactcagcttctgacatggctttgatgaggaacacgagagagtnttattgtgatgtagatcgactatggtcaaccgagcgcggctcgtcgacgttgcccaagccgatgatgcccgatctgctacttgcatggagatctcctgcagcatgct

SEQ ID NO: 818 - DNA, 170 bp, Oryza sativa
  unsure (1)..(170): unsure at all n locations
agacgaactcgtcatggatgcgctcccattatcacacgttgagcataccggtcatcttgccgacctcgccgccgaacgcgaactctcggcgcgccgcgtgngtcatctaggacgtcgccggcggcgaccggcgagcacgctccgctcatcaccctcgaggaggaccccgc

SEQ ID NO: 819 - DNA, 421 bp, Oryza sativa
  unsure (1)..(421): unsure at all n locations
tatgcttgtttctttttatatgcagcggaattgagccaccgaagcatggccctgcccacttcatgagagcatatatatggtgacattacttttgacccgggcgagtaactcgatcacattcgacgtcaatacactagcactgtacctgagacatcgtagcacactacgagggtgtacacacacatgtatcagtcagagagtgacgatggcgctctactatggcgtgcaatttcagacgagttgtccatttagagctcctgttacaagcagtctcagtgctatcttcagcacatcttatgcgtaaacacactcagttgcctgtgacaaaagctgtgtgtaaacccatatagcatagaaagaacataatntgtgcacccatgaaccatcaagcgctgagcattcataacgatgcgccgaaagc

SEQ ID NO: 820 - DNA, 479 bp, Oryza sativa
  unsure (1)..(479): unsure at all n locations
agctcggattcatgctgatagctctcatctggtatttcgatttctcaccgntcatgatcctcgtcatcgcgatcctcaacgacggtgagttcttgaacacaacaaatattgaacttctgatccacacacacacacacaattttagctgatgtacctgattgatgatgcacgaacgatcatgacaatatccaaggacagggtgaagccgtcgccgcacccggacagctggaagttgccggagatcttcatcaccggcatcgtctacggcacctacctcgccgtcatgaccgtcctcttcttctgggccatgaggagcaccgatttcttcaccgtaagcaaacaatcaaacaaacagatccaaagaatccttcaaaaacctttgattccactgctctgatcgaattcaaaattgaatttggtgtgtgcgcagagcacgttccatgtgaagccactgatggagaaagacgagatgatgtccg

SEQ ID NO: 821 - DNA, 447 bp, Oryza sativa
  unsure (1)..(447): unsure at all n locations
taccatgtaacttccatgctaagatatgaagcatttcatctttttgtgaagaaatttaagccaactattttgtgctcatatcagccaaaaaaaaaaagtaatactgaccttcaattgtaaggttgtatgcaagaggggaatcagcattccttctttcactaagaggcagcactggaaacagctttgcaaccaggacttctcatttctatgcagagtaaaaccaggggaatcatgcatccaggccttcaaagcacaatatgctagggactgcaatacaaaatataggcaatacatttataaaactggggaggtcaaccacaccaccattcagtccaaaccaaatgatattttgatggtgttcaatcagagctcanggagatattcacttcctcagctggaaatgatgcgattataatgaatagtgacccaaggtaaattgtcacaata

SEQ ID NO: 822 - DNA, 359 bp, Oryza sativa
actaactggcccctccctggagacgatgcatagattgtctatggggaggagatcgggagaatcggcttgcgggcgtcggggaggaccaaatgagcggtgtggactcagcgagaacggaccatgcgaaaacccagttttacccctccacttgtttagggcgtgcgggcgggagaaaattgttattttgtcttcgcgggataattgatctcctggaatactattactttggagtgaatcattattatgctctcctatactattgggttttcactgaaacgacatataggattttttagcatgctacaaatcactgcactctatattgagctgtgttgtgagcatatgacctcgtgtcctta

SEQ ID NO: 823 - DNA, 297 bp, Oryza sativa
  unsure (1)..(297): unsure at all n locations
caagtgcgtattacatcatattgtacaaaatttattactttaattcctgaaagnttctgattaaaaataagtcaattgttttaggaggaataattgggagggttgggataattacaagtaggttcttttggacacacgaagtattcaacacgtgagctgtgtattgatgtcaaagactcagtttatatttctttcttgaagcttgcatttaaatatttaggtgatagttatttgagactcatcacatgcataagtntcttatatattcgagagctcatctccctaatttatacccac

SEQ ID NO: 824 - DNA, 443 bp, Oryza sativa
  unsure (1)..(443): unsure at all n locations
tgtgttgggcatccacaatgtggtaaaaagtgggtagtatgaggccctattacctggctcaacattgtggagataggtatcaaggtgggtactaatattcggtagtagcactactacccggttgtataattaaacaaatattacaatctctcttctctccattccaccagccatctctcccattctcacaatattttttttgttgcaatgtggcccaccttactaccacctcctactagtatacattgtgacaattgaaacaactataacctactgttaaagggacccaccttattaccaacttaggcaatatacatcggtgatgcccttaaattttatgattgtctgaattntttttcaccatggtctgaatatttgtgatagtctgaaattttatgatggtctgaatatttgtgacaatctgaaatttttgaaatagtctg

SEQ ID NO: 825 - DNA, 444 bp, Oryza sativa
agcttgcgacgtcatttattgatgagtactctcttctgggctggcgcgccatgctgactgaagtcaatctgtcaccgaaaccaggcctcgtggatcgcattaactgcggtgcgcacaaagatatggcgctggaagatttccaccgcagcgcgctggcgattcatggctggctaccccgtttcattgaatttggtgcctgtagtgcggaaatggcaccagaagcggtactccacggattacgcccaattggtatggcttgcgaaagtgatatgtttcgcgccactgcgggcgtaaacacgcataaaggcagcattttttctttatggctgctatgtgcggcaattggccgttgcttaactcaccaaccggtacgccacaaccgtttgtctacggcggcaagttctgcgtggctgacgatcggaactgcgtacataattacactga

SEQ ID NO: 826 - DNA, 423 bp, Oryza sativa
tgccaccagaggcttcatattggtgccaggtttttgcgttatctttggaggcaagaattgccgctgctgtcgccgggctttctggcttgataaccccaaccaacaatgttcttaattgcactttgccagaatctacccacgggcgcgcctgctgccagaactgtttacaatatgggcagaacggatcggcgaagacgtagacaatgaccggcgcatcttttttaccgtcgaggagccagtgggattgttccatccgttgccacatttcgcgtccggctggtgcgtaaatttctttttcgataagtgtgttactcaggttttcacctttctcgttgtacatgtaaccagagatagcgtgcttaccatctggagtcaggtagatggtgacgcccatatcctgatactttccgagataacctttca

SEQ ID NO: 827 - DNA, 469 bp, Oryza sativa
  unsure (1)..(469): unsure at all n locations
agcttatctcttacgctccaccggctcgccttgatcgccgccgactggtgtttccgcctgcacggctggcctattatgccgccgttgttgggcgtctacgtcttcaccgaccggcttgccttcgtcgccgccgactggtgtttccgcctgcacggctggcctattatgccgccgttgttgggcgtctacgtcttcaccgaccggcttgcattctccgacgccgactggtgtttccgcctgcacggctggcctttatgccgccgttgttgggcgtctacatcttcaccgaccggcttgccttcgccgctgccgactggtgtttccgcctgcacggctggcctttatgccaccgttgatgggcgtctacgtattcaccgaccggacgtctcgtncgccgacgactggtgcttncgactgcacgggtgacttattatgccgcgnngtgtgggcgtctacgtcttcaccgacc

SEQ ID NO: 828 - DNA, 467 bp, Oryza sativa
  unsure (1)..(467): unsure at all n locations
ggacctataaaactcagctatgtcaacttcttacggntatcttgtcgatatanaacaataaagtgcagcattccctatacgataatacatgcttacaggcagtaattaataaaacaaaaccttacctagcattgaaacgaatgttgacttaaccatatcagtattgtatatagaagtcaactgatatagcccatacgtggctgggacacgtagttggatcaacaagaaagggtatgcatgcatgcgcgcaaaatctggtctgacggacacctcgttcctcctgcacaagtagaaagggatgaagcatctccagtttctactataaatacatcacaatattgacacaaactcaacatccagcanaaccaagcacacaaacacatacatttgcccaaacttcaaccatggctctcanatctgcagctcttctcgccattgtcatcaccatgagccttctctcagtggag

SEQ ID NO: 829 - DNA, 424 bp, Oryza sativa
  unsure (1)..(424): unsure at all n locations
atgagcttcctgcctncaatagccatcatgtaatggttcagctggatttcattcatgtgccacatgacaagaatgaaacatattaaatagcatactatcaaacaaaatttngtgggtagacctgctcaattgtcttgtggagcagtacatatatgggacaatggcagcctgcaaagctcttgaccaaaggtcacctcttgcactgaggtttgttagctgctatgttgtggttagtaagaagtttgagcagttgaaaccttgtatgataattgacaagataaaagtgaggcagcacagagagagaaagagatataccattcaccccttgtcacctgacaagataaaattgtggacgcgtaaacctcttttcacctggtatttgatctcaggtgaactttccagctggattgtatgatctgcacta

SEQ ID NO: 830 - DNA, 354 bp, Oryza sativa
  unsure (1)..(354): unsure at all n locations
ccttctatgatggaacggntnttcanaaataagaaagacagtgtttatctttatatacctggaggaaaggactcaggcgttcatactactgatccatgcaccaccaacaaagaggtggtaccattggttacatccataattgattcttcattctctcaaaaagaaaactgggctttggaggatcttcgcaggttaatttccttctgatgtcaatatgtttcatatatatgcgcctaattgttacctcatacttgatgctttaccagaaaaaaaaatcatttacattcatatattggtttaagatatgccaatgcatcacatttaatagaaatatgtaacaggttgcagatcaat

SEQ ID NO: 831 - DNA, 438 bp, Oryza sativa
  unsure (1)..(438): unsure at all n locations
ccgacttatgaaaaactaattaactatcttactttaaacctttgcgtggtgcttatccccacacatgacaaacatgagtgtgttcgaaggaatcataatcttaattgcatcactcgagctacttgcttaacatctctgatccttatctccatctggacaaatattaattattttcagctaattaattgatctgctattctctttctaattaagcacagagatgaaacctccacgatatctgcgttttgctcttggactttgcagcgtgggtaagccgacgagaggagtacaatctaagcgattactccctccatcctataatataaaggatattgagtctttacttgtattgtgtgaccattcgtcttattaaaaaaatttaagaatattatttatnttttctacttactttattatccagaatactctaaatacaac

SEQ ID NO: 832 - DNA, 458 bp, Oryza sativa
tgtgcgctggcatgccgaagaacggaaagtcgatactatgctgatgcacccagcagattcagtacagtggaggacaatcgataggatttaccaggaattctcaaatgacccaagaaacatgcgtttcgcaatgtgtacggacggcattaatccttttggtgatttgagcagtcgtcacagtacatggccagttctgcttgttaactataaccttcctccctggttgtgtttcaaaagaaagtacattatgcttgccatgctcattcaaggaccgagacaacctggcaacgatatcgatgtgttccttgaaccgataatcgatgacttcgaaaggctatggaatgagggcacacgaacatgggacgcatatgcacaagagtatttcaacctccatgcgatgctgttttgtaccatcaacgattatccggcccttggcaacctttctggccaaactgtga

SEQ ID NO: 833 - DNA, 461 bp, Oryza sativa
  unsure (1)..(461): unsure at all n locations
agctnggtagnccaaaacaattgtcttagatattcaacctttttactttcaatggctcatttgctgtgatctaatccgcgagcacttggtaagttggtagtccaagatagaatgcacaaacttgaaggcaatatactcattcccagtactatgcataattacgagtggattaccacaccaggctgctgtgtagaatgttcccaattgggtattttaaatttcacacctactctgagaaatagcacctgttgttttgtctttcacactttctaagaatttagtactgtttctccttccaattgtctccatcgaaactgtaatttatcgtgtgctttacccanattgtgtgtatccagttatagaccanatgactgtctacctcanagtcccatgtagtgaattgtgggtgctatgcacgattccgaataatcaaatagaatattgccaaacacctcaatcct

SEQ ID NO: 834 - DNA, 461 bp, Oryza sativa
  unsure (1)..(461): unsure at all n locations
gaccttaaatctaagcttgttntcataaccgaaagccacttcagattggcacagtttgatatacccttcagcattcaaaaccacaatgtgagtggaaaaaaaaaagatactctgatgaacacagccacagcaatgatttaatggaacgattagccatcaattctctacttcaatgaactcaaagaataatccagaccgaatgggacatcaaattagtccattatatgactttctaaaaggttattacgggattcatccttttaactattcaatgtttcagatggatttacccagtgcctatgcttgtagagaacacagtaacaccgacatcgcatatatccatacaggtgaaattcaccaagaatctacaccgatgctaaatttgttgtataaacatgtgcatttctcactagaatactgtgttttaacccgtagtacattgactagttacctcgagagtg

SEQ ID NO: 835 - DNA, 430 bp, Oryza sativa
  unsure (1)..(430): unsure at all n locations
agcttgagaacaacaagacggatctccaatctattattacttatgaggtatagncttttcccaaggattacagagaaattatgtaccaacagattctcctgcatgaggcaaagtgatgtctatttcaggtgaaagaaaattcaatcctccacgcaagtcttggaaggaggaaagaagaattgcatgaacgccgcttatcacttgaaaaagaagtaagagctcaaactatgggaaagtattttttttctagaaacagaacatccaggtagattntatgattaagtctctttatctccataagagatccttacattatgttaagatcaccaganattttatacatcttcaatatctggctgaaatatgcaaatctctgttaaacggaaattggttttcatacaacaggtggaaaatttgcgggatcagctac

SEQ ID NO: 836 - DNA, 304 bp, Oryza sativa
cttgccatgatcaaagattcaaaggtagcttcagtattcaagtaactgttttgctatcatccatccgttaggcatcccctagctaaaaccacccaaccaattagtacaaactcactctaaattacatcctcttgtggcggcatcctaactagtctctacaagctggccatgtcagatggcctaacgggagaggagttccattcttctctctcaccctctctccttaactcctgaatacttggatagagcggggctttgtgttgatcgcaagagttgggttctgggcgatcccgaccgtgttttc

SEQ ID NO: 837 - DNA, 355 bp, Oryza sativa
  unsure (1)..(355): unsure at all n locations
aaagttggaccgcaagcactgacttgaactaatattgttgttcttcaataattcctgcgcttagatattaataaacagataataaacagtctccaatcaagatagattgtatatgagcatatactaaatatactacaaactatcatagaaagattgggagtaaaacactaacaagtacgagctcagttcaaattaaaccactagacatttacttgctataatatattctcattccaccatctgcatcacggtggagttctgggtgatctcgggctgaacaaactatgtgtggagtcgggncataaaactaatgctangtcgtggcgttgataaaatttgaaaatatgtgattact

SEQ ID NO: 838 - DNA, 476 bp, Oryza sativa
  unsure (1)..(476): unsure at all n locations
agctttcattggtcattccatcactatcatcctcaccatctgtattgatagacaagggacgaatggaaggccaaatttccactgatctcacattagaataatgtaaactaacacactcacgagatgcaaccttcgctgctaaattatgtagcaggtcatgaataatatagcatggatgcccatcggtttcatcttttttgaaaaatccatggctgaccaaatcatttaaattgttcaaagctatatcatcatttgttttattctgatattcagaatgtaaaatatctagtcctatccaaaagcaagtaagttcttttgtgtcaaacttgtaatcttcaggaaacaaagcacaatagataaaacattgttgcagatgaaaaggtagataatcataactaagctgcaatgcacgcataatgtcatgattgctggtttccatttcccattctctactttctanggactctgtccaatga

SEQ ID NO: 839 - DNA, 348 bp, Oryza sativa
tcacgcagtacgtgttggcgcttttctggccagctggattatcatttcttcaacacagacactgaaagaacgattactaccttgctagtgacatgcatggcacgccaccttaattatatttctttccatggagctcggaccaactgcttgatgaaaccaaacacgagagctaatatgagtttcttatcattgctagaagtcgaaatcaaatcacgaggtccccaaacagtaggccattaatcttagctagtactagtagctactccctccgtcccataatattacaacctcgaatgggatgtgatgttttatagtacaatgaatctggacatttatctgtctagattc

SEQ ID NO: 840 - DNA, 414 bp, Oryza sativa
  unsure (1)..(414): unsure at all n locations
gctgacttaacgcttcattatctgtcctttcgtgtaaaccttatgcatttagatggatttctttattttcgaacgttatcttgtattaatgcttcttacatgctatttggtctaaactacttcattctgctttttacatccttgagtttcaatttagtactttntgtttgatttcttcaattacaaagcttctcttttttgatattatctttggactttaaatcattattgtagctctgaaatctttatttcttgatatatcctttttggagtttccaattttttcggttatcatcgttcgtcttccttaagtgtgtttgaactttgctgtctagtttatgaaaacaaaatattctttcgcattgtagccgactgctttatttngtccagacgttaatctcgatcctataattg

SEQ ID NO: 841 - DNA, 412 bp, Oryza sativa
  unsure (1)..(412): unsure at all n locations
actcaagcttattatctgccagngaaatagactgaagaaactttatgtttcttaagacacacggatgcatgcaacaacaccattgctatgaaaatccaaaactgtcactgaccagaggttccctaaccaagacagaatggtgcctcctatgctgctgcttgcccaaccaaggtaactaagagatgactgcctctccaatggcggaattctccctgtctagtagtgcgaataggccggaatagcggtcaatgccgataggcttccgatcgattcacggatggagcctgacaactgattagagctgacgcttagcatggtgatgctgccaattttgcctatctgtgatgggatctgtcctgtcacgttgttgaattctaagacgagctgtttgatacttacaatgctgccaatg

SEQ ID NO: 842 - DNA, 303 bp, Oryza sativa
actcagcttatggttttttttaaacgagctcgcgcgtttggcatcttttttcaactggccatccactttgctcctattttacaggtaactggagatggaacaaagccatacactctttctgggaaaatcttttttaatgcttccaattcccccttcccatttgggtcaaggaacaaagcttctgaattttcttcatgggtcagggcagcaaagaataccatggatgatggagtttcgttgtatcacaattacaatgcggggaaactgtccacctcttttctgttggtttgaaacaaagaccac

SEQ ID NO: 843 - DNA, 456 bp, Oryza sativa
  unsure (1)..(456): unsure at all n locations
agcttgtatatgggatggacaattaacttcgtatcatcatgcaatttattaattntctaaagaatttagagggcactttgataatgaaatttaagccaaaatatgcgaaccacaaacaagcttcatttaacctgtaaaaatcatcttccattaaatgctatgtttgtagccacgtggtttccctatcttacacgtaggacgctgaagacataaggctgacttggatggctagtgtctaatagagacagctatgtttgattgtgaaaagcataagaagtaagtagtgatgagatgtttgtactcgcacttcaagctatttatgaagatagccagactcaaatagaccaatagacgaagaaccgaagatagccagactcaaatagaccaatagacgatgaaccaattgagacagtagagcatggtaaagtcaaataacatagaattaaattaatggat

SEQ ID NO: 844 - DNA, 379 bp, Oryza sativa
  unsure (1)..(379): unsure at all n locations
tcggatataccactcctatagtaacaaaatccaatagggtcttctctgtcctgagtcctcccgactccttagggcatgtacaatacaagccataagtaacagtggtcttaagataccacgtaggatagaaccacataaaggtcacacaacccacagtggtaatcactccaaaacatattttgcatttcagctcctatctatttatatgttagcccttgtgttgtatgttattatcaaacctattaaaactttatattttagaccctataacaaccaaaagaaatacatatgcaccccaaaaaaccataagaacccactgtcagcctcttccacccctcttccaccctatttctttnttactctcccccttctctctccc

SEQ ID NO: 845 - DNA, 394 bp, Oryza sativa
  unsure (1)..(394): unsure at all n locations
tcacanacaccgaaagaacgacggctaccttgctagtgacatgcatggcacaccaccttaattatatttctttccatggagctcggaccaactgcttgatgaaaccaaacacgagagctaatatgagtttcttatcattgctagacatcgatatcaaatcacgaggtccccaaacagtaggccattaatcttagctagtactagtagctactccctccgtcccataatattacaacctcgaattggatgtgatgctttatagtacaatgaatctggacatttatctcgctagattcgttgtacgatgaaatgtcccatccagttcaaggatctaatattatgggacggagagagtagttggcactctagatgattaataataataatgagttca

SEQ ID NO: 846 - DNA, 391 bp, Oryza sativa
  unsure (1)..(391): unsure at all n locations
ttcctttccggtgcgaagtccttgcccagctataaagctcaaacagatgattattacgtgagtgcaacctaagctaaagtgctattattcaatatgcttatttagcaagattaatagaagatggattccaaacgaataaaccacaagaccgaacttggtttttttgtcttgattctcgatgggaaggttggagatacacctcaatggcttttggtaaaaaaaaaaggattttggttcgtagtataatttgggacacaaggactgttatataaattccattgaaaataagcttaatagtcgaggccgaaatatttatcataagggcattttccctttccttacgaagtccttgctagctataaagctcanaacagatgaatattacttgagt

SEQ ID NO: 847 - DNA, 440 bp, Oryza sativa
  unsure (1)..(440): unsure at all n locations
tgagaagaacgtaataaatgacggctttatttatcacaggttatctaaattctgcgtaattacgtagaggacaatgtaaaatatgttactgctaaaagacaccacaaaaataatgtaattggttgtatgacaccggaagcattattttataatatttaagacaagcgtggagaacaaatgataaatttgcctctgccggctctttctccacctagccacggngcaaggaggccggtgcaagcgcatgtgcgcactgacatggagaggcggcggtggcgagtggcgattatgaagaaaaggttggcggctcgagaagtccggaggtgggcgaagatggagctttcgatgctcaccacgaacaattgactcgctgatgggatgccaatggaactgctaacttgcggaagtgcccgctgtgcttaggagtccgatcgacccta

SEQ ID NO: 848 - DNA, 455 bp, Oryza sativa
  unsure (1)..(455): unsure at all n locations
agcttctaatccangccaggagagatccgctcatactacactgaccctatgaccccggagtccatctaggatctacttcgctcaacaccttaatatgtggattntgtacgccactatgcttctataagtggagcttgcatgttgtatgagggcgaaagcgtatccaggccctaaaacagtctgggtcactgggcacttcttaccgtacttctttgagatatatgaatgctaaagtacctaggacgaggtctaggagccaatcaacctatttgctttatccctagttgctttatcctaagtaccccacctatnttaaggatggtttaagcatgccatttatctcaattgtgagttaataactaatttactggggaaatggngtaccctagttcccatttcaccaacaaacaccattcgaggaatggtgagaaaagaagttaaatctctcatacttg

SEQ ID NO: 849 - DNA, 387 bp, Oryza sativa
  unsure (1)..(387): unsure at all n locations
aaactaagctgagctaattatagagctctattgactaatngatacttgtattaggtagagaaaganaagaagtgaagaattccggagttgcggaatcctcttctattctttgattttattaattaatttgtttaatagaaatatcattttgagtaataagacttacttcggagattattcttgttagttcctaaaagcgtgcgggtcacagcctatttttatacaaggtattaggatacttttatatcaatggttgattttaatattttgcattactttgtattaattaatttggacaattaaacctatcgaaatcaacatcattattggcctattgacctaggatacttcatatatcaatactaatattatctgataaatattttg

SEQ ID NO: 850 - DNA, 382 bp, Oryza sativa
tataagaccagacagcacagcatgacatcagagataatacatcacatactcagaagataagagtacctgcgaagcataagttcgctggaatgggcttttgtcggcattaagctgaagcaatacacatatgtcagatcaattcaggctaaaccaccatacaacagaactagaaaggcatggcatgacccaatagcagtctccagtaccctgtgcccataggttttaggtatcattggtagcaactataaattaagttcgccttagattccttactattattcacatgatacgactgccatgaaagggattccatataaaaatgtgtcaaaccaccatctcatatatttaatgtattcgaaatgtatcattgtgacataaacta

SEQ ID NO: 851 - DNA, 460 bp, Oryza sativa
agcttgaatcaagagcaccttgctctgatactaattgaacacgcatattatttctatagggcgggtgaataggctggccctgaaaacttaaaaacaaatcgcggcggtaaaattcaaacagacccggaacttcctggtaaggaactccggaacttccggcctcccaggcccggaactaggaggattaatgcactttcaagatagactaaaatttgcattttgcggtgaacaaagatgtactaattattaattattagacagggcaataccatctatccatttgctcgccatacggccaatcggggatatgctctgcaccatcgtgacactctcgctccttctgtccagtacacacagaaaaacaaaaaaaaaaatcagaaaaatgaggattgcagtcaagagagatgaagaaagaccaaaaagctagaatagtaaacaggtcacaaccgatggaaatatg

SEQ ID NO: 852 - DNA, 333 bp, Oryza sativa
acgactcacagggtgaacaactgggaaaacagtagtcttcgagcccccgtacgtacacgttcgtatattcatacaaacctgtgttattgcactaggtatattgaaggagatctcatacagcgatggctgcctaatgttcatgccaagccaagcagatggaaacgatgatattatagaagtcaacgggcgatattgctccacaaagggatgagtacactagacacaggatcattgcattgcatagacctggctgctagaaaataatgttgaagaattggcgcactcttttcgccaagatatagagcgacagatctattcacgtgtggcatgtcc

SEQ ID NO: 853 - DNA, 447 bp, Oryza sativa
  unsure (1)..(447): unsure at all n locations
tatgattatatctgatntaaaaatgagtaatcatagggttttgttatatttcatagtagggtaccatcaatttttattgacctacttttcgttttcggcactactacaattaatcttaaagagttaccaattgacattttgaatatttggcaggaaggcgcaagaagaatcctgatggaaagatgagatagtgatatagatgggaagacggtgatagtgaaatgttgcaacgtactacacgttatgatgtgctgtttgccaatttggtttacaaaattttcgatttatgtaaatgaacaaaaacatggtacacgacacggcatgcacccttttcgcggttgtaattctcaccgagaaaacagtgaattttagtaaaaacagttactggtagtttagtaaaaatgtcgcaattggccatgggatcaataaacggcagtggaataaaag

SEQ ID NO: 854 - DNA, 462 bp, Oryza sativa
  unsure (1)..(462): unsure at all n locations
agcttgccaaggtgtcaaagaatttgacaatatatcagtttttattgacanaatttggnagactgatacactataagaaacgtttatgggtctttccgactagctttacaaggtggtgggttntggagctagccggtctggattcgaagcctcgcttattctatttanttgatattaggttatttcttaataattgcggnctctgatacactaatacactatgagtatatgactaacaaacaaacaggtacatatgccacttagcaatcctcaagccaaaaccgagtgctaaaggttaaacacacacatacacaaacaaaaaaataataattcggtagctcacacaagtaggcccgtgaacaccagatctgacagatatacttgcataaaacataacatgcatgttcncagatatcccttnntgtttcgtagtctacgatcgatntgtaactcttggaaagt

SEQ ID NO: 855 - DNA, 459 bp, Oryza sativa
  unsure (1)..(459): unsure at all n locations
tactcaagctgggattggaagagacctctctgctgctgtgcttggccgccgtttctatangtcaatgaattttactttggttaacttggtttatgtccttaaaaagttaaaactgctgcctgttttatataattacaattgaacataaaacaacgtatttcagttgccttttgctttacttgtttaattaaatcattgtgttaaacttattacttaccatgggttaactcaagtactccttttccttactgtagctttacccttcaaagtgcattgcattcattatcatatttgagcatgttttatgttgtcaaggacattctgcattggcggcattgctaatctacacatgttccctactgttaaactgtcatgattcatgactgtaaatgatcaattacttcaagctgcatgcacatgcctatacatgatttaagtgtgagtcttattcagtcgatt

SEQ ID NO: 856 - DNA, 464 bp, Oryza sativa
  unsure (1)..(464): unsure at all n locations
tcctccgagacacctgcaggctgcaagcgtcatgatcctgacatagcgaatacacaaagaacattgttcttatttcanccaagattaatcaagataaaataaagagactgatgctgctcgaggtttaagaactcaccttcttgggagtgacgaaggagaggaacttgctcttggtcttctccttgtccttgggtgacgacgacggcgacgacttgttcttcttgccgacgctggctgaggcgcctgcgccagcgccggcgaggccatgcttcctgagctgctccctgacgaacctgttgtatatgaacgcagctcccctgaagttgggcagcgccagccacgcgatgaacagcagcttcagctcgtaccagatcggtatcctgatcgaacaaaatcatagtacttttatgaatgagttctttcttgaataatccatatctgctcgatcaagatcaagatgagat

SEQ ID NO: 857 - DNA, 111 bp, Oryza sativa
atacttgtggtaattgctctggcgccttttagatccatctgctggaggcaatacccttaagttgtctgtcatggtgagagactctctgataggcattccccaagatctatt

SEQ ID NO: 858 - DNA, 344 bp, Oryza sativa
  unsure (1)..(344): unsure at all n locations
agctgattgattgattactttaaactcccggacatgtttattaattcttacacctgacacttgtacaatttgaaacatattgtggcggcttccgagaatcaaatatgccagtgaaataataagagtggctgatggacaacttctgctctgaagtaaagacgaaaataaagactcctatacctgactccatgatcgatagatcgctctatcttgacatannaactgtccgattttgagccttgtattcgagcagcctccgactctgtggatagttgggaaacaactgaacatagagtcgagaactgtagcttggcgtcgagactcattgcttaagtatgttacat

SEQ ID NO: 859 - DNA, 395 bp, Oryza sativa
  unsure (1)..(395): unsure at all n locations
cctctgcaacttccacagccgtgacagaagatggcgtgtagcntgcgctcccactctggaagtgagctatgacgcatcgtgtttacaccgaccaccatgttagtcgtacctatgtcagaatttaagtgaagaacgacttgtgagtagttgactgaacaaacacatgcctgcacactatgcgggaccaccgtgactcataggtatctccatgtactatgtactccagggcacggtgcacgaccatggagatccacgcgttagaagtacttatacttaatatatgtaccatgaatagtatttaaatgatagtatatttatcaagagagttcacggttgactaaaccaatcaggaagctgctcattcattacgtcgattcctcacatgaataataact

SEQ ID NO: 860 - DNA, 398 bp, Oryza sativa
  unsure (1)..(398): unsure at all n locations
atgcagcctaattagcaggacagactcatcttatgttgtctccccangaanccttagatgcatatgcatgcattcgaggactaatcatagcattctgctcataagctcgataacgctgccacaaaatccgtcgctgacagatcatctgatgcaaccaataacccacattaatcgcggcgactccgctcagatcgatcgatcgatcgctgcacccaccgtgatggccaccacaccatccgtcgacgtctcctagctccacaccttcccctagaccaccgccaccggcaccgtgcggtcggccatgcacggcgatcgggcggatcgaccatgccgacgccaccaaccaaatgcatcccggacatatctctgtcgcctcctcagacacccaagctccatca

SEQ ID NO: 861 - DNA, 474 bp, Oryza sativa
  unsure (1)..(474): unsure at all n locations
agctngnaccctgctctggagatctgtgagcttattcttcatatgccgngncngcaacaagattatagttaaattctcttcaacatttctgaaacatatgtgagaaacagttaacaaaatacccttgtggatctaatgtgcctcaaggatgaatcaagttgtttctcaagctgctctagctcttttatgccaagtgtcccaagatcttcaccaagaatattcctgttattgtcaacagagagatctactaagttaggctgtatttacttccacactaaaattgaaagtttgaagacactggaacgatgtgaacaaaatagttggaagtttgtgtgtgtatgataattcgatgtgacgaaaaagttaaaagtttgaaataaaagttggaatctaaacggggccttagttcttgatattttacactgtgagtgatgcatgcatctaattctctaagcaacttcagtatatactact

SEQ ID NO: 862 - DNA, 424 bp, Oryza sativa
  unsure (1)..(424): unsure at all n locations
cttatgaaacatcacacagatagggagtttttttttgttggngctcagatcaaacattactccatggttaagagaattggagactgtatatatccccagctcctgtagtatgagagctttcatgttgtcttgtacacctgtctgtgggtttctttatgcgtctgtactctttatggtgatggtactgtttgtgtgttcttaaaaagaacctgaacttggcattacctgatggtcccatgcggtgatggcactgtttgtgtgttcttaaagagaacctgaatttgggattggctgatggtcccttgcggtgatgcgactgtttgcgtgttctcaaagagaacctgaatttgggattaattgatggtccgttctctgagctaatatatgtgcttgctctatgcaccgccggatgttttgaagattt

SEQ ID NO: 863 - DNA, 158 bp, Oryza sativa
  unsure (1)..(158): unsure at all n locations
cacaattcttgtcggaaagacaaggtttggccgcactatgaaccttctccggctcgtatgacatcgatgttctgttctccgctaccgcgggaggatccttcgacaccggatcgtncggtgttataaccacggcgttctcgtttcgggcattgatggac

SEQ ID NO: 864 - DNA, 392 bp, Oryza sativa
  unsure (1)..(392): unsure at all n locations
tctgcaacactctatgaacgtaaggaaattntataacattgtgcgtgctaattggaatttacatgggtccattgacaacaaatatttgagtgagatctcccaaatttcttgaaattctcatgaagttttgctattttttaaggctcaattccatattaatttcatatttctttgttcctattgagaaaatctcagaaaactcaatatgtacagtagtacaaactttggcttgggttgtagttttacatgtgagttaatccgttttgcagaagttcatccttaattagtatatagaggtgctgatgtgtacaaaaaatattaatccttttacggtgccctttgctttntatttttctttcccaaagtgtcatccaacaatctagctatgattg

SEQ ID NO: 865 - DNA, 418 bp, Oryza sativa
  unsure (1)..(418): unsure at all n locations
atcttaagcacctcagctgcagcngcttagttttgtgttgaatttctgaaatgcctatcttcagacatatttgaagttgccaatactaatgctttcgcccggtgcaaattatataatattttcagaagattgccaacttgtttgaaggattacatttgtcacaccgtactattaggatttggatccctccaaagtttcttctctgatttctgttggcagactgtcacaagtacacaacttacataccactagttaagtgtgtaacaagaagtacaagacaagctcattctttgtagcataagacaactctaggtctaggcaataatatctcataaaaaatggtaccaatttaacctcatgttgagaaaattcttttgcagaaaaatagaagaccatgtgttcatattacttcatgttg

SEQ ID NO: 866 - DNA, 369 bp, Oryza sativa
tcggctaaaatggttatgtcaccagattagatttttttttattaaccacaacggacagagaatcggcactctcaaccgttgtatatcaatggaattgtcaatgggaagccaatgtccaaaatgatggttgatggaggaactgctatcaatttaatgccatatgctacattaaaaaaattgggtagaaatccagatgatcttatcaaaactaacatggttctcaaggattttggttgccatccatcggaaactaagggagttttgaatgtggagctgacagtcggcagtaaaactgttcctataacatttttggtcatcaatgggaagggtttctatagcctgctgctcagaagggattggattcatgct

SEQ ID NO: 867 - DNA, 447 bp, Oryza sativa
  unsure (1)..(447): unsure at all n locations
tagctaggttaagagtcgagtgagctgctctggggagatataaatcatatggtaaattctactttagtctccacaattattcttttgttctttccattgtagttaatatgcgtcaaaatcataaaagggtcgcaatgtttcacccccacgttccttagttntttatctgttcctcctatgtaatctctctgtataattagtttggcatatatatcaggaagaagctgtatgcttttaccggttggaaatctaaaaggacgtcaagttagcgcttttaggatgtttcatgatcgcagcatcaatcctaactntatagtacgaaaaanaaaaccttttaaataaatcaaaggggaaacagctcaatatctagctctatactcacccctaatttttcacatggcanaagagctggaatgcttgaaaatcttcgatctacgtcacattcta

SEQ ID NO: 868 - DNA, 280 bp, Oryza sativa
  unsure (1)..(280): unsure at all n locations
acaaccacccgagaccacaaatgacagactggagaccgcccaaatgtaacgaataacaatcgtaccggggtgcggacgcctccatctgtgagctgatccatgagcttcacccctaaccgccctgtatatttcacatgatgggcacttagaaaaactgatntcgcaaacagatcgacaaatgcactagtccaccgggtcgcgctattgccggtaattatacgctagctaaaacataatatgccctattatgcaccatatgtgtgcagactagtccacaata

SEQ ID NO: 869 - DNA, 430 bp, Oryza sativa
  unsure (1)..(430): unsure at all n locations
tggtttggggtccggctatgtcggcgacgataccaaacagaagtattatccgtatccgnaccaaacaccaacactgcgaattatatatatatatatatatatatatatatatatatatatatatagatatatcttcctctacatgtacacgacgtacacttggatactgcaggtagattagattagatgatcggccggccatggccaccttccgggaccacctcgccgtcatcgccgaggcgctctgcgcgatcgccgccgacatgaatgcggncgcccgcgccctcgacccctccaccgtgatcaggctcgcctgcgccgccttcaccagtcgcatcgtgctcgtctgatacgccgacatctgcggccgtctcgtcacgctgcactcgcagacgcagacaccggcgggggatgacgatgacaataatgc

SEQ ID NO: 870 - DNA, 468 bp, Oryza sativa
agaacactcaagcttacctaacctagagacaggcctccacccttggcatacatttctcttttcctatgccagccaagccaaaaccaccctccctgccttacccgccgctaacaatccccaaccacaaagcacgtacgcacgcccttgcatcattctcctcctgccttaatccgtaagagagagaccgtcacaaccacaaccagacccaacctgtcgcccccattttttatgtcctcttttcaccgtcagacaaggtgatcgagagaggggcagcatcgccatttccaacccattttcaagcgccggccgtcgctgtctgtcgacgacgagaacgcgtacgccgcccgcctcctcctcgataaataaaagggactcacgctctgctcgcctcgcctcgcctcgctaacccagttccaaaagcaaagcgaacctaagctcgcttcgtatctctctcggattcgatcatgg

SEQ ID NO: 871 - DNA, 430 bp, Oryza sativa
tggtatcgctctgtataaacctgaaggattccgttctgcagaccagatcacgtatttaggtctctaaacatgacggcacttctttgtccttctacaaaggacgagcacaacataccctagatcactatgagttgcgaacatttaagtttaaattaccaaacatgtgtcatcgatgacataattggcatgcaatttaaatatgtagaagcacaaagattactactggtaacgtacataggtgctctgatattaagtcacaaatcaggaactgacattgcctatattgcacagcttgaagattttcaatccaattctgccagaactctattcccgatgcttaagaatgttgataaatatccaagtgtgtagcataacacacagcatgaagtgtacaggtacattctgcgtggtacgttatacaatacaacac

SEQ ID NO: 872 - DNA, 451 bp, Oryza sativa
  unsure (1)..(451): unsure at all n locations
actcagcttctgatgctgcatccgcttggtgaacgcatgcgactgatgtttagcgcatgcctacctggaagagctatagcatctcccactttggggagcaaggaccacctgaatatagaatataacactctatagtatggacgcaacccatgtgtagtccccaaacaatccttgggagcatccttctcatacatganagtggcgctggtcactgataaagcatcctcctcaaagatatgtggacgacttaggtcatcatcatctagctccaaagctgcagcaaactgtgccatagaggtcttgtactgctgcccctgaatggtccacttcacaaaatgaagtcccttcctggtagtgccgaagaaagcgatggagtagaattgaccaattacttcctcattccatgaatactgcaaggccaacagatctgccacatgcttgtgcacacaca

SEQ ID NO: 873 - DNA, 286 bp, Oryza sativa
ttaaagatacacgaatcttccttgacctcctacattgaacccactgggtggccctggatgttgcagctcccatatataggatgaagtggagatatgactatttgaagatgccatccccacgatccgcggaggcaggaacccatgtcttgtatatctacaaaacctcgccactggcttacgggagaccagcatgctatctacctggagacattaatcttagtttctttcaacaaacaagtttttacctgtccaccagctggatgatctgtatctctgcctgtcactt

SEQ ID NO: 874 - DNA, 492 bp, Oryza sativa
cggacctctaagcactgagctgcagcttgaaaaattcaactttctgggtattaatccttaagggtcatcctatagtcaaacatatgctctgataccagttctgtcgggtcccaaaactaatgacttggatccgaccatgattaatgtatcaagccctggattactaaataattcatacatataatacagctggttcttcattgcataggtaaagcttacaatacttgggattacaaagctgattgtctaactaattatacatagggttactattatacagcggaagtctaataaagtttgactaggaaggaacaaactctgagggttttctaaattatcgaagtcatcatagtagtagtcataatggtcctcctcttgacccacatctaaaaaagggtgaaattgagcaaggatgagtattcacaatactcagcaagtgttggtatttcttacgatcacagataataatcgcaagcacggatataccgatgt

SEQ ID NO: 875 - DNA, 424 bp, Oryza sativa
  unsure (1)..(424): unsure at all n locations
tggcgttggnggcgatccgcgtggactccaatttgttcttcttctcgcctgtcacctgcagatctggatcatgtccttctgtgtgttgcttcacttgccttgtaaaatattggatgatgcgtttggtgcgtggggaatgagatgcaccctcctcgtctttatcctcgggacctgccatggtttaaaaaagaaggacaacaaaacaatagaggatgtaatataagccctacaactattgggatgtagcttttgcaaaatgctcactcgcagcctatctcacaagctcttaacagttcttatcttgcacacaggaggggacggtaacacacaagttagcaaccgtggaacgaggtgtattagtgctgtagcaacaagacctgtcaagctgtantcgggttcgtggtggagctgtcggtgggctgaa

SEQ ID NO: 876 - DNA, 339 bp, Oryza sativa
gcttggtgatgaactcgatctcgttcctcttgacatccttcacgaccatgatcttggcctttgcgagataatggatcgacacatcggtgactgaatcacgcacgatgcttttctggatgagcaggacgttgcatccggatgccttgatcttcttcaccatgccaaggatgtaattccgctcctcgcggaggattcgatccatctgctcgtaatccgacacgacgacgctgtgctcgatgatcgtcttgtgaggcgagacctgtaactggatcaccgcgatcttggcgtcctcgatccgatttggccctccagcgacatggctggccttcttgttgatga

SEQ ID NO: 877 - DNA, 441 bp, Oryza sativa
  unsure (1)..(441): unsure at all n locations
tgatcacaacattatatttattcaaaagaattaaatagttttaagtcctgtcccattgattntaaatggtacaaaattacttccttttgtgactagagggagtagtagtacaactcaatacaacaatctgatcaacaatggcgcattatcgatccgcggagtaagtacaacttaaaaaaagaacttcttttaaaaccaagttatcaactntctaatatttaattaatttacttatatttactctcgaataatggttaatcacaaaaactcattttcattcatcatccataactctgttgagaatgcatataggtgtgccatcctacaagcgcttcaaaagcaatattatntgcccagagctcagtgggtctatatcaatgcctgaactacctttcagaatcacggngggtaattaattaaaccagtacactataaaagatc

SEQ ID NO: 878 - DNA, 455 bp, Oryza sativa
  unsure (1)..(455): unsure at all n locations
agctnggaaaactatcagatttgcttatcgctttgttataactaagaggacccattcctgcttctctcggcaacttatctgcattatcacgcctggatttgagcacaaacctgttggatggatctgtcccagcaacagttggcagcatgaactctttgacatactttgttattttcgaaaatagcttacaaggggatctcaaattcttgtctgctctttccaactgtaggaagctttctgtccttgaaatcgactcanattgattcaccggaaacctnccagactatgtgggcaatctatcaagcacgctgcaagcattcatcgcacgtcgaaacaatatatccggtgtccttccatctacagnttggaacttaactagtctcaagtatctagatcttagtgataaccaactgcacagtacaatatcagaatcaatcatgggatttgagatacta

SEQ ID NO: 879 - DNA, 443 bp, Oryza sativa
tcgggcgcgctcctacgtcatccgcccgtcgcccatgactctgagtctccagcaaaacgttggctggacgatgtggccaaattgatcatgactgcacggcagcgcctagatgctggtgggcggtcctccgccaccaaggcctctggtgctgctaccaccggctccgcgtcgtcaagacgaagggcgcggcgagcggcagctgccgttcgccattcggccgccactccttcgtcgactccttcgacccgggaagatctgcatggggggccggacgcccgcgccagcatcgagcaccggcgtaatgaccgacgtgctgcccacgcaacggagggcgcttcctcgtccagagtgtcacctcgacacggacgtggggaccagccctccgtgcccctagttggtggtgtcggctgtagagcttttgtggcgagtcttcggaatgtccg

SEQ ID NO: 880 - DNA, 435 bp, Oryza sativa
agcttctcgtgcttgccttattaagaaccctgtttgtcctaccccgccccggcgttcccaactattggcatgcgaggtttccctgaaccgtctagttacttatccagggtgttccattccaccttgtggttgcactttgattatgttcgatgagtttcccacaggaatcggtccttatatgcgaatacgggacagtgccacatatgcacaacccccgcatcgcgagttttcacaattcattttattttcaaacacaccgacaccacatgtcgggttttgaaggcttcacaaaccccatttccaagttttcgacaaacaacggtgtatgtgggatatttggtatacgcgctcatagagcacgaataccgacgtaccacaagggtggagcgacaaggaatcacggtagtacgacctaccgaaattagtgtgactact

SEQ ID NO: 881 - DNA, 453 bp, Oryza sativa
  unsure (1)..(453): unsure at all n locations
tcanacctgccgcattagcaaaagctcggntataaccattattnttctaagaggataaagctacagctcactgcaatttcttctcagattgctactacaggaagcaaataaaaatcaggtccccatgcaccgattattggccggctaatgcagcatgatgcagaccaaatagactccttggaaaattctctggtcaatcttggctggctagaaggctgtgccgtgcgagaggatatctaacgtatccgaatcacctcgttggaatcgtgtccggtggtggaggacagcatgaataaaagctccgtcctgtatgccaagtcttggcatttaactgttgtatacatttgtgaacgctgtaaaatctgaataaaggtcaagaacagtagtgtcgaattttacctctttcagacctacactgcctgttcttgttttggtttgtttcaagcatgggtc

SEQ ID NO: 882 - DNA, 447 bp, Oryza sativa
tgatacaggcatgtttaaaaggtacatatgatgtatcatttttttataccaccaagaataaagctacatatacaaaacatcattttccaatggatctgagataacaatgtcttaaattaaaaacaggacccaatcctatatatctataaagctcatccccactaaatgtaattaatactaattctctcttctctcatgaagccacatcatcttaattgtttttagcccttggatgattcatcaagggtgcaaattgcatctcttctccctaaaagccacaccatataactcaaccatttataacttttgaataattgatcgaggtacaaaatatacaagcacatgaaagaaaatcatatagtaaataagatattttttctacaactcatatgtaactgatttatcacacaattctcccgcacaacgcacggagacccatctagtaat

SEQ ID NO: 883 - DNA, 429 bp, Oryza sativa
  unsure (1)..(429): unsure at all n locations
agcttaccaaccgctacgcgggtcgtcttctttcttaagacaagatggctatacatcagctctgggggtcgaactttttagctataagctgtcaaagtgcttgcggcgtacttgtgcatgtgctcgagcgcttcgaccctcttcgctcctagagaacataacccttgaggagttagccnctagctctgctggggtcattgcctcatcgccataataaagcataaacgggctaaacttggttggtcttgtgggggtcgtccgaagggcccagagaaccgatagcaattcctctggccatttgcctttcactgccccctcgagtcttttctttagtgcttctaagatcttgccatttgtacgttcgaccggcccattngactgcgggtgcgtgactgacgcgaacctgattacaggtaagcccttccacat

SEQ ID NO: 884 - DNA, 445 bp, Oryza sativa
  unsure (1)..(445): unsure at all n locations
ntatttcanaatgaagcaatcaattaatcagttaacgagtcaactccaggagtcattatcttcatcctcgctctagagcaggcaactccaacattttgagcgacaactctggccctcagctgatgccacggtctactccaggtttctcaagtatcaagtccaggatttaatcaacatgtctgagagttcagagttatcaaccaatcaattcagatttgatgaattggacaatagcgtctactttcctccaaggccaaaatcgttgtcacgagctcaccactgtcgtgccgtcgttgtcgtcgtcgaggtcagctgtcattgtcgccgagggggctcggccgcggctgcattgctcgccgtgccgtcgccacaccgtcgtcgagccatgataaataaaataaagtaggaaaggtaaaaggtggcgatgcaccgacatgtattgatc

SEQ ID NO: 885 - DNA, 424 bp, Oryza sativa
  unsure (1)..(424): unsure at all n locations
gcttcacanatgagaagttcacataccacataggccagatttatgagaagtgtcttgaagcactttcttggttggatgacaatcatccatacatttggagtagaagcaagttctctaacgagtgccaggtagattacatcaataataatctttctgaatgtttcaatagttgggtctcaagaaccaaggatcgacggattgtggacatgtatgatgcaataagatagatgatcataaccaagtttgttgcaagaaacaactttgctggtaagatggagggaagaatcattccagctattacaaagtctttgaatgctcatagcaagaatattcaggaccatgaaggattgatatgtggagctgggacagctgaagtaactgtgggcaccattatgcatgccgtacatttggagcaacaacatgt

SEQ ID NO: 886 - DNA, 440 bp, Oryza sativa
  unsure (1)..(440): unsure at all n locations
tctttgaaggatcatgtgtttacattaatgacatgctattaacgatatgtaaattgctacttgaattctgataaaacttataatgcaatggtgacatcgtttgacatcctgattcttttattgactatattccaggttctgttggacttcattcggcaaattaacgatgataatgggtatatatgcctgcgtattttcttttatcaaacataatttcgcacatagtaccatgtatactagatttgtggtttacggagtaatcagcaatggcatgaatacgtgatttgtttttcaattgaaatttctattcagacctatggaagagcatagagaacgttatgggccagcactctacactcttaccaaactggtgcttgccatncgactgtatctacacgtgtcattagcacgatatgggcagacgaaaatgcgagaacttc

SEQ ID NO: 887 - DNA, 479 bp, Oryza sativa
  unsure (1)..(479): unsure at all n locations
agcttgcaccactntggctgcaccacgtgcctgaaagttanggttggcaactgttgcaagatcatatgaacgtttctgaattgaacaaacagcataaccacacgacaagtaacgataaccatcctgcctctttgaaccagcaataccaccaccagcagttatcttcagtaaagcacctctactgtaaacatcaggaaccacaaaagatggaagaggaaagcaatccatagaaacaaacgtatcatgcactgcaagcaccatgtatcgcagtacctcagctataacagaagaaatatgtgccctcttggggttatcaacaacagggccatcactcagacgtctaaccaatatttccacaaacatgcgcacatatgtttgtgagagagtgatgatgtcaatcataccaagtgccacaggcataagaagctctaaagcttcaactggcactctctcctgagtaaagggtagaagcatatcac

SEQ ID NO: 888 - DNA, 437 bp, Oryza sativa
  unsure (1)..(437): unsure at all n locations
taatatgcagtaaacaatctagaattacaattattttgggacggatgtagtattcaactattgtatgaattgactattacattgactatagatgaattgaagttagtagtgagatatactattaaacttgctcttagggagaatctgaatggttgagtttcagctagtgataatcttacggctctctttcatttacaagaaaaacataaaaagcttggaaaattataaccctatagaaaaaggggttgttcatttgtgctacttgtgactgtgttacatctgtagcaacaatactcacaataaaaataaataaactatggtttgtgctgcccaagctagcacaaacaatcggaaacaaacgatttcctttngaattttcatggaacgaagaatcatataaagatttagaggaaagttagcanatgttctaatctctt

SEQ ID NO: 889 - DNA, 470 bp, Oryza sativa
  unsure (1)..(470): unsure at all n locations
agcttgcctanaagcgaataacacattagcattgtaatttcattcttacatnanaaaacattggcatgttcttttttcttttttcaatttgctctgttattgaagcaattacatcactttacagggaaatagctgatctacagaatgaattaagtaatatacatagctcaaatagagagggccatcctaatgtggatgaggtatgcgcattctactgaactgatctatgctcttatcttctacaagctataccaatcatatatggccacttgttgtggaagtggagaagacaataagctgactaaatgggtntcatcttgaggccgacattctcatcagctttgaaccagtatgattctcatgcacctgaaaagaaggatcagtggattcaagagggtttcatgataaacacggatgacatatctaacctgcagctggagttggacataactgttacaatactggctgaa

SEQ ID NO: 890 - DNA, 430 bp, Oryza sativa
  unsure (1)..(430): unsure at all n locations
tcatcaatccaattctgaaggttgaccagaacaagcacattattgttgtaaaaaggtatatgccagtataaaggctgtctgtttcagtgggagaaacagagaatggttaggatgtccatcgatgagtgcaatggttatggttactttttgctaaacatagagatgtgcaacattagcaattgctgtgtcatactttcttcccacactagaccaaattgttaatatagcatgacagattaatttgtgttgagttctaatcagtgaagtgtatgcttgaatagtttatatactactatcaacaaaagtatgggctgaatgatgattangtgtgagttctgactataataagacgtgaagtggatagcatcagatttattctggtcctttatacatgctagctctgattgaagattcaaggaatagttaccta

SEQ ID NO: 891 - DNA, 391 bp, Oryza sativa
  unsure (1)..(391): unsure at all n locations
cggacacttaaaactcagcctgggtatgagttgcaacgggtcgacttggggttaaaggtttacgcgnnnactgccaaggagagagaaacaatttagcgttaagatgaacgtataagcaatatacgcagcacgtatttctttctggactcccaagtgccaaccaattgtgaggcaatcangaatggcatggaatgcaacttctatgatgccttcttctcttnttttaaaaaaaaaggcgctttttccatgaactcttctttatagtatagcatgctgtaattgaatgcagtatgaagcacaaaattacatagtttcatgcgactcatgcagtggttaacattctactaaacgccaggaagaagtacaagcttactataatcaaaaagttaag

SEQ ID NO: 892 - DNA, 439 bp, Oryza sativa
  unsure (1)..(439): unsure at all n locations
agcttgtcagaatagtttgaagtgtcttgactactctgatcaagcctcatgattcaagagttccaagctatcaatacatcaagcagattgatggacaaattatagcaccgtatataatatagcccgataaaaatatttccaattctttctaattcaataggcagctagcattgtactttgactccttgtggctcttcattgattcattcatggatagagggaagacacgtcgcattctttggaagtgagtagcacataacagaggcacactngtatggttgtatgtttcttccaagctgctcaaagactacgagatcaaataatgcaacaatgctaatcagaattcacaacgaaatntgaccatatacgtgcactttgcctattgtatccttatctcgttttcgaaaagtaatcctatcacacaattcataatttgggt

SEQ ID NO: 893 - DNA, 156 bp, Oryza sativa
  unsure (1)..(156): unsure at all n locations
tagagggatggcctangaggcaacaatttgacgatgtgtttctgacaacggcggttggtgaggtggcggtgacgccattagagccgcgaggtcagcaccgggttgtgggctgatgatatcgatgagggcacagtaaggcaaataggaggggaagga

SEQ ID NO: 894 - DNA, 441 bp, Oryza sativa
  unsure (1)..(441): unsure at all n locations
agcttgaagatgaatagtacacggagaggctctttagactctcggctgggcttctacttccaaggactgattaaaggagggacacaaagcacactttgggaaagagagggaaaggactgcangctgagaggagactgggccgagagtgagaggacttttcctaattcggcccgaaaaggaaaaggtgaatcttaattactcttccaattaaattaatcactgaaatgatctttgaattgttaaaaatacttatattgctcaaataatttcaagaaaaatcttgaaaatacttggaccctcagagtatttaaaaaaagtataatcagaccatttaatgattaatttaatatgtggataattactgaaattgtctttgtatgattaaaattaagaatcgagctctgaaaagatcgagaaaatttccgagagtataactaacca

SEQ ID NO: 895 - DNA, 454 bp, Oryza sativa
  unsure (1)..(454): unsure at all n locations
taagccgaaggtgctcaaggtatgctgctagagttattgtttctactagctcatctggagatttggcatctatttcatggagcctatctctaatagggaccacctgcgattattccaggcggtctatttatggggtccgcctatgaagctccatcttcgcaggcgcccattttttgccacctgcaaaattcattcacggcaacaccatttaccgcctataaaaatctggccgactatatagtcttcttcctccccgagctcctgttcatactcgatgattatctctctcttaaaggcaccaaaatataggggggaggttttgaacttcaaatcttcgagggattnttctactgtagttagatctatgcctttgcactctatatacatannattttttgtaatttaaacccccatttgactatggatctacgtatgcaaaatagtgaggggaaaa

SEQ ID NO: 896 - DNA, 424 bp, Oryza sativa
  unsure (1)..(424): unsure at all n locations
atgcatattgtatttaanaanaacgaactgctccagctgctgccgcggatgatgaatcttccaagctgccctgaatgtcttctgaaccaggaggagcacatgattccttctctcaagcttaggtctcaaaaaaagaatcccaagctagcaagcggcgactgcagccactgaaagtggccaatgcattttgaacacacaccgaactcgtttatgccatcgcacttcgtaaatgtgttacaacgtaatcttatgggacataagtaaaagctctcgtacccgacctntggacttagttgatcactctcaacacaatgtaaattttgtcatgcacgaactctcttctggacgggtctcttgctgaaattctgtcatgcaccgattctactagtactgtatacaagactactgtggagcaataggcatg

SEQ ID NO: 897 - DNA, 205 bp, Oryza sativa
  unsure (1)..(205): unsure at all n locations
atcttaagcgcctgagctgcagctacgacaatgttgattttttatgttttcccgatggtncataagagagctgaacatcacgcagtcaatggcttcctttgccgagagaatggcaccaccatcatgctaggatgtggctgtaatcaccgtgacattttgcttgcttagagcatatgccagacgcttaactagcttacccaaccaa

SEQ ID NO: 898 - DNA, 405 bp, Oryza sativa
  unsure (1)..(405): unsure at all n locations
cagcttggcacaaaataacctctcaggccttattcctgattctattggcaaccttgcccaactaaccgagtttcatctagatgggaacaactttaatgggagcatacctctcaacttatggcggtggagacaattagagaagcttgatttgtcccacaattcattcggtgaaagcctgccaagtgaggtcttcaacatttcttccctgtcacanagtntggacttgtcccacaatttgtttactgggcccataccactagaaattggcaacctcataaatcttggaagcatcagtatttcaaacaatcgcttgaccggggaaataccgttcactctatggaattgcgtgcttttggaataccttcacatggaagggaaccttcttactggaagcattccacaatc

SEQ ID NO: 899 - DNA, 448 bp, Oryza sativa
ctcagcttgaaaatcataaaaaatatctccgtactcaaaagtttatacagtcaggttatcaaatcacagttcaccaccgttcataggtttgaaccagcagtttgttacatattaatattttattactttggcatatcttttctcatattgtggagagaaatagcaaaaggattaatataaaaaattaggaacttactttattcaattgttgtacaaaaaacaaagaaagaaaagaaccaatacatgtgttgggatgttcactacctagcacttgcttctgatatagcaatgaaagacatgcattgtggttacataacactgatggtcttatgagagtaggttccagctgctagtagttaaggggacacagttacatttaaaggaatatgggcacgtggaaagagagaatttgaaaattgaggcaggggattgctgaggcacccattct

SEQ ID NO: 900 - DNA, 474 bp, Oryza sativa
  unsure (1)..(474): unsure at all n locations
agcttcttccaaagcatacggctntctagatgtatatgacgatctctagacagatggatcttatatgaatcgtatgatgaagtaccacatgagtggatatataggaaaggaatccaaatctgccgaatcgctcatgttatgatcttctacatcctaggtctccgcgttccgtcatctggcttatgttcttcatgtagcattcagatcgaatgactctatgaaattacgtcgatacttctacatattatgggtaacgtaggagacatccctattttcccccgggggtcttaattaccactgcttagctttcaattcgcctctgaccatcaaattaaatgtgaataacccgtcctcctctctttgaaacaaggggcgcttccggttctgtgcgtgcttcaaacaatnttgtcttctccatattaccatatctctagagtcaantaatttctatgaagaactactgaactcaatcac

SEQ ID NO: 901 - DNA, 432 bp, Oryza sativa
gtaatcctaatgtgggagggtttggtcatggggatgcagaaatagtgcttcatgatccattacgcgttcaaggccttttgttcttcttcgcatccgttattttggcacaagtttttttggttctcaaaaagaaacagtttgaaaaggttcaattgtacgaaatgaatttctatgtcccgggatttcttaccatcaagttggtaaatagccgcgaattattggcgattgctagaattctctatgatccattttggaaatcttttttttgtttagactatattttgtttgcgagatgtcttgtctgcaattccttatttctatcatctcatgcataacgaggagaatgcaatgcaatggcgagaacaataaaatgaacaaatccttttaggaaggattgctggtcttcttaatactctattgtgcacaagaaaa

SEQ ID NO: 902 - DNA, 396 bp, Oryza sativa
tttctctaccgatccgggatataaatgtttctcttctccgcattactccacagcactgagatatgtgcccgccaccccgtacctctgataatggtctaaaatcattgaagccacttgcgacgacgtgtgctcaataaggaaaacttggcgtgaataatattcaacaccatagcagcatcttcattacatacttaccatgcgcgactactcgcttctatatattgactcaattaaccagtctggttaaaaatagcgaccaactcagtcgcatatatagcgactaccctaactaagcaacaataaggaatacactatgactcgttctacaagtaaaaatccgcacgtcgatattgctgaaataatgcattcttccttccgatattccttaaccaatat

SEQ ID NO: 903 - DNA, 337 bp, Oryza sativa
aacataataggttcatcattggctcatggcaaaacaattaaggaacctctctcagacatctgctgcttgtcaacatctttcatgagcctgaggtgtatgtatatcgtatttagctccactggtttgcctgaaaggaatgaattgagcatgtaaagagtatgctgcaaaatgcttcggccttgagtttatgtatgaaatgatttttgtagtcatggagaaggcatgatgcatacccgtaggtggcacattcaacactttctcatacttcttcatatggtgcatcatggcacaatgtaaagggggaggggggaaatgtggtgtgtcacaccctggattt

SEQ ID NO: 904 - DNA, 388 bp, Oryza sativa
  unsure (1)..(388): unsure at all n locations
agctntgcactcagtccagtcctctcctatggttatctcatcaccccatatccagagggtatgaccagacggttggagaaaaggttcctactggatcatggtaccaatccaagtccttctaatgcatccctaccctccacttctacactcgctcgctgtccaaagagatgcggcaaattgagcttcgattatccctttggcataagacaaggttgtttccgccatgtcgatttcaatctcacatgcgacatggccactcagcctcctaaactcttcctgaacaatggatcgacagaagttcttggtgatattggggtagatggtctgaatatctattntatccacttcaacttaattccgatcacctccacccatgtcatccctataa

SEQ ID NO: 905 - DNA, 423 bp, Oryza sativa
actcagcttattccactgctcttaagatcctcgaccggtttcgttgctgcattcgtggaccttgtggaagcaagaaggagcagactttgtgggtagtaaacgcctggtcttggggttagagtaagcaatcttcgtgtcctccgactgctgcataattccatctgttcgagcggcagcatatgctgctctgcgaagcgttgttggtttttcatggggcatctgctgctgttgcttgtggggcaatgattgcttctgttgctgttggggcagtgattgcttccgttgttggggttgtgcttgctgctgtttttgtggatacaattgctgctataacaatatcaaaagaagaattcaacacgaaaaactttagtgaaaacaccaaataaaaataacaagtgttaatgacaaacaaaacctacgtga

SEQ ID NO: 906 - DNA, 462 bp, Oryza sativa
tcacatgatcagtactaatatcaggaaatatatatatgttattatgaaccaacttgagatcagttataattaagtttgggtagccaacggcattaacgtattgtccacgttccttcttctattttactcactacttcccaaaatataacaaatttggatggatgtaacgtatcttattactattaatatggacatgtctgtctagatttatagtactaaaatatactctctccatccctaaatatttaacgccgttgattttttaaacatgtttgaccgttcgtcttattaaaaacttttgtaaatattattcaaaaagtgagtagtatttaactataaatcaaatgatagaaaaataattaataattatgttaattgtttaaataagacgaaccgttaaatatgtttaatatagtcaacaacgtcacatatgtacggatggagagagtatttcatcaatct

SEQ ID NO: 907 - DNA, 438 bp, Oryza sativa
  unsure (1)..(438): unsure at all n locations
gcttatcgatcgtgttatcaagcatgttactgttttcctttgtgcaatggtaaattggaagtgcggtttaacttttcttggtaactttgttcattagttcgttccagacatttgtttaaaattcacttttcttctttcagatttgcaagatatatccaagccgtgaagacagctctgtccttcagcggcaagagaggtcaagaagaacatttaacattttgaaagacccagctttgccggcaagaagaacaaactcgtccaaagagctgttgcatcatcaaaatgcaagaggcgtaagtcttctactctaaaaactntacctactaccagcagcaagctactaagcacgcccactttcatctagttgtngagaaacgtgttagtcatgcatggcttaccatgagatgtgcatgtgtcaaatgtaaatattggtgcatg

SEQ ID NO: 908 - DNA, 377 bp, Oryza sativa
atttctgaaccgaaccgaactgtgctctctatctgttgctaagctatctaaaaactaaaaagatgggagaaagaaagaggattattctgaatgagctagctagacagatggctttaattaaaaagggatgggggatgcatgcacgggatcggagagaggatccatctgccggcggcggcgatggaggacgatgaattctaccgccaagctagctatggatccattccatcttcctgacggtgagttatgtttttcacatgcgaagcgctcctcgcctctgcttttcttcttttctttctttctccttccgcatgcatatactgctatggtgttgttagcattctgctccgtggtcgcatcgtctgattgcctttctt

SEQ ID NO: 909 - DNA, 469 bp, Oryza sativa
  unsure (1)..(469): unsure at all n locations
agcttactgtgccccgtcatctcnctataactatgaaatcaagngaagcggccggctagctatgatatctacgtgcaggtgcatatgcatcacatatatgcaacaatataatcggattgggaactctaaaagcaagcgttatacttggagagcaagaacgtagagcatgctgctatcatgctactccgtgatcccctctttatatactatataagaccttggcctttggtttgttttaagtcgcactttttaaagttgatcaacttaatttatagaatgaatgtagcaccgacatttcttaaaaaaacaaataggctgtaaaaaaatcatggtggtgatgaaactaattctatgttgtagatttcgattttttcttataaaccttatgtactctaagaagtctaactcagaataaactcaaaatatctattcttgctccatttacaatgtaaggtaacatttccacatt

SEQ ID NO: 910 - DNA, 415 bp, Oryza sativa
tgctgacagcgaacttcaattgacttatgctgcgctttgtttctttcaaatagtactaattactaaacatatgtggaagcttgcgaaaccctgtgtatactttgtaatgttcatgttttatttggcggaaaatatgcacatcagttcatgacatgcatgatatcatgatggaagacatggagaaaaatgagaacgcatatggtcagcatgcggtgaaagtgcaagaattacaaagagagtaaatgcttcaagcttgagattgcagacatatagaagttttctcttaaaaaaggttcataaagcaaccatttccagcaaaggattgctcctactggtgcagaccatgacttaataagatgaaataaaacatgaacttcctagtcctaatctatgtgaacctataatctcgcattat

SEQ ID NO: 911 - DNA, 338 bp, Oryza sativa
agcttccttttcccagacttgagtcttctagctcaggcaatgtttctacactgaatgctcctagcagcccagcacatagcaatggacataagaccgttgcgagtcggtcactcttgggaagtaccaatgtttttgatgcacgaaaaggcactcctaaagctgacaatagaccactttctcaactgaaagcagcaaagtatagtatctctaccatattgcataaattatgagattgaactattaactgtgtttttctaaacatattgcataagaagtgactgaaatcatctatatgaatgtagaattactaaagcaggcaccataagttcaaagtctga

SEQ ID NO: 912 - DNA, 322 bp, Oryza sativa
tattacacgttgctcctggagtttcatattgacattcgagctacatcatgttactcccaaggtcattcggcttcggaagaaatatctggatgccgcgaaacgttagatgatgaaaaacaaaccaatggattgaagcttcagtgacacttatcgaagttctgtgagtgctgctacattagtctataataatccaaaaggcgcagatgcatcctatttatgtataagttggcggatagctctttcaagtgctgacagcgttcctcaccatgacccaacatgaaaattttattcaaccgcgggatgattacgattcacggcatgc

SEQ ID NO: 913 - DNA, 421 bp, Oryza sativa
  unsure (1)..(421): unsure at all n locations
agcttctccaggttggagtggatctgtggatgaccaaacacaaagaanagcagcagcagcagcagcagcgacaagaaatttaaagaaagttggtattaatcggacagattccttggattaaaggcattcctttccaactgatgtgaaaatgtgagaagccattagcagagacttcaatgttcaccaacttttgattggcagctagatgggcccccacagacctgcttggcatgctgtcgatcgcggagtatttaagtaaacacgtggtaattaaaaatangtcacttgcagactatcatacataagctcttatgtatttgaaatgtgggtctactaataaattcttaactaccacttataaaaatgaaataatagtaaatatctcgtcgatcactcgcaacgacatgggttgctttcacat

SEQ ID NO: 914 - DNA, 403 bp, Oryza sativa
tgaaatactccaggatcgcttgaatacccaacgccgtactgatgttctggatccatcttctgttagtcattgcctcggccaccgtgcgtcgattccggagatgggcagggattgcagcatatacagccggcgctagcaaccgaatggatgaaccctgctgccatcaatcctcccagaacagctccgaattcccatcccctaccaagcataccatagaaatcgatactagattgcgctccttctgcgagaccagaatactaatcccttgccacggcttttccggtgaagttctctgctgccagagccatcgcgacctcaaggcgattcccaacctctctagatcatgaatccccaaaccaccatactccttgggcgagcaaactcgagcccatgcgacccgaca

SEQ ID NO: 915 - DNA, 451 bp, Oryza sativa
tgcacttatcaccaaaccgcacccacatccatactacatacattggctgtacaactgtgtgtaggtgaaggtaacaaaactggtgcacattaattctgcaattggaaattaccatgatgttgttgaatgtgatgttgtgcccatgcaagcatgtaatattctgctaggtagaccatggcaatttgatagggattctatgcatcatggtatgtccaaccagtactcttttctgtaccatgataagaaaattgtgttgcatcccatgtcttctgaagatatttcgcgtgatgatgttgctaaggctgccaaatccaaatgtgagagtgataaataagcccaatctgatggctagaaacctgagacaatcaatgtgaaacccaaatgcttacttgctactaaatctgatattactgagttgattgcatcaccttcatttgcctatgctttggta

SEQ ID NO: 916 - DNA, 272 bp, Oryza sativa
agatgtggccaatggttttgtgttatacaaatagtggtttgctcaagatattcccacttaatacatgtatttacatatactctttgcatttggatatattctgcgttaacataagattacattattaatgaatcacctaaatagtcaaaactaatattttacaccccaaactatcccagtattaatgcattaagtattaaaatgaggaaaaatatgttgggctagaatagagtaactggcacagtgacattatcgaaagatgtacgagacat

SEQ ID NO: 917 - DNA, 441 bp, Oryza sativa
  unsure (1)..(441): unsure at all n locations
gcttatatcttttagcgcatattattgacaatttcattcgctttatcttaaatactacattccaatgcccctctaaagtaaataaattataggaaataggccaaaacgacctgcttgtaattcttaaaattaaaagcagactttcacgaaccatatagtatataggatactcatgctagctactcctgcaaaatggaaagttttcaatgtcatctgagttccaggctctccaatactttgagccccaattgccccaattgatgctccggcttcaattttcttcaagtggtaacgagataaacatgtgtccaagaaaacctgagccatatggagaaaaggaataccattacagaatgacgacacaaggataaaatgcataagcaaaccaattaaaataatacttgaaatcagtttaacatttactgcagaantatagcatga

SEQ ID NO: 918 - DNA, 432 bp, Oryza sativa
  unsure (1)..(432): unsure at all n locations
taagctattcatactcattctcacccaatgccgtgctcggcctgtgttttggtctagtgccaaatggttccttctctgttgtgatacatattgttagccaaagcacgaagcatcatagaaggtcttaaaagtaatcttgcgtacgaagcctatgtgtttatntaatccaagcaaattttgattagctcaatggcaatgaccaagaacaagttatgtctcagatgctagcgcctgcctaacaacaaacgggtctcgacaggatgtgagcttggtggctaaccatctcgaacatggctagtgggagaggacaagcaatgcctatcagttataatatcaagctacacatgacttgaattggntagtgaacacattattcccgtcctatatatgccaaatatgtactatgtgtgattatgtgcatgaatatactca

SEQ ID NO: 919 - DNA, 363 bp, Oryza sativa
  unsure (1)..(363): unsure at all n locations
gcttgcttcctaaatcatttcgcaatcaccatcttatttcaactcacaagggtacaaaaataaatagtgggtgatgctgatataggattgcttaagtatggataacaatggctacataaataaagtattttttggattatatcagcctgaacttttttcactaatttccctgtcaaagagaaaaagcatgacttcattttcctctttagttttcttttctttgataaaagcaactccagctttctgattggatagctgctaagcctcacatccaaaactgtggcccaatggtcccaacatagcttccttcttcattattngttattgggaaaatatgtggcatgacatgtaaaaatatttact

SEQ ID NO: 920 - DNA, 364 bp, Oryza sativa
atataactggaataacaaaaaagacttgtgttatatttacaaccctgagagttgactttgtaaaaaaatttatttcggaataattttacatctactcgtactcgtacaagacatccagtgggctttactcaatcaagttcatggagttatggacaggagattcgctaagcaaacaattttatcaggtatatatgttgtacaattagcacggaagcattcctatctatttcatttaaaactaataatattgttgtcaattacacaggaagacatatacagctacaggagaaaacttgcagcaatcttgtacatgtctccgtcaaacaagcttcgaaacaatatctgttctacctcaaacggacat

SEQ ID NO: 921 - DNA, 265 bp, Oryza sativa
  unsure (1)..(265): unsure at all n locations
ggaagaggagaggagagccatgaacttttctgagcgggaagggtccatcgatttaaataaaaccgatggtcatatgctttnttttttctcaaaaattntaagatttttctataatttataagatgtgaaatgtgtagatatagaggtgttgtaatggacatctaatacatgatgatatgatataggttatcaatttttatataacgttacattgcctgttaattgtcacataaaggatatggatttaggcctaataatatattta

SEQ ID NO: 922 - DNA, 425 bp, Oryza sativa
  unsure (1)..(425): unsure at all n locations
gcttaaagtctcatacccgcaagatctacgatttcttatatgcaatccaatgatccatagtctgccaagctacacgctatctattcccctcttcacatcactttcagcattgcatacatatatgatgggaaatgagaaagtggagttacaaatagatttcaaccgattccagcagcatatccaaattacagattcatcagggaaaaaaaaaggattcgagggcctgtcttgctcacaatttccatcataggagcaacttcttctggcacagcatacatcataccctcttcactccatgtttgtcatcctcaccgggctttctgttcatccaccgtggtaaaacatacctctgatctttcactnttcanacaaatattgttcatgagaacaagaaatgcatattcacactgcctgatataagtgca

SEQ ID NO: 923 - DNA, 367 bp, Oryza sativa
gatctgcctgtacttctcatggacgcagcggaagatcttctcttagctctctcctcgtcgtaagtgtcgtcgccgtactgcaccattttctgcaagagagtgttgagacggatagcaaagtcatcaacatcctcacctggcttgaatgccaagttctcccactccttgcggagtgcctgcagtgtggacttgcgggcgcggtcgctgtctatgcgtgccgtattgatggcgttccatgcctccttggcagtccgcttctgggaaagcgagaactgcatctcgggcgggactgcatcgatgatggcatccagtgcctgccgatcctcgtcgtagtcgacgtcgccgtaccggactggcttccacatgt

SEQ ID NO: 924 - DNA, 430 bp, Oryza sativa
  unsure (1)..(430): unsure at all n locations
agcttggttactttatttacttacctttttattctgattntctaactntattcaaattaatccaaaaacttgtgctattaattggataaaggtcttaactccctcctttcacttgtctttagatgccgcgttacaagcctgagtacctgtttggtgttgagggttttgtccaggagttgcgtaagatgtcctttgtcattggatttgggactgcccctttttatgcccagattcgtcatgatcgtcatgaagagaggtgccgtgtcaaagtcaccttaaacagcaatagtgaagatattccatcagtgatgttcgaagctggaggaagaaattatattcatgcatgtcaggaagtggcaaggatcgccatatgagagctccgtgatcgctacagtgatcaggttgccgacactgaatatcgctaccattc

SEQ ID NO: 925 - DNA, 436 bp, Oryza sativa
  unsure (1)..(436): unsure at all n locations
ttatgaaatatattctttaaaaatgtctttgtttccatgtgtattntactccataactttccagttaaaactcaatctacagtcaagaaaaaaaattgtatgtgcagaccataggcttgtttaaaatgctctcataaaataaatgctttccgtttcacttaaaaaagagagcggagcatgttatagtattctcataatatgaactatagagatcctactctataacttcacgcaaaacctatctagctttttagttaaatttaggggttggagtaataacaaacattgcccaagtttggatttcaatatttgtgaagcaactttcgtgttactaattttatacagcgatatatgtcatagcgatatgcatttgaaaatgatttgtctagacacgtttttttcccctcccgtctttacaagtgggaatagttacttc

SEQ ID NO: 926 - DNA, 340 bp, Oryza sativa
  unsure (1)..(340): unsure at all n locations
gcttcactgagagagaatgagacactgtttttcaatatttactttgtataactaatgtttgtgcttttgttatttngagtgcaggttccaagggtgccgcagtatgacgaagggagcaatgtggaagtcatgttggatacaggaaagcaccgtgcagcctgtgtaactgctactgtcattaagatggttagcagtaaaaactatgttgttaggcttaaaaataaggaaggctcagttaacatcgtagattactgctatattcgaccacaacctacctttgacagaaagaagtttgagtatgaactggagccctctgcagaaggtgaagtgaatctgggtg

SEQ ID NO: 927 - DNA, 344 bp, Oryza sativa
cttacttatatagagaaccttacattcatattatattagcatatatataatatcatcagtgggggattgagaaccccgcgaccctatacagccatctatccgaactctctggcttgctatagtatagcaagcatgtgcattgttccactggcatttgatgatgttgacggttatctatctaccgcgtgctctgtctatgtaggaaaaattcacaagtccgcacaattatatctgcaccttacgattaatcaatgagggtggatgatatatatagtacaactttagctaaccggaggtgttgtatagactattatgatattttatctgatatatgggcaaagata

SEQ ID NO: 928 - DNA, 466 bp, Oryza sativa
  unsure (1)..(466): unsure at all n locations
agctgacccatataaaaagattcttatgctttgttaaaattcaaaagttttcaaactgtatgaataaaaaatggatctttntttgcgcgttgctgaatgttccttttcatctttctgtttgtaggttggcatgtacacatgctataaaaggtgccactattgactgtacattacaagctgtacacgaatatgctggagatgaacatatggaggagtgatagaccatcatctgttggttgccgattgcatgtcatggatggttctatgattgcctattactctctagaataaatcagtttcaatcatgcgatcttctggctatagctgataagtcatgtgctttgtgaagtaaagcttgtaaaaatttgagaanactctacgccatctttttttaaaaaaaaataatataattgcttcacaattcttgtggattgcacagtaaaagaaaagatacaatcgtgatctc

SEQ ID NO: 929 - DNA, 368 bp, Oryza sativa
tactaagcttccatatggtggacatcaagtctaccgatgtggatccagtctatgtgattccaataaccatggacatgctaacatcagaacagaagcaagggtttgaagggatgataaatcaactgcaaaatcggtacttacattcatttgttctgactcgttcgggtacagtaattcaaagacacaatgtggatttgccaccggttgatgagaagcctgagtcaagctctgctaatgatgataaacttaaggaagtcaaagctgaatgactcaaacgggaggatgatggtgctccagagttcaacaatctacaagatcgatcagtgtggtcgtgacactgaaaattttgatttaaaatttgattccat

SEQ ID NO: 930 - DNA, 361 bp, Oryza sativa
ccaacaagatgactgtaattggctggtggtgtgtacaagtattacctatgcgtgggccaacaataagctaggttttagatatgtttgaaaaagcttttaacgaactggacatgcctccaaaacaaagcgtctgtgaatcactgtggacaccttattatctatccacttttttgtgctgtttggtacaagcattcttcatgaaattcaccgatgccatttctttttgcagagaacattcggttcacaagttaaatgcggaaagcacaatctctgctactgacaaagcatatgctggtagtgaaatactgaatgtggaagagattagccttgtgaattcacaattcctactatgactaccaac

SEQ ID NO: 931 - DNA, 398 bp, Oryza sativa
tcacactcatggtggagctcgtcaaattctccacattgtatgttcacttgaacgcggtgaaccctcccacttgcttgaaaatgtcaatcctcgtcacgttcttcccggcaagcataacgtcgaacaccctctgcccagctgagccgatgccagcatcgatctccgcgaaatgcaaccagaccatgtatgacatcctggtgtcgaccggcatgaggtactcgatctcgttggaggcatcgccgccggtggtgatcgccgacgtgtatagcttggtggggaagtaattgggcggctggttgctgccgaaaatcttcctcccaccggccgtaatggcgtcgtaattgaggtcattgttccggatatcgatgtcggactgccagacccgggagaatgcgtca

SEQ ID NO: 932 - DNA, 348 bp, Oryza sativa
ttgcgtagctggtatatggagtacctacttctctgggcagcagcagcagctagcgcgcaccgccgcgttcgacgagtgtacgtataatactactggggcatgcatcagctgcagcgatctgtttctctgtcaaccttaacatgtaccacctccttctaaaataagtgcaaccgtgaaaatctgtgtccaacgtttgaccgtccgttttatttaaaataatttatataaaaatttaaaaaattagtcacacataaagtattattcatggtttatcatctaataacaataaaaataataatcataattttttttaaataagaccaacagtcaaacgttggagatgaatag

SEQ ID NO: 933 - DNA, 427 bp, Oryza sativa
tatacggtcaccggcgctacccgagagctatatgtgtttttatctcatcctacatatatcttatatatcactctgccatgtatatcgttaagcgctgcaaactctgtaagattgtcgatataaaattcctgattctaaactcacgtcaccattgttggcttttatctcccccctaacctacctaagatttgtgatataaaattccccaattggccgttgagatgaaaaggaaacttgtgagccatatgatgcttggtgcggctttatatgttgcatatgggttacgtatttataggttgggtgaatgaattactggcgatggttaatgcacagacattaccaaaatcattgaccattaatccggttgaaggacaggttacaatgaaccaatacaatcgtattatacgaggataggatattcaacatt

SEQ ID NO: 934 - DNA, 427 bp, Oryza sativa
  unsure (1)..(427): unsure at all n locations
gcttttatcaaggactttngtcaaaaccaatttatgatatcagtgaggatggtttcccaatcattcagtatgctgatgacactctgatcttgttaaaagtatctcagaaagaagtcttctgtttcaaggctattttaaatatgtttgctcaatccacaggcctcaaggtaaactataataaatcaagcctgtatccacttaatatgtctcaagacaaagctatcttattatctggcgtcttgggatataaaatcggntctcttccattcacttatttggggctacctttatgaaccaccaggcctagagtgggtgatttgctacattggtagacagggttgaaaggaggctgacggcaagctcaattttttaccgcaggaggaagataacttgatcactcagcctgtccttatccaacctatacatg

SEQ ID NO: 935 - DNA, 409 bp, Oryza sativa
agcttatcgggccaaaagcgcttggttgaagatcctagtatcacgaaagcccagaccccctctttgcttcgacttggctatggaattccaagatttccaatgcgtcttgcttttgcccccaactgctccccaccaaaagttcctaatggcctttgtcagctcatcgcacactgcatcagggattttaaaaatacacatgacgtaaaccggtatggtttgaagaacagcttttataagcacttcctttccacccgatgacagatggttttcgccccacagcagaattcgtttccaaaccttctcttgtaaactctggaaatgccctttcttcattctacccttcggtgtcggaaaccccaggtatctgtcatcgaaaccattatcaccaactttgcaaatcgatctgata

SEQ ID NO: 936 - DNA, 355 bp, Oryza sativa
tctgatgcatcccaagcctacggtttcagataaaatatattggtgaattggtgatgtacatgtggttcatctgtgaagagcttcattgatgatccttcataactcttccttatcctttcattgtgtgctcgagagcagatacgtgcaaaactaataatatgggcacaattgagccatgaccaattcaattatatggacaggacaaagtatgatgataccttggcattggaaactgtaatgctgaagaatcgaggcctcgagggagcaaagtgttcgtctgatccttttgatcgataagtgtaggttcacctttttatagtgctgctaattgctcaagattataatttggtttaca

SEQ ID NO: 937 - DNA, 378 bp, Oryza sativa
  unsure (1)..(378): unsure at all n locations
gctgcctccatctcctccctcttcggcattgttactctacagccgcctgacctcaagtgatgatggtacttcttcctggcggcattttctttgtttctttccatcatcgcctgctcttgttgacctgtcttatatgtaacgaactcgtcccagtgatcccttagctttgggaatgtgtcgaatttcggtgtctgccccttcaagatatatttctggtacagatctcccttgaagctctgaaactgttctgccattntctttagagtccaccttttcactttgtcctctttacccgcgggaagggtgaatgtctcgagcattgtggtccacaacatctctttctccgaatctangagaaagctctcatgatctccgcgt

SEQ ID NO: 938 - DNA, 369 bp, Oryza sativa
  unsure (1)..(369): unsure at all n locations
atggcaattacatgtggtgtcctctgagtcaatgatgtgtgcgccaagatggcaaatcatcataacagaaatctaaagagtggaaaattatcaaatctcaccagaacctaagcagtaagggggggaaaacaccaaaaaccttaccgtctaaataacaccatcacctcaatttaataacataacgtagaagttattcatgccaccatgaagctgacatttcaggtttagtggtcagcaccaacatatcaggtttagagcttagtgctgcttgaaacaaanaagaatgaataaaggacaaaagggaataactcatatattggtggactattgcaaatactgttaacaaacatttttcaaaatgtaagtgca

SEQ ID NO: 939 - DNA, 413 bp, Oryza sativa
  unsure (1)..(413): unsure at all n locations
gacactataaaactaagcttaaattggtaacatgaactggcagctgaacttacctcttaaaatataagcagagttcataaactagaagcaaactgttctgacaatctgccccttgactggttcaatcagaaattcctagcctgattgcctgaattcacaatctgaactgctacagaagcatgaacaaaatttcgaaaatcccaagttcatagcctgcaaaatcatgctgttntgaacttttgctaagctgggtgatgaactgatgatagaagaaggtgcttacaggtacgtgagctggccgatctggccgatgctgctgctcaatgttccctgcatgctgacgcttgacagcctcctgcaaaaaccagagacatccatggcacgatttcagatgaaggcccatcacatgatat

SEQ ID NO: 940 - DNA, 378 bp, Oryza sativa
  unsure (1)..(378): unsure at all n locations
catgcagcttatgagcttgtatagcctatactgtttctaatcttcgnatgcaccaatgcgaaagtgctccggtttctcccacagccactggatgacacacattgtgaaacaatacgcggtgcatacttttgtaaagtaagaacttctccaaattggaaccaccaagcacctgccaaattatgaacaaatgtgccatttgattaaattaccagcagcactacaaatcaatattgattgaacagaaagaagagacacttggtatgtacttattatggtgaaaacaagtaactttgagcttccatattgctccataattacagatacaagtaatctggtagacgaaaaaagtacatctggcttcatattgctccacttata

SEQ ID NO: 941 - DNA, 410 bp, Oryza sativa
acttgtactttatacggacggaaattagttatgttaaatagtgaactcaccagttcctgatatacgacagcatcacttttgttctcaaatgtgacagagaccgccgggttgaccttaccccttgcccgcgcccagttgcgagctctttgttcaaggatgtctgaaaacggggcaaggacattcgctgctgcagcggctgcatcttcttgggcccatattgcctccttgtcgatgtaccctgcggtgcccagccgatgcgggtgctcattccgctgttgcagtacgcgatgtgcctcgctggattacctaaactcttgggtggtcttgagagagcagaattcctcccacaccgcttcgtgtatttgagggtatgcatcgaacggcgtatgattgcccggcggggtacatac

SEQ ID NO: 942 - DNA, 334 bp, Oryza sativa
  unsure (1)..(334): unsure at all n locations
agcttgatgcaaganacacctgtcgctcttgtatccgtaagttccaaaacttgacagctcagtatgtcatgcgctgtcgcgctcttgtggagtatcctaatagcccagcctggtttaacgacaatcgtgttgcttttatgtggtcgatgcagttgagcagttccagttcgtacaactactattcatcatgcacccgagagatcgattagaatccatcttgtgcatattgttgcttgtctctctggtgagttttgcgagacttgcatcgctcagtctccaagtaactttaaccgatggagatccatggtgcctgatgagaaaaagaaaagggtcg

SEQ ID NO: 943 - DNA, 404 bp, Oryza sativa
  unsure (1)..(404): unsure at all n locations
caacttgcaagctacagttagtggggtccgttgtgtttatcaagataatgtgttcaaggtttgcagatatcttcttttgccctgtattttgtgcggtatttcttcagctaatagtaatgctgtattggctccacgtgtgtgatcaaccacatccgttgcatgtcaagaatatggtgaaaaatgtgcttgatggaaagtttgatgaagcttgctctgctctgaagcaattatatgatttgggctactctcccactgacataatcactactctcttccgggttatcaagaactacgacatggctgaatatctgaagctggaattgttgaaggtaaccttacaagctatcaaggtgcaacctatgcaaaccaattatcgttctttctacagtngaataaaatatcat

SEQ ID NO: 944 - DNA, 349 bp, Oryza sativa
  unsure (1)..(349): unsure at all n locations
agcnttgattgctatatactcacatgcctgctgcaggagccccttctcatgcaccactcctcctgcagaaaccaacaaatcgaattcagtcaaaaactcaaaaccttgcccattgcaaagcaaaaggaaaggggaaaaaaaggggctcttccaagcgagggatcagacttcagagaagagagtaacacgcaccccagttctgcagcctccggttcttgagtgacttccacttgggcgctggcgcctggtaaatctgcatccccccgcgagcaccagacgcatcaaaaccacaagatcacagagacacacacaaaatataaaaagcaagcaatccggggaggaatacatg

SEQ ID NO: 945 - DNA, 352 bp, Oryza sativa
tcatgtcagtatctcctgtgagcaacatcttccggcttcaatattcataaaggatatctctgtattcctttaggttaaagaattcagaaatgtagtatgtcgcccacgcgtgggcgactcggggggaaacctatcaccgccgctgccactctctcctcctctccctcccctcgcagctaccggagaaccgagcggccagctgggacggcggcggcaatgccaaacgtcgacggcgctatgtgcatggaatgcgggccggcgcgcggagcatatgttgaatacacggcgtggatgcggcagattcatcgccgccgcggctggatccggccctcccatgggtggatctggatct

SEQ ID NO: 946 - DNA, 303 bp, Oryza sativa
  unsure (1)..(303): unsure at all n locations
gcttaacagtcagaacagaanaccctataatttcgtgggtttgatgagagcaaattccactgcattatataatacatcggaattggggggcatgtgttaacaacggaattttgcatcagacttggagaagaaagagaaagatcgaggtggatttggtgtggaattgagttgaattcaaagtcggactgtgcatcggctggcatcgtatcggctggaaacagggcaggggcttgacttatccgatatggcaagtagtcgatacaatatgacttgggctcggtttgggcctaaattggaataacc

SEQ ID NO: 947 - DNA, 392 bp, Oryza sativa
tgatttcttttgttgcatactcctccggtggtacaagttgttttgtggatagtggtggcaccaatcatatgactggagagaggattatgtttacaagtcttgatgaggagaacgaaactcgtgagaatattgtgtgtggagatgatggtaaaggaaaggtaattggtctatgtaaaattgccatctcgaataatcaatctctctctaatgttcttcttgtcaattcattaagctacaatttattatccgtttctcaattatgtaagttgggttacaattgcttgtttactgatgaggatgtgaccgtctttataagggatgactcctccgtagcattcaaaggcaagttaaagggtgatctctatcttgtcgatttcgatgtggatagagtg

SEQ ID NO: 948 - DNA, 306 bp, Oryza sativa
agcttcatcatgcactactgattggtgggtggctatgatttttcccatttaagggattgtgtggacctagtaataaattatctgataaatatgttatatgtatacgggcacttggaagttggaattgattcaaatcgtcacgatgctcaactcgataagtttgcgatttaataaccgatgtcgactccctagtcctcctaatatcttggcgattatggaaggaacaaaacttcagaggttcgactttgctctctcttcggtctcagtgggtctagaagccattctcattgagggtcacctatagtc

SEQ ID NO: 949 - DNA, 390 bp, Oryza sativa
  unsure (1)..(390): unsure at all n locations
tgccacccaagcgacacaacagcttcgacttctctgcaatgcttctccaacgccacaaaggcaaactgaaacgatactcatgaatgacatcagtccaaactaccaaataaccattttctgcacgcatctatcattaacaatcctataaagagatagcagtactgtgtcatcgttgccaagctttgtcgcacccttacaatgaattagctttgactctacccagcatcaaccaaataataatgctgaacacccacggttgatcaaggaacggaatcaatgcatcgaatgcctcgtcaaacagctatacttgtatggctttggagacattgcangagtacatcgatggctaccattgtgcgcgaaagggtcttgatgctatgagatgtcaac

SEQ ID NO: 950 - DNA, 362 bp, Oryza sativa
  unsure (1)..(362): unsure at all n locations
tgcgtattccccaacacgaagtaccttgtagcttnggtctgttggatgcataagcgtgaaactagttttcaatcagaattgatacaagggaacaagggaacaagtacttgttccttgggatgaaatattggatacacgtgatcagtaaccattttatctgaagtcacagcatttttctctttgttgtttttccgtcgttcgaatcttctcttatcctatatacctatataattcatccccactaatagaaatttcctgtattgtcgtgcagccacgtcaccttaaattaccacagcgaaatagcaatggttcagattgcagtccctctcttgccttaccgtaaccacaggccaatatacatg

SEQ ID NO: 951 - DNA, 426 bp, Oryza sativa
  unsure (1)..(426): unsure at all n locations
ctgcagctaaactattgagatgcatggagtatatttctattatattnggatactntttacatgtcaaatataattaagtaattattagtgatcaaagtntataaaattttgaacttaatttcttactttataatatgcatgtctttaattaaatagaaactgaggcagtatgatgcactataaagagctaggttctgatcatgtggggttcgctggagctctcctctcttctttagtttgttccatttgatgtggttcacacgaagacccaaattgaaaacgactttctgcccgctagacctgtttcttgatgcaatctgtagtgaccacacaacatttcaaccatatgtgtatacctcactgctatagaaacaatttttccatacaagaaccccaatatgttccaggcggaatataactaatatt

SEQ ID NO: 952 - DNA, 441 bp, Oryza sativa
  unsure (1)..(441): unsure at all n locations
ggatcttgagcaccgcagctgcagctatacaggcaataatcgatacccttaatggcttgaagggcattttaaacattttntgaaaagtatacatctcgatggcatattataaaaaaaattgaaaaagtcggtggcatattatagagggagacaaagtcgatggcaaatcattgaactagagtaaactcaggggtatagaatggattntctcttacattatattattcgtaagtaaactacgacacgaatntatcaagcctaattaatccatcattagcacatgtttactatagcactacattgtcaaatcatggagcaattatgcttaaaagattcgtcttgcaaagtagtcgcaatatgtatagtcaagtatttttttaagcctatatttaatacttcatgcaggtgtcaaacgttcgatatgatatggtgtaaaatttt

SEQ ID NO: 953 - DNA, 386 bp, Oryza sativa
tgtatggtgtgaataaataaatttccaaagtattgggcatactccatgcgcacactgctttaacaaacgtgctttattccctaaaagacacatggtttcaccacacctggaaatatatggcatatgtggtgtaaaatccgagtgaataaactcataaaggatttaccaaccgcctagataatgaccacaatatataatcagcctaagccataatattggtcaataaaaatacacacttacgtggcgaaaagcaatgatattgtatccaatcaattgcttaaaaacccaaacagcaccttgacttatatataaaaaagtcagcgggacagctatataaagctttactggttgacaccttttaagatgcattgtaccaactcctaaaa

SEQ ID NO: 954 - DNA, 367 bp, Oryza sativa
  unsure (1)..(367): unsure at all n locations
tatatttntaataatgtaattcatgaatttctttgttcatccaagggtaaaatggtcattnttatggaaaatagacggtcaactaacggtcaactgatgggaggggtatgcaagggatcaaaatcaaattttgggggtatacaaggaagtaagcaaaattcaagggtatagaagggattatgtaaaatttcaggggtatataagggaatttctctatccataatatgacttcttctcgcctattgcgtncaacacctccacacgaactccactattatgaagctgcgctttcttgttcttgcctatcatataaaacgtatatccgccgatgtcgtaccattgccatgagttcatgaaagctacttgg

SEQ ID NO: 955 - DNA, 378 bp, Oryza sativa
gatgttcccgcaactttcccaacaccagacttgtattgtgctgatggtcttcctctgattgtgagtatatcataatgtcatcgatgaaaaccacaacgaacttatccaagtattccatgaacactttgttcatcaagttcatgaagaaggcaggagcattggttaagccgaacgacatcaccgtgaattcatacagtccatatcgcgtagtgaatgcggtcttcggaatatcttcttcacgaatacgtaattggtgatatccggaacgaagatcaatcttggagaatacagtggcacctttaagctgatcgaacagatcatcgatccggggaagaggtactttgttttgatggtgacttcattgagagctctgttgtc

SEQ ID NO: 956 - DNA, 396 bp, Oryza sativa
catatcatgatagtatgaagtaacagttctggtatcttgttttaaacattgcagtttgttgaacaaaatgtcagcataatacatgggaacataaacatctctgaaatatcgtttcaggtctttccaagattgtggtattttgttatgcctacaaagatgtttccaatcattagaagcatgtttaattaaaacactagaggcacacataaccttttgtttctccgacaagacatgcttttgaaattcactatcaaccgctagctcccaattaatgtaagcacgaggatcatagtctccctcgaaataaggcagtgcagatttgatcttacctagaacatcatcacttacctcataatggtcatgttgatccctcctcatgtctcgacgaagatgtcg

SEQ ID NO: 957 - DNA, 401 bp, Oryza sativa
  unsure (1)..(401): unsure at all n locations
agtgtgcatatttatntgtcctctgcattgtgcactacctatgcctattcttatggcaagagagagacgttgatgtgctctgcaaaatcccttcttcatgcattgcttcatgcgttccttcttcatgcccattcttatttattctgattggagtagcatatggtttgtagttggcttcgaaagcaatataaagacatttccctttctgctatgtatgtatgctctgttactggtaagctgctagtattgctctgggttcacagtctttctgctacgtgtgttttgagtccctactaacaaatattacatccatttgattttatatgacatatttaccttagaaatagcccttcaatattaaaacttaaccattgatttctataatatgcattcttaacagc

SEQ ID NO: 958 - DNA, 436 bp, Oryza sativa
  unsure (1)..(436): unsure at all n locations
agctntccacaaagtccaagatcactcatattggagttggcatgaaggctctaggtccatttgaagtcagtgctgtctccggaggccgaattggattccaaaactcattggactttaatatcttgtatatccgccattcatccgatgtattctttggaaatgttntatatttctcatgcttggttgtatgcatatacttgatggtcacatcattctccccttcttgtctggaaaccgtcctcggtttcttcttgcaattgtcgtcataggagagatcacatgaagaaatagcaaacaagaaatcattgtgtagcatcatttgttcctcataaatacaatttacataaagagaaaactaactcacctcacttaatgaacatttcttaaaatgatagcgtgactcgaccatagaatctaatggtgcacaacacttccc

SEQ ID NO: 959 - DNA, 388 bp, Oryza sativa
gtgctaacgctaatcatggaggattgggagtctgctaaatctgtggccaaaaatagtgtgacaagaggggtaattaaagaaattccagctgtttcatgggatgatatacgagggttgaaagctgttaaagtaaaatatgcctcattttaagatttctttaatcacacctcctttaatggatattgttgctatgcttcagaaaaacttcatcaagctgttgaatggcccatcaagcatgctgcttcatttgatagacttggaatatcacctatccgtggggtgctatttgatggtccaccacggtgctcaaagactacccttgcaaggctgctgctatgctgccaacttctttcttttattaagtttgctgcgtaaaaatgtctctctt

SEQ ID NO: 960 - DNA, 407 bp, Oryza sativa
  unsure (1)..(407): unsure at all n locations
agcttgcaatgctgattcattagtgttaatatctaccatttccagataactatcaactgtgcattnttgatcttcatgagtacagaacctcggttcagataagtaaacacagctccatctaatgttggaggtgcttgctacaccaaaaccagtgttgaagtacttcgacacgaaaaatgcaatgtcctcggaatcttcaaccttggaccacaacggattctcatcgaggaggttacacttgtagaccactatctcataccttgtccaggtagtgacccgtaaaatggcgccgacgaggtacaactcgccatttatgtccatgtagctacgctggcagatatgtgccggcggaggcatcaagagcaacaggctcgccgtgagaggagctacaccatcagtgttatcga

SEQ ID NO: 961 - DNA, 350 bp, Oryza sativa
agaagatacgcatgcattgtttagtgttaaattgccagtaggtaggtctagggggtggacgaaaagctcgtaactagttaactcgctcaactcgtggttggctcggtttggcttgttgtatttcttaatgagttgagatgatgttgtagctcgttattagagataatgagccggctcgtgagctgctcacaaaccaaaggagccaacatagctgagctcataaacccaaacctaacacttcatatctacatatcagtccatcatggggaaggcccaacataaacgagcccaatatggccctaccaagcatcaaaccctaatttctctccctgatcccctcctactcactc

SEQ ID NO: 962 - DNA, 346 bp, Oryza sativa
  unsure (1)..(346): unsure at all n locations
gcttatgatgttatgagtcattacctaaatttgtgcatatggnctacatctcttattagcacccattgtcaagctcaacatttaaaatgtagtttactgccatgttgtttttaaatgtggtggtgggtccagaaatctcctccagtccatactgcatcttaacatttgttcttcacttgttaatatcatttccaatcattgtttatgagatgttgacctattaaagttcacatattagaatcttccaagtaaacatcagttgcatttacaatgaaatcttttggtgtagttcttcaattaggacattatttgcagcatctttttgcttgcactcatgatattctta

SEQ ID NO: 963 - DNA, 424 bp, Oryza sativa
actttatactcagcttaacctccatcatggaggccttgattgggtttgtttcttttctatgtcccttgcaatctgccatgggttcatcaccatcaccgtagacactggatggaacaatggaacatcagctcggtggaaggagttgaatgacctgatcacattttacttttctttataggacttcttttacatgtttcaaaatgttctatgaggggcctcgtgtactcccaattgtgttttaataaactaccctgaggttgttgcctcagtttattttttaaaaaatcaagttcctatttaattagtatttagggcttagaacgtagaaatgtttaagaatttcatagaactatgttaatacatgcaaaagaaaaattccaaagaggtcttatagtagttttaattttgaagtgaaatgggtcaa

SEQ ID NO: 964 - DNA, 469 bp, Oryza sativa
  unsure (1)..(469): unsure at all n locations
gctttataacacaaaataagatattctgtatcttccaataagagcagcactaaactcgaaatggcagatgattaaaaatgtgaaactctgcacaagataagtagcaggctattagcaaccaaatattcatattttgtgttcaacaatataacacaattaaaataaaaatatcaaaacatgtgtatttcatagaaatgtttcgaaagacaagaagatagctcccaanaaaaaaaaacctaaacagcatctggcatgaagcactttatagagtcgccaaataacaaagcanattntatatatggaatgtttagaacaattgtcctccatggttaatactttgcataaatctgaacatgtgacatactatattatactggggatcttcaagtctcgacgttctaatattttcaggctgattatcggcatggttatttatcttaaactcatcttcaaacaacttaactactta

SEQ ID NO: 965 - DNA, 318 bp, Oryza sativa
  unsure (1)..(318): unsure at all n locations
agcttaggttaattagctacaactagcaagttgttcaattattggttgggtggggctatgtataacttttccaatttagctcttaagatcaatttgtttgtgctatttggaatctactactttgtttactgtgatttgtgaacatgcctcctgatatgctaaacaacgcttttcttaaaaaaatatatatcaaaatttatttgaaaatcaaattaatgtattttaaaattgataataattaatacttaattaatcatgtattaattactggccgtgttttctatgtcacagtttntgttagccggacatcttatatcg

SEQ ID NO: 966 - DNA, 394 bp, Oryza sativa
tgtaaggaagatcacaggatatgtactctgcaatatctctgtttttttctgaaaatggcgacaaaagcaacacagagaatgtttattattacaaacaaagattttcacttttccatatactggtgaaagactatcatcaattgcttaatcatgagacatgcgtgattaatttaaatatgttcccgcattctttacatgatttcacatacagtattcatccccgctctttatatatgtttgattaatttaagtatgtgtgattattatgtttgaatcgaagccatatagactgattaatatgccaatttaactgttaacggcagtgaaggatttgatcaaaaagaatctaataagctataagcagttgttgatatttgaataaataaattatact

SEQ ID NO: 967 - DNA, 262 bp, Oryza sativa
  unsure (1)..(262): unsure at all n locations
ttcgctccaggcgaggctacagtgccgagaccagacggtggtcttcgcggccttcttcgacgtatggcttcggtttctgagcagcactttgctgccggaaatacttcggcttttcgacgtcgagatcccaaactcagcccctccgccctggtttgagtcgccatcttcgactgggcttgccggacagctgggttcgagccgaccgtcaagatgttcggtgcgattttctacgccatcatcaattngaagatggtggttaccc

SEQ ID NO: 968 - DNA, 159 bp, Oryza sativa
ataaaacgaacagagaaaaaaaagacccgccttgttgtttaatttccacgaaaacagagcagagccaatagacgccaaataatgctagatatgaccggcgccgcccaacggaacaacctaacaccaacgaccacaactccagcgaaaaaagcaactgaa

SEQ ID NO: 969 - DNA, 304 bp, Oryza sativa
accttagcacccagctgcagcttggataaacattttacctagtctttctctacagaaggaagaaaatgaactcttctcacacaaagatgctctataagaggagggttgagaatgcacactggcactggcgtctgactagctcttgctattcttcattctgttaactctttcaaggggaatgtgatgtcaaactatcttggaaaaacacatctgaatgtcatgggtccaagcatatcgagtaacacaccccgtttgtttatagatcgtatccagtagatggacaattgacacctctccactgaca

SEQ ID NO: 970 - DNA, 364 bp, Oryza sativa
tatctctgtgactggagaaacataccgataacttgcaaattttataactgaagcttttgcctctgtttcactccgatttttgagtctcaccttgtgtcaatactactgtgtagtcttagttttgagcaggtgcatgtacttttgacaccatgcttggtaaaaaatatcaaaatggtatcttgattcagcttccagacccccatctggtgtgggaatgcatctcaattcctgtgaaattcgtgcaaaaatatctttgcttctttgtgtattgcatcccttctcatccattctaattgtagtggtgtgtgccaagaaaatggagagcttcatcttttcgcttatgcttaagagataactacggatc

SEQ ID NO: 971 - DNA, 262 bp, Oryza sativa
tgtgaaaaaaaaaatatcaaaaaaaaaataaataaataaataaaaaagttgtgcctctctcctcagcactagagagagcaagcaaaaaaaaaaaaaagaggatccagcgagcacaccacaccattccccctttgtcaccaccttctaccaccggttcttgttttcgttgctgtttgggtttgtggtttgtggcgtcctttgtggttaggctcgcgtctctacttcgactagcctaggaccagcactgtacactatatccttg

SEQ ID NO: 972 - DNA, 460 bp, Oryza sativa
tatgacaatgcgagcgaagatgatctagtgctccacactcatttcatcgattcggttctcctcttttcctgttcctaacatttttcatagctcgagaaaatttgttagataacaaaaccaagtcctcctcctcgaactgtttgagttgatcatcggacatggcattaaataaagcaagaacagaagacttcgatgaagaagcaccaacatccaaagaagttgaagaaaataccaaagcactagacttagaatcaactttacgagtaagaatattcatctcatgagttttcaattgtgtgtaaagcgaatccaaggtcaaagtagacatgttaacagactcctgaatagatgtaactttcatctcccaaatagacatgtcaagaccattcataaagtgacgagaaatctcagattgtggataattagcatcataagaagaatcaacagatctaagatcact

SEQ ID NO: 973 - DNA, 272 bp, Oryza sativa
acacgtgattcattccgcactcgctaatttttttcaaaaatggatcaatatgattttttaagcaactttcgtacagaaactttttataaagaacgcaccatttatcagtttgaaaagcgtgcgtgcggaaaacgagagtaggagttgggaaccatgtcttgcagacagagcctaaatgtttggtggagagggagaattataaggaaaggaactgctatcactacttcagatcagcagaagtgtgatttgttggaaggacattgctactatgt

SEQ ID NO: 974 - DNA, 311 bp, Oryza sativa
  unsure (1)..(311): unsure at all n locations
tcaagatattctcaaatcaatcttcatatgggccgctctttcaactggactttcctgactgtggaaaaaatgaaataatgtatagatgacattgggccaacgccttgtagagatgacataatctcatccatgttatgctcacaagttaaacgcttctagcaagtctagtttgatggatcacaccgagtctatcttgatgggccacactcgagctagtttgacatatttaacatacaattgttgnggctacaggtgcctttagcattccctctcaacttactggatacattctacagcagatttggatgcta

SEQ ID NO: 975 - DNA, 360 bp, Oryza sativa
gcctatattatcataccttgttttttctctctttaattaaactgaaatgattatcggccggctaaatgtatataatgtgtcacgaaaatctttgatcagcaatgcacgccgcagaactgatggtgagttaatggatgctgggggcaccactgtcatgtgaaaccaggcatcatacagcaactcattgtgatgcgcacacttacgtaagataggtaactgaactgcatcactggtgaaagggttcatcattgatcagataccattgtcgtgcaccacaaaataccaattgtgacaagaaccatggcaacaagcattgttcgtgacatccatgcggtggatttgaacataagcgatgatgag

SEQ ID NO: 976 - DNA, 267 bp, Oryza sativa
  unsure (1)..(267): unsure at all n locations
ctacctntccgatccaccaattttcgttcgccatcaaaaagtggttatttattttctttccaatatggataacatatggcatgggcgctatgttcacatgccgatctaattccctccaaggtaatgccagctatacatgataaatgaattgctgatttaagacactctaactttgctagtgctatggactctcgtataggtacagaataaggaacatatctggtggtttcacaaagaggtatttgtttatttattgaataaaaattc

SEQ ID NO: 977 - DNA, 322 bp, Oryza sativa
tgttgacggtcattatcgatcaagttcgaccttctttatttcttatacaggagagaactagtgatgcttccaatgcataaatatgttagaacaataatattccactagtattatgtctactaacctttttgcagagaatgacaataaagtgaaggagaatcgacatcaacaccaacgataaatcaatcagatgatgtcgaggaccaaacttatgtatggatgggccaagaactcaaaattgacacgatgaattgagccaaaattcacaagtctgcggagtggagcaatagaggaggccaccatccgaaattgatctggattg

SEQ ID NO: 978 - DNA, 384 bp, Oryza sativa
  unsure (1)..(384): unsure at all n locations
agcttctgactgctctgaatgaatgcacagagttcgatgcaactnttgatgtattgagttttgaacctatctggatattaaaaattcagtccacttaacatatttggtgtatttgcagatggggccaggtttttattttggattctctgtcaaggtacaaagcagcagatgccagggaagcagaaaatatagtggaacgggttacaccccgtctgcaacatgcanattgtgctgttgttctctctgctgtaaaggtaaatattacctgcatcgcttgcattagaaaagacaagttgtttagacagggttntgtgcagtctgtacagtttctatgtggtaaccatatatcgtaatatcatcatagtattgagtatttgaatacgt

SEQ ID NO: 979 - DNA, 258 bp, Oryza sativa
  unsure (1)..(258): unsure at all n locations
gtcagatagacagaatcacgttacttcgaaattttggcaaaaaatacaataaaaatagggtacccgcttgaatatattaccgcttaccaccctcatacaaatggtcagacgggaagagtataccaaatattgcaagatattgtgagagcttgtgttctatatctcggaggaaagtgggataaaaatttgccgtatgcggaaatctcatataacaattantatcaagcctagttgcaaatgtctcccaatgaaacatta

SEQ ID NO: 980 - DNA, 436 bp, Oryza sativa
  unsure (1)..(436): unsure at all n locations
agcttgcatacgtctctatttacctcattntcttataactattcatgtttattgtgaacatgaagagacaagtaatatctaataaaatgtccattcgaaatggcatcctaacatttctatcataatcctcatcatcgattcagagtctgaggggactcaccttattctcctttgtgtgtgagagcaatttatcctacatggggaaaaaagggaaatagctctaaactctattggatgccttcagacaaacatgtcttccaaaacgcagataagcccgtttgtcatgccttgtgctgaagttctggatgatgtccgtgcagcatcanccttatggatntgtatctaaacagagcttttcccatatgaccattttagcatcgaccatttagctgaaaacatatagaannagtaaattcacccatatacttaacaaaat

SEQ ID NO: 981 - DNA, 441 bp, Oryza sativa
tcgacggcgtgtaccactctcctgaagttctgacgatgatcttatgccgggtatggttcaccggcaatcctcaagcagtgggtacatcatctcctcagttgaacggttgatggctttgatgcatagaaactgacgatctgatagtttgtatacagaaatgtattgcatgccgccaggtgatgggtatgccacgggaatactacacatttttcagtgaattatatggtagccaatgccattctatacacaacagttcaacacacatgcgatttttcttctcccaaagaatttgtaacagtataaatattgctcaatgtgcagaggtaattcatcacatacatgattgcaggttgtaatatctacacatacagtatgatctataacaaacttcattccaaagaagaataccaactcacatcattgagaatgaatattcacgtc

SEQ ID NO: 982 - DNA, 376 bp, Oryza sativa
  unsure (1)..(376): unsure at all n locations
agcttccataaaagctagactaagcaataaagtaccgcgtattttaccttctgcttctggctgtctcgcaataccttctacagcttgtcctgcagcagtaccttgaccaactccaggcccaatagaagcaagacctacggccaatccagcagcaataacggaagcagcagcaattagtggattcatgatgagttcctcgtgtcaaaaaaaagaaatggttaaggatacaatcaaccaagaaattcatatttctaagctctattggacagaagtaactaaaaagtacaaattgaaacgataatctgaattctccgaactgcttcgagatctnctttntagtttctaatcattagagggttgtgtactcattattcta

SEQ ID NO: 983 - DNA, 416 bp, Oryza sativa
  unsure (1)..(416): unsure at all n locations
gtaacaatttatggactatttgtggcactggcgctcttatttgcgaacccttttgtttaatcctaaaaaagaaaacgagtcctttagattagatactttcttctttttttagtaaattggtatttgcttctgcaattccaattatatcaatactttactcctaatttattactcctagagttttctatttatggggacagacaataccccaccccangaatagctgatttgaggatgatcaatttaaaagatatgttcgccgtcttgcttcccgccctttgtttatggcagtggaaagtatttttccttttattntaagaattttgggaacatttcaacaaaggaggtctttcacaggtcaaacgagatctaagacttaatctaaaagaaattactaaattgaatctatttctatt

SEQ ID NO: 984 - DNA, 380 bp, Oryza sativa
cataaattcttgagttcctaaaggatttgttgctagaaggaaacctgattccacatacaacatactaagcaaataaaagtcttatgcccatcgggtctggagagtaaaaagaattcattcttgtaggaacgattgtatattgtactccctccatccattaaagttacacatattacttttgacaccaagatcaaggagaaattaaatcaccttggatgttataaaatcaaagaatgaatgccagcatgcaaccaatgagtatttagatgactcctttgggtctaataaaatatttaacttatctcttcatttaagtcttgaatgcataaagactataaatgggaacaacttatttggagatctcaatgtgagatagtgta

SEQ ID NO: 985 - DNA, 416 bp, Oryza sativa
tactcaatcttgttaacggatcggcaatgcacaaattttcgtctatcgctctattttatattatcatcaaaccatggccgggctatagttgggctttggatttcattggtcacaattatacctcgtcatcaaaagggcattggttcatgctaattgcaatggattacttcactatatgaaccgaatccgtgccgctctagaatattacttgtacggaggttattgactgtattttgaagcatattgttcatagattcggttttcctcataacgtaaaaagaagcttctgttatgtccaaagaagtgagaagtgttgccaaatcttatgatattaagttgttgagtccttctctttactacgctcaggctaatggataaaccgagtccattatataacatcgttaaattgccgtttg

SEQ ID NO: 986 - DNA, 357 bp, Oryza sativa
agcttattgctactagacatcctggaagctatctctcatctcaacaaccggcaatccggcatggacttggagactatcgagtccctctgggacctcaaaatcaattcctagcctgaatcggggaatatcttcttcttttttaaaatagaaaggcctgacagccttccccttttctcatatcaaaaaagcagacagatttaaactctgcaaatggaaaaggaagaaataaaaacatccagggaaacttcgcacacagctcatgatcaagtccatgccggtttatatccaaaagttggatccaaacttcagtacttttccatcacatcaacctttcatacacacaacttttcagtcaca

SEQ ID NO: 987 - DNA, 290 bp, Oryza sativa
tactctatctttcttcaacgcgtttactgcttatggaaaccgaacgccactctcatgctccatgctgcacattctatcgtccgtatgcgtgaaagggaaagaacttttcctccaacttgacagtatggtcgcccctgacaaaagaacttttatcatcctctcgcttactttttctactcacctgacagaatattattcatgccccaacactgaaccgtgttaagttcagtcatctacagtgaaaaaaacatacgaaataaaaactaactcttacagatgaatccatacta

SEQ ID NO: 988 - DNA, 380 bp, Oryza sativa
caatcctaactaaactcgtgataactaaaccactgggttcatgggtttaaaacgtgacgtgcatattacataacttattcacacactctacactcaacataacatacccaagcgtggaacatgacttagatggggactaaataaacggcagcagaagttcgcaacaaaaagttcaaaaattgtcaaacagaaatggcctaaatatcatgtataacaaataactcttattgccgacatcttcaatacacaaattgagccctaatactacccctactggtaaagtatacaccacgttgtcatttctcatggtgaacaaatacacgttaaaagaaaactactcatatacttgcagcagtcaacacatatgagtgcaatacatg

SEQ ID NO: 989 - DNA, 384 bp, Oryza sativa
tgcagatcgatgatcatattctctcatctctaacaaaagttcatctactgaacattatattctgtgcgtgccagagctatataactgaataataatgacatgtatgtgtcacgaaaagtaatggaagcaaaattccagatgtgctactggaaatatgaaaaaagttgggaagtaactaaatgtattgaaaacaataagtgtattttggtatgccaacttataaatatgcccaaagcaatgtgcctttaagacaaaataatggatgtctttcctggatataacaacaatgaacattcttttttttgctcccgctgtctattatctacattactctatgtcatgtggtttcttttctactaactacactaaatcgtataaataact

SEQ ID NO: 990 - DNA, 204 bp, Oryza sativa
  unsure (1)..(204): unsure at all n locations
ttgcagagaatgacnaataagtgaaggaaaatcgacatcaactcagacgatatattaatcggacgatgtcgagaaccagacttgtgtatgaatgggcccagaacgcaaacttgacacgatgaatcaagccanaattcacaagtctacgaagtgaagtagcaaagggggccactaaccaaaatgtgggctggttgggccggccct

SEQ ID NO: 991 - DNA, 105 bp, Oryza sativa
actttaacctatatattttaattcactcctggtttctgatgttccgcaacaatatactgtcttaaatgcatcaacgtatatgcattaaatacactatattggggg

SEQ ID NO: 992 - DNA, 378 bp, Oryza sativa
gcttcgtgcatgcggcggcccacagcagaaattacgtctgacacctcctgcgatcgaccaccgggttccgctcgccggcaaagtcgccgttccacgttcccgccgccggcgccgtcaccgtcggccgtaagttgaatctgcctccgaaattcatcggctcgatctgttttaactgttttagagattatctccattattattgttatttttttcccgttttgattctgagcatttctttctcagttcagagctaaccgtgtcacagttactagacaagctgaacgaactcaattttgaatatctagttactcgaggataatctgattaccgagtgataatccaccgtatatacatcattatttctcttccgaatcgcat

SEQ ID NO: 993 - DNA, 374 bp, Oryza sativa
  unsure (1)..(374): unsure at all n locations
gctgataagaagtngatttgcatgtgttaagctatgataggagttaacgttaatttctggtcacccacctgttgactaccatcaccactcctcgtctggataacttatctgagttgcgtggagcatccattgcttttgttggtacggctctcaagtttaccctcctagacgaaatcaacatgcaagactgtcaatntgtcattgcataaggagggggaaaaaataatcgcacgattggtttgaaaaaggaaaatcaagatatgggagacaaactttaaccttcgctttattggcctagtcgggcctctgtccattctagcccaaacataacccttacataagtcgtggtccttgtccctcgcacataataaaaa

SEQ ID NO: 994 - DNA, 441 bp, Oryza sativa
  unsure (1)..(441): unsure at all n locations
agcttttcaggaatatctggcaatgttagctgcggatcccttgtggcattttaatgatgagagtgatcgctggacatatgtttggggcaatggtattttttcctctcagaaaatttatgccatgaatttttctcatgtccgtgtgcctgattatattaaatggatttggaagagcagttgtactatgaaagtcaaggtgtttggttggcttctcttgattgatcggttaaatacttatgacatgttagatagaagacattgctgccctcaaagtgcttccttgctctgtgtactttgttcaacaggatcaagggaaacaactctccacttanttttccagtgtccttttagcactcaatgttgggcgcaatttggtgtggtgtggcaattttctttgagctttggtgaaatgtggtaatggccagaaatcatataactctt

SEQ ID NO: 995 - DNA, 353 bp, Oryza sativa
  unsure (1)..(353): unsure at all n locations
tactaaagacctatgagtatgacttatacgctccacccgatgtgttgtcttcatacggtctattaccagataagactttgagtgaaacttgcttgcacaagacttgcaattcaaggcgtagtccattgttcaagttgtgagtaagtgtagcttggagttctaagtggatgttcaaccttaattggtctccatcgaaccgctggtatatatacagtacattggaaaaggcaaatctcantgggattttgagatttggtgggggaatgttggaattaatgaatgggtcttagcccactcgaagattaattctttggaaaatcacaaaagcccacctcatgggatggcatgcatgt

SEQ ID NO: 996 - DNA, 200 bp, Oryza sativa
agctacctgcggcatgcaagcttaattagctgaactctatctctgattagttggggttgttggtttctttacttgcaaggtcagtaagtgacactcctgtgaagtaagtgagtatagtggatatatccatatcatgcagatgcaccttaatccaatgtaatagtggcaagaaagacattgccattaataaataaatatta

SEQ ID NO: 997 - DNA, 424 bp, Oryza sativa
agcttcagttcaaaattaattgattgttctgtttaaatggacctcatacaggcataatgtccattgaaaaaagagtgcaacgaggggggaagtaaatataataaataaaaaaagaacagccataaagctgtaaaacagtgattgtgatctactaccgatataaatatttacaaacgaaaagaagaaaattgtaaagttaatctgcaaatccctcccaagtgcacgatttcagcttttctgtggcttgagcacagatgcagaagcagaacaacaagcaatgctgtcaaggtaatcctgtgtcaaatagcagtgagccttatgattcaattccaggcttccagcatgggtttgctttcccattcaatcatatctgagaggaattttattatcttctttagttccacgaggcaaaatcacacccagc

SEQ ID NO: 998 - DNA, 444 bp, Oryza sativa
ctgcataacttgcaagaatatcattcggtttatcttcatccaacccacaataaatcataaatgtgcatgagttctatgaatttgaataattgataaattgataaaagtgaataaataatgaggaccgtgtctttcattgttttctaatatgctagtgcatatgattcacttgagaaccatttaacaagttgtatgtaccaaaaattaaacagaacattaaaaaaaataaattgtctccgtattattcccatctcactactcatgttctccctattcctgagatatttgagtgtatgttcatatttaactccactttctcttgggtttatactcttcccaattcttgtgcccactcataataagccttatattttgaaagaagggagtacatggtttcactatgaaacaactatcagtgtaaccatgaactattactatacatta

SEQ ID NO: 999 - DNA, 297 bp, Oryza sativa
gcttgcgtccatggtctgtactctatatagtgttgagcatattcatggctcactgtattgtgctcagtgcggcctatgggatgcgttaaacaatcgatgaatcagctgtaccacaccgcataatcccaattgcgaagaccttaataactagtcaattgatgctttggatcggtactgatttgatttgtgactaattctaacactttgatgactaatgcatactttgcagaatgcgtaagaataacaagtgccatcgcaaacacaaaatcgtcgaaggtgacacttgtcgggataccc

SEQ ID NO: 1000 - DNA, 321 bp, Oryza sativa
ctcacattacactcctgacatatatatatattctacattgttgtcatggcacggctcctactccaatctatcacaaccaacgaattataatcttatcaccctgtcccattaaccaaattaacatcgatcgatcattagtacaaactaattaatcaatcaattagttagagatcaagttattagtgtccaagtatagcttatgaagggaatgggaaagagagacacgccggcgaagtcctcctaaattaggaccttggaccgtacctcctccatcctcacggctataacaacattatacttgaccccttcccaccaaccctc

SEQ ID NO: 1001 - DNA, 212 bp, Oryza sativa
ttgtgttccagctatataatttatattgtagagcccaatacctaaagtgagcatcattcgaaattgcaaagcttctaagctatatctatcttgcctgaaaactcgaattgagggtatgtatgatacaccttacactgctatagatatctacatgaaccttgtcttgagtgaatttgtggatatactgaacccacgttacaactctacctatt

SEQ ID NO: 1002 - DNA, 306 bp, Oryza sativa
  unsure (1)..(306): unsure at all n locations
agcttaacaactcacagctggccgttaagtccaccaattggtctattcgaggaagagggaagtgatccttgggacacgccttgttgagatcggtgaagtcgacacacatcctccacttcttgttggctntgcgcaccatgactgggttggctaaccactctgggtggagaacttatctgatgaagccagctttgagaagcttgtcgagttcttctcatatggcttgtttccgatccggtgcaaatcaccgcagtttttgttttactggtttggcatcgggtcgcaccatgagtttgtgctcgatca

SEQ ID NO: 1003 - DNA, 353 bp, Oryza sativa
  unsure (1)..(353): unsure at all n locations
ctctatgtcacagcttgatatttttcattttangatgtataaattatttaataaattattaatagaatttatattaaatgttcattaatttacaagtgaagttaaatgtgggaaataaaatttcctaaatttaaagcatgaatggatttaaattttaataaattctccatgattaattatactctctgaaattttctcggatttttcagagctcaattcctaaatgatacaaagaacagttcagtaattagttaatcaattaatgagctaattataattatgttaagtgcttttcttgtttaaaaatccttaaattataaatttggtgttaaaaggaattattataaatgatc

SEQ ID NO: 1004 - DNA, 455 bp, Oryza sativa
tatcttactcctcacttctttcagcttctttcattttacttctcgagccacttcgtcttctcctctcttgcagcatagtttaagtttgagatatgattggcgatatatatgatgccgactggtcgtcgttcttctccgccggtggctgctgctcttgccctgcttctcctactcgtactctttttcttctcccactgagcctcaactgctctcccactgccaacatcagcagcatcaaagctagtgcttcatgatggcgccaccggcaatggcgacgaagtttccgaggtgagaattaatcgaacaccacacagtagctgattatacaagaattgatcgaagaagcaactagtggtagcttgctaaacttgatgtgtgttttgtcttgcctgttcttgggcaattgatgggagcaactgatgatgaagcatcatgattatgcgatgaggggaact

SEQ ID NO: 1005 - DNA, 122 bp, Oryza sativa
gaaggggcaggtgaccaaccgaaacaaatcgggagcaaccacaaaaaagaaaaaaagaaaagaaggagaagaaagagagaaaaggagtcgaaaaggagagagaagaaaacaaggcgcaacga

SEQ ID NO: 1006 - DNA, 345 bp, Oryza sativa
accaggcagcaactatcgtacgtcaactgccgattccttttggtcgccttgctttcttcggtgccggcctgcatcaccatcatcgcactgctagtggcacggttcaattcaatccaactccaactccgagccggccactctcaattagccaccaattaagaaaaaacttttcaagtaacttgcaccaaacataagataaagcgaagaaaaccatcatgtgtcatgcatgtacaccctaatcttgatgaagaaatagttgaccacttcatgtatttcctctaatctttaaagtattttggaataaagctaactcatatgttagagtaattatgagattatactctc

SEQ ID NO: 1007 - DNA, 387 bp, Oryza sativa
atcttaagtcacctgctgcatgcaagctcggatgatgacaaacttgtgaggaatactcttctacaagtcacaggtcaaaccggggagtgacgcgatcttcaactccaacccgtcgtcctctcgcgccggcaccgtgaaagcgtgaagcgagggcatcgggtgtgtggactgtggagtgggaaatgtgtggtgttttctcgtcgcgtcgcgctcgatcggaggctgtgcaacggggttgcacgccgcggacgatgatacttttggttgggcctattgatgatattgtcgagagaattggcccgtggagagcaagacggggttcggaccgcggttctcatggcccatatgcattatgatgacatcgtgtactatactactgctgttgac

SEQ ID NO: 1008 - DNA, 418 bp, Oryza sativa
  unsure (1)..(418): unsure at all n locations
agcttgatcttgtctatccttagctgcagcttcatgttcttggttgctatgtcgncagaaccgtgagccgcctgctgcagcatcaggcctcatctcggcctccttccctttcccgcggaaataccaatatactttctgcaagtagaagcagaggttttcccatgattaaaattctgtcttgaaggaagttatatcactgggtttatatatgtaggcaaagttaattaatgcgggtgtgtgcgcttacctgcatgacccatatgctcagcaacgtctcaaggacgaacatcgcgaaacccacgaagaataatatctgaaagacggagatagttcatgtaattatgaaagcattgagagagggaactagtgcaactaacaacattgtatcccttcagtcgtacaactagtatctgaagta

SEQ ID NO: 1009 - DNA, 331 bp, Oryza sativa
actagcttccctactttgtttacaatctagccttccagatgagactggattgcaggaagtgcaaaactttcttgaccacacaccaagtaaattctgcaatagggcaattgaacaagacatgattaacagtttcagaaaccccacacagcttgcatttattctctcctcccttccagttgctcttaaccagctgaaatgcacaaggaatcctcccctgcccacatgataaacaaaatgttttatcttcaaaggaactttactcctcctgatcccctgcatgtctgaatccactacccctccaaaagtcaagaatctatacattaatcgagag

SEQ ID NO: 1010 - DNA, 344 bp, Oryza sativa
  unsure (1)..(344): unsure at all n locations
agctngcagagtgtttctacgatcattggacgtattcctttgacatctagcaaatctttcactccgtgatgggtgcgcgggatcatcactagatctgcctgaagtatcaacaggatctacagttttgtcatgaacacaagaactggtttttatgccagcacaggagaatactctctcacagccatcagaatctatgatcataacctcaaaacaggaattctcaatgtgtcggaacaacaaagagtcacccacttttatgtgatgggcatcaacaaatgccttccaaccacattgtaggaccggtctattcatgcactcagtgacttcaacaacatacagaatac

SEQ ID NO: 1011 - DNA, 395 bp, Oryza sativa
  unsure (1)..(395): unsure at all n locations
ctcaaaagacatatctaaaatgtggttgattaaattcaacatgaacagatgcattgctacacctgctcctatagtcaaaggggataagtatggggcatcgcattgtcccagaaatcaatatgaactcgatgaaatgaaatacaagccatatgcgtcagctgtatgaagccttcagtacgcgttagtgtgcacacgacctgacttggcatttgttatcacgttactcggcagatttcaaagtaattccatgcccataacactggaaattggctaagaatgtcttgcgtttttgcaaagaataaaaggcctcatgctgtcttacataagatcataatcgctctagattagggggtatcagattctgacttgaaaagatntacaaagcaacatcggga

SEQ ID NO: 1012 - DNA, 369 bp, Oryza sativa
  unsure (1)..(369): unsure at all n locations
ggaancaggggttctagcactcctacgcgggccaaatacgntgcaacttgcgagttgcgatacattgcgctatggctcaacgacgaatggcacacgtacaatcacgaacattgtcgcagggcgcacctagacgagacaacaagaacaaggataaagttggacagtcagaggcaaatgcaatttgatgaaccggcagattacattggagcatatatgccaaaaaaaaaagaaggtagtactaacatacactggtggagaaaccatctntgctcggncgacccaaatccacagtagtcccggttccattaaaaatcgggagtaaaaacgatttttagtcccaatttataagaacaacaggactagataatc

SEQ ID NO: 1013 - DNA, 375 bp, Oryza sativa
gatgttgccaatggcctgcgggatggttccagttatcttgttcgcaaaaagataaagataagctagattggacagagagcctaaatttggaagaagtgcaccaatttaggcatttcctgaaaggtctatgtacgttaagctggaacaatttgtaagttcatcaggaattatccctgtcaaattgtttttatacagatagagtgcctgaagttgcttaagattgccaaggcgaggtaatgagccaagtaagttattatcgccgaggtcaagtatattaaggaaagataggtttccgaaataggaccttatttggcctgtcaaacttttgctggagagattgagcgccatgacgcgccatggaccattggatgtgca

SEQ ID NO: 1014 - DNA, 387 bp, Oryza sativa
  unsure (1)..(387): unsure at all n locations
agctnntaaacgaggtaaataagtatttactattataacatagcaagcaagcaacttgtctatgatctatccttntatattttgggagagaaaaaagggctatcgatatgggattcgcatgattttttaggcttccatcatgcagtgttttcccaagtaaatcaaaaatattttaatcttttaaaaaagttggaacacaatcaaatcaccaaataaaatattttgctacaatgtatgaaacaacggttccgaatatattgaaacatgatacaaatccatgcacatcgagaaaaagtctatatgggatttacatgnatttttaggcttccatcgtatagaatttgaagccaaccgagctttggttacaagtagatcgaaaatgtttca

SEQ ID NO: 1015 - DNA, 386 bp, Oryza sativa
ttattatatttgaccgcaacacgaccggatattatgttattatgtgtgcggcaagtttattatcaagatatatgtttatcccaagtcagttataatttactactgcgaaaagagatttgcggtatatcaaatggaccacaggttatgttatatggtacaagccagttaaaaattaaaattaattggctacacggatagtgattgggctggatgtcttgatgatatgaagagcacatacggatatgccttctcacttatctcatgtatatgctcctggtcaacaaagaaacaatatattgttgctttatcttctgccgaagcagaatatgtatcaacatcaaaagccgtgtcacaagctgtttggtaagaaaaattatggaagacat

SEQ ID NO: 1016 - DNA, 421 bp, Oryza sativa
  unsure (1)..(421): unsure at all n locations
agctgtggagatctttttctatatatgttctgctaaaagntngattcaaccgaaagttattctatttccgtntcccatttctttggcaaccatacaaatagggtcaaattagagagatattcttatttaattagtcaggaccaattcaattccaaaccaacggggattttattgttggtcataaaacatgcacaaaaatgtataatattgattacaaaccanagaaatttttaaaaaagaatatgttaataagtagatatatatatgccttgcaaatgctgtcatataaatatcttttatattggtttactaaaatattgtaacaagtctatattgtcatgcttactaaactgttgaaaaaaaactcatacttatttttgtcgcgattgaaaaactatagtacttantaagaacacaaata

SEQ ID NO: 1017 - DNA, 292 bp, Oryza sativa
ctctaatcacagaataacagaaatatccctccggttttaataaaagacattatcgactattgaacatatgatggatcattcgtcttattaaataattgtatgcgaatgacaagaataaatcatgtgaaagactttggtgtaaacactcacaacaaataatatgttacgtaaatttgtaataagacgaaggcaaatgtgtgaaaaaaggaacggcgtcgtctattaaaaaacggagggaactactgatgcatttgaatacctgcagaggaaaagatatagcttgtgtaaaaac

SEQ ID NO: 1018 - DNA, 335 bp, Oryza sativa
tggactcaaaacctacaatgacaataatttggaaagtgaaaagctgtacgctttatttatcttggatgaagacacacaacgatgaaaaattatctattctttacattgggattgagatcaacattaaccttttcttgagatattttgttattagcatggcgtgtaaggtgagttcaacgaccacattcacctaaagacatgttagagatcaaggtcaccctaagcgatgttgaggaaccaaaatgagtgttctctcattattattaataacaagcaccacaatgccatttgtcagatagttcctcatgataaatagaatgatacttctgtgtata

SEQ ID NO: 1019 - DNA, 428 bp, Oryza sativa
acactttaatactcaagctttgatcacgaccgagtcataactcgacgtccccatctcgtgtgtatcagttcgaaggtgatgcctcttttgctaattttcaaaagatgaaccaaacaaaatgtgtaccttctgcggggatcgaatctcgcaaagaaagcaactaggcttttcccctctcctccctgcgctactactggccaagcatgatgaccaagaaaaacacatcatatcgatcctgattcccggccggccagcgagagagactcaaggcaccgggggaatttcgccgggcggttgggcggctgttccatgatgcctccgcgcggttccgccggccaaatggcacgcacggacgcggtggtcgcaaatcccatcgccccgcgcgcggctggcgtctcgacagctcacgatctcacgcttgctttcca

SEQ ID NO: 1020 - DNA, 425 bp, Oryza sativa
tattctcatggtgttgtgactattccaatcccaactcctgattatgactttccagttgtacagtatgcagacgatactctacttatcttgatagcttcctcacaagagcttttctgtttgaaggctattctcaacacttatgcagattctaccgggttgaagattaactacagtaaatcatgcatgattcctctgaatgtggacatataataagtgcagcatttgtccaatatgtttggttgctcactaagcactttacctttcacctatttatgtctgcctttgggaacaactatgccaaagataattgatttttgccccttatttgataggggtgagagaagaatggctactacttctgctcttctgtcttatggagatagattaactatggtcaattcagtttatcctccctccaactacta

SEQ ID NO: 1021 - DNA, 318 bp, Oryza sativa
  unsure (1)..(318): unsure at all n locations
ttatttataaaggaactacctctccacctcattaacgtataaccgagtaaaggtttatccagattcaagaaacatataaagtaacccaagcattaaagagtctctctcctgctcatgatctaataatgaactgtgaactgctcaaggttacaaatattttacattggtaagctggtactggattcatttgacccatccaggatntacgatcaaatgaaaactgatattgagagaaactgttacagtaattaaagagttaccgaaacaaacaaacaaacaaggtgtgcaactgaatctaaccattccattaccgaggta

SEQ ID NO: 1022 - DNA, 441 bp, Oryza sativa
  unsure (1)..(441): unsure at all n locations
tgcagcttttccgaaacgggaaagtagaaatattatgctaagtttatgctaacctgtttgcaaagtactgccaggtatggctccagaattggtttgacttgtttaatgatatctgcaagagatccacggtccatgtattctataacaagatatattacaccattatggtagaaagattggtggcaaaggactatatgtgcgttctgtgttgcttgatatattttgagctcttgtactatttgtttgcgaactgcctcttgaatgttcatttgtatgccctgtggacagaattgcaatgcttattaattaaatgccacagcagtatgaataccagggacaatgcacagaattcttgattgatctgaacatcataacatgatgttcttcattagcatcaatattaattggaaatcanaagttcatgtagatattgcatgcaca

SEQ ID NO: 1023 - DNA, 245 bp, Oryza sativa
cttttttgaattattgtctgatcgaaatatacctatatgctaccagtggtcgtccatgtatgaatattctataaacttggatctgacagcatatttatattaaactagctggaaatcaatagttggaaaaaagactacagctctatgattataagtatagcccacggattagaattagtgcccatgtgaaacgcctgcgcagtatatcaaattaagtttttaatacaatacgtgcatattgatat

SEQ ID NO: 1024 - DNA, 376 bp, Oryza sativa
  unsure (1)..(376): unsure at all n locations
aataacagaattaaaacagatacagggtgaactaagtatattatgcataacaagcgtttcgttcttgtagagtagataattggattctgattgagttatttttctaagggaaaaaggaaaaggaggattcaaaatccttttttcttctgactatccccaaacacaaatacctncttgtattcgcactctcaaatgagagaggaaaaattcgactttatatatatcttaatagaattcatgtaatgatcaatgcattttttgattctatattattccatgtctagatcctaccagagaatacccccattttatgtaattgaatggattgcgaatagaaataacatatactgttattatgtccataaaccccaatggg

SEQ ID NO: 1025 - DNA, 408 bp, Oryza sativa
tctatcaatatttcttcgtgcgtcatgtacacagtgttggggatggtgctctccggtgccgttgccctcccccgcgccatatctgacatcgcgtataacggcttctctcacgaccggtggctgtctgtgtgctggcatatacacgccttcctgctaccacgtcatggctgcgctcatcgccggcttagtagcgctggtcgtccacttcgtcgtcgtcatgtactccctccacattgtcaccgatgtcatttgcccctgccattatcagagtctatctatatatatagtccatagtagcagtttttatatatgtcgcgatatatacttgcatcaccacaaattctggtgcggatataccatattattgtctctatatctatgtctcattttgtaaagttatgttcaaac

SEQ ID NO: 1026 - DNA, 293 bp, Oryza sativa
  unsure (1)..(293): unsure at all n locations
ggccatactgacctgtgcataaaccacgtttcttgggaacaacagcctttctggaaacctggcatatgacaaaagcccttcactgaacaatttgtatgtgtagcaaattaacatttaagtgtagcacatggccacatggtacctcctatattnttgaatattttgtactttggttttttgaacttctgatgggacctttgcagagtttttcatatacccntttctggaagctttcttcatggttactgggaacatttcaactgaagtttatgtctgaaattcttataactttg

SEQ ID NO: 1027 - DNA, 391 bp, Oryza sativa
attggaatggggaatatggcaattgcttctctcaatcatatcaatgaggtctttgactttcttcatttgccttattgtgttacttggtgttatgctacatgctgtttggtttgatacaaatattgcctcaatctatgaaaaaaaaagtcaataatcgaatgcataagaaagccagttagcttaagtaatcgaatgttgacctgaaatggaacctaaaccaatgctaatggtacacctgctagagttgcagttgcaccatgtggaagtgatttgtagatatggatgaccaatataagacagtttcaagaataattctacaagtaagcctaatagccttaatcattgtcatagataaagtattattttataatcggtctataatggttgatac

SEQ ID NO: 1028 - DNA, 341 bp, Oryza sativa
  unsure (1)..(341): unsure at all n locations
ttattaagatacattatgtaaggaaatgtattntgaaaactcaatttattaaaatacattatgaaagaaaataagtcattctattaattaggaaaacgtatttcgaaaatccctaattaagatacattttccttagctatttattttatggatatgcatggaatatctagagaggataagtaacagaagtgatcaacaaacacataacaaatggctacagctatatatcatgattagatagtttaagatgcccgaggaagtgcaatgactatgaagtgtgctgtgattgacgaaacgttgtgtgtgctttatggatcaaatcgagtgttaatcccacttgc

SEQ ID NO: 1029 - DNA, 281 bp, Oryza sativa
taagcttatgcttgtatggctggtcggacaagagttttcataactccttgatctgttaaaagatctgttgccagaggggaacaatttatctcaaacgacatatgaagcgaagcaagtattatgtccgttgggcctggaggtcaaaaaaattcatgcatgttcgaacgactgcattttgtattacaaagaatacactgacttggatgtctgccctatctgtggggcatcatgatacaaacgaacaaagagtgaaggtgaaggaagtaagtcaaagacgggag

SEQ ID NO: 1030 - DNA, 208 bp, Oryza sativa
  unsure (1)..(208): unsure at all n locations
acatattggncatgttgggggctccaactcccatcggtgatattgttcttaactcaccgggggaattcgagggtgtgagagaatttgaactccctgccacacagtcgttacaagtaagtgaagagaaggggagattctttggataagtttcaggtacaatgctgaattttttggaaatatagagcctctgtttgacaatttgcgagtt

SEQ ID NO: 1031 - DNA, 401 bp, Oryza sativa
ctttccttttctgcaacgacaaaaccaactttgacataacagctcccactatgaagaacttcaactctggtgtgggggaaaagatagcaagactgtatactacccactgtactcagcaaggcataccggaataagaagtatgatgcacgatataaccaaaggaggctagaagttcttttgcatatagctagcatttaaaaacaatatttgaatgcaggaaaacaagtgtagtaattaatcaatattatccatacactgttcaacgtctccccacgttgcacatgtccaaccaaccacctgtactacaccagttcatttagctatactatgaatgagactatcacggtgaatctggttgatccgccataaccgcgggcacagctattctaatatttttactc

SEQ ID NO: 1032 - DNA, 354 bp, Oryza sativa
  unsure (1)..(354): unsure at all n locations
gcttgcagtacagcttgttggcgatcgtattcttgccaactcctccaactcccacgatggacaccaccttgagcttctcctctccgcacacatcgagcaagttttcaagcttgttcaccgcggcgttgatgccaacaagacccgcggactccatgaaccgcgtgggttgcctatatgaggtagaagatacatcacctctagtggtagtagaagtagtggtgataccagtgggtatgtttttgagcttgttcaggatggcttccacatcggggtggatatgacgcactntattggcgtgctccctgaactgcacgagagaagcagtcgggatactatcgagcaagttnttgagct

SEQ ID NO: 1033 - DNA, 399 bp, Oryza sativa
  unsure (1)..(399): unsure at all n locations
agcttaccgcctcattctgaatggtcattntaccagggcgntaatgacggattccatcgcctgcttttccagctcactgcgctgaatgcgtttattggctaatgctgtacgtaatacgcctgcgataacaatatgctttggttcctgccccaaatcgcgcattttcagcacaactttaccgacaactctgcacatttctcggtacagatcatcctcttttgtccgatttcccattctttatacctatttatcatgccaactatcagcatatatcaatctaaccaattaaacaaaaattcaacacaatcagacaaataacgcgataaattattttaactgtagcaattgagcgatgatatatntatacaccggatgactgtcacttattctcacactgac

SEQ ID NO: 1034 - DNA, 393 bp, Oryza sativa
  unsure (1)..(393): unsure at all n locations
acacttataatactaagctttgggtataagcggcgctatgtctcgttattctgtatcatctgacgatagaaaaacctggaccggcgggccgctgtattataaagaaagattcttcacccagttatccaccgatgagctggcaaaggggataaacgaatatgtggtgcgcgcaatttctgcgaatcgtattgagccggagtggatgctggagtttcgtctaaacgcctatcgcgcatggctggagatggaaaaaccgcactggttgaaagcgcactacgacaagctgaattatcaggattacagctactactcatcaccatcgtgcggtaattgtgacgacacttgcgcgtctgaacctgtcgcggngcatcaaactggcgcgaacgccttttt

SEQ ID NO: 1035 - DNA, 144 bp, Oryza sativa
agctgccctgtcagagctacacgccgcggcgcacctcattatttgtcaataacacaaagcagactgcgatgaatagtcaaaccggaacagtcaaacatcccagctaatatggaacgataggataggcgtggttgtgctcatgcc

SEQ ID NO: 1036 - DNA, 396 bp, Oryza sativa
  unsure (1)..(396): unsure at all n locations
agaagagatacaaatgtcgatacttttatataaatcattatgcagcagatagacaactatgtttgcacaggcaacagggagctcttactactttctagcatactaaacatgtaaccaacaataattacatagctctgactggccataagacacttaaagaatgttgataataaggcagtcaagatgttttgaattaagacagaacaatgaaatgcgagaaatatccttcagtaagattggtggagccaaaaatgtaccataccaaataattggtaatacgaaaacctaggcaagtttgggcactaccanatttgtagggtatagtactgctaattagaacttagaactagtgtggcaaaattggcaccaaaccaacatcagatgacacaatttaag

SEQ ID NO: 1037 - DNA, 420 bp, Oryza sativa
  unsure (1)..(420): unsure at all n locations
ntgngattgaaagcattccttgtatcagatcatactgcatgattgctgtaatgttatacactgcatattcagtatgatagctgtcatgcttatacactgcatcttcagtgttacttgacataagatatctagatctaatgtgagaaacactgcacttgaaatttccaccagaccccactttaacccccacccaaatttctttgggtctagattctccaatgtctgaaacttttataatggttaactccaaacaacatatttcgaggacttgttaaatcattgagaaagggatccaacaattacatttccatttctttccaatatgctgagaagtgaaaactggttcattctcgcttcttttcctcacctgcgtagaacattcccatgacaaggtttggcgagtaatttatgcttataatc

SEQ ID NO: 1038 - DNA, 494 bp, Oryza sativa
  unsure (1)..(494): unsure at all n locations
tggtgatgccttagattgatccttctaactggattctaagtatacataggtgcttcanagaggtcagatcaaatagctcgtctggaagagtcccggtgaggttgttgtagctagcgctcacaagtgtcagcttggagcaattgctgagccccgcagggattctttcactgaattggttatagctgagttcaagcacagcaaaagatggcgcgctggcacagaacgaggttggcatctgcccagtaaatctgttgttgctggcattaagcacaaccagattgttcatcctctcccatgtggttgatggaaaataccctgtaaacaagttgctcgagatgttcaatacctgcaacggccggtcaggggtcgaagatggcagctcactcactcctccttgtaagtagttaatactgacatcaacgaccacaatgctgctggatgacactcagttcagcggtaagccaccggacaacgagttgcgggacaagttcatc

SEQ ID NO: 1039 - DNA, 464 bp, Oryza sativa
tatcttgattgagtcggcttcaaaccactcggacgagatctctatctactccaacaccaccagatcaagatgatgcggcctacccgccaatcctgatgaaactccccgacgatttggctaccgtcttcactacaagggcgtcttctccccgtatgcctatgcggaagtcggcttcaacaccgatcctgcctagctccagagaagtcggcgtcatactccagccactcggcacggtttcgacggatcaattggaagctacttcagctcccccggcatcgactcgcgactaacagagatcgtggagtatgacgaattcggctaccgctacgacaaccacgacctcgacgacttcgacgaaagcttggaagacaattacacccctctctacttcggcgtcttcatggccgacaacgagatggaagaacaacgccaagcccgagaagcagaagcacgacgcgtacagc

SEQ ID NO: 1040 - DNA, 454 bp, Oryza sativa
tctcctacaaacttacgcgcatttcactgtgatgttttctacttttcaaatagtacaacgaagatagtgatgacgatgaggatgatgctgacaaagttgttgcgcagcctgagtcactataggtataatactgtactgtttacttgatggaaatgcatgcaatctgcgattctcaatgtagccttgcgaatttcttcttattactggcaatgacaacagatctttcagttcatatacatgcttattggaagctgaatgcctctcttgctgtgcatggaaatagttgatttattgatgagatagttatcgatacttgtcctacttgaaagcttgtcattcctttgtattatactgctttaccaatacgatgatgaagatgatggtgatgatgctgacgatgctgaacggaatgtcactcgtaattggagtgttctataaactaccggacaggctg

SEQ ID NO: 1041 - DNA, 415 bp, Oryza sativa
  unsure (1)..(415): unsure at all n locations
ggaaaatcagagacagatgcattctggtgttgagcaaaagaacaaagctttgacatagtgtgaaatagaggaggttgatcagcccatacatcataccaaaaggagcatgtatttccacttttcagatgacaccttgcaatacctctaaagacattcattaatttgcaaatgtctctccaccagaatgagcccttcatagttgtcagatgagggacagaggtaccataacatgaggaccaaacaagatngacccagtgcacatccttcttattgtaaaacttttccaaaaacttgatgagcaaagcttgattntggatagaaaggtttagcacttccaggccaccttttctcttangcttacaaaccttatcccaggctgccaaagaattattattggagttgacctcagaacctc

SEQ ID NO: 1042 - DNA, 352 bp, Oryza sativa
atggggaacatcaacacatgtacatacaattttccaaatgcttggatgcacagaaattagatgcaacttcacctagtgcttccaagcggcgtaatgtgccccatcaaattgaggagcacgcccggaaagcacggagacaaagttatgagggaggaacattaagtttggtgtactaaagggaataacacctcccttgagtctaatatccctggtgctagaagcgcctcccttgtcgaccaacactttcggttccttctagatgcgacatcgtggatcactccaagcggtgaaacttgaatacatagcaccttgctctgataccaattgaacatgctaatgaagcctagaggga

SEQ ID NO: 1043 - DNA, 420 bp, Oryza sativa
  unsure (1)..(420): unsure at all n locations
ggtgaccatgagtggtaattcatggtttggttgcacatcatttcctaaccttcattntactgattcctgttatactaaaactntaagggagttatgatgaagagcacatgtgccataagggttgagtagttaaattctcttacacctgtttattcagcatgaatcaaacttgatatttgcttcatgataatttaaattggtcttgaattatgatatgaaaattgaaaaggtacagttagtgttccattctgaaacacgtgttacggtgttaggtaactcgtgtagcaatataacgtacttatcattacttgtgatatgaaggccatcgaactgtgatcttgaaactagcatgtttcatttatgctatattggtcctgttctcctcatgcaacgagctgaaatggcagtggtgatatttct

SEQ ID NO: 1044 - DNA, 472 bp, Oryza sativa
gacctatgaaactcagcttgggcagatccggatccgctaccggatctgcccgccggattcactttcttcggatccacccacgggagcactgatgccatctctgcagttgcgggaaaagcttggggacggaggaggagggggtagaggaccgtcggatccatctgtcggaagcgccaccgctagatccgcccgtgggagcaccgatgccatcatcgctaccgtgggaaaagattatgggtagagggggaaggggagagggtagaaagactatcgaaaacgccatcgccgctgcctctgctggatctgcccgcgagagaagcttatggatggagaggaagagggtaaaggaccgtcagatccggcccacgggagccgccaatgccatcgactctaccggatccgccgatggcgaaggaggcgagagaggatggggcatgacgagagatggaactggtatagatgggaggagagc

SEQ ID NO: 1045 - DNA, 443 bp, Oryza sativa
  unsure (1)..(443): unsure at all n locations
cgtgaattgcaacttgggcaccttatatgaatgttgtacgtggattatactaatatataatgatgtacgtggattatactaactcataattctttcgacttattctttttcttcatgtttgccacgcaatgtatattggatctgcagcttctcgtgaaaatattatgaggtatgaattttactaccccaaagagaaacctaagaagctcatgaaaaagatatcatctccatctaatgaagacaagaaacaatcaagaataaaatttgatgtccttttgacatcttatgagatgatcaatatggattctactgctctaaanaccatagaatgggaatgcatggtacttcttttgccatctncctttctatacgcttcaattctctggagaatgtttaaattgctcttaagttctgattgactattcttcatttgcgatgcttta

SEQ ID NO: 1046 - DNA, 306 bp, Oryza sativa
gaatggattttttttgttcttccttccaaaaggactgcgactgcacatgctcacaccggatgtgccctaccaccattatgtcaacgagatggactgcttgcatgcccaacaagtaagtacttccaatatcacttctagttacacatttacttcttaatctgagatactaaccaccgacatctctttcacctttgcatactgagcggttaccactacacacaaaagacgcttccagcctgaccctgaactatatgtgcaatcgagactttgactattccatgtaccagtgcccattgatttgttctg

SEQ ID NO: 1047 - DNA, 462 bp, Oryza sativa
  unsure (1)..(462): unsure at all n locations
tgttgagcaaatagctatacaaatacatgatgaggattgtgtctctaaaatatgctcacaaatatatatctcgattgggtaaaaccttacgcccatgtgactattgttcagcctaacagttcacacttttggtcaggcttgatgaaatataacatagcaatttntcaactcttctccatttcaaccacacaatggtacatattgttggcaacttctttggcaagtagacaaacataatcgcaacacctaaacgctntgcggcgattgtagagtcacaaatcaccctaatcactaccatatttcacatgacaacaaatgatccattatcattacaataaatttacgtcacgaaacatgagcatatctattcacccaacatataacataccaactctacaaaactattgtccgcatcactagcaaaccatatttcagctatgtcacagatcttcgtatctcaac

SEQ ID NO: 1048 - DNA, 302 bp, Oryza sativa
  unsure (1)..(302): unsure at all n locations
tgtcatcttctcaagacgtgctcgcagggccaaggttangtaactttacccgccttagccttacacttaagcccactgttctgaagaccccttacattaaccaactcctttcgcaggctggtgactcgacttctgaggagcttgcctcagccacccaggtccagggtgactacatgcctattacccgtggtgagaagcactctgttgtagccgtgaatgtcacggatgacatgaatgcattcatggtctacgcctatcctgacgtggagaggatgaaccatcgccacatctgtgcccggcag

SEQ ID NO: 1049 - DNA, 466 bp, Oryza sativa
  unsure (1)..(466): unsure at all n locations
tgctgcaaagcaagagatcctcttatatgtgttgttcttataatttagcatggntgcttgacatgatgtttcacacatctgtttattcacatgattttattcaagtataagcaatttgatacttcattgttcactgcccaattttctgtcatggtctgtagttagagtatttgtcaatttgacgcttcaatgctgaaatggataaagttaaagggcatggaaagaatgtaatctacatagataaacctcagcaaaggtgggaagttaaatcatatcttgtgcagatagttcatcagtactactagcagtacattgaattaatttattagtgcttgccttagttcttttagcttacaaacagaatttgcagccattgtggnggatctgtagtaattattgttcaatagtttagagtggcaatgtatctatgcagttgatggttggtctctctttntatatacttatg

SEQ ID NO: 1050 - DNA, 476 bp, Oryza sativa
  unsure (1)..(476): unsure at all n locations
tatgtggagtatgttcccagctacaagaagatgtcagatattggcggagccatcgcccggctagcccgggctcaccggcgaaaactccattatatttataaaattgaatattgatgaataaactgatggtgaaatttatatagcaaatgctatttatattgaaatttgctcgggctcgaaaatctttctagctacacctctggaacagatagngatgatgctcccaagtttccttccgtacagtttgttcagggtacccggctacccgccttctaactacaagcatcaaaatctcaatgcaaataattctagaaagcttggcattgttttttcttaaaagaaggtaaaaaatgaaataggtgatttttcagaataatttacgtagaattttttagtgaatgttttagaaatcatgaaaagcaatgctgggcgatagaagtggcatagaacaaaaccctaacattaaatttttaaag

SEQ ID NO: 1051 - DNA, 460 bp, Oryza sativa
  unsure (1)..(460): unsure at all n locations
actaagcctcactacgctgttaagcatgtgtataaagaaaagactgtttctgtctctctcnttcgctcgcaagggaggattcttctgcttgctgtgacggcgaagacaaaagatgcttatgtcatggctaagcgagtgactgttgaggatgcgagacccctactgccggacggctgtggatcatctgtgcccacacgatgtatgatatttgtacgaacacgacatgccgttgcctgtccatatatgctcgtctgcctaatatatatgtgctgatcgacagtgtggtgataaagagatatagcgtgagacaagccattttgttcccttatgtacgcttcattgtgtacagataactgattgacaaatcggttgtttgttcacaaanaaaaggggagctctcttccacactatagaagaaatgcaacatgattacagccaatcgaataataccctatactat

SEQ ID NO: 1052 - DNA, 424 bp, Oryza sativa
  unsure (1)..(424): unsure at all n locations
tctcacgctgattattattagggcaaatcgcgccatataaatgggcgagctctccagcgtcagataatatcctgcattcgcaggcattatccggacatcggcatccactctctccatgaaaaacatacaagtacgtctcgccagatgggcagacttcttcccggcgtgctcgaggacggtctcctcgccgccgacgcggcgccggcgtctgcgaaagactacaccgtagcgactcgtcngggtggactaccggtgtggactacaccgcctgtgccagaggcaagacgntcaacatcggcgatacgctactgaaatgaaaggccttatatattcagttatcacgtaatccttctagtacaacgctataaagtctacaatggactagacctattctatcacaacgctataaagtctaaatatatac

SEQ ID NO: 1053 - DNA, 471 bp, Oryza sativa
  unsure (1)..(471): unsure at all n locations
ttacggagcacctaatntaacagagaataatacgaggcattatgcttgtgttctgaataaaacacacggtcacagctacaggcacagtagatcagtgaatttcaccatcaattgactttctgttttgtgttacagcaaatacgcgatcatagaattaagatgtaatgctgataatatgttttttgagataataaacattccaagttacctcaactgccgcaggaggaatcctgaaaagttttctccgaggttgggctttcttattggatttgacatctgatcgaccctctacggaattagtcccaacaccagttgaaccagttcttcttttctttctcttgttaagaccncaatcttcatcttcactctgttcgtcattgccaataggctctccaaacatttgctgtgaatggagagaagtggtcataatagcgttgatccatcttagtgatgaaaaggaacttactaata

SEQ ID NO: 1054 - DNA, 470 bp, Oryza sativa
  unsure (1)..(470): unsure at all n locations
tgggcctttctctctgtgagtgaggaggtttgcggtcgctgttgtttcctttcatctatccctctgagcgagagactgcttccatcctcatcattgcagccttttccttcttctttgccatgttgctttatagctggttgttttgtggtgagcagctgtggtgtgtggcaacaaaaataggacgaagggctgtgttcttgaggttgatgtggatggtgaagatgacttactcgctgaaaaggatcttccttctttnctttcccttcttgcagatcttcttccttcttggtagcgacaaatcttcttcttgcagatcttcctaaagtctcttcttttcttgctctgttctgctgcttctcatcctaagatgatgaattgggaccatggtgatgctcttgttgcggntcttccttcctacggtgacagcttgctcttgctgttgcgaatattcgtctgactctacttctggc

SEQ ID NO: 1055 - DNA, 490 bp, Oryza sativa
  unsure (1)..(490): unsure at all n locations
tctcttcatttaatataacacgatgaatggatgttgtttatttgtagattctaaagntcttcttttaccatggcttcgctgttcaagaagtgaaagtgcatctcctggttttntattgccacaggtcatggaatggatcatgagagagaggccctacaagcttagtgagctagaatactcatatctcctgtagttcacagctaaagttcatggcatttctgaagctgaaagcctcttccttcgcatacctcaagaataccagaatgagctgctgtacaacaaccttgttatggcttgtttggatttgggcttgattaagcttgcatatggttacaagaggaagatgagggaactgtcgttgccgatttcaccatatgtatacaaccggttgatcatcctccattcttctncagggcgtcagaaaactatttccaagatcctcgctcagatgaaaggcgatcgtgtgacccctcacacgtcaacctacaac

SEQ ID NO: 1056 - DNA, 430 bp, Oryza sativa
  unsure (1)..(430): unsure at all n locations
tggcccaataattgaggctctcatagcggcaagctactcgtttttataactcatgtcctgatcagtaattgtgccttatggatctaacagggagggaggatcccaaatatataaccttctccaacaatggtccaagttaacctatacgcatagttaaaatcgacaagtattcaggaaaaggagagagtacttgataaccgaagtcgatcgaccagcaagaaaacaaacgaacggacgttgcctaataggaaattatcctgagaaattcctatgttccaaccatccatagcatgaccattctctccgtgagtccgtggtcgatcaagtgtccatatttgagaactgtagcatangagtactatctatgctatagtcgagtaaattatggaggatagtgtactggtactaatgaacaacgacactggctagc

SEQ ID NO: 1057 - DNA, 338 bp, Oryza sativa
tagggtatatacttcgcatccatagattctccagttttatctctcatccactatactgcctttgccaaaggctaataaaccacctcggacgtcagggtgtcctgtagcattccatattgttattgttgccacggcatatatgcctaaaatgctgcccctgatcaagcacagcattgccactgagaatggattcatctgtgttcactttaaatagaccagctgctggtggggtcacaactcaccgcttgctttcctgatgcaaatttttcattctattgttggtcgtgagttgtttgctgcaggctttgcaagttgctgggcccatatgaatgaaacat

SEQ ID NO: 1058 - DNA, 479 bp, Oryza sativa
  unsure (1)..(479): unsure at all n locations
attacggacctatgaaactcagctttctcttcttgcatgtagtctcttttatttttttgccggtgntgnatcttcaatgtacatttgttttttattgttgtctccacaatcatttcacctatgtattatgtacatgaagaaactcttagtggaggatcagcctgcaaatggtatttaaatgaggacataccagagataaaccagttctttgataggttagttaaagcccctcacaacagagttaataattttttagagttctacccnctttctctaacatgtcgttttccatgccttgattagcctgngtgatagtgctccaaagatccagtggatatcagccggagcacagtcctttggttcgtcacaacgcccagcacagttggagcataaatctgttgctgaccttaaaaagattgatccatgggaagctgcggtaatcactcgaaaaagcatattatatgctttcgcatatgtat

SEQ ID NO: 1059 - DNA, 414 bp, Oryza sativa
  unsure (1)..(414): unsure at all n locations
ngttgatcttgtcaactaagacatcacattgtgcttgagacttgatcttgcggtctgcgtcaacagattcacattaatgaatcagcatgtacaagataatggcttttgaggtattgattattggtaccttcaacctcctttaaagccgaatccctctgtcttgccagctctgccttgtcattttccagagtatggatctgcttctctagttgagatatcttggcagcttgcactacattaacttcggttaatcaagattacagagataacagcacaaatcagttgggcagagtttgcgcgaaccttctgacgagccactcagttcanaattggactcctggagctcagcaatccgatccctcagatcgtgttcattcttcttggcaagttctctggcctcgtgcaattgactcc

SEQ ID NO: 1060 - DNA, 365 bp, Oryza sativa
  unsure (1)..(365): unsure at all n locations
aaccgatatgcccttaggcacggccatacataacatagaaatcacacgtggaaggggtgggcaattagctagagcagcaggtgctgtagcgaaactgattgcaaaagaaggtaaatcggccactctaagattaccatctggggaggtccgtttggtatcccaaaactgcttagcaacagtcggacaagtgggtaatgttggggtgaacccaaaaagtttgggtagagccgggtctaagtgttggctaggtaaacgccccgtagtaagaggggtagttatgaaccctgtggaccacccccatggtggcggtgaacggaaagcctccatcggtagaanaaaacccacaaccccttgtggttatcctg

SEQ ID NO: 1061 - DNA, 343 bp, Oryza sativa
  unsure (1)..(343): unsure at all n locations
agcttgccactgtggaccctaccaggatcccgcgctttatttttatgcgatcaagaccacgccacattcaccgtgaactcctcctcacacctaggtcgacttctccactgccggtcacgcctttcgcgccaagccagacatcatctccgctgaccgcgcctctcgcgccgagccggcctccgctaccatcgactgcgactctctgcgccaagccggtctccgacccctccaccgaacgatgccgagcctgccataagcagacggctcccacgccctcggctagacgtccgagactgttatgccttctgtgaccgcagncgcagtctccaacaccacagccact

SEQ ID NO: 1062 - DNA, 443 bp, Oryza sativa
tgtaaagatactatgtggcttataggtttgtacactgagctttgtttagttacgtcttgcattaatatcttgtgtgatagtcaaagtgcaatatgccttacaaaggatcaaatgttccatgagagaacaaagcacattgatgtgagatatcactttattcgaagagtgattactgaaggtgatgtcaaggtatgcaagataagtactcatgataacccatctgatatgatgacaaagccagttcctgctactaagtttgagctttgctcaagcttggttggtgttacagtatagtcctagagactatttggcgcgcggtgagtttacctacatgaggtattcttttggtgatagatgttctcatgctacaagaggaaattcgtctcaaggtggagagtgttaaatatgtgatccgaatattgggcccacaatatattccgata

SEQ ID NO: 1063 - DNA, 414 bp, Oryza sativa
tcctcggatgccctctatcaattcattcattcatgaatgtactttttcgcttttcataaaccacacaaatcgtatacagctgtacatcgtatatggattgttccccatcaagcatcctctcggtttcttgcattctatctacatataaaaaatatattataaaaaatatgagatatatcagttcacagatacgtataattaaattggatttctaccagctgtaacataactctaactaagtatccgtatacatggttatgtttgttaaagctaaacttaaagctgtatattcgcggagtgatatgccatatgctttataaaaaaaaatataaatattcaatgcctaaaactcgatcttgtgcatcgaacacgtacgcaccattagtcgactgagctcgagagctagtcgagaat

SEQ ID NO: 1064 - DNA, 427 bp, Oryza sativa
  unsure (1)..(427): unsure at all n locations
tctcgagttcttggtctctgcccgaggcattgaggccaacctcgagaagattcgagctatcgagcggatgcgcccccctagcaaacttatggatgtgcaatgcgtcaccggttgcatggccgccctaagtcgtttcatatcaaggctgggagagaaggcgctacccttgtttaagctcctcaagcgctcggagccgttcacttggacggaggaagctgaatatgccctcgcccagttgaaggcgtatctcagctctcctccggttctagtcgccccggagccaaatgagtccctgctactttacttagcagcgactccccaagtagntagtgcagcgttggttgtggagcgcgatgaggacaaatcctcatctgcgcactcccactctgtgccgacttggccgggagcatgccggaggagaagcccc

SEQ ID NO: 1065 - DNA, 352 bp, Oryza sativa
  unsure (1)..(352): unsure at all n locations
tgataccgnccgcagaaggatgatgatgacctctggagacgctgtcaagtacaagagctccatggatgctttctccctaatcctgaagaacgagggtgccaagtcactgttcaagggtgctggtgccaacatcctacgtgccattgctggtgctggtgtgctctcaagctatgaccagctgcagatcctcttctttggaaagaagtacagctcgggcggcgcctatactggcagaaaatgatgacgaacatgtgtctattcctggtcctgcactaacgggatctggtgaattttgcctttttaacatttgaacacaataataattcttgtaggggagaacacttcccgacat

SEQ ID NO: 1066 - DNA, 461 bp, Oryza sativa
  unsure (1)..(461): unsure at all n locations
tatattcaaacctcaattaatcatcagaggcataactgacattngcaaccaaacgcatcactgaaatgaaggattatataatggcacgggtatgctagggatcaaattataatttcacgggtatcgaacggttaggcaaattncagaggtatgaaagggatcgagtgagtttttataggttcacatggaatttactcaaactgcatgtgttatggtggtctgaatgttngagttgcggtaatacattgatccattaagaattttccacacctttttcgttaccccgaatcctcttgtaattgtatctcgccgtgagacatgcacctacttgaatatttcactagtacacaagagctttttccatacggacgaaatggatctttccatgcatctagcctgcccacatggaacatgatgtctgtaaaaatctatatttctccatgcggactacacaaccgcat

SEQ ID NO: 1067 - DNA, 488 bp, Oryza sativa
ctagcttcttattctcataatatattatctaagcttattggttagaatggagaaagaacatctattcctatacttctaatatacatagtatatatacgttctagttaaccgatatactagctaataccctctatccgatgctctcctggtacttcgagaagccatccctgactgccgagttccttacgacagcccgtcatgaccatacaaccggggctaaatacggagtaataccctccccacggaattaacttaggattatataccggcgcggaggaatacccgtactgagctgtctccatcagcggcccacctctcatccgcaatatataaccccaaataatgatatcccgtaatctagacaccacgtctaaactaccagatactactctaatatcatcatcatgacatatagtatatgcatatgcgaacattatacgcgcaccagaagcatctccagataagcttgccatatattcagtattaca

SEQ ID NO: 1068 - DNA, 425 bp, Oryza sativa
  unsure (1)..(425): unsure at all n locations
ggacagatgctgntactagcaatggcgaggtttcatgtgatttagtccacccccatatatcattcagctgtagcgaaataagacctgtggcagaaatatgtgtgggctcctcgaagtggcatcgagtgaagcagagatgctttagtgactggcacaccaacttctcggtgcagattccacatgattccatctcatggtcttgcaatgcaggtaagcttgacagaaccgcagtaaaccgaccatctgtgatgcatagacgcttcattgactgcgagataatcttgttggtggcggaattcccacataaaatcatctcaagttcctccagtgaaggacagcttgagaaatccaaagcacgcttgtccagcagtacacgcctaagctctaatgtctttaagngttcacagatgagatgcatgttgact

SEQ ID NO: 1069 - DNA, 495 bp, Oryza sativa
  unsure (1)..(495): unsure at all n locations
ngatcgagccncattntttggctatctaatgattcatacataagctcgtanaaacgcataataatgtttacttacttcaacgaatacctacctacctacctacgggtgcaaatgtgcaataaacccatttaccagtataatcgcaacatcgagcatgacattacaaagctttcaagaactggagcaaatgaaacactttgacaaaaacatttgagatcacaacacacagaagatctaaataccaccacaccttcaacgagaaaatcatcatcaaatccttgtggcaataaatataacgaacaagtctcatgttctgagcagaaatgcaatcatagtgttacatgagctggcactaaaattatatacagatcatgtcacaagagaggggaacgaaaccaatcactagtattagactcgcaaccctttatagtccatagcaatacagtcacggcagagcatgtcaaccaaaatcacaacaaacaagctcaacgtgtg

SEQ ID NO: 1070 - DNA, 448 bp, Oryza sativa
ggacctatgatactcagctgacaaggagggatcacaagtaaacatggaacacgcgatgtaatatgtagttccataatcccatgtactcctaattagcaaaacgtgcaattatagttgcaaagagtaaaacatttgtcaattaacaaggagggctaccggtttgaggaagaactggggagtgaagctcattagctgcaaacttgagggggatcaatcaataaaacatcacgcaccaacagacaagagaaggtgagaatttcccccatactaccaccacaaccacatcctctagtaaattaaacttaaaacaatccatcaccactgtgtagtttttccctaacaccttagttcagctcttaatagaaaagaaagagcggtagcaggctatcatcacatataatggaggaggaaagaatacgagcacttacctatgggatgattgctcggt

SEQ ID NO: 1071 - DNA, 408 bp, Oryza sativa
  unsure (1)..(408): unsure at all n locations
tctgcctgacgatgtgcttacaatcatcctccgttgtcttgcgccacatgaccttgccatgtctcgctgtgtctgcaaactctggtgcaccatcatcgacactcatcgcatgctgcgtgtggacctcctcccacactcagtaggcggcatattcatcaactttcatgatctaagcttgtcagaattcttcgcccgcccctcgacaggccccacaatatctggcaacatcaactatttgcctctcacatccatagttaggggccactgcaatgggctcctcttgctttacagccatatcagtcgtcccggcatgaagcagttttatgtggttaacccggctacaagacagtgggtgcaattgcctccacctccaaggcctgatattgngatcatgcacttagacaattt

SEQ ID NO: 1072 - DNA, 378 bp, Oryza sativa
  unsure (1)..(378): unsure at all n locations
attgatctcccgttcagtcagctnttgctttctcttggatattcattatccatgggtccgccaaagatgtggntgagttccttgcgatggtcttgaaaaccagtcgagtcatcatcttcgtcatccttcttctttgacgtgcattgatctccgtcagtgttcttgcgtgcgttcttggcgtattgttctgcaaactatttgtatacgaagcaatctttggccgcgtgactggaatttggatgatgcggacattgtgagttcatgatcttgtcaaaagtgttgacgcgggaacgtttgtcgggaggatagtgtagtagttgccacaagttcctcgggcttacgcttgcgatccttgtgattggtacttccactccccct

SEQ ID NO: 1073 - DNA, 439 bp, Oryza sativa
  unsure (1)..(439): unsure at all n locations
ntcttgggaactcaggtacacaagtagcagaacctctgatgaaacattttggaagtaaattagtgcttcagtaaaaataaaaatcaacctcagcatgaagcattagaccttgaaaattgatgaacatgtacttagttacctacccagtttcaaaatcagctaaatacttctttatttgttgaacccttgatgtgagttgttctcctatagaaacaaggcagagtgtgcagtatgtaagagaaaagattgtgaatcgaatcaaaagaccaaggccaatctttaattagttntggatccgatttcttccaagctagtttcactgtagtactcaccaaagttgactagcaaatctagtctaacggactanaatgaagctgccatataatgccagatggaacananaatatatgtagcatcaaatctcacataacaccccatg

SEQ ID NO: 1074 - DNA, 368 bp, Oryza sativa
  unsure (1)..(368): unsure at all n locations
tgtgtatactanggaatcaattcaattgccatgttcactattcctagtctaccaggttctgcacagagatcaaaatacttcgttttatgcatctagggtgtttcgcgtttctgctaagattcaacgaattatactggcagatttatgattntattcccaagacgagtttgaaatttgatctaccgtttcaagattgagatacaaattctcattatggcaagtgatgatttgaagcgggatgaggagatgctaatactgtcgtgcaccaatctatcagttgcgcatacatgtttcaggacacacaagcgaaatcatcgagagggagttggaaggttcctgtccaaatcacatgagggtggtcaaatttt

SEQ ID NO: 1075 - DNA, 458 bp, Oryza sativa
  unsure (1)..(458): unsure at all n locations
taaggaccttgtgaaatgatcacactggcttagtttttgttcctccagcctattatctgaatggatgagccaacattaccctagatgttntattctgcatataaggaaaacatagagcaataaacagatctagagctactttctagaaatggcctctatttttaaaaaaaaaaaattgtacggtacaattattttctcgaacgcacgagaactgcttgtcattttgttaaagaagaacatacgggatacaacacctaacacacacacacacacacactgcagcccatatacatacataagacgttttctaacttcacaccagactttagaaaacaaccaacataggaactcagggtgatgttcctagctactttggttgttcatatcatttcatcatgtaagatacatgttataacttatatttttgtatgcagagatgaacatctactgcatctata

SEQ ID NO: 1076 - DNA, 442 bp, Oryza sativa
  unsure (1)..(442): unsure at all n locations
tggccaccagaaaccagctcattttcagtctcccttgtttctgatctcagtgagaggcctctttactactgtatattgaccatcaagcagggggatccttacatgatagaattatacactcctaataagatcgtatatcagttntttttgcgggggaaatggggattatattactcagctaaagagtcctcacaaacaaaatgtgcgatgaanatacatttatcatccgggcagaactcagtcagagattcacaccgggctctattagctagagtatggctaacattattctgattccgctgaatcttcacgatgatcacttccctgtttcctgataacaattcaccaatgcccctgacgatgaatgtaagctcagagcgcccttgcacagctgactctatgaggttcttcaccaccaagcagtctgtctccactatgaatg

SEQ ID NO: 1077 - DNA, 434 bp, Oryza sativa
  unsure (1)..(434): unsure at all n locations
tattacggacctataaaactaagcttaacattgcggccgatctgagttganaacatctctggatcatgcgttgataagttgctcctgcgttcttcaatccaaagggcatggtgatgtagcagtaggccccgaagggcgtaatgaatgcagtcttcaagcagtcggattcttttagtcggatctgatgatatcctgagtagcaatccaaaaaactgagtagctcgcagccggctgttgagtcaactacctggtcaatgcgaggtaacccaaagggatctttgggacaagaattgtttaggtcgatgtaatcaacacacatgcgccattgtcccgtcttcttccgaactangactgggttagccagccagtcgagatggaggacttccttgataaagcctgctgctaacagcttggtcaattcctccttgatcgca

SEQ ID NO: 1078 - DNA, 414 bp, Oryza sativa
  unsure (1)..(414): unsure at all n locations
ctcatagaagtaattaatcacatcatccaagtgagattgatgttctgcctcattatctcattatctgttcacctggttnttgttcctccgtgcctctttcgaacgtatccttcaaggttcacatgtgtggtcaattagaagcattctacaagtattaatagtatgtaagtttggtgttatttgtacttacaatgtgtagcactttaacaagccggtgtccactgctcgtagcttatagaggtaaaaaagatccgagaaggccactgcaaaataattntgttgccccaaggatggttcttggtcgtggtaacctactatggacgtgtccctcatcttgctcttggagttggctttctccatgtagtatctatgcagcacttggcaagcagaacccattttggtaactcatggtct

SEQ ID NO: 1079 - DNA, 427 bp, Oryza sativa
  unsure (1)..(427): unsure at all n locations
tatctagaagaaagcaagatcaagaaggaatcgagaagagctcaacatggcagctcaatttatctattaattagacagtgtatagtaattntcttttttattgttaagcaagttagtttagtatccgatcaggatttgtttcttttctcccatggttcgtatccataaagcagacagtagggatggcaatttcccttgcggggacccgacccaacgggggcgggggcggnggccatttctgacccgcggatgagtcatgggatgggccccgcatttgggcggngaggggacggnggagacattgaacccgcgtggccccaggggatatattaccccttcaaatgtagcccatagaagacctaacaagcccaacttaataaaatattgagatatataagcaaaaactgaacagtctaaccctacctta

SEQ ID NO: 1080 - DNA, 435 bp, Oryza sativa
  unsure (1)..(435): unsure at all n locations
ctaagcttctcnaacctgtttttttatacttggaatatttgtgctttttttttttttgcattctaaactggctggatataatgacaagatttaattgaacaaacaaacttattgctgagggagtacagactataccgtaatagcttgtacacatgaaaatagcatagtacattatggtacaaattacttaggcttctcatattcctgactttcctttgttttcagagtactagataaagaaaaagaaaacaaaaactaactaaatcaatccatctaataaagatccataaagatatgaaaacggacgcatacctttgtcccattccgaggcgtgctgtcatatttgttccttatagaaaacaaagtattagaatccccgtagacctgaaaagaacatatattatcatattttcagaagatccaagaatattaaca

SEQ ID NO: 1081 - DNA, 338 bp, Oryza sativa
ctcaagctatctctagacactgtttctcattaagaaatcatctctgacctctgtctctattagctgtgcgaccatggataaacctgatgaggagataatctcactagttcccttggagtcgataccctcggaatactccgtaagggaagtgctacatcggtatatccgtgcgcttgcggattctatctgtgacgataagaaacattaaccgtgggtcattttcttcccaacaggaggtgaaagcagggggtacagatgcttttgatgtgtgcaacaccaaaagttgtgtttgggcacaagcagttgcgtcttctggaccctttggatcggttttggct

SEQ ID NO: 1082 - DNA, 464 bp, Oryza sativa
  unsure (1)..(464): unsure at all n locations
tctacacttgtgatggtttagttaattaggaaggcttgcatttaatattgctccatgaaagcttcgatactaattaaatcatatatgtacaaacttagtaccatgtgtgtttgtatagaccttatcgtttttgcaaaatataatagatcaacaataagtgctacaattattttatatcactagctaaatgcacatgcgttacaatagagttgataagagatattcatctttataaaatcatttctcattgtctattcatgaaactatactttcatcaatcaaatattattggttagctataaaatgattgctaatcatcatcataatttaaagttgatatcacattgtcttacagatctctttttacttttatagcctggntcttttctatataattgataaaaatggcatgtaacatgtctaactaacatttaccgtatataggcctcactgtcacacttggc

SEQ ID NO: 1083 - DNA, 409 bp, Oryza sativa
  unsure (1)..(409): unsure at all n locations
ncgcagaaccctcatcgacggaggcagtgcactctatattctcttcgccaagaccttggatgatatgcagatacctcgctccgagctacaaccaagcaatgcgcgctttcacggagtaattccaggattatccgcaactccactcggccagatcaccctcccggtcacttttggcactcgggaaaacttccgcacagagaatatcacgctttgaagtcgtcgatttcgagacagcataccatgccatactcggacgcccggcgttagccatagtcatggtcgtcccgcactacacttacatgatgatgaagatgcctgcgccccgaggagtcctgttcctacggagcgacatcaagcaagccgtcacatgcgacaaggagagttgcgacatggtccaaacccgcgagat

SEQ ID NO: 1084 - DNA, 444 bp, Oryza sativa
tattgattatgtctattacagatgggtatatatgtatatggtgtactgctctagcagtttctctgtgttggagatattgtgctcgccatacacatgtacatgttgggggtctcaagacaaacattattcacaaatttagccttacatatctccagagtacctttatacaaaattatctttcttcttccaatatatgtgatttcacttttctaaagcattccataagtgtctctcagtagctgtaccaaacagtaagtatttcataaacattttcttacttccttatgttttctcggcggaaagaaatatattaattaaacgacgactggattacaatctcatgacagagcgtcagaaacacacttgggagcctgagagccaaacaacacttttgtttatgcataagctgagtagagcaagaccatgcgttacaaaattactatg

SEQ ID NO: 1085 - DNA, 467 bp, Oryza sativa
  unsure (1)..(467): unsure at all n locations
ntattgatctcggtcattctgaggatacttctggcctttgctccatgacagtgcacacagccagcaaactccaacacaaacaaaataagagaaaaaaacagcgtgcaagatcaaggccctacaacccgaagactatgtcgccacccatatgtcggggtaaaaaactccttgatcacttgttccaaatgtaggcaagccgaagtgacaaagtcctgcaatttatgtttctggacaataacctataatctatatcttctataaagntacaactcactaaatttaaagctcaacattcaaccatatcacatcatcattcgctaatgataattacatatcaaacctcatgcaagcatgcaatctataatctattgaattctacaaatcagcatgcanacatatccaatcatcatccaccatatcatttnncacaatattntacatatctatatatattaatnttataatac

SEQ ID NO: 1086 - DNA, 459 bp, Oryza sativa
  unsure (1)..(459): unsure at all n locations
tagtactctgtttcttgtacaaatagagagacatgtaccaacatgcattgttcaaagctgctcattgctaacttggcagtggtagctntgcaactcacccagaatcaactatcagggatggcttgattttataagagaagtacacattttctgcaaggaaaattgcaacatttgtccttaagcggaaagcacactagcccacacatatttgtccttagaagaataatcattccctctagtaatattntcttccctcatggtcaccatttcaagtgcccgaggcaaaataggagactataaggtccagtgaaaagagcatggaaattcttctagtaacatgattgtgctttgcttgctacaaccaccaagattgtcaatctgtcatgcggacatctcctaatcacagataattaacagctttattatgttatgtgtccatcgcaatatggaatgtcatgt

SEQ ID NO: 1087 - DNA, 499 bp, Oryza sativa
  unsure (1)..(499): unsure at all n locations
ctattacggacctatgaaactcagcttacagacctcgaatgattgcgtgcagcatacatctgttgctatacacctcgccctttatataggagcagcctggccgatcgaccacatccatgagatcagagtatatatatatgaaaggaaaggggctacaggtagtagactccggccggttgcatgctttcttgttggaaagaataggtaggtctttagcacttgattctctcgttaatctacatatatacatgcctcatgccatcattaatttcacacttgcatttgcattcttcatttcaagctgcctcccctcaatcaatccatggtccatgcgcattggctaattatttgctcaatgtacttgccaatgaattcatagttaatgtaattccttccattttaattcattcagcaagattagtactagtgaatatttgcgcttcacgtaactcgtgtgacacatagatatgtttcccccangacaacatgacacaatcat

SEQ ID NO: 1088 - DNA, 432 bp, Oryza sativa
  unsure (1)..(432): unsure at all n locations
tcggatgtgcatcgactacaccgaccttaacaaggcatgttttaatgatccttacccnctgcctcgcatagatcagatcgtcgactccactgcggggtgcgaccttatgtgatctttatatgcatactctggttatcatcagattcgcatggctagggaggatgacgaaaaaactgcgttcattacccccgtaagaacctatcgntatacatcaatgcccttcgggttaaagaatgcatgtcctacttcttaacgagctactcgaatttctttgggtattcaaatatgacgtaatgttgaggcttatgtcgatgactaggttgtaaaacgcctaccaacaactttactttagatctaccgaaacctttgaaaccttcgcttgccgtataaactgaactcgataatgtgtgttggtgacctgcagcagcttct

SEQ ID NO: 1089 - DNA, 493 bp, Oryza sativa
  unsure (1)..(493): unsure at all n locations
tgtccagaaggccaagcttgatatgaccgaagaattcacaatatctatggtggatttcatcgcacttcatggaggaccaccatatgtggcaggatggatgtttgtggtgtctgatataacacgtataggagaagatgccttggactttggttgggctcaacgggttgctggtggtgtgccaatggtcggagatgtcaaatgtaagcaagtgagttatcagatgagatgcatcaatgacagtggtgaggattgtgttgtggcatccatgttcttaccaaaatcagccatggagatatttgccaaggagatcttggtgttgtcgtctaaggagattgaataaatcaacctttcttttgtatccaagaagtaaacaagatatatgtgtattgcaactgcttggcatgntttagttcattactttctcccaaagctagaaatggcttactaataataagtcaataagcaagtggtgctactcttaatatagttttat

SEQ ID NO: 1090 - DNA, 219 bp, Oryza sativa
tataaaccactgccagaaccgacaaacattggtatcgtttgtttatctgccaactgacgaaggagccgacctttctaaaggaaccccagttgcgacaggcacaacgcgtataaaacatggacgcatggactcattccaccaacccattctttatgcaactatctcttaaggccacagtaccgatgggacttgacccccgagcatccaacatactcgttt

SEQ ID NO: 1091 - DNA, 476 bp, Oryza sativa
  unsure (1)..(476): unsure at all n locations
taaggcttgtaatggctggtcggacaagagtnttacagaacttcttgagctgttaaaggatctgttgccagaggggaacaatttacctcagacgacatatgaagcgaagcaagtattatgtccgttgggcctggaggtcagaagaattcatgcatgtccgaacgactgcattttgtattacaaggaatacgctgacttggatgtctgccctatctgtggngcatcaagatacaaacgagcaaagagtgaaggtgaagaaagtaagtcaaagaggggaggcccaggaaaggtggtgtggtatctcccaattgcggagcacatgaagagaatgtttgcgaacaaggaacaagctaagcttgtgcgctggcatgccgaagaacggaaagtcgatactatgctgatgcacccagcagattcagtacagtggacgacattcgatagggattaccaggaattctcaatgacccaagaacatg

SEQ ID NO: 1092 - DNA, 371 bp, Oryza sativa
  unsure (1)..(371): unsure at all n locations
aagctnggcagntggtcagttgggaccgttatccatcgatggatattgtcttgatcggtccaaacagatactacagtagttgtaaactgtaaatgctacatgaacacgctttgtctatgctgtgtgtagttccttccaaagttgaaagtttgggttgaaattggtatgatgtgactgaaaagttatgtgtggatgacatgatgatgcgatgtaaaaagttgaaagtttggatctaaacatacccttaagtaagatctaacgacatcaattcttgatccaatgatggctataagactgtttaagttacaggagctataactatgtaggtgatcccaatccaagcatacggtactccgacatatacaaacacg

SEQ ID NO: 1093 - DNA, 477 bp, Oryza sativa
  unsure (1)..(477): unsure at all n locations
taccttcttttctatgagaggatagaaggctaagatgtctgtatcctacagagtancaatcacaaaggaagcatatgttatcagattaacaagcattctttggacgaccaatgattcaatcttaatcagtgtacatatactgacgtaggttcgtgatcaagttgaatcttgttgcgttggcttagtcattgcaggactccaatttgaccgcaacatgtacataccagttgagagaattcggttgttcttgaccagctgatatcccttttntgtccatgagtgtattaataatttattcgaaaacaaacggcatagttggacattttgcattagagaatttgagcaaaatcattatgtacgcacatggacacggtttcttcttctctttgaagtaagcaanatcattatgttngcacatgcacaggttgttattcttctttttgatgtgaagcaccggtacagttctgtcgattgtac

SEQ ID NO: 1094 - DNA, 429 bp, Oryza sativa
  unsure (1)..(429): unsure at all n locations
cttccatagtcctatacacaaaagaacagatcaatcttttgtctaataanatcgaattttataaagaatgctctgttagtctttgttacctttataaacatgaaagctgccccttgtcgatagcatgctttgggccaactgggccgcaacattctgcacatgttagcatcagcaatagccccaatgccggttgacaaacgcaaccagcataggctcctgtttgctagcagggttgccttatcatgagcacttgtgctaagatctattgcctacagtaaaagtacatgcaacttttatcaatacataaaatggaatgtattgtttggctatattactcacctcaactgtaggtctgtagctattatcatgtctttgtaattacgtaatccaacaatgctagaggtacggatgaaaacggagcggatagtt

SEQ ID NO: 1095 - DNA, 416 bp, Oryza sativa
  unsure (1)..(416): unsure at all n locations
ntgatgcgatcttacccatntagatgtaaattattctctgtgcagttgcttctagcaattaanaacttgtagtttagggcgattagggacttgttcgttcaaaaattggtccgttcaattagtgtatcttcgacgcttttaaacaaaatcggtctgttgacctgaaattttcctggtgaatgatggctatgtgatggtgttgaactcttgaaactgtgactgaatattaataacctgtcaatatcctctgcgagtaatcctttcgtcaggctaatccgctggttaaatagataagttatagagaattagagatgcatgtactgttgaattgttgagttgaaagcactgcttcttatggaaccaccatcaaccaactgagatatgtgaaatggtaaaattaatgtgggctggtgatc

SEQ ID NO: 1096 - DNA, 425 bp, Oryza sativa
  unsure (1)..(425): unsure at all n locations
tgtcccttgctagagcaagagggccagcagttcccaatggctcagtctcttgggaacacgtgattgtgatgccaagcttatcctcaaagtccttcaggatattgagcattacctataagacggatacagaacaaaccaattagaatgcgaagatagttatacttataccatgagacaacagtaaaatattatcttctttttacctccgggcggtagttgatggctaaaacaacttctgttactccaacttctttcaaggcctcaatctgcataaaccagataacttttaattcagagctcattactctcctcaatcctcatgctcatgtttgctggagccaacattntggatataaatgaagtactctcgataactgantggaattntcaaggacagaaaatctggtgtgataccaaaagagttc

SEQ ID NO: 1097 - DNA, 403 bp, Oryza sativa
  unsure (1)..(403): unsure at all n locations
atgncaggaacttacactgaatcaaatgaacaacacagttttttcatatcacggaaatggatatttagccttatcactcactcttacatgagacacaacacctgacatctgcatactcgaatccatctaactgaaacacacacacaccaagcgatatagctaacaatccttctgcagcaaactcgatcctcgatcaggctgtgctaaccgtgtgcggatcgacgatggccgagccattctgaaacgtagaattgtccgccgagccgccagagtctccaccggcagtactgccagtggcagtcgaccaggtgaacttgtcatcgatccccgcgtggtacatcaacgcccacaggtgcgtgatgaactcgccgccgtcgacgagccccttctcgtgggcgctgac

SEQ ID NO: 1098 - DNA, 290 bp, Oryza sativa
tatatacgtgacctatgaatctcagctcggcagcttgtcgatgtctatggcgggagctggttcgttgttccccaagctccagccaagaacgcagtggcgcgaattcacgcggcctgtcgccgccgataagccgatgtagacgacgtcggcgagcaccgtggagaggtcgtgggtgaccgagagcagcggcttgacaggcctggccattttgagaggagccatggtgacgtcgagctgcttcttctcgccgtcatggtagttcactcagacctgcttctgctggcggctga

SEQ ID NO: 1099 - DNA, 401 bp, Oryza sativa
  unsure (1)..(401): unsure at all n locations
gtacataatcaaagcggaccgtatctctataagtgcataggatagtttatcttttgaaatcgagtttttaggaaaaaccgcactattaagaggggttccaggtgatgctctaagatatatcaagtgctcttagtgtgaaccaagtgtcaagtttccctatgagtcatntttgcaaatactccatctgttcaaaaatgcaagtctggaacttcctgtcttccaagtccggaagttccggtcttgtgaaaaagattttcccaagtgtagtctggaagttccggtcttctatgtacggaactttctgtcaaggtttcacgtcaaaattgtgagtaacggctagatgacgtctcctatctcgtatacatatacagctccgttgcagctcggtctgagctattcca

SEQ ID NO: 1100 - DNA, 494 bp, Oryza sativa
cctatgaaactaagcttgccgtcgatctggcgtcgctctgctcggagagagaatatttattgtctccgctcttgctcacggtatctgctcgcgggtgaataaagaaaagataattctcaaattgattgccacctataattaattccatttaacgcgctggttaaaaaaaatacacatatagtatttgtgctttttttttctaaaaccgacacctatagtttattaaaggtactggttatacatccttttaattcatggagatgagaaatgttttaataggtatcgattttagaattgttggtatttatagtgctgttcattcatgacgtcctgcaatagtgatggtactagattgtaccatctggtcctagattgttatatgatagaatgaagagaatatattcttgtgacggatcctgagctactcttaatttcttaactaaacgagtatacacataattttgtgtactatgaaatgatcatccaatcttata

SEQ ID NO: 1101 - DNA, 421 bp, Oryza sativa
  unsure (1)..(421): unsure at all n locations
tggcacagtgcacctatgtgtggatgataatgganaactgtgagatttaaaaattggatggtgactcatttttgtatgaccctcctccttttactttattttggaaaacatggctttttcctatatttatctttttttttcatgctcgagaatactttatctcattcccttttgagcgttgttttcattnttcttccttttagctcatttctcattggcatcaaccattggaggagataccataaatgtatggagtctttatagaaattcttcttgtggataatgtcttgccagaaacaacgtaccgagcgaataaatttatccatctccttggccttgagatacagacaatgtacgctgacgaaataattggatcctttactggggtgattatgcggatttggaccaatgtccagtatgc

SEQ ID NO: 1102 - DNA, 479 bp, Oryza sativa
  unsure (1)..(479): unsure at all n locations
cgcagaatagtagtgagggctctgaagaacctcatcatcacttggaatcactttntgaagnggttatgcagtttatggaaccattgattttagagtgtaagtcatattcggagaagaacttttctaatttaggggtcacaaagctagtagaagttcattgtatgttgaagtccatcaacaaggtatggacaacagttattgaagagaaaatctatgtacctacagaggacacatcggaaggatcttactctgagttcttgcaagatatttacagggtcttagtctcaatggccgaaaaaatgtatgaattctgggtgtcagctgtgcatatggaagatgcaaacgttaagaagatgctacctttaatgttngctgagattgtcgatgcagttggtcatttgctagatattgaatacaacggcatggggcgggaccttgtaaaattatgggtaatgatattcgcttngtcagctactaat

SEQ ID NO: 1103 - DNA, 467 bp, Oryza sativa
  unsure (1)..(467): unsure at all n locations
ntccatagagtccaagaacgccaaattccgagacccgagtcatgagatatcgccgctttattaacgggcgggtgagctgaaaagtgacctgcggtctgaccgtgggccttatgccggtctgaccaggcctgttagccggtctgaccggcgtggtaaagccggtctgaccggcccactggtctgttgcactggtttggtttttggtggcgatacaaagccgccagagccgcaaccggtcagaccgagccgacggcggtctgaccgagccgttgacggtctgaccggccactacactgcggtcagaccgaccaggttgagtgggctcaatgattgccctgtaacggctagctttctagccgttacaaagtagtccggtctgaccggcctacaacggcggtctgaccggcagggcacagaagtggggatttcggttccaacgactaattntggtggctggggtatatata

SEQ ID NO: 1104 - DNA, 308 bp, Oryza sativa
  unsure (1)..(308): unsure at all n locations
cagagaaacggagtagtcgagcgctgattttactcaaacaacagatatctacaccggactaactcgagtgaaaatgaaggaacgagtcgaaataagcctcaataggtgacaaacaagagtccgntggagcataaatctgaggttcgaccgccaaccgaacctcaacatcttatctcaactactaaaaacatcacggaactatccactggcactaatacacttacgactgatgcgagacgcctttgactatcgagcgcgtaatgccgaagtctccatcagttgaggaacgacactgaacggtgagcgca

SEQ ID NO: 1105 - DNA, 470 bp, Oryza sativa
  unsure (1)..(470): unsure at all n locations
taagctgctcatctaatgtcagcttatatatcctggtaatattatcgcatatttttcttggaagtatgaaacatgaattttctatgcttccatagtatggttcattgttactcagctcagttttaccgaattgttatttcatagtcctactatgattcataaattctcgagactcagactactgctgcagtctatactagaagggcagtgaaacgttttgacgcgaacagtgaaagttagatgtagcttgtgatgtgcaagcataggcgtcgcgtgacacttaaggattgcctgaaattgagttcagacttcaagctttctgtacaaattgatgactgngaagacatggcatgcttctgtaacttttntgcttgcacaagtggatggctggtattcgtccataactcttttgagatctgcattgtcangtgttacctagcaagataatatctactactgtacttagtatg

SEQ ID NO: 1106 - DNA, 386 bp, Oryza sativa
  unsure (1)..(386): unsure at all n locations
tattacngacactatnaatactaagcttacaaagaggaaagataagctactagagccataccctatctcttccgaaggtttctggactcctgatttctactctattcccattccactagcttaatatcactaaactaacttgagagaatatgaaagagctcttgcttgaggtgtgtgaatgaagtgagaacgtgacgggtttatatagcctcccaatgacgattgtcacggntagtatggtcggaaatacccttcaatcgtcattgggagccaatttaaaccgttcagaagaaaccttgcattcaacggcggcgagggaggtttcgaaccacgggccaaccaattcagcccatagtttgtgtggtggcctcctggacttctccact

SEQ ID NO: 1107 - DNA, 348 bp, Oryza sativa
  unsure (1)..(348): unsure at all n locations
gtgccactntngtattgatagagaaggaggatattatcctcttctacaagaatttacagggcgacccgcatgaaagagggaagagctacatctattcacctgaggggacaatctgcctttatccaggtcttcgcttcctccttaatcttggcaatgattgtggttgacgtacaagcaatatgccggaagatctatgcgcatcgctcacaccaaagcttccacgtgaccaggatgatcatcgattttagagcctttcgcgggatctggggcagctgataaatattgtacaaccaatcctcctccactgaagcgtagaaccataacggtgtgcgatgccttgtactccaa

SEQ ID NO: 1108 - DNA, 385 bp, Oryza sativa
gatccttaagtcacctgaagctgcagcttccttgtttcacctcgagatcattattctttagtgccttcagcgctccacagaagaaggaaagttgccaccaaccgaccagcgtcgttcactcctgtccctctcgtcattaatcacgcattaggtagattcgtggttcttgatatgaataagtcgagctcaccatcatgttcctatccagccacatggaaaaagacgagcagaagaaacgacaagaatcctactccctccgcccataataagcgttggtgtaggtttaatcgtctaactttaattatccgtcttatttacaacactttgattgtgatagatgataaatataatagttcttatgagtgattaacttttcatttttcat

SEQ ID NO: 1109 - DNA, 445 bp, Oryza sativa
  unsure (1)..(445): unsure at all n locations
agcttgttcttgtggctgaattcaatcaagtctttcatgtgattcaccacctctgatatctgaagaggacacaaattcaatgaagatgctgtgtgcataagtatattacaggaaattctggataatattatagcaaatgttaaataacacacggagaactcgcgaaaatatggatactgttagcatcgacatattaataactaaagaaaattcaagagcttctttatggataatatcacaaaaataattaaataacctacaaatgctatgcttacctgcaagcagcgaacatatcttttagatagaccatgctcatttaaggtgtggtggtctnatattttcgctagctgtcgngacgccgtcacaaacctaaagagcgtaatggggtgctgagatcaatanatcataaataaaaaaaactctagatggaaattttaaaaatcat

SEQ ID NO: 1110 - DNA, 368 bp, Oryza sativa
  unsure (1)..(368): unsure at all n locations
atctctaagtcacctgcagcatgcaagcttcgaggccgagatgaatagtgcggcggttacagataccgatggaggcggcggcgccgcggtcgtggagccgcaagtggtggtggtggagcgcgtggtgacngtggagtacctggagccgtccatgtcgcggggcctgctcggcatgttcccggactcctccgccttcgacttcgactactcccagagcggcatctggtccccgctgaacaaggtgccccgcgcgtcgtcttcgccgccgccgccgccgcgctccggcggaggcggagccgaaggctcgagggactttctcatcgccaacccgaagcgcaaggcgagggccgccatcgggggcatgtcgt

SEQ ID NO: 1111 - DNA, 379 bp, Oryza sativa
  unsure (1)..(379): unsure at all n locations
agcttcancaaactggaagtatgcacatctttttttgtttgtgttctaacatacaatctcaaatgtgcgctatctaactctcctattgcatcagcctggaggatctcgtgtgaacaaaaatggatccgggatgttgacttttctcccggctgtgggacaaaggaaatatgactattcacagaaacaggtaatgatatttcttgagtactagatatttcctggcaataaaatatgcctacccactgataatcgctagtcacatcaacattgtactcatattgggatgaaacaatgccaaattcatatggaagaaatctatttatgaaaaccaaagcagcgtacaccatagcctattggctattgccgaatactcatatgt

SEQ ID NO: 1112 - DNA, 355 bp, Oryza sativa
  unsure (1)..(355): unsure at all n locations
agcttcttaagaagtttggaaagattgtcggtactgtgaatctatccaaagtgtgcaacttggattcctgaatgcagataatatctggcttgtgctctaatactgttgacagcactagttgtctcttatctttgtcaccaagtcctcttacattccaagagaggaatttcattgcgattgtgccggtactccggngaaacatgcgaaaaaacaacgagaggtccggtagccaaaaaacctccttgggtcttagcatccctgtggagattatggataccccatacctacacggcatgtatagtccgactgggtatggngtgccatgtataaatagaatatctttaaaaagactcgg

SEQ ID NO: 1113 - DNA, 368 bp, Oryza sativa
gcacaatactttatgatatttcccactcgttattcatgagtttccctcccctccacagaagcagcacatcatttcagtactcgggaaagagattggggcttcacttctcttatgcctttaagagatctatatgatccgactaaaggttatattgtgaatgataaatgcattattgaggctgaggttgctgtgcgtaaaataattgatttctggaattatgattccaaaaaggagactggctatgttgtgcttaaaaatcaaggggctacatgctacatgaattctcttcttcagacgctctaccatattccgtacttccgaaaggtgaggcgtaaattgtaaattctcttaaatgaatcctatgatgc

SEQ ID NO: 1114 - DNA, 459 bp, Oryza sativa
  unsure (1)..(459): unsure at all n locations
ctgcagcatgcaagcttcaaaaaagaatttactttcgtatgaatcatattcttgagcggcacggcttgggcaccactggagaagtaatccgctgcaactacaacgaacctatgcccctttgatgacgaaggataaatttgaccaatgaaatccatagcccaacctcggaacggccatggtttgatagtaagattcacacggcggcaggcaccaattgaacattgccgaaccagtgacaagcctcacatcccctataatatttgaaacaatcttcaatcatcctcgggcaatagaaccccgctcttctaagcaaccaattcatcttatgggccgattgatgagtccatanaatccttcatgcacctcttccataaccactttagattgatcactatctaaggactttaactgcaccccatctatatttcggcgatataaatcctcaataagcaatggata

SEQ ID NO: 1115 - DNA, 411 bp, Oryza sativa
  unsure (1)..(411): unsure at all n locations
agctggacgnnnatttcatcctatttcatatctcattttctgtgaataaacatgagaaacagaaggaggagcaattctttccgttgccattattccttcgacaacagcatcgaagtcggagtcgagcccgttgatgatgtatgccaccagttcttcatcatccagcggttcgcctgcgggcgccatctcatcagcgagagatctcatctttgcgatgtattcgctgatggtcatgggactcttctgggtcatcgtgagggcgagaaggacgttgatcgaacccgccttggacttggtggagaacatgtcgccgatcatgctccacgcctgagccgccgntgttgcaccagcgacttgttgaagtatcttccgcgtgagggaagagaagaggaacccgagcacttgtagatc

SEQ ID NO: 1116 - DNA, 380 bp, Oryza sativa
taagcaccgcggctgcagctatacacagggtggtctggccttttcatttgttctgttggagaggaaagtgatctccttatgaaatcaagaatggaatttgtgacgacaacatgccgcccaaggcgttgtggctggcttgacattgctgcactaaagtactgctgcgagataaatgggttttcatctcttaatctgaccaaacttgatgttctgtctggattaccaaaaactaagctgggggtttcgtataaccaacctgatgggcagaagctacaattctttccatgggaccttgttattctgagcaagacagggaaacatttggatgcattgtttctgtttgtgatacaaagatttggaatgaactgtttttgctaatt

SEQ ID NO: 1117 - DNA, 434 bp, Oryza sativa
  unsure (1)..(434): unsure at all n locations
agctttaagtgattatggttgttgttctactgctactgaaatggatggccaaaagaaaatgtatgatgtaacttctatacttttgcaagggcaggaaatgtaatcatacctatgtgtacgtttctacttctctagaagaaatatgaccttattattgtgaagaaatgagaatatgaagggtttatctgcaccaaataacagataacacttgtgcttaatgatttgtgtacttctaaaggaattttacggagcaactgactctgatcatgntttttccaagactaatcatgtgtacgaaactacagggaacaaccacagttcaacaaattaacatgcacaatgattcaagaaagggtacttcttcaaccttggtacttatngaatatgatgtactactaggcgtacaattatagaactgtgttatagatgataac

SEQ ID NO: 1118 - DNA, 429 bp, Oryza sativa
  unsure (1)..(429): unsure at all n locations
agcttgatcatgaatgaaagagccatgctctatactattcacttgnctttctgagctaagaatcctttggagttgttactagctagacaaaaaaatgtaccggcagtgagatctctgctaaaaaatgtaccggcagtgagntggtggttagtatgttttgctatccgcttctctatacgatggaaaactggaaatggaaaacttccttttcttttctttttttactacagatgattggtgcatattcgtgcacaatgtagattaaaatatactccctccatcctaaaatgtttgacgccgttgactcttttttaaatgtttgacccgtcgtcttattcaaaaaatgtaagtaattattaattcttttcctatcattggatttattgctaaatatacttttatgtatacatataggtttacacatttcac

SEQ ID NO: 1119 - DNA, 424 bp, Oryza sativa
  unsure (1)..(424): unsure at all n locations
atgacacactacaatgcaagaatattagatgttaggcactgatatgtattcttttagaagtaaattcagtaacaactgcaaagcatccaaccagaccttccagtgaaaatgtgctcacgcacaccaagaattgttggctggcgcacaccatggttctcgtgaaactcctccagtaaattccgcaattttaaagcttcctccaaataattgtcctaaaaataattaagaatgcaacagattagatatatcttgagtggcagcatagctcttcagttgtttagaacaaccgttcaattcacctggttcatatcaatagtttggagaagcttaccccgtgtaaagacaatngcatgattctgggtttctggggttacttcaccctaatttgttgtcctggcaatttatgcgggatattcttacagat

SEQ ID NO: 1120 - DNA, 494 bp, Oryza sativa
  unsure (1)..(494): unsure at all n locations
ttaagtcacctgcggcatgcaagcttgctggcaaggtgagaatgatgtcattttcttcttgtacagcagctngtgccaaacttgtcgcgcgaagatgtactccaccgagatacagtgagccgtttccagttcctacgcacacatatggcaaatggtgtgactgtccatcccacggctgcacaattgatcggtcgtctaacagtaccgccgaaacgcaagcgataggaaaagcttgcacttcactggaccagtgctaccccataagaactcggcgcaagggaagttgtatctcaagcgaccgaaaccactatcctgccattttagaaaaaacgtgagttattctgccatatgatcatctagacctggtgttacatggcttactactgttaaagcgcacaacaattgaagtactttttacattgctaacactaacacatgtcatcaaaggaactaagatagaaccacgagcagttatcaacctgtctttatgaaca

SEQ ID NO: 1121 - DNA, 419 bp, Oryza sativa
  unsure (1)..(419): unsure at all n locations
agctngccagacttgcacatgaatattgtctctcattgcatatattatatgtcagcacaaaccacacatatttgccagtgtttttcttcttctgttacaacatttcaaagaagtaaagtaactgtcgctgatgtgtgcttcctttcttggcctgaattgtgaaggtgcatggctgagtatcttcctaacttggaagaaaatcttaaaatccaggtactatagctttaagttttgcatgtaactgttggtcttgactgcctgctcttattagtgatagtattactactttacatcgtantgtagntgtcatgttaatggaatgactaatcatccttcgaaaaatagtgtgcggaaaataagtgaggatcgaggaataaaagaaaaagatagacagttgatctgatgctattgttgaattg

SEQ ID NO: 1122 - DNA, 464 bp, Oryza sativa
  unsure (1)..(464): unsure at all n locations
agctntgcaatgtgttatgatcattttattttattgatgatgaacttttactaattggacatattctctttcgaatgctaagtgcagtgcttgacatctgtagagaaagcatgaacatctactaatgttacctccgcaaatcagcatgaaacaattcagtgctatntgattaatacatttcatgttgagataatctaacctgtctgtgtgaaaattgctgtattaataccaatcatatgccccttctaatccagcaatggaccaccactgcatggacatacatcagtatacatgcttagtaaaaccctctataatacattntcagaaacataaatatccaacacatattgtataaaccactacttacaacatgatccttaaccctagatggtcattgccccacaagacaggtaatgcatactanattcacttcaggacgaaggcatacatggtcaagctgattt

SEQ ID NO: 1123 - DNA, 417 bp, Oryza sativa
  unsure (1)..(417): unsure at all n locations
agcttcactatatacaaaatacaagtctcatgttgtctggtggcatctataaagatctcatcggtgtctattctaaaacctcatcactgttgactaactgttactggttggaaaatccgatctttatgtgggtttttcaaccattgcctattatactttagtggcataaatcataatctcccccccccccctaaatatgtacaaaccctagcctatgtctagtttgaagatatagtcatacagacataatccatatgtaggagtaattatctagagcccgtcaccgataataactattggtggcgggcttatgtttaggtccgattgagaatatctttgtaatctttgttggcccttaaacataagcatttaattntcagtgatatgtgggccgtctatctaaaactcgtagtaact

SEQ ID NO: 1124 - DNA, 437 bp, Oryza sativa
  unsure (1)..(437): unsure at all n locations
agcttcattacgttggttatataaatagcttataattagaaaacttgttgcttctcacacaaaaatcgagaataaaaattagtgacccacatattgtgaatagtacaaagggaatttcttctgtaacgacatatttatgcaccttggaagctgtaaagccatggcagatcactacattcttgttggaacccatgtgctgcagcaacccaacgagtttctctccatgtttattcgttaccactaccctttcttcctgagcagctgttgagaaaccatataatagagttagagccccattgttcgcttatcttatgcatatagccaaatntaaaagttaaacaacgagggccctaattatatatcgagtaacaaatctcttctctttcttccctcttgtcgtggcaaacatattgattattaccacaaagacgcctttg

SEQ ID NO: 1125 - DNA, 399 bp, Oryza sativa
  unsure (1)..(399): unsure at all n locations
aagcttaagagctggagcaagctngacntgatgatagtgatgacatcccgcaggagaacgcccaggcaggtagcattaacgatgaatgggctgatccaacgaagaatgtcatactccctaactcaccaaaagaatcggaatcaagcatcagttgtgctggtagcaacaatggagaaccacggaccccaaagcagctgctctctgactgtgcaatggccttatctgattataatgtagatgaagcacaggcaatcataacggacctcctgcagatggtctcaatccaaagggaccctnctcagaagatcgcagcctatctattggaaagtcttgcaccaagaatagcaccttcagggaaaggcatatacaatgccttgtcgcgcacagagcccccactct

SEQ ID NO: 1126 - DNA, 407 bp, Oryza sativa
  unsure (1)..(407): unsure at all n locations
agctttcagcccanaggtagggaacgggatgtatcctttacttcaccgccggtgtataaccactggaagaagctccacaagaagctgatgccgaaatacctgaagaattcacggacttgctttctggcattgaggggaaaccattgaatcaagtcagtgaattccaactatttctgcagcgtgtttggtcggctcaatcatgatttcatcagcacttggctgaaatctgaaataaagagcttacttcgcattcttatctccttgaggcgtgtgaaacccgcttatgagaacagcagtcgctgtcccactaggatatgttagcttgtagttgatgaccaacacctgcgaaatatcgtgttttatcacatctcttcattattgcatgattgcgataattaggccacttt

SEQ ID NO: 1127 - DNA, 380 bp, Oryza sativa
agctaggtgtgttacgagttcattctcaaatctcttacctcttatgacagcccaagctgcggcttcttcgccaacaccagggtcaaccttgccaacgatatgtgagttatcttcttcctctctacggagaattctggtgatttttgtttaagcggaacagcgactacacgctgatgcggttgctggcacacgcggacgccatcaacttcatcttcttcaccaagatggacattggtgggttgttgtgctgccttcaattatgcaaggttgggttggactctatgaaggtttcgagggcgtgtgcatttgttgaccatggctgcgggtggtcctacaccaacagcgagcggttactccatgaagtatcttgtctggatgga

SEQ ID NO: 1128 - DNA, 484 bp, Oryza sativa
  unsure (1)..(484): unsure at all n locations
atccttgagtcacctgcggcatgaagcttacaagaaaccagatatggttatggttacttaagntgttgtttccatttttatagaatttcaagattacaatggatctacgaaaagatcgtgtatttacaactacaatggaatagtatacaaagtcaacacaaatcattaaatagaatttatggctacacaaaccgttgaagatagttctagacctagaccaagacgaactcgcgttatgtggtgttagaattaaaaaaatatatgtgagacccatttatccgcagagtgactgagtgactggcgcctacctcgggaggccatgcgccatgctgatgttgtcgacatcaacaccgatgagcgccttctttcttctcccagtcaccgctcaccgacaacatgtggaggaagagaaatggtaggtttgaccgatgtttcgtgtctttctccggatccgacaataacccctcgttgacactttgacaat

SEQ ID NO: 1129 - DNA, 385 bp, Oryza sativa
  unsure (1)..(385): unsure at all n locations
agcttctttaactggagtgggaaattattaattgtttagagtncaacnaccatacgcagcaggccacaccggaatatgcacataatacaacggggtactaggagtaatctattacgggttaaagtttttgtaaaaccatctttcanatagttaaagtataatgcacatttcaaagcaccatacttaatctattcaaatattaatcaagccgcacacctgtaggaacttgccttaacccatcccatcaagtcatatttcaagcaatccagtttaacaaagtaaaatatctaacctggatatattgctaagcttgctagtaatgggcacacggagagagggcacataggataacgatgacggaagagaggagatcggcttggcgtat

SEQ ID NO: 1130 - DNA, 387 bp, Oryza sativa
  unsure (1)..(387): unsure at all n locations
agctaggttaggctcgttattgttgctcgtctcgaaagccaaacaagccaagcccaagactgcttcctagctcgtttccgaaacaagccaagcccgagctggctcacgagccgctcgtgagctcttttgactcaatagaataggtcatatacaaaaaaattgcacatttttgaactatntattggttgaaaatgataactctgattgtcatattatctatntatgtgttgcgatgatatattaaagaaaaatataactttattacgcattctatatggtattatgttgctcgatttctcttagacctgcttgagattacttgatgccggctcgcgagccacttagctggtcgagccattatcaaccaaccaactgcagtttagctcg

SEQ ID NO: 1131 - DNA, 296 bp, Oryza sativa
gacctatgttactactactactattcagctacttttagtttggatctccctcttgaatacctaccccggggggtacctgaattacaatgctgttgagccaattatgttttagtttatcacttgccataggctactagagtaaagctaccaactttactggacttggaggaagtctccgttactagctttgggggaaccaaatctctggtttggtacttcccacaaattctcagtgaactgaaaaacgacttacatctttttctgatgatatgctctctggacgacatggtagcttc

SEQ ID NO: 1132 - DNA, 498 bp, Oryza sativa
  unsure (1)..(498): unsure at all n locations
ctctaagncacctgcggcatgcaagcttcttccatagcatacggctntctagaagtanatgactatctctanacagacggatcttatatgaatcgtatgatgaagtaccacatgagtggatatataggaaaggaatccaaatctgccgaatcgctcatgttatgatcttctacatcctangtctccgcgttccgtcatctggcttatgttcttcatgtagcattcagatcgaatgactctatgaaattacgtcgatacttctacatattatgggtaacgtaggagacatccctattttcccccggnggtcttaattaccactgcttagctttcaattcgcctctgaccatcaaattaaatgtgaataacccgtcctcctctctttgaaacaaggagcgcttccggttctgtgcgtgcttcanacacatttgtcttctccatattaccatatctctagagtcaataatcttctatgaggaactactgaactcaatcact

SEQ ID NO: 1133 - DNA, 438 bp, Oryza sativa
cgagacctctaagcacctgagctgcagcttaagcttttggtgggatatcatgactattttttatctaactctgccgctactttagactgtgtactgtaagagcaagtttaatagtatatacaactactaagtccacatcatttataacaaatgtaatagttatttcatacgatgagtgcttactatgctattaatgcacggccctacctggcatacacacattacattgcgaaatacactgctcaactagctatagatttgtagttcactgctcttctctcttatactctatctctttaaaatatgtgtatagctacgttatagcatgctattatacctgctctaaagctgtccgcgctacagctagctatagatctgatgccactgcgcttgactcatagactatatctctttaaaatatgtctatagctagtctat

SEQ ID NO: 1134 - DNA, 469 bp, Oryza sativa
  unsure (1)..(469): unsure at all n locations
agctntcatggaaccaaaccatctctagaattagcttgttctctaatttgttataatatccaataaagcacacactctctcctggtattactgtagtaaagatcaaatttcaatgttcataagaaacaccattaaatcatgaattggatttaaaacatgtgtgcttccatgtaacatagtcctacagagacagctgccaacaacagtcgatgcaaacttctggttttcatttggtataacttaaaaaggatgaaatgtgcaaagatattgcaaatagaaatggatgttgtaaaatcaaatgcgaactggttcagagctatccacaagaatagatataatatttctttatagtactaacagaatattcccaagtaacaaaacagcatgcagatcacatgagagcaatgcaatgacgaacaaatcattagtagagataaatctatggatatatatacaatagagcactact

SEQ ID NO: 1135 - DNA, 342 bp, Oryza sativa
  unsure (1)..(342): unsure at all n locations
agcttngttacaccgtctagttagtactacttgtttatccaatggatcgagtagtcttacctcatcggaggatatactcccttccgcccatgatacaagagaatttaacggtttgcttatactggttggtcacttgtcttattcaaaaattttgtgcaaatattaaaaacgaacagttgggttaaaatactttatataataaagttagtcataagaataaataataatttcgacatttttttgaataatacaactggtcaaacagtgtaagaaaaatgtcacaatcctttatattataatacggagggagtagtaagcgattaaaagagttaaattttgcgt

SEQ ID NO: 1136 - DNA, 447 bp, Oryza sativa
agcttaagctaatgaagaaaggcgtgcttttcactttatattccaacagtatcttctggttggggtaaattcatcaatttcttctgtttctggggttggagtggactcactggactggacttggtagaatgattttaaagtgctgctcctcttcatctagcaaatcaaaccaatttctaattgactaactgctaccaaatgcaaaataaactcgcaaaatcgatgagtagagaggacactgatcttgatttggggaaacgggaatcaaactttgtggagaagtggctgagaaagggggcgctcttgcctcaaaagctctgacccgccgtcaccacctttgccgcgatgcgtatgcgactgcgccggagccatggccgatcccctccctggctcgctgctgctgctgcccccctgcgcactagctgctgctgatatgcgcctcccgtc

SEQ ID NO: 1137 - DNA, 447 bp, Oryza sativa
agctctgtttatatttgaagaatatatattctttatcatccaaagtcctatttggcacaactactgcatcggattccactacaggttaaaagactgcagaagttatgccaaccaatagcactaatgcacggctgcgccaaacttattcttcttcttaaagagagctgtggccctgtttagaagggactaaaacttttaagtccctatcacatcggatgttggaaaattaactataaatattaaacgcagattattaataaaacccatccataatcttggactaatgtgcgagacgaatctaatgagcctaattaatccatgattagcctatgtgatgctacatgaaacattctctaatcatagactaactaggcttacaaaatgtgtctcgagaatcagctcttattaatgaattagtctagaagtagctatattaaactctaaata

SEQ ID NO: 1138 - DNA, 319 bp, Oryza sativa
agcttcataatgaaagaagcagattattctttgtcacacgccatatatattctacctagtttggaaaagggtagcttgataattagataggagagaacaagaaaagaatttattctgccatgctctagcctggcaagaattggagggggaccaatgtctaaggaccaaagcttaattagcttctcaacaacacatttgcacctaataaaaagccttcaagagcagctggaatgcttgtcaagcatgcagtgagactacttctgaagcaaacctacaaaagactaaagagagagaggcccatagcatcaaggcatgcatg

SEQ ID NO: 1139 - DNA, 450 bp, Oryza sativa
agcttgaacagagagaggaaagtgtttagcctgttctaaactctcgagctctaaaaagctttgacaggagatgtccttattcttagcaaaagagaataaggagttcatttcatcttgtaaaaacttgccagaccagttatctttccagaaaaaggccgtgtccccattgccaatagtgatctttgagactgctctgaagatgggaatcaatctaaaaatgtccttacaccaaaaggatcctttttatgtgtgagcatgaggagagtcagacaaagagtattacttgttccatattagttttacctagggcagggtctttttgttgaagaacttgtccagatgtttggtcagaagggcaatagtttacacgtccaggtttataatgcccaaaccacctttcttctttggctggcatactaggtcccatgtagcccaagagtggatcttagt

SEQ ID NO: 1140 - DNA, 438 bp, Oryza sativa
  unsure (1)..(438): unsure at all n locations
agcttannacattttttttagttaccaatctatgcaactatctgaaagcgatcggcggtgctgagatcttgaatgcccaaccgtacttctattttcatcactatggaaagagttgaaataattagactgaattgctcatttcaacaattaattacgcatgaaaacacagcaattaccccatatcaatcttttgaggaggaagatacttcatatcaatcttttgaggaggaagattaattgttttctcaaacaatgtgttgtgaactgatacgcctactataccttgctgtctcaaaaatatcaaatgactcttcaatgttgccctactgagatttcatggaagaaatatatcagataaagtgctgacttactgaaattcatcacaatttattgagttaacttacatgttatctgtcatggtctctatctcaagccttt

SEQ ID NO: 1141 - DNA, 366 bp, Oryza sativa
  unsure (1)..(366): unsure at all n locations
agcttgccagcggcaaacggaggctcggttgatggtgctaccaatagacaaaatgacgatcatgctattgggattccattcctctacttttctcggncagtggacatcggagtaacgccggcggcgagtccgagcggcggctgtgcttaggctgctactgcatgttgagttggtgctcgattctaagtgaatgaaatgcatgaatgcaatcctatgggctcaagtgtgctcaccgaaccttgaacgacgcgcgggaaagtctggacagcggcagcggtgaagaagatggtccggcgacggtgtatagcttcggggagacggcaacggctcgatccactcatcgaattgacatccatgtgttttcat

SEQ ID NO: 1142 - DNA, 448 bp, Oryza sativa
  unsure (1)..(448): unsure at all n locations
agctntatcaatcatatcaaataggtgcatcttgaactcatatganttagttgttttggcaccttctgaagcaaattcagcacttcttcttgagaggatattgaacctgagagttgagcagtctgaaacaggtatgatatgattgccagatttcagttttgatgtttcttctttctttctccatctctgaattatatatttgtctggtatactgctgaggttgttgtggagcataactttcaagatatgtgaacacagtaatccatccttttggaacattgcacagatgcaactgaaatcttccttctccaagtctatcataacaaggtactttcttcgtctatacacctcaattgtctgattcagagctatganaacttcataggttctgaatttgtctatctcattagagtgtagtctcggttggtttttaagttgcacctggaac

SEQ ID NO: 1143 - DNA, 398 bp, Oryza sativa
agctagctctagatgcatgtccccttcgtctgttctctttcttatgcaaggtagccacgtcggagggcctaagggggagaacggctccatccttctctctcataatcccaaagaagtggctatagtggggcctgcggtctgttattatggttaagttttgaacgttctcggatgtagtcttcttgttggcttagcggtgaccggtcacgcatagcggcggtcggttcggtgctagctttctcctacgtatgttgagctggagctatcggtgcgtgggtggggagtatctttcatctgtttttctcggtaccacttcccacggttataatcttggattctttttctgctcatcaaaaaaacttcgcactgtctggtgcgagtcattaaaataaaaactc

SEQ ID NO: 1144 - DNA, 406 bp, Oryza sativa
  unsure (1)..(406): unsure at all n locations
agcttgtacaccanattattcaatcttacaatacaacctttgattggcatgtgaatttttctatccattcatatggtgggcaccatttttcatagtatacaaatatttactatgtgtactatacgagcatggtgccaaatgaaactattctttggttctttcaagaatcgtcatgtagcaagttgttagcacatgactggaccaaaagagggacatgtgctttccctttttatatctgccctgtgcatatctttttgctgtgaaagaatagtagtactttttgtgtttttaagacaacgtcatagcctcaatacggaacttttgatgttattgcaatttatcatggttgggagtaagttagataggtagtgagtatatatatgtacagattcataattcttttggg

SEQ ID NO: 1145 - DNA, 356 bp, Oryza sativa
  unsure (1)..(356): unsure at all n locations
agcttcngaagatccctatgcctattaccattaaggtgatgaggacgatggcgctcagtaagtcttaattacggtcgttgcctgtggcaatggcgtgccgctgccttaactccgctgccttacctacttctgtgtttggaatgtattccggaccgctcggtccgatgatntaagactgtgcctgtgggcttatgatgtaataattcgtactagactctcgtgtatgtgcacttgatatttcagctatgagttcgtgtataccagactacttgatccacggaaatggtacggtttacacgattgattcctgttataaaaacgggggtctacagagctggtatcatagccatacgact

SEQ ID NO: 1146 - DNA, 297 bp, Oryza sativa
  unsure (1)..(297): unsure at all n locations
agcttaacacanaataatgggagggaaatggttgaatatagaagataatggagaggggcgcatgcttctctatatatagcttttgagtgtgtntttggagaagatgatggagagtgtgctangctagctgccagcttgcttaaaaaaagtttgactttaattcattggtgatatatttctttcattaattaattctcctttagaaaaaatattgagtgtgttagacagctgcctaatttgcacattggtgatgtggttgttcctggaccgttcgatgtggattgtggtgatatcctg

SEQ ID NO: 1147 - DNA, 459 bp, Oryza sativa
  unsure (1)..(459): unsure at all n locations
agcttatctagactctcggggtaactaatcttttctatcacatgtgggctcactggattaccttctgcaagcctgcacgcaaacaaggactntgaggtattaaacctctcagctcttgcttggtcctcaaacatgttacgtagtcccgtgattattgtatgagcatccaatgcctcatattgcctttgaagctcacgggacatagtaacaagcatgagacagcttatatcaaggtattccttgcatcgcctttcatgctccctacgttgagcagcaggagcattgctgggcaagtcagctggaaaaggctgtgtaagcacaaactctttgtgctcttgcctgagaacaattctcaagttgcgataccaatccatgatgtttgttctagtcaacttctctttctcaagaatataccgcaagttaacattggatggtgcaagaactgctatgatgtacaat

SEQ ID NO: 1148 - DNA, 473 bp, Oryza sativa
  unsure (1)..(473): unsure at all n locations
ctcgtcccggatccttnagtcacctgcggcatgcaagcttatgtgccaatatttcacttataaactacgttctaacatgcaatttcattcttactgcatgcagtggatacatggctcctgagtatgtgattcgcgggcaatactctacgaaatcagacgtgtttagttttggcattctcatcttagagaatgtgacagggcaaagaaacagtgggccctattttgcagagcaaaacgaagatttagtaagcctagtgagtatcccttctaattcctacaaatcaatacactaatattgcttatgttttcagaaaaccactcatatgtaccatctatattactgataactggagatctatatataactaatgctatgtatggaggcactggacagagggaaatattgtagagatggtagactattccttggacagaaactaccctgaagccgaagtgctgaaatgtgtcaacat

SEQ ID NO: 1149 - DNA, 405 bp, Oryza sativa
  unsure (1)..(405): unsure at all n locations
agcttaatcagcagtgagaagtgtaaatgtgtgtgtattttggtgctcgatctattagctaccaaaggtgttcacgtagagcacactttcattattacaataagaaaggggaccttgcctaatgtgcatgcaagcaatatatctagcatctgatggtcacgaaggcactctggatgggggatgagaagagtgcgtgatgcccatcaaaagtacgaagaagtgatcgcgtccnctttaagccttttaagccttttaaagccctggttctttttttagcttggaattattataatccacactattaagaagaagctgagagaaacagaccacttattgaaagtacttattataatctggagcccagcttattataatctgataaactcatttatgtgagctttttct

SEQ ID NO: 1150 - DNA, 368 bp, Oryza sativa
agcttcatctcatgattcccactatagaaatatctatgaaactgtttatctaaatcggcccagctataaacagaattataaggcagtgaagaaaaccattgaaatgtcgatccagactatgtcaaaggaaacaatctgacccataaagcatcaacagccgatgcctcaccacattgagccaaaaatcggctgacatgctcataagttgatacattgtcctgccctgagaattttgaaaagtctaagactttgtatcggtttggcaatggaaccctctcaaaccactcaggttaggggtgccgatacaaatttccagtatccttcggttttagcccaaactgctccttcatcacatatgcaatcatgtc

SEQ ID NO: 1151 - DNA, 363 bp, Oryza sativa
tagcttgaagaagacatgatataacgtgatcttctatttcggtacctaaggagctttccgacacggatatgaccgtttgcttaagcgccaatattataatctctgatgtgacagtcattgtaggttgccacaagaaagtctcggactttaaataatttagcctgcttaacactatgttttgattcctcaaagtggaagttttcacaagatcgaattctttgactcgtaaaatcgataatcgtactaaaattgagattctgccgctttgtcgcacctcgtacatgatgattttatatctacctgtgagagatcacactagatttcagcatgtgagcaaaagatatatccccgcttccagacaac

SEQ ID NO: 1152 - DNA, 445 bp, Oryza sativa
  unsure (1)..(445): unsure at all n locations
agctngagctgaattataacaggctctattgtactatattgtatactaaaataggaagagagtagagtagaaggagttggaagaattccggagttgtcggtaatcttctcctatttcttttattctgtttattaccctgaattcaatataatattcttcttgagtaatttagatttatcttgtgagaattacctcttggttagttcctaattagcatacgggattattgttcgctataatcaacttaaatatagtgattgctttggtgagttataaatactaaagtagatattaattgcatagacgtgatgtttaggtaattattattcagtaattgctgcgtatcccacaatacgttgaggtgggtgtagaggtggtgacagtcctcgagagcacttaagttctccctgtccgggtacgtagtagagcgacatctatgaacaac

SEQ ID NO: 1153 - DNA, 393 bp, Oryza sativa
  unsure (1)..(393): unsure at all n locations
taagtcacctgcggcatgcaagcttaatataatgtcaaacagtcatatgcatgattgtggttgatcattaatgtacttgcacatggcctcggtaggtataaggtacagtcaattggaggtgagcttttaaaacaactttattttgaaaacaaattcccaagagtcataagaatatgtgcaagaattcctttcatcttaatcatctcacaaaaagcaatcacctagatatataaagtcccctanacatggatgattgttcacaagcactagttcagctgggaataatgaatatactagatcaatcccatgaagaatttcattaattggaaattttatctcttacttatgctagaaccaagtgtttctaaatttccacttctaccctatactata

SEQ ID NO: 1154 - DNA, 376 bp, Oryza sativa
agtccgaaaccttatctctcatatcttgatctaacaatatattggagggcttaagatctctatggatgaatagttcctgtgccaagccatgcaaatattctatccccctagcaacatccaaagctattgtcattctctgcgtccatgtaagagggataaacccactctgctgaagatcacagagatgctcacgtaatgttccaccagacatgtactcatagaccaagagtctctcattgccatgggtgcagtaaccaagtagtgcaaccaagtgccggtgtcttactttcctaagaacattcaattcagccaggaattcttcctgccctttagtccccatggtaccacttgtcgcacctcttcacagctaccagct

SEQ ID NO: 1155 - DNA, 332 bp, Oryza sativa
agcttaagaagcagcttaagaataagatctccttgtggttcttgcttaaaggtgttgtgttaaccaaagataatttatcaagaccgaattggaatgggtgtttacgatattgtttttgcatgaaaaatgagtctattcaacacctgtttttggattgtcattatgcaaagtttatatggagagcggtttagttctctttttgcttatacctccctagaagtatatctcatatgtttgacagttggctttagggtgtggacaacaaaaagaagaaactgatacttgttggtgcctcagctctatgttgggctctgtggtagtgtagaaatgat

SEQ ID NO: 1156 - DNA, 456 bp, Oryza sativa
agctttgcacatagtacaatctatcttatactgtttatttgcaattagcatgcaccgcgagtattgtcaccttcctccacagagagcggacattagtgagccgtggctggctgctgatgaatggtctgttactgatgaaggaaaagacatgacgtacgagtcaaacccttcgttctgcatcaacgttagcatctcaaagctcaaatgaggtggcatattctcaggtattggaacctctccttctaagcattgtatgactagctgcatttttggtctagcatctgcaaacgggtgggagcacagcaattccagctttagtgccatgcttgcctcgtcaacatcatatataccttaggagcttcgtgtctactgtatcagtaaatgatctcttctgcaatgctcttcacccaatcaccatcatggattgttaccgttgacatctcttgatggcctttt

SEQ ID NO: 1157 - DNA, 415 bp, Oryza sativa
  unsure (1)..(415): unsure at all n locations
agcttaagaaatacccacagtgtgttaactttacttgtgtaaatctatttcaaaagagtttaatgtaccaaaatgcacaaagggtcctacttagctaaaaactacatcgagggacattatcaatgtttccttgtcttggtatattgcaatggtctatgaaccaattttccacgtttcagtctacaaaacgaagtcctcttgaagtcatatacctgatatatataaaaaattgattntgttttttatactatgttctgaacgttttacattcttatctttctgttggttatttgctcgcaggctgaaaaggctagggacaaagtatntgaagaaaggattccgacacaatcagtctaaccacattgactaaagtttggtggattcaatcttcaaaatttttctgtacggtacatgt

SEQ ID NO: 1158 - DNA, 458 bp, Oryza sativa
  unsure (1)..(458): unsure at all n locations
agcttgttcaaacaaagaaacatgatatttacaagttggtcatttgcttctcgaataggtaatcgaacatttctatgctactaaaaagtgcccaactaagactagtatatgttatatattgtgcataagtctggctaaccatgaggcacaccaaggatagaaatcctgaatccaccattgcaatggagtataagactttgtgaagtatgatggcaagaaaagggcatccatcaaagaagtctgagcagcattagaagttcaggtaggcagaaagcccatgtcaaacatcttaacatgtattntcgacatgactatattttatcatcataataacatagcaagaaaatagatgataaatgtggcacaagatcaaatatagataacgcanattctaaacatccacaagattaacaagtatgaatatgtagtaacaacaatgaatagtcatcacagaaaac

SEQ ID NO: 1159 - DNA, 392 bp, Oryza sativa
  unsure (1)..(392): unsure at all n locations
agcttcaaagaatttgttgtaagatattgtgtttacttgaagcttcagccttacattcagtcctctgtggcaaagagagctaatcataagctctgctttaaatactttgggccttctcagattcttcataaggttggcaaggtagcttatcagttgcaactccctgccaatagtgcagtccatcctgtattccatgtttcccaactcaagcatgctgttggttntaagcaccaggttcagcctcgattacccaccttgtccacctttcaagtacctgtgtctgtgttggactctcgacaaatcaagaaaggtaacacttctctgactcaagtcttggttcgttggtccgatgatgggtatggtgaagagacttgtgaagacctggtggagtt

SEQ ID NO: 1160 - DNA, 384 bp, Oryza sativa
agcttaagattaattgccatatcagcagtatcagcaaccgtggacttgggctgaccaatgttccagtcacggaagagaaactggcgactgagattgctcttttcaataacatcatcatctgtcactgtcagctttccattctgattgcaagaaatgcccattagtgctaggtttttcaagaattcacatccaagcgccccagaaccaaccataaatattttcgcctgctcaagtttcttttgaaggttagatccaaaaacactgatttgtgcatcatatctagtattctctggcttcaactcggctggctccaatggttcaacagggagagattcaacagaatcaaaatagaagaactgcccaacccagaaaattacattaatg

SEQ ID NO: 1161 - DNA, 433 bp, Oryza sativa
  unsure (1)..(433): unsure at all n locations
agctntcactctgttcttccaagtctaattgtgtttccaaaagttgtttcgttttgcagaagcttccacaagttatataaaatcgtttcttttatggagaacaatgttctctacatcttttcaatttggtaccaattattgcttttgctgaacatgttgtttgctttcacaaaaatacattgttttgggttccttggcatttgtatttggattcttacgctacttattgttggttttcttaaaggtggtctatcacattattgaaaggaaacattgctctggtttcttgctcttagtttgattctatagcttttagcttatacttattatcctatgttagaaatttgatgttccctctatcgataaaaacaatctcttggtttcgtgcttggtgcttctactangattctaaatctcttaacatcatacttat

SEQ ID NO: 1162 - DNA, 394 bp, Oryza sativa
  unsure (1)..(394): unsure at all n locations
tcacctgaggcatgcaagcttgtcactaaaggagcaatactactctatacttgctgcttggctccatgtcaagtaaccaaaaaggtcttgttagcttttgtacatattngctcatggatatttatattgaccacgttttcacacacctatgtgctctcctttccaatgatttggatatatatatatatatatatatgcacctaactatcatgcattctttagcatactcaaaaccaataatggagcaatgagtgcaatttttggtggttatgtaaactgcaacaccttggcatttgaaataatatagctgtttgccaaatgaaagttagtctcaagaggaacaatagggcaataaaaacaaagacagtcaccagcacaaatgcacaattgacta

SEQ ID NO: 1163 - DNA, 420 bp, Oryza sativa
  unsure (1)..(420): unsure at all n locations
agcttcaagttcgcatgaacatgcctgtgggccgtgttaaggtactaatccctgggttggcacctagtgagatgctcaaagcatatgttnttcttgactcccaaccgatcacatggtgtctttctccacctccaattaagaagttggtggtgagtttgagaacaacggagaaaaatctccacgagagtccacgatggccttttggcctctaccgttgctcaactgcgcactgagaacaagaggctaaaggacaccttgcccaaagacaaggtcgagctctatgagcttatagttgaccttgcgttccttcgtcgtggcttttgtgccaagcatcttcactcgtacaaagccgtatgaaaggaagacctttactgtgcttctatcctgataaggacacacatagctggaatataccatgac

SEQ ID NO: 1164 - DNA, 469 bp, Oryza sativa
  unsure (1)..(469): unsure at all n locations
cctgaagcatgcaagcttaacatgcaaagatgccatatcatcatctactaacaagataccacattatcattcactaattaacaagatgctacatcatcatccattaacaatcatcacatttaaacatcatgcacacatgctatatctttatagtttntataatttaacagcgtttcaactacaaacatggtaaattattatccaacatcattcacataatgtttcaatgtatatctttttatgttttatgaaatcctatatacttatataagtcatcctcacttaacgattaaatgaataatctatgggccaaaatatctgtttccttttttcctctaattaagtcatatcacatcaatttgttctagcccttagatgatatacagccccattatctccctattttcttttccataaagcatacaacttacttttacgttgaatcaccattatatactattaattaaat

SEQ ID NO: 1165 - DNA, 329 bp, Oryza sativa
  unsure (1)..(329): unsure at all n locations
agcttctgcaaccctgccgatcttagcaagcacccgttgttgttttccaggagttataattctggccgaagcccgacctgctcatttcgtctaacacctcgctggcgccatggaagtccccagttatgcactctacggcgatgagggcgttgtattaacgtgcccccctcgccgtctcctggatcacagacattgccgcgtctaactcaccgatcgaagctagcgccttgacgagcgaaaacacgccggacgcacggcaagggcccccgacttcatacagcgtggctagaatcgctatcgncagaatcctggcgcttgcctgggacgtg

SEQ ID NO: 1166 - DNA, 384 bp, Oryza sativa
agcttatgatacagtaacagccattctatatctggtttaccaatccggtgagcaatgcagttcaagaggtgatactagatatttataggccttattgagcagtttaattgaaatgtgataggttatataagtaatgctgtaataaaaacacgaccctttttgacatgaagcaagtgaataacatgttcagttacttcaactaataaagtgattgtcctggagcacaatgccaaacctgaactttgtttattagtatttttaaagatggcaagcattaggttcaaattgtctccctggccagctgctgatagatattccatttttcatatgctcgaaaagatgtgcaggcaggcagattttgttcttcattatcaccacagctca

SEQ ID NO: 1167 - DNA, 336 bp, Oryza sativa
agcttggcgtgaagtactagcgcgcccacatctgtgttttgatgaagtgctggcggcccgcagaagttggtgctgccctgcaggccgaatgcaccccgcgcgaatcctattccctttggatgctggtcatcgttcctgagtaacacactaatgcacgcgtctccggtgtataaagaataggaatatgaactctagaaagaactcacctgagaatttatctgacgtgcactgaggcggcgaataggatcatcatgctgtacatggggggactggcgatgatcgatggcgtgtatggggggaacgtggatgtatcgactgggatgatgtccgcatcag

SEQ ID NO: 1168 - DNA, 389 bp, Oryza sativa
agcttcggggcggctaaggttggagaggatgatatggaggcgggatatgccgcgtggtatctgggcggggggcattttaaggcttccgggtgatgtggctcctctgccgtgttgggcttggccaccaccgggccggcgtgggcttggagtctatacacattgggattctccttaaaagttttttctctaaaaaaaaactaccgttttaactccctccgttccaaatttagataacctatatcctatgtgaaattttttcgtctttagatttttttttaatatttacagaaataatctatcagcgagaaaaattactaaaatagaccatgccgccccaatggtgggcggcaagctgacgtggcaaacggtggaagaacgggcggtgaccg

SEQ ID NO: 1169 - DNA, 437 bp, Oryza sativa
  unsure (1)..(437): unsure at all n locations
ctgcaagctgtccctggaagatgtattacatacgtttcatcacacgcagctggctccgtccacatgggtgtcacttgttcatgcagagaatctgtgaccttgattgaccttggaagattagatagagaggccatttgtgttgctgaaaatatgattgtgatccgattataatgtgccatatgtacagcttaatctattttctgaanaactgtatgatggtttggcgccttaatttttatttggcgccttctatttggcgcccttgtttccctggagggccacgctaattacgattaatcgctaactacgtaatctggtgactgacggaaagaaataatctgttatctccatttatggtagggccacacagaaagaatcgacaaacggatgcccttcacgtgatatggaacacggatngaaacacaacagcggaacag

SEQ ID NO: 1170 - DNA, 364 bp, Oryza sativa
  unsure (1)..(364): unsure at all n locations
agctttagcttatgatgatagcaagccgatctcaatatatttatgagttctcccaatatattgctcttaatcaatatgctagatcctacattttttntcagaagaactttgtgaaagtatagtcaacacgtgcaaaccaatacatgtcgttatgtctcatcttactaaccacttgatgtctcgggtatatttaatgcatccatgacactacaaagtccaccccattatttgatctttgatcagcaactcgttgaactgcatccactagctagtacagatcgatggccgtgtcttcgttttcgttcctcgagctcttgctctccttcctctgcttcggtttcttctactactaccacgtcaagtc

SEQ ID NO: 1171 - DNA, 293 bp, Oryza sativa
  unsure (1)..(293): unsure at all n locations
gcttcacactatgtcagtgtacaatttctcatattttaacaatcaacaatacattacagaacacaatcatatcatatgatatattttaatggggccccactgcaagccggtcaacctttagttaatggctgacggagacgcgtaggccccactctccctttaattgactctctattctttccttctctctttctcctcatctcatttctatctctccctcatctgtttttctcgctctttttctttgagctcccaccacgtaaaagagaaaggctgtacncaggggatatgcc

SEQ ID NO: 1172 - DNA, 452 bp, Oryza sativa
  unsure (1)..(452): unsure at all n locations
agctatgcctaaaatggtgtggcagctacttcagtgctatcagtgatcaaactctgggactagctacgcaactaactcaactactgtcaataataaaaacactatgacccaagaaatgtatattctacaaacatttcaacttgggaacggctataatgtgatgttggattgtctaaagaatggtagtttggatgatcaactagatagatagtaacatgttgatgaacaacctctttcatggagataaactctatcaaggtgtatacacggttatgaatgggacccaagatattcttgcttttgatactaccgatgacttccactcaatgtangcttaataacgatattcccagccatgagaataccaatggaatgaacgacacactatgtggatcctgactgaaagctgctgctgatccaacacttcaagtatgatattggccctattctta

SEQ ID NO: 1173 - DNA, 397 bp, Oryza sativa
  unsure (1)..(397): unsure at all n locations
agctagctctantccgaatgagatgaggcagttcaatattgtgatgaacaaaattaaaactgaactagagtgggactaagaagcgtgggtagcttcgtccccaacgctgcgggcgacgcgtcctctgtggctccggatagggagaggctggcgctgacgactccgctcgttcgtcgccgctccgcaaccgtactcgtccgccgacgccgccgcttcgcctggctgcccgctgccgctcccccgccgccactcgcccttctccttgcagcgtaagggagagagagaggtgggatatagagaagatggaggttgacatgtgggaccatatgggtcccactttttttattattntgtgtgtagctgacatgtgggtcccatggtttttattattctttgc

SEQ ID NO: 1174 - DNA, 465 bp, Oryza sativa
  unsure (1)..(465): unsure at all n locations
agcttcacgtngcggccgatctgagttgaataacatctctggatcatgcgttgataagttgctcctgcgttctttaatccaaaaggcatggtgatgtancagtaagccccgaaaggcgtgatgaatgaagtctttaagcagtcggattcctttagtcggatcggatgatatcccgagtagcaatccaaaaaactgagtagctcacagccggccgttgagtcaactacctggtcaatgcgaggtaacccaaaaggatctttgggacaagacttgttgaggtcggtgtaatcaacacacatgcgccattgccccgtcttcttctgaaccaggactgggttggccagccagtcgggatgaaagacttccttgatgaagcccgctgctaacagncttgtcaattctaccttgatcgcatcctttctatcctatgcgaaacggcngagtcgttgcttgattggttaacgt

SEQ ID NO: 1175 - DNA, 453 bp, Oryza sativa
  unsure (1)..(453): unsure at all n locations
agctcttccctgtaatacccttgatagctnttcttaatcctttgctacgaattgttgcaaatctctcattgaatgagtaaaacgcctccatgcgtagttgagtctgcatgtgtgtgacacatgaaactgtaaaatttaaataacccaattttgcagactttggattgctgacattccggttaaatcactcttagttaaatgaaatccaagcagaaaagcatgcctattctattttcaaaaggcagcgatttcctaaatgaaaataacttaaagacaatgaaacgaattgtcaaaaacttgtcttttacagatgcctaaaatgcaaatgtngcagaacatggcaaaccagcaccagccgatccaaaaaaaatgtataatagaggtgaaatgctgacatcttaacaattgatgttctcanaccgtanaactaacttactagntactcattttttt

SEQ ID NO: 1176 - DNA, 419 bp, Oryza sativa
  unsure (1)..(419): unsure at all n locations
agcttatgcgttgaatgtggcatcttctttctacttttccaagcatagacacataaaaaagctgtacagagaagcaaatcaatgattacacaaatttataactgaagttgcacagatttgaaaatgcaactacaacaaccagggagtgcaatacgtcgccgaatgtatatgcagtttacacaaaacaaatgcaagcccagtccagtcctgaaaaatatggtgtgctagtacgaagcatcatttgctatccgtcggtactcangcatgtgctgggtgaaagtgaaccaagaaacacagagaaacatttcagaaagcagagttgtctctcttcgcctcccatgcaaaattttgaacaagcaaataatctatagaaatatagcagtgtcactgtcttcagtcanggagttcatttcgtgatc

SEQ ID NO: 1177 - DNA, 343 bp, Oryza sativa
  unsure (1)..(343): unsure at all n locations
agctctctcgatgcttactctggcttccattttattaccatggcaaaagaggacgaagagaagacagccttcatcacgccgttctgggtattttgctatgttaagatgccgctcggactgataaccgcaaggaatacttttcacgcacggtctatggcgcacttagcgaccagctcggcaacaatgttgaggcatacgtcgacgacatcgttgtcaataccaatacaagcgactcattgattgacgatcttcgtgaaatgttcgacaacctccgacaatatctcctcatgctcaatccaaagaaatgcacgntctgagtaccgtcgggcaagctgctcggttt

SEQ ID NO: 1178 - DNA, 457 bp, Oryza sativa
  unsure (1)..(457): unsure at all n locations
tagctttgtccaggacacatatattttattactgagcaacttttagtactaaaactatgtgcgttaaattttgtttatttatccttctcgagcccaggttataacaaagcttaattgagaaagaggccacttggcttacagaaaggcaagaaagtgaaacaaccaataaattgctcatcgaagctcatgggagaaatgaggaattgctcaataaaattgaagttgctgaaaatgacatatctaaatttcgagacaatatccagaggtctattgattggtctcagtttaccttttcctatgcttggttacattctatgaccgacctctgtcatagaaccncactcatccaaattctcacttaaatagtttctagattctcatccttttgaaaatataaaggctgcattactatttcaatgatagatttgaagaaactgccacaacattggagacttta

SEQ ID NO: 1179 - DNA, 344 bp, Oryza sativa
  unsure (1)..(344): unsure at all n locations
agcttggctntcactcaaggtccttggtaatgattgaacccctganagcgaaagtacgcctgaaggtcatcatgctgttgctgcatcatgttgttgatgttggtgaactgagcatcagcagattgttgccattcttgcgtttgggctatgtattccgcgaggtcgtactggatatcccccgtctacacataaagggtgtccattcttctagtgatttcacccaagtcccaatgtgaggaacttgtgcgccattcacttggagatgggggcacaccacttgacctggagggttggttgtcctcccagtggatgtcataaagcgcatgccacccgtcctcactggc

SEQ ID NO: 1180 - DNA, 407 bp, Oryza sativa
agcttagctacctcggcctattatttgcttatggcctacacctatattacactacgacaagggtatgtaggggagtcgcaccgtagctatggccagcgccatggcatgccacaagagaggatccaccggtcctcgatcatcttcttctcctcttgctcaaactctctcttgccccctcctcccccgaagatcacgcaaaccctagctcctgaccacggcgagacttggacagaagatcacacaaaccctagttcctgaccaagttggaagctaaaagcgagaagagaaaggcttggagttggaagctaaaagcgagagcgagacttggagttggaagctacaagcgagaggagaatcgtgtgggctaacctctccgcctgctcgccccgctctcagtgagttatgga

SEQ ID NO: 1181 - DNA, 405 bp, Oryza sativa
  unsure (1)..(405): unsure at all n locations
acactatanaatacataagcctcgggatcagcatatcccaccaacatgtacataagctgattcatactgataaggcaacaacgatctaaacgtgtagacagtcaactatcaatagcaatatatccaatagcgagttcctcaagaagaaaaaaaaaagacgggcgagaataaacgacgggagctctaaattacccgactgaaaagaacaaggagcaaatttcgccaaactgattgtatacaggagctagaagctagagaacatgtagcatattctacaaccatgtaaccacataccctgctctctatgacctggacatgctctcgatatcgtcttagctcagggctctgaagaggaacaaatcctttagcacaaaagcgcattggacatgaaatataatgactaca

SEQ ID NO: 1182 - DNA, 429 bp, Oryza sativa
  unsure (1)..(429): unsure at all n locations
ctcaagcttgatgacgagtatctcgtccagacttgctcattccgctaatggtctcaatcagtgttacgccaaaaccgtagacatcattctttaccgagataacaccttccacaatatattctggaggcatataggccccnaatataacccaatacaaattaaacactctgaaatttcagtcgagaaaacagaaaggaaataactttatattgaattaataggatgccagatatcttacaatgtttcacgaacgcttgcnttaatctcatcatcttctagcactctaactatgtcaaaatcaccaatcttatggttcatgtctgaattcaggaggatgttgtctggtttatgtccagatggactatagtatgtttcccacagtgtgtgtgaaggtaataattcccagagctatctccttaattatttgga

SEQ ID NO: 1183 - DNA, 229 bp, Oryza sativa
atagcatggtcaatcgagcaggcatgattctttaagaatctctgacttgtttttgtttcttaacttgtgttgataagtaattggtggagacaatgcaaatatgccatctacccccacgattactggagtggaaattataatttactccagactactcaaccaggtgaatatgccacatgagcccttcagttttgaaaactatattgtactaccttcatctcaaaatata

SEQ ID NO: 1184 - DNA, 498 bp, Oryza sativa
  unsure (1)..(498): unsure at all n locations
taagatgtcgttgtcgcggagaatatcggntcgatgatattgaccataaggtctcagcccagagaanatacttccagattaatatcaccgccaaaattcgactagatcagactagataactacggtgctatttacagatgaactcattaatctacaatgagatatcagaataactgttgcccaagttcgattatactcatgcctaagaccttatgtgacggttcgactcttaatcggacgagcatacatacatggtatttggacctcggcaagccgaacacatcctatccttccaagccgggagggcccacgcacatttggctgtactcctagatcatatgtctactacaccctacagtgccgtgtacaggagagtactacgtgcatcaattcttaatgtcatgcacaaatcaacataggtaattagtagaatgtgctttaaatactctactaatattgttgatatattcagcatatatcttcacagttattcaacat

SEQ ID NO: 1185 - DNA, 404 bp, Oryza sativa
tgaatcctaatggcttggatataagatttccttggacacgatacactaccttctagagagcttactcagatccatgtgtaaaaactctagacgtttgtcatctggcagccccttgttaatataatgtatagcctctgcgaattctgcacggagcaaagattcacgaggtttcttctcacgagtctgaaaaaaatacaagggacccgaaatggatatgagaactccagaatgataacaaagaacataatgtcgtcaatatggcaattaaatttccttttcagaacaaaaatattgcaattaaattgatagatatataagtcagtagtgagtcacatgtaaactatcacaaaaaaatccatcataaaataaaccagatttgtattcacactctatctcaccttgat

SEQ ID NO: 1186 - DNA, 424 bp, Oryza sativa
  unsure (1)..(424): unsure at all n locations
atacggccttnaatctcagcttgaggagccaggataaagtcgctaatgccgctactcctcttatccaggccatgtgcttcaataacgccggttcgagtacacttgatgctgccgaaatcttctacaagctgagagtcgctccacatacttacttcaagaacatcatagaagctggaagtatgggagcaagtctggcattggcgatgaccaaatccctttatccaagagttgacattgatgccattgatggctttgcagacaggacgagcaaagaagctgctcttgacctcatcaatgatgcgcagaaagcggctgacaagaatgctgctgatgtatttgagagattccaatatgtcgaccttcggccgactgggtctaataagtctgatgatgaaaaaactgatactgatttgaataacaatga

SEQ ID NO: 1187 - DNA, 419 bp, Oryza sativa
tcgatatgggctcgatcgagtagagaaacaatcgctattgtagtatggattatgcgccaggaaaacaggagcttatcatgagtgttatgtctgcaaaatgctatgcccaactagccgctagcgatacaagcgtccaccgccaacccaatctgcacggtgaaagaatggacccctttgtgcagcccatggggcggtgaacagaattaccccgcacgagcacacacgttcgccgcgcgcgctcgcgactacacgaccgtgaccgcgacgcgggcatatttgaaaaaaaaaacaaattgagaataaaacatctatatacgcgccttaccccactaaagtacagactcaaaataatctccatcaaaacccctcaaaatactctaaactaagagcaaatattatcttggctgacaatataagaa

SEQ ID NO: 1188 - DNA, 420 bp, Oryza sativa
  unsure (1)..(420): unsure at all n locations
aaactcagctnntggatttcatttaaattatcttgggatatttcttgatttggttttaatataaaaccttctattgacaaaattccttttattcaaatttagtctagaaaccctttccacttttatgaattatggtccaagaaattctccatcattgtcctagaacctaaaccaaatgattccaattttataagaattaattgtcgatccatcctttgattcgaaacctatccttaactttcttccaaatccaaattccttcctttcgatctagccactaatttaattcatgtggcttgataccctctgtggcacaataataatatatttttgaataattgctcttgtgctaagaaggatatatttttattttatttccctctctccacataatcttcttttagcctccaattattttct

SEQ ID NO: 1189 - DNA, 438 bp, Oryza sativa
  unsure (1)..(438): unsure at all n locations
ntcaggacagctcggtnccttctgtcccaactcatcagtttttgttctatcctgctagtgatggtaccagcgctgtatcatactctgcttctggatcgaaccatcctgcaccaacacaataccacccgagtgctgatactactacgcatcaagttacttcccctgctatcgcaccaccggctagccaatacaagtatgatagcagctaccagccagaagttgaaaagattgccgaggctcacaaggcagcaagatttgcaggtggagccctcacatttgacgacgtgttggtcgctagtgatcacctgaagcgcgcgctggatcttctgacgaacccttccgccgaaactcattatttctctcaggctttcttatgtgcttcgcaaaaaacatcttctgtacatatgctacacttgggattactacgacatggagatg

SEQ ID NO: 1190 - DNA, 424 bp, Oryza sativa
  unsure (1)..(424): unsure at all n locations
ggcatctntgaaataaccatganactcatgctccatttgtgaccatgtataaatagaattaggagcaagtaaactataccatgttgatgcaaagtttgacaaagaaagaggaaacaactttaacttaagcaaatcatcattaccggccttaccacattgatcaataaattggccgttatgctccattgttgntctagcatcctctcctatgaattttgtgaagttgagcacctcaaatccttgtgggtatgggaccgaatctatgtgttcaggatacggtctttgatatgtatgtacagctactttggattctatctcactactatcccgcaagacattgtcactatcttttccaacatccacatgaccgatttgtaaattcgtcttatgtgacaaagctatttcacttgagcttgtgatacaa

SEQ ID NO: 1191 - DNA, 368 bp, Oryza sativa
  unsure (1)..(368): unsure at all n locations
tggataatttcaagtaatctactcaacagatgttatgttattatcattctggattatttcttggttatatacatgaatattgcctgattccagtagtgatctttatacacagattgtcattctgtttccaactgaagtgatngatagttgccgtcttgtacttttctatgtatatactggttagtgatggaaaactgactataatttattgatggttactttggtgtacttaatagcttggtagcactaagggtttccttagagctggtcaaatcgcaattttagatatgcgtcgtgctgaagttntggagaacgctgcacgccacattcaaggtcggttcagaacattcattacacgcaaagagttt

SEQ ID NO: 1192 - DNA, 388 bp, Oryza sativa
  unsure (1)..(388): unsure at all n locations
tattcgtttagttaactggtggtaaagacctatatgnggactgtcttgtgtctgcacaaatgaatgaatagtctagctaaccacaaaatgttaatcggtaaaaatcgaatgctaaaatatagatatgtaacttaagtgaatgtctacttataaataaacacacctaagaaacaggaaaacactcgtagaaatgtggtttagtcataaaagttacacaacaaaattaacactcgtagaaatgtggtttagtcataaaagttacacaacaaatntaaggcttcagttgtaaaaacttcatgacaanattaggagtataatcatcgctaatggcatatattctaataagtacgaacatattatagnttgtgtataataaaatgttacatca

SEQ ID NO: 1193 - DNA, 406 bp, Oryza sativa
  unsure (1)..(406): unsure at all n locations
tgcccgcaggtacaccgaacacacacttatcggtgtttagttttatgcgagcggagcggagactctcataagtttccgctagatctgagagtaacatttcccggttgcgcgtctttacaaccaagtcatcgacataagcctcaacattacgttctaatttggtacccaaagaaattcgagtagtacgttgaaaagtatgacctgcattctttaacccgaagggcattgtcgtataacaataagttcctatgggggtaatgaacgcagttttttcctcatcctccctagccatgcgaatctgatggtaaccagagtatgcatctagantacacaaaaggtcgcaccccgcagtggagtcgacaatctgatctatgcgaggcagggggtaaggatccttatgacatgc

SEQ ID NO: 1194 - DNA, 495 bp, Oryza sativa
  unsure (1)..(495): unsure at all n locations
aactaagctcttctgaaacccattacatcctaagggcttgcacccatatgtatgctcaacgacttcccaagtaccattagacataatcgagtccatttcactgcgtactgcttccttccagtagtcagcgtcaggagatgaatatgcctcttctatggttcttggggtgtcatccacgaggtatacaatgtagtcatctccaaaggattttgcaaccctttttctcttactcttgcgagtatctacaatgttgtcctcctcaagattttcctcacgcgtttgatcattgtgttctatcggtgcaaagtgctcatggtgcatgacaatttctttactataagtgctaggtgtatgtttcatgtgaaattcattatcaaagaatgtagcatctctggactcaagaattgaccaacatgcatgtcnggtacaccacaagttactattaagaatctataacccacactgtgaatagcatacccatgacacacaatcaca

SEQ ID NO: 1195 - DNA, 372 bp, Oryza sativa
gaaactaagcaaacgaatggcccggcaccattcttcggaagcagagattaagcttttgttgagctgtatcgctagtactaccatatatgagatgcaagtgtgaccaatatacacaaggtcccctgcttgccttggaaaaagaaatcagataacgattgcccacggcgtttgaactcaaaaaatcaaaatgattgtgcctgcaaaagtctgaccacccacagctaaaaggaacacacaattgtaaactggtgcttgcactgaaagacattgagcagtgaatcaaccagggagtaacctacaaggttgcacaagcgtaatctggtaataagttgaacaccaattctatgaccaacagacggccaaaaaaatcca

SEQ ID NO: 1196 - DNA, 483 bp, Oryza sativa
  unsure (1)..(483): unsure at all n locations
aactcaactagatagnatatanaccactaggaatcaatattatcattatactcgtttaaattgaaaatacgggtaaaaatatatgcatcatggaggagtgcgagaggtgaaaaatgtcctaaagtagatatgatattaatagtgtctttaggagttacatgccatggggacagaagccggagtactgatgggggtggacaggaattcgctcaagaaaaagtttgtactatacctaacctaattttatcatatgtgcatctaatggcgagccaagaatataaacctcgtgggtcaattactaatggtttgtattaatgtgggtcatttctctaattcttttggattatacataaaattgagattatagacattttaaacagtgtggggtagccgacccccataaatggctaatccaccactgatggcaccgcctcatacaaattaacacctgattacttaacttgtattaacagagtaaatacc

SEQ ID NO: 1197 - DNA, 426 bp, Oryza sativa
  unsure (1)..(426): unsure at all n locations
tgccacactnttatgtgccaatgacatgtgggatcaatgtcttgttgtatgaatcttgctataagtgtggcacaaactaaacggacacataactttagttaaacctacataacttgagttgtggtatggcgagacaaattgtggttttataccaaacaaccccttaatacaaaatgtgatatatcctatactaatcagagcaatattatatctcatactaaatttatttatttgaagacgaaggaagtatatcaatatgagtagtactatatccgagtgagagggatggacacgcacttccatgcctacatgagtagcaagagaattgttatttcgctagtggattttacaacttggaacgttcagatgagatatcggccaattggctacagtgcagctctcatttcatggcgtaatatttataca

SEQ ID NO: 1198 - DNA, 325 bp, Oryza sativa
tatgtataaaccgctgggcacggatgtattgatataggttttatatggaaagcactctctaaaatattctgcattccggagaacggttattactattttgataaggaatttcaatgctagctagaatgataagtaatctaatacgaaaggagctaatagtaccaatctggcggcgatgttgggaggggcgatgtatcggttgcccttgctgaagatggtatggctcatgccgccgccgatggcgtacatgagccattgcgtgtagtctgtgttgacgacgtggaaaaacccacaccggcatcgcggcattcgctgcacgaaccca

SEQ ID NO: 1199 - DNA, 359 bp, Oryza sativa
  unsure (1)..(359): unsure at all n locations
tcgttgattcccagtgaggatctagctgtttctgttcgtttatattcngacttgcatgttccgcccatatccatttataccaaggcaagtctgaagagtgaagatggtgcacccttttaacgagcagagcattgttctgtcggccaacatccttgataccaaggcctccaaattgctttggaatgcagattgaatcctatgccactaagcatctggctccaatgcagctatcctcccctgttcagagaaatgctcttctcatccaatctaagtcttcaatcgttccttttggaagcttgatggctggcatcgcacatgcacgtaagctgtcaaggatcangttagctgacatcccatct

SEQ ID NO: 1200 - DNA, 273 bp, Oryza sativa
ttgataatgggccacacccgccagcgagcgatcaacaggagaaacctcacaccccataccgagacaaagagagagaagaaagaatgaacacatgtgctacgcaaaactcctgaaccaattgcgttccatgtaaaatatacaacataccaatgatgtgagactacgtgttaatgaaacaacaaaacgtgaaagatgggtgcgtagcatcctgatgttggaatcacacggaaaccctgaaactgaacagcccactctataatgatctggatcctt

SEQ ID NO: 1201 - DNA, 405 bp, Oryza sativa
ttacggaacttaaatctcagcttgacacaacttctaactggccatgcgctttgtgtatattatactacaaccctcttaaccaatccctggattgttgtgagaaaattatggttattcactagttggaaaagaagaagaatcagcacaaattatttctaaaatgctctttacatgaacaccaagagactgttcgatactgtaactcatgtttgaaataagctcacaaaattgttgccatactttcctccgcacatgacagaaactagaccaaactccaagaatatgcataatgagttaaggtagaactatgagatccatacattagcaagtttccctattattctcataaattgcaatgagttgtgataccaatcagccaatgcgatatataatggataatcaaca

SEQ ID NO: 1202 - DNA, 402 bp, Oryza sativa
  unsure (1)..(402): unsure at all n locations
tnctgcgatgttaggcaagccagctaatctatctctatttgtgtcatatatttacctgtggccatgggttatcagctgctctcttgcttggtggctcggtaagaagttcaacgtttacaatgctggtgcaaccatgccgaatagatgtaccaatgcaatctgtgcctgtgtcaccaccaccaataaccacaaccttgttcccctctgcagatatgtatctaccatccttcaagttgctgtcaagtataccttttcgtatttgcatggaggaactccatggcaaaatgaactcctgataactcgcgtccacgaatacctagatccctgttgacaaaatatcaattaaatgtctactcataacatcaactatatggctacatctgctgatagctcttatgaact

SEQ ID NO: 1203 - DNA, 434 bp, Oryza sativa
  unsure (1)..(434): unsure at all n locations
gtaattataataatccgcaaatctccatataacagcattaaatctttgatgatcattatctggncatgcgagctccgaatcgacccgttcaagtctcttaatgtttgttataacctaaagaaccctgtgctttctttttatgtattgttattgcttctttataagcttgtagctttgcttgtgtgcttcgcgtagctttcgtcgttcctgaggttcccgaatcgtggttcgtggtcgtctccgaaagttcggaaggccgttctctctgagcaaggcaagtcacatcattcttgagcatattgaatcccagtctataaaattattgtgatttaaattattgcattatcgctctgtttaaattaccgcggtatcactggtttatttagccatgcctatatacctttggtatgacattattattgctacttgtatta

SEQ ID NO: 1204 - DNA, 353 bp, Oryza sativa
aagctggctgtcagagcataacagcatgcatgcacttttttgttatcttgacatctcctatcacatgtatccttgggcagtggatcgtaaatgcaaatcctcatctgagttataacttatgcttcattctggccagggttcaactaaaaactatgtatgtgttctgcaaaccatgggtaatgtacctgagagatcaaagtctggctgctttgtcttactggtgtcaagcttggcaagcagcaaaggaagaagatgggctctactggccaatttgaggcattagctgaaaagatatcagtttggttctgagataacatttctccagcctattgatatgacttttgttcttgcac

SEQ ID NO: 1205 - DNA, 470 bp, Oryza sativa
  unsure (1)..(470): unsure at all n locations
ctaccgctggaattntgttaagtgtcatgctgaagttactgtctacagtcctttgttgcaccatgttgctgtccaatattatgggtgaattgtgatatccatacccatcattcctgagagaagcttggtgtttgatgttttgataaccttgcttcttctgttaatgccctgtttaaattccaccccacaaattttcaccctttcacattgaatgttngaagacatgcatggagtattaaatgtggacagaagaaaaaaccaattacactgtttgcgtgtgaattgcgagacgaatcttttaaggctaattgcgccatgatttacaatgtgttgtacagaaacatttgctatgacggattaattatgctaataatttgtctcgcagttacagcggttatgatattgtttgtatagacatgttatacttaatgtgtctcgttatcgatgtaacgccaaacttcacctgatta

SEQ ID NO: 1206 - DNA, 477 bp, Oryza sativa
tgtgatggagatgattgggatgtggacgtcggctattcttgtttatagattattgcaatgtggcaacacctagatatgcgaaggaagttctgcacgcatgaaacgatagcacacatctccttctttcgtcatgtcatgagtgggcttatccatctctacctaaaccgtgccacaccgcgcatcaaaaagatgtttgaattgagtgccatcacaatccaatcataatatctacggcgaggtcagtcacacatgcccaggttgtaaacataccctaccccaaagagcaactcttggcgattggcaaagaaacatggtgtaaagtgaaaatcttgacttaaccctagcccaatatgaaacactggtgaaaaaaatatacgccatgatgaaatctactcatatctattgtattcgtgacttactttattatctaaaaggatttaagaataacttcttgtctttatattatatatattttaa

SEQ ID NO: 1207 - DNA, 445 bp, Oryza sativa
  unsure (1)..(445): unsure at all n locations
gcttcactgcgaacttgctctcccattcggagtgaatctcagttctttctttcggngagagccatcctcactgcttcttctgtggttggggagggatatggtggactgggtgcttgcatgaatggaagaactagcgaccttgctcggtgtacagatatggtggcgccaaggatggactctgtgcgctgcgtgcatcgctgctgcgcacggatgcgcgactcggtgcactgcgcggctggcacggtgcaacggcgtggttgccgactgatgcaaggcggcgcggctcatcacagtgctcacccggctcaacattttgtcgaacacgtggtgggcatgtgaacctggctggaggaggaaagaggaanggcatctggccaactgatgtatgaaaggggtggaacacacttgtgctggatgatggaaaggatgccgatggactatgctg

SEQ ID NO: 1208 - DNA, 469 bp, Oryza sativa
  unsure (1)..(469): unsure at all n locations
ngtttatataaagcgagctgngtgtagcttgtgctcaatatctgacacaccaaacatgcatgccatatgacttatatatataggtgcctgatacatattcaccggtggtttttctccgtcatatccagttcacctacgaattcaagcaatgattctccaataaaaaataaacaaatgtacatggataattcggcaatcagttttaatgcggagtcttggcacatcacttctgttcatgcacattcatgttgtagtcacttctacctagctatcttaactccatctagttggtgttagctccatcagattggtcctaattaatgaattctaatgattcaggggcatattcatctgaagaagaaaaacacatttgatccatatagggtagctcttcaccaattgtgaagcacattacgaatatacagaactgaaattctatagctgcacgcctcaacaagacacatattat

SEQ ID NO: 1209 - DNA, 433 bp, Oryza sativa
  unsure (1)..(433): unsure at all n locations
gtgtccgcatccnctcttcctcctcttccctctttctctctgtaactttccttctactcctcctccactttccccggccaccttctccttcctccactttgcttctccttctcctacattnttcccggtctcgtcctccttcctccatttcccggcctacacatggcggggacggtggctcgggagtgggtggcgcaaatgcgccgagatgaccgtctcgactcggtgggcgcatggagacggcgtccttggtggcaggcaatgctagcgcgtggatacagccgctggctcggggggcgcgtggatccaacgacctcagggcggatccgccgccagcttggggcggatacgacatccccgtacttgggtgcggcggcggtagcctcngactgtgtagatcaaccactgaagttgcacaagcgacagattgctc

SEQ ID NO: 1210 - DNA, 387 bp, Oryza sativa
tcacagatgtacaatgcagcgagggccttcatgcttttctgtatttcacgacgctccaaacgatctaatgagcgtcttagaaccatactcttaggtgcgacgaaacaactacgaatacagcattacgaaagcaagaatgtactatcaacatctgcgggttggaacacacagagagctacgactcatatacagcatcctaacactgcgcagaagacagacaaaagtgggtcacatgaccacatcacatgcatgcatgccggcatggacacctgctgaaacgcacataatctctcagacagaagtagaacagtgaagcagtgaaccatgccgaaatggcccagatactctctcatgtgtcatggaccctagaaccgttccattccattg

SEQ ID NO: 1211 - DNA, 374 bp, Oryza sativa
  unsure (1)..(374): unsure at all n locations
ctttatactcaacttgatcctctcttccataagtacactgtttctttttttgttctaactaacctatacaatcctatcctatgaaacatataaaacatggttttttaacctacacatatattgctctgtagtgaataaatgtatatcacataatgttaccaacgtttgttttgtgggataaaatgaagatgaagattataatggctcggtatagttgagcttgtcactatataccaccaaggggacaaaaaggagagataggcactacattttcaatgtgaatttagattgaaaccaacatgcaaactatcatgtttgtgngctttgtatatccatccatcttcagacttgctcctaagctgcattgattatct

SEQ ID NO: 1212 - DNA, 488 bp, Oryza sativa
ctataaaactaagcttgcacctggatctatgtaagctggacaggagcatcatcattacatgtcagcgctaggctaacttggggtcgccgtcgtcgagacatttatgctagtactatgattttagggtcaaagatatggcagttagtacattggtgaaatctgtccaagctctgccttttgccatttacaaattatgagcattgatctataacgataatggcagcttttgaatccattggtactatgttagaatatagaatataacctgcggcacaatgtgaagatacaaatatccaagaaatagtaatgggatagtttacatgacatacaaatatgataatcacaagcttcataacatttcatatgacgaaacgcctcaatgtggcattcgacgtacagaaaccacattccatttggtctataagttgaagagataatatattttagacgattatacggtccacaagtcgactaacacagttgtaaca

SEQ ID NO: 1213 - DNA, 408 bp, Oryza sativa
  unsure (1)..(408): unsure at all n locations
agctnagcggcatancaggnnggctcaccattgaccgcaccatgttctatattgttcgattcctccgttcagacaccccattccactgaagcgttcctgtcggagtgagtcgcggaacaataccacactcctttatatgattgccaaagtcaaggctcaagtactctccaccacgatcagatcatagatacttgattgtcttgcccacatgattttgtacctcattctgaaattccttgaactcttcaaaggactcagacttatgcctcattaagtagacataaccatatctactaaagtcattggaaagagaattaagtacccaaaatcacctctggcgagagagctcatatggccacatacaccagaatggactatgcccaatagttacttgcgccttcactttga

SEQ ID NO: 1214 - DNA, 354 bp, Oryza sativa
  unsure (1)..(354): unsure at all n locations
atatgtctcagacactactcttttgttcacatgggaaaggcanaggggcagacgtgtattgtgcagcgggcaaacagagaatttccgacactttattatagcgaacatagaccgtgattataaaataagccaccagctctagtgtaagttaaattacgtaatatagattgtaaattgttaatttaatggggacacaatataatggtggagaccttactntgaaacagtgaataatagaccaaggtaatgaaaagtagatctgatgatttatgtaatggggccatcagtttatgtgcatgtataaattaattaatataaatactcgctatttaatagggacatatcaatataatt

SEQ ID NO: 1215 - DNA, 432 bp, Oryza sativa
tatttaatgtactagtaccaaataatagcacactaatgcattgtctatacactcccaatgggaagtgaagcaccagctctaccacgagcaaatgagactagctacacataacaaaccaacgaaacaggcatacaatccagcacaacgagcgaaactatctttaaaggcaagaatattattcataaatgacgcatgatttttatcaaaacgcttgccaatgatatcagataagtagagtcaacaagacaaaactgtatctgtcatagcacaccttcccaactgcacccaattacgccattatttctgggcaaaagcaaacgagttgccattcctccccttcaccagtctcaaaccataaaccccacaacaaattctcctataggacggcctataagatgatgaaaacaaagcacgatactccagaggcgtcat

SEQ ID NO: 1216 - DNA, 320 bp, Oryza sativa
  unsure (1)..(320): unsure at all n locations
tccctggatctgngaagtntctctatcaccgtattgcgatcttctgatctatttccttgatcgctacttatgggcgcgcgctcaaaggatcaaacacggattcgcaaacaaaaaggggaattcttgaccactttttcctgtcgcgataaaaaaaggccttacgcgagagcaatacaggttgggatacatctatctcttctgagcaacctcttttggattcttaagaccaccctctccgtaagataccgcctgctttgngctctctattatattatctccttccaaggatttgtatgatcgttcacgctatatttaatcta

SEQ ID NO: 1217 - DNA, 337 bp, Oryza sativa
tcatatgtgccatacctcatctcaatgatcttttgttactctctccatgcctctgcatagcttatggtgtacttgaatgtgtactcgacgtgcctaataattgattttggttcaaagccaatgttaccaactacactgctgtacatctcacttgccacaaaagctgaagtgatgtttcggtgatacttctccaccccgtgtaagtagcacttgtgctcggtcacaatgctaactttccaataatcattccatttacccttatatgcatggacacgccacggcaatcttccttcatgcacctcactttatacacataatatgttgacttgaccaccct

SEQ ID NO: 1218 - DNA, 474 bp, Oryza sativa
  unsure (1)..(474): unsure at all n locations
ntgtcnctgacttgctgcatcataaactaaatatcttcttctgatataaacgggtggttctagcgagatatgttatatgagtacctttacgctttgccgagatgtaaggggccattctatgattccatttcttaataccatgaccaaaatgaactcccgcttctatcatctctttcaaattgatgttccaatatcttcttgtcattttttccacacttncttttgattatatctttgttgtcatcctacctttccattacgaaatatctttcttttcgaagattaagaaagagccgaaatagcttgaaataaataataattgttccgatggaaccttctacatggtataagcataacctttatgaattaactatacttctttttaattaaaataaaatagatatctaacctcttacgtctaacgtcaaaatctatttaaagaaaaaatctgtttatgtatcttaaatctataat

SEQ ID NO: 1219 - DNA, 305 bp, Oryza sativa
aactcagcttgaattatagaaggtatttaacagacgcctttctacgttatcttggtggcattgcgcatgcaaagctccgtatcgtattaagcctgaatttcatacatgctattctaactgatatctctctacggatatttcaagcgtcaagatgtctttgttgtcctattgagttataagaattcagtatgccttgaactattccaagtgacactttattataccataagaccaacctgcatattgttgtgcatatatattgccgccaaaaactggtgccccttgaatccaaccttcagtacaca

SEQ ID NO: 1220 - DNA, 418 bp, Oryza sativa
  unsure (1)..(418): unsure at all n locations
tcatagtaaacacatcatcctgtcgtgtgtagaatcccttttcaggaggatctaaaaaccggattcttggtgtccaaactcaggctgagttcgttggttaagttatcaacacatatctcgtctttcgcgctcacgtttgccaaattactaaatggtgcgtttttcatagattatatacaaagttgtttaaaaaacatattaattcattcgcaaaaaactaatacttaaataatcatgcgcgcgctaatgagttgctttgtttagcgtgcttagaggattagttcccaacacacaatacccaacacagccttagagtctgtgaggagagcttctagcagaaacagntctcacaaatcttcccatcccaacaggatggtctctattctagctcatacaaaagctcccccccccaacagct

SEQ ID NO: 1221 - DNA, 384 bp, Oryza sativa
  unsure (1)..(384): unsure at all n locations
ntgatcgacatcgtcctgcggcacgtacagctcaagcgctattgccgtatcgacaaccggcgtcttatgttgcccacgctactggacattctcaacatcgacatctctacagcgacaataaagtactcggaatctacatgctaagaaaacaatgggaacaactgcatacacaatggcagtttgaacctacgaaagttttacagcataattggataaggcgtacaagggaaacaaaaccctactcttcataataggggagcacggactcccctaggacaccgacctcctcgatcacgccccgacgtgcgtcgtcggcggcctcctgatccaaaaccttcttatggtcgagatcagggtgcgccaaccttacgcacgcaatgacgt

SEQ ID NO: 1222 - DNA, 407 bp, Oryza sativa
  unsure (1)..(407): unsure at all n locations
tttggacagaaagtacttgacctcctcaatcacattgaggctgtttcttaatatcaatatgtcatcgacatataaacacaagatcactccctctcccccaccatagcgatagtacacacatttgtcagcttctttcacaacaaagccaacagatgtaagtgtattgtcaaacttctcatgccattgcttatgcgcttgtntgagaccatataaagacttcaacagcttgcacaccattccctcctgaccttctagtacatacccatctggttgatccatatagatctcctcctccaactctccattgaggaaagctgtcttaacatccatctgatggacgagtagaccatgagaggctgacagagcgagtttgactcgaatcgtggtcaagcgagcaacaggtgaat

SEQ ID NO: 1223 - DNA, 485 bp, Oryza sativa
ctcaagcctatgggctaattatgtgttccagaacaaaatgtcagactttatcttttatataataggaaagaacacactggttgtatggagacaaatattatcatattatctagtaaccaaagacgagagtctagtatgttctaatactactttcggcctttaatatatgacattgattatttcataattgaactaaccaacgtcatacataaaagaacagagggagtatctattatgatagcaaatatatgctttccaacccatatttcataagagtaaccgcttgcaactgtatatgcatagttacagatattaagatggaataaattactctgagtgaataggaacatgtaaacctcttctccatatagcattgtatctctctaaacagacttgccgacattatgagttatgaacaatcatctaccgatcaatttgtaaattaaagtctattgatctacgccaaaaactatgcacaatattat

SEQ ID NO: 1224 - DNA, 346 bp, Oryza sativa
ttgacacactaagacaacccaaactgcaccttttttcgtcgcaaaacccagcgataggcacccgatactgtactccggcaagtcttcaacaatcaccagaaaagcagaaccaccagaccaagatgaagcaagagaccactggcgcacaactaattactcctcagggcagaaggcgagagcgactattaactacgaagatctatgccctggtgggccccttgccaagaaaccaaggatttctctctctctcagaatggggactattgaccaaccttggaagctctggggcaagaaagacaatgccaggaaaacaaaacccgcaagtggaaatgggaccacaacacaa

SEQ ID NO: 1225 - DNA, 328 bp, Oryza sativa
  unsure (1)..(328): unsure at all n locations
tatagagtctagtttcagatggttntggtcccatgttaaatatctttctcagctgttgggaatctgtaaaacacgtacctcatccagtccaagtctgatttgggccttgggccttgaaatattgtagtacgctaagcccaagggggtggcgatgccaccctaggatgtccccaatcaaatttattcagcatctatcatagtttaaaattgggtttgggttacattatttctgccattgcagtttcaggctacttcggtttgtgtatccccaaatctatcgcttaatcattcacatgcaattgagttgctatctaccttgatcttactt

SEQ ID NO: 1226 - DNA, 392 bp, Oryza sativa
  unsure (1)..(392): unsure at all n locations
tcggaggcgaaggagatgaagcacgcctttcactctcactgtattgaactaaggctttttgttcatgcttcgtagtgctcagttattttttggatgggattatcttggcttagctgaaactggaagattatgcattgtgtgatcctggtttctcgctctgattgaaatcgctgggataaacacattaaggtcatgaactacattctgatagaattaactttctgatattcactacattctgatagaattgtgctgtcagagcataaatctttttgggacagtattataagaatctgtgtactatntctgagacaattccttttcccgaactgtntgagttgttggtgatgatgatgatgatgatttcttttctgacccttgatataatacag

SEQ ID NO: 1227 - DNA, 461 bp, Oryza sativa
  unsure (1)..(461): unsure at all n locations
ctattgtgcactangctatgctctctcgagatctctcacttatctacaatacacaccatgagggcttgacgatgattatcattgaccatgaggatgatgtgtgtcatcacctcttcgtcgtaactcaaaaagacgataagccaaccacctctttgtccaagattatggcatctctagtgttgcattgattagttcagtccatgcaaacgaacaaaacttatgtttgatctctgcagcgtataaatcgttttgtgggacccacggggactcacacacgtgcacagtctcgggcttacccacgtcttcctctgtctcacgtagcccgatgaaaattggctgtattcactttgtgttgacacctatctaaaagacgaatttctcgctgacatgcacgatatcggtctccgtatgtgctctgctcgatatttcaatggtagggttgatttaatcacatgatgttg

SEQ ID NO: 1228 - DNA, 392 bp, Oryza sativa
tcaggaagagatgggttctaagctgaactctagtactgcttatcattcgcagacagacggacaaaccgaaagggtaaatcagattttggaagacatgttgagagcttgtgctttagacttcggtggaagttgggataagaatctaccttatgcagaatattcgtacaacaacagttatcaagctagtcttcagatggctccttacgaagcactgtatggtcggaagtgccgcactccgcttttgtgggatcaaacgggagaacgtcaggttttcgggatggatatcctgatggaagcagaagataaggtgaaaatcattcaagaaagattgcgtgtggcccagtctcgtcataagaagtatgccgacaatcgccgcagagatttgagttttg

SEQ ID NO: 1229 - DNA, 419 bp, Oryza sativa
gatcatatcccctcgtgatcttcttcttgacatgctgggagaacaacatctgcaccggcgacggagacgacggtgacctccggcaatcgtcgccgccgtatgcgtaaccgccgccgccgatcccgagaccaagccatgaacctagatcctctccttccatgctactagagctatacatggactatatcttatgtagaagcttctattctatgttgaagaagaagatgacgaagaagaagaagaagccgctataagtttaaaggtgttgctatggagaagatgaagtgtatgtagaagaagaagaagaagctagaagcttacaaggtgtgtgtgatagctatggagaatagaccaacgggtcaagaagaggagtactggtgttatgctagctttatacgtgacaacaacaactcgatcaa

SEQ ID NO: 1230 - DNA, 315 bp, Oryza sativa
cgttatatatccacataaaggagaactagccgtgctagcatgcatatgttgtctaagaataatcaatctccacttgtactcggaattatttctgttggcgagaaaccttacataattggaggagaatcgatggaaattaaccgaaccataaatcagaatcccgtgataggtagacttatgggtggatgggcttacaaattcagtgaaataacaccaaacgggtccaaccaccacagcactatgccctcctggtgattcgagagaccactccagaatgtcgagttccttacacaatccatcatgccatctgaccgg

SEQ ID NO: 1231 - DNA, 426 bp, Oryza sativa
  unsure (1)..(426): unsure at all n locations
actcaancnntataatcgtactaactatatgcaaatcgtctcaacaatgtttctnataacatacctaacctcgcctccctactggttataatgcaatgcagtctatcatactcatcaaggtgccatattgtgcatatgcagacttttatgtgtcatatctctaacctgtgggtcctctgcttaatccttaaacaacaccaccaactcctgcgctttcatctttcatcgaaattttcatgttgccgctaatcaaccataaaaacatttgcagatgcgctctgacaaggtagtctcataacgagtcgttatagatcgaccgcatgtgagttaccttctcctactaattataatagacagactcacgcgacattttgactcacgctatctcactttcccaataaggacgcttctttagtccgcccgaca

SEQ ID NO: 1232 - DNA, 349 bp, Oryza sativa
  unsure (1)..(349): unsure at all n locations
caacagaaccaacgacgttgcaacttgcaagttgcaatgggaaaagcatctatatcaccaattaactctctagcttgctagggtagttggtaattagatatattgcttctacattgatgctgcgatgacaactcatttgacgaagaaaagttaattaagcatgatcgagtaaaccacctgatcgggagtacgtatgtcttagatacgctgaacgcatgacagaaacaacgagtcgtgattatactcttcacctacctgaataccgtagatacgcaaccaggcactgtcgtgatttaactngcgaccaactacatacttcgtaccttggaccggcatgcatgcccgatct

SEQ ID NO: 1233 - DNA, 401 bp, Oryza sativa
  unsure (1)..(401): unsure at all n locations
nttaccgaanataatagatacgctcagatcgatgttaatcttgacgtagatctattggcgccgggcgaaccactcgcacgcagccggtctaaccgccgccttgtcgccgggtgaaccgtctccctgccgcgagtgtgaccgccagtgagtagactgcagacttgcctccggtccaaccgtcaggatccagaaaaacacgtatcgacgaaacactngatagtatatcaactttattgcagcaatatatgtttacaaagtgtacctaaaacactcccctctcaactcacgaactaagattgaaacctcgaagtagaccctaatttttctctctcaaaagtcgatattcttctaacctcaacccttccattgcgaagatctcatgcatacaagattcattcacc

SEQ ID NO: 1234 - DNA, 392 bp, Oryza sativa
tgtggagggcgagctgcacctgcaggtgttagaggagccgttagcactcaaggaggcagaattagaggagccggtagcactcaaggaggcagaatcttatccgcagtgacgcgttgccaagtaagcagagatggactccatcattcagaacggcacctggcacctcgctgatctgccgccgggacatcgagcaataggcctcaagtgggtctataaagtgaagaaggacacccaaggtgcgatcgctaagtaccaagctcgtctcgtggcgaagggatatgtgcagcaagccaacgtcgactttgatgaggtgttcacgctggtggcgctgctggagtccatccggctactggtcgccctctctgctgagcatggatgggttgtgcatcaca

SEQ ID NO: 1235 - DNA, 321 bp, Oryza sativa
tcgcgactttaccatcatattcaagcgaaataatcttaagtcttgtaaggtgcttgataccaataatccctgagtccaacctgcaaccataaatttctatactttccatcgttggcgaggtgccctcctcaaatcttatctctctaagttgcttcagcaagtaaatatcaagacacctgagatttgggaatgttccccttctgaatgtcattttctcgtcagcatatgcgttgcgattaagacgaagaaccataaggttgggcagtgccccaagtatctccatagttttaccatctgttagcccacatctggataagcaca

SEQ ID NO: 1236 - DNA, 374 bp, Oryza sativa
  unsure (1)..(374): unsure at all n locations
tctggaggagtaaacgccagattggtactgtagctcttaccatctcgactgttcttcatgaggccaanacatgaaagcctagggntacaagcctgtgccattgtaacaacatagaaatgttacaaaacacacagatgatcacgttacaaaaacaatctatatgatactcacatcatcaaagagaactctgtatgcattaagatcatggtacatagcacgccccttgctggtgcaatattctaaagcctcagccagatagagaacaactcttaatctcatgggccatttcattgcttgcgcctccctgtgaaatatacaataataagtttgaatattacatcattcaagactgtggtattgatcataatatgcag

SEQ ID NO: 1237 - DNA, 428 bp, Oryza sativa
tagtcgtctccatcatggtgggacccaatcagatgcacatctttgtctggccatgatcggacccaacctttctggcattaatggagatgatggtacttgcaacgccgtgggtcggtcgagttgggcttggatcttctgctcggaattcttttatcgattgagattccatttttcccagcttgggagaaaagagatgataaattattggaaggatttcttgtgaaaacctctcttgtagtaatatataggtgggatgcgtatcacgattcgtgatgttgtcgctgggcctgtatgtcggtgactgcttgtgtttatggtctataaggaattttgattgtgagtaagccggcgtttattttcttttcttttaacatatggggcctgtggataaggaagcaactttatatgctatgattgtgttaacctga

SEQ ID NO: 1238 - DNA, 421 bp, Oryza sativa
  unsure (1)..(421): unsure at all n locations
tttataccatctctccagaagaatatctatattaaatgtttcacatcatttanaagcagcgactgtagctgcttacctttgctctgcagcctcttcgccttcaaatgtcatcttgaatctcatccctattgaatgatttcgtttcagagattccttgtacagatcacgtggtaccacacattcagatggactagtcctgcaatatcagtgtcactaactcaattaagaacatgcaactgattggcatgcgcaatatcactgtcactaactcaattaanaactttgctctatcgtgtatatgattatggattctactacaacaatgagagacaaatggaatatcatcgcttccaaactgaaaacagaattgctaagtatcaatttgccagtatacaaaccttgcttgtgtcacagtgacatg

SEQ ID NO: 1239 - DNA, 316 bp, Oryza sativa
atgtataacgtgaagaccaatctgaagttgaaggtgaaaccaaaaatatcgcggggatagacctaaacatccagtattttctacggcattaaatgaaccgcatattttgaataccaatgaactaacatgacttgcaagcaatagacattaacgtttgaggtttacttccatagttgaaaaagatatacctactcaccaattcagatttatacaactaaactgcgtaaatgattagagaaaaatcaagtctaataatacgttcgacggatagagaggatatataactctccatgtcaatccagggtatatactgcaa

SEQ ID NO: 1240 - DNA, 380 bp, Oryza sativa
  unsure (1)..(380): unsure at all n locations
tcataatntcttcaaataagacgcgaggtcatgcctaaattttatattgaattaattaggcgattacatacaacatcggaagtgcctaaaacgtttgcaacttcatcctccaaaggtttatattgtcacactacatatacacctatgttgtgcacactgtttttgactccaaaacttagttgtaagttgatgagagataaaatgtgtgttgggaaaacagaatatataaaaatttacctcattagctcaataaggctctatataatagttgagaaagataactctcgtgaaagtcaatcttaaataatagaaaaccaattaaaatgaatattatcagaagccaaacacatctaaatttaaaactcttcaaatcagattta

SEQ ID NO: 1241 - DNA, 374 bp, Oryza sativa
  unsure (1)..(374): unsure at all n locations
ngagcctacgcttctatggtcttcatgaagatcctctcgctttttatgctgccatgttccagaatctaggccatcctaacctttaccggtgcttcgacagtgcgaaactgacatttcacgctggatggatccctaacctgaaacacctgtacctgagctccatgaatgagctcatggaggttgaggttgacgatggcgccatgacaagcttgtggagactagaactntggagctcgaaaagctcaacatctgtgccacaagggcttgtgcatcttacgtcactccagcacctgtgcattggatcatagatgcttgaagagttccacacgaaggtatagggaatcgactcgcggaatgttggcacatcccctaca

SEQ ID NO: 1242 - DNA, 447 bp, Oryza sativa
  unsure (1)..(447): unsure at all n locations
gggattctgggatagatggagtgantaattaacattaaatattgttttgatcgaaaactggatgcataaagatgctcgcactataattttaacactttggcccttcttacatttactttacaaatgtaaatccatgctgaaacttatattgtaaatgacatatgccaagacttgtttcacaaatgctagctaagcgtgtactcctatgacttttagcctgcaagccgatcggccgctctctatgccggcgacgtacgagacagccaagttcatggaacgaatatgagaggtgctccggcggtatgacttttcagtcagactattattgtattagtacgagccacgttcaatttctctacagtacgtaatttgtcagactattattgtagtggggcttttctgaacagtaaattgagcntactcctcacagcggaatgagttcatttt

SEQ ID NO: 1243 - DNA, 255 bp, Oryza sativa
aatcggggccagcactatctataaccaatctaatagataggattcatcatacaaagtcctctctttgaaacacatagcatatattcatgagtaaatacaatacttctgtgggcagagaagtgtatggattataagcgtaatgcttaatatcgaaaaagacaatgtacaggttacacgtttatataagtatggtcctagtggctcaaatgcttatataaaatatatactaaaatgagatggtaaatgttgagcata

SEQ ID NO: 1244 - DNA, 267 bp, Oryza sativa
  unsure (1)..(267): unsure at all n locations
ctactcagttactgtcaaaacctccaggcctgtgtgccaactgtcaaccctattccaattnctctcactagcatgaatgcatgatagaatctcagctgtcttttccttatgctgaagaaccttctacagaagaactgtttgctgttgcttactaatcatagcgcggtcagctgaatgatcttgtcaagccttcatctttactatttatccctctaaaaacaaagggttgcaactattcaatgcaggaccctgacggacaacatcatc

SEQ ID NO: 1245 - DNA, 461 bp, Oryza sativa
  unsure (1)..(461): unsure at all n locations
gacctatgaaactaagctttcctcttctataggcgaccgaaatntcataatccatcagtcgatcccctggtcattaattctgctccaagagttgtgcgcgctatcaggcatatggcttaaacttttttgggtatgggccaagcttcccctgcttctttttctaatcccacgggtttatccaccgaacctcgtacaacccacggcacctccacccaatacacctttgtgtcagattagtgattccgacacaaactcagctgtagagagagaaatctctatcaggacaccatgtattcctgagatcaggttcatatgcagtccctagcgtgactgcaacttaatagtcacactagggctattgaaactacatcgaatgggtgagattggttaagcattgttcgtgaaaaaaaataacagctatctgctatagcagatggtactggagtacttaatctactacc

SEQ ID NO: 1246 - DNA, 350 bp, Oryza sativa
  unsure (1)..(350): unsure at all n locations
tgccgtcagttagcagaatggcgtagccagaatattcatattccggcgttatccgngaacttgtcggcgctgcactttcgcagtaatcaactgcctaatcaggtgtctgatgcaatgcacgcctgcggtattgacggccaccagctgacggtagaaatcacggaaagcatgatgatggaacacgataccgaaatctttaagcgcattcagatcctgcgtgatatgggcgtgggcttatcggtagatgattttggtacgggcttttccggattatcccgcttagtcagtcttccggtaacggaaatcaaaattgatcaaaagtttgtcgatcgttgtctgaccgaaaaacg

SEQ ID NO: 1247 - DNA, 262 bp, Oryza sativa
catatctatgcatgacaaccgccaattggtgccagaaactgcaggtaagctcccattgatctgattattgctcagattaaccctgtacagagactgacatctagctatctcactgggaaatcctccgccacactggttgatgcaagacaagaactgcacgctggcctcccgtgcacaaaccaagtggaattgcgccacggaactggctgcgagcgaagtcaatatgaagaagccccggcgttgtgtcagccccaaatcctgt

SEQ ID NO: 1248 - DNA, 461 bp, Oryza sativa
  unsure (1)..(461): unsure at all n locations
gcttgaaagcaaaaancgaactctctcttatttatggccctccacgttgtcctttagttacggttaccagcaatttgtcacaatttcaggcataaacaaaggaaactttacacttgtgtgttctgcaggtactggtaaaaccaggactattgttgcaattgtgagtgccttgctttcattacatgcagccaactcctcacaaagaaatgaaaccttcgctagtgctgaaattaacaagccaagaccaaggctaagccaatctgttgcagtaactaaaagcttggcaaggatgcacgcccttgcaaaacaacttattaacgattctcagagagaagtcccaacagatcggctttcaaaaggaagggttttagtatgcgcgcagtcaaatgctgcagttgatgaacttgtgtcatgacttatcgaacgattgtatgacactgatggaaaactgtccagcctta

SEQ ID NO: 1249 - DNA, 454 bp, Oryza sativa
  unsure (1)..(454): unsure at all n locations
atccgtcactctgtcagaacttaagaatatatatctatttcacgtggacttcagtacttcacatacgaggctagtgatatgtttggccctgatccgatcatgaaatcccacaaaaaaaaaatgcagcggtcgcatgtatggttctccacttgggtctcagtgacacatccagtgtcagtctcagtctcacgatgatgagatgcagcaagaggcagatcaggtgagctactgcaggagaagcaatggaaatcgcacatgtatgtggttagagatgggcaagtgcagtgcacgaccactaacaccatttggatccggcaagtcacatggtcccgtggctgcttgcagattaaaatagctattagctcgcaagttgcgacaactatagataaacagactgatggtagactctgctccctcacctctatcangtctggttcggtaatccctgtgagag

SEQ ID NO: 1250 - DNA, 282 bp, Oryza sativa
cggttccttccgtccgtcggcgaagtgaggccaagcataaagcccccgccgaggacatcgatgatggcgataatgacctatgtttccaagagcctggggctaccatatccactgtcgatggaggagcgtgtgcgcacgtatctcgcctgagcctcaaggccatgaagcgagagcttctggccgctgcccctactcatgaggcgacgcgcccggcgcggtggtcggaaattgccctcacttttgaccagtccgaccacccgccgtgcgttgcccggggagggc

SEQ ID NO: 1251 - DNA, 401 bp, Oryza sativa
  unsure (1)..(401): unsure at all n locations
gctatggtacgaagntcgaagaacacgcgcgacttgatggttgtggcgagctanagtgacttattgngggtcgagttgccagcgagggcctgccgacctgcgcgacggctacgacgtgaagcgcatgtgttgtgttggccgtcagatagcctcgccttccgtgcagaggtccatccccatggacgatgccggtaggaccagccgctgcggctacaacacatattggtgcaagcagttaaattattataggttttataaggaatttggccgactcgtcatgtccatcttggcctccgtctcatctgatcatctncctctccaacaccacatagaattcgaagtttactcttccctgcgattcaaaattntggcatctgcgtacgacgcgatgtcggcatata

SEQ ID NO: 1252 - DNA, 384 bp, Oryza sativa
  unsure (1)..(384): unsure at all n locations
gcttgccatatgcggaattctcgtacaacatcttctaccatgccagnctatanatggcaccgtttgaagctatataccgccggaagtgccgcacacctctcttctgggatcagacaagcgagcgtcaactgttcggaacagaggtattatcggaagcagaaaagaaagtcatgatcatcacggaaagggtgagaattgcccactctctacagaagagctacgcggataaccgtcgaagggagctcacttttgaggcaggagattacgtgtatcttcgtgtcactccgctccggcgagtacaccggttttaaacgaaaggcaagttggcaccacgcttcgtgggaccatacaaaatcttggaacgaacgggagaagttgcttatc

SEQ ID NO: 1253 - DNA, 414 bp, Oryza sativa
  unsure (1)..(414): unsure at all n locations
gttatatctgctaaatgagttgcggcggaccccgaaacaatgaccgctgtcactgattggaagcaacccacaacagttactcangttcgcaactttttgggtttggcaggatactaccggaggatcatcgaaaacttctgcaaaatcgctcgacccatgacacagttgttgaagaaagaggaaaaatttgtgtggagcccgcaatgcaagaaagcgttccaaactctcaaagagaagctggttgcctttgcaagtttaatcttaccggatactgccaaggacttcatggtgtgcagtgatgcttcgcacccaagattgttgtgcgtgctcatgctcgaaggtcatgtgtcacctatgccttacgccagctacggtcttatgaacgcagctactttacccatgatttggagttgc

SEQ ID NO: 1254 - DNA, 343 bp, Oryza sativa
ctatggcaaaaaacatctatcaaagcctttgagacaaaggattgaatcctatccaatcctttaaaattcctatggaatgggtaatcctatgcacattttggaggaaagttaacaagaggtctaacctcttggaacatttcctctgagtctatctctctcatctgattcctgcgtttatcctgtggtccaaacaaacagccattcctgtgtttttcctgtgttatgcactcctctgttatacaattgtattcctgccagaaaccttgtgtgttcctattcctatgttttatattcccacaatcaaaagggccttatgtctactcctcaaaacaaacccaaaaca

SEQ ID NO: 1255 - DNA, 479 bp, Oryza sativa
  unsure (1)..(479): unsure at all n locations
tctcacaccatcattaagcaagatcgtccttctttggcatttcataagtcaacattctgatactacaagcatgttactatcgaaccgtaaatgccttaattctgaataggtcatgccagcagacagtagtgcttgtgaatngtacagcataccggtattcatggtttctgacgacaagattactgatcataaggcangcttgcttctgagtttgagcagaagaagggaacttttgcattgtctgtatagccaaagtgccataccctgctcccattgcacgagctgcattttctggtgaccgcagtgtaaggatagtcaccatagacattacctacacattcatttagcttgtaaaagttagcgcacatagatgcttcagtatttctcattatatgcaatgtggcagtacctcttgtattattggtgggtcttagataatctcgatgtcacttcaagaactatcaaaccacctcgtcaat

SEQ ID NO: 1256 - DNA, 288 bp, Oryza sativa
aaaccccgagcatccactatcttaaaagattttaattttacaacccctctcagggactgatgcccttcgtttgaccggtcgaactttagaaggcgcccgaccctaaaactggctgggagctggaacttcttgattgtcctgatgcatgtactggttaactgaaaccgtatagttggagcttgttcatgtgatctgctgcttgcactgtgacctgatgtccgattctgtagccgtgcgacagaactctgcgagattatctacgaatcctcctatccaaccgggaactgc

SEQ ID NO: 1257 - DNA, 388 bp, Oryza sativa
  unsure (1)..(388): unsure at all n locations
tcaagcttgcactgcannacagtagtagacagcaatctttctccaactatccacaatgaattagctccgctggttaattatatacttcattttccttttctcttcagatctcatctgcattatgttgtagtatgggttcacttgttgatcttagatgaagaaattaagaagatgaaacattacgaaatacgatatttaacaacatctcagttcagtttgatacacacttatagcatgtgcaatagcagttattagccagctataaacatattttaatacgataaaagatgagagagaagagcagcgggctacagatcttgtaccagctgcagcacggactccaagacacagtgtgtgtatgacaggtgggaccatatattaatagtat

SEQ ID NO: 1258 - DNA, 333 bp, Oryza sativa
  unsure (1)..(333): unsure at all n locations
gtcgctccagatacttatttcaagaacatcacagatgctggaagtatgggagcaagtctggcgttggcgatgaccaaatccctttattccagggttgatatggatgccattgatggctttgcagacgggacgagcgaagaagctgctcttgacctcatcagtgatgcgcacaaagctgctgacaagattgctgctgatgtagttgagagattccaagatgtcgaccttgggccgactgggtctgataagtctgacgatgaaaaaactgatactgattgatggtacaatgattttgatgatcaatgacagtggacgctcaatntgtacaatact

SEQ ID NO: 1259 - DNA, 490 bp, Oryza sativa
  unsure (1)..(490): unsure at all n locations
ggcctcatgtgcttcaaactgcanaaattcatggactnntgtttggatggtaacagtcatattgctaacattggaatcatcgtccatttgaaccagactgactagattcctagccgacaactctttcaagtagaagtagccaatgtcctccattgacttgccaacttttgaccttagaaatccctcagctacccacatagacactaggttgcgtgcctcaatggtaacattggctggaaatgcagcaagatacaggaagcaacatttcagctcatgtggaagatcatcanagcaaattgagagcatatcatcaatttgttttgattgcttggacttaagaatatcgaataccttctgccactcaccagtggactccttggttttcataagacctgataaaagagcaattgccagtggtaaccctncagtaatctganaaataatatcatcctcatgggtttcaacgtctagattttgtacttcatatggg

SEQ ID NO: 1260 - DNA, 366 bp, Oryza sativa
ctctggaagaaatactggtcttctctggctcttctctagtaacttaaaattgtattttcactaacctaatctagagcactaaatacatagccttacaagttacaccaaccctcttgacttattgaccccactgatgatttcaacccctatcattctcttgtgatgctttcattctcagtaaatttggttgacctttgggagctgggacttgcaaacctgttgcatgtaatagctccataatgttttctggcaatttagttactaaaattattacatcacatggactgcttcttgttacatatttgcccattgcagttattcatatataactgaaagttggcatgtctacatctacatctaattatt

SEQ ID NO: 1261 - DNA, 299 bp, Oryza sativa
  unsure (1)..(299): unsure at all n locations
tctcaaacgctccgggccgtntacttggacggaggaagctgttcgtgccctcactcagttgaaggcgtatctcagctctcccccagntctggtcgccccggagccaaatgaacctttgctactctacttagcggcgaccccgcaagtggttaatactgcgttggttgtggagcgcgatgaggacaatcctcattccgcgcacccccaccctgtgctggcttggcccgggagagagcatggaggagaggccctcgagccgaacggtggcccaaggcccccgacgaccggagcaggccctc

SEQ ID NO: 1262 - DNA, 332 bp, Oryza sativa
  unsure (1)..(332): unsure at all n locations
cgctcgtcagcagcgggcgcacggtaatacagtacagattagcagtttatgttttgctacaaataaattcagtttctgaaacttgacagtgacactccattcctttctgtgcagcgtgttcttgtgtctgaagagaacgaggaggcccttatctgcgacgctcccctncgcggaaagtatgtgaaatttatgatagtactactaccatgttcttctcagttgctagctatcaaccacgagttcgacaagatcatggtgactgtttcgtctcatcagaagctgcacggggtgcctttctcttcaagtattgcgttggtttgatccactggatg

SEQ ID NO: 1263 - DNA, 441 bp, Oryza sativa
  unsure (1)..(441): unsure at all n locations
tcacgaatcttcgagaataccacgatcggtgttatatcctgttaccgcaactatacgcaaacaatcgaagacctagacaaaagaccacaagaaagatcctaattagacttaataatagtgccattagatagatctcaattttatggaattactggaagttgaacggagtcaaacggatgagcggttgagaagatatggattttctaaagattaaggaatttctgtctaaaggaaaaaggatttaataatttattaaaccctttttttggagagaaattgaaggagggaggaatatcaaacttcctcacggtggctatggtgcggcccgaggggatttgcgtggctcaaccgagcttattgggccggcgcgggctactgngaggcggcccatgataggggtgcggtgagagagatgggggagcctggtggacccggctcacc

SEQ ID NO: 1264 - DNA, 386 bp, Oryza sativa
tttggggcaatataacactgcaacttccctgtactattacatggctacataagagatgagaaatctttcattgttgctagccgcaactattattattgtcatgatgaaacaaaccctcttggcctaaaaaccccacataagaataataacccgcaagaaatgaagtgagcgtgctatcacatcaacaattggcctcttatattcctcgtaagtgttaaaaagcacccacagattggatgtaattacacatggaggcatgcaatgttttgtcgtagatctgaatggggcttgcttaagcatgattgtagtcgctggcgttatctactgaaatcattgaagtgtgacctttgcttcgttaaagaacttttaaatattagtgaacactg

SEQ ID NO: 1265 - DNA, 436 bp, Oryza sativa
  unsure (1)..(436): unsure at all n locations
tactcagcctctccttcaatcctctgtgtgcacttggcgtaacgctgttaaacgagcttgaggctgaccttgcccatcaccggatatgagagaagcatggggatactgttgcgccagccttcgaagagggctatgngaaggtgcagagtgctgctagagctataggaaagcctgctggccactggtaagaagctgatcgagctataggcggcggccatgggatagaggggagaggagcgcatcacgagcacaacgagaggcgaagcggcgagcctgacttctgtcattttatttgtgtggcctgaggaggtgttactgttcttccgggtgtaatgtgcattttccggcggatcttaatncgataacagcccattcaagcagtcctttccagcctcttcagttaaaactcatggaccggtatgttacacctggtttg

SEQ ID NO: 1266 - DNA, 445 bp, Oryza sativa
  unsure (1)..(445): unsure at all n locations
atgtcaagatgaagcaatcaattaatcagtcaacaagttttctctgggagtcatcaattttgtcttcgcttcatagcagtaggtcaagattaaatttccatgtctgggagtttggagtcactgacatcatcactagcacctctgcttcatcgaccctgacatctccgttgttgctaatggatgattatgtctttaccaacttattatttcaccttcacggttgacctactatgcaaatgctgatgagcgtcttcgtcattatcattggttgcgacactgctattgactggatcgccgatatcgtcatcttcatcatgtcagntgcgtttgtcgtcgccgactcttttcttcatcttcaggattggtggatntcgtcatagcctttgatttgcctcgtctgtcaccgattggatatttcgctgccatgactacacaactttatcac

SEQ ID NO: 1267 - DNA, 381 bp, Oryza sativa
  unsure (1)..(381): unsure at all n locations
agcttatnatatanactcacatgaacattaactttctattattgtattttaaaggttatacacataacaagtcatagatgctgtgttagtatgtgttaaccaccaaatatggtaatatcattatcggaaacggagattatatcaaggtggagtcgaatgcggagattgatctgaaaacagagcaagaatcggctgaaatccacatctgctacgattaagatcggctgggtctgagtcggactaagtgagctgatgcagccgattctgacagtataatctggtgtatgacattgggttgaattgaggtgcttcaagatgaatgccgcatatggatagagtcatgagaacgcaattgtatctattaattacgattgtttatgt

SEQ ID NO: 1268 - DNA, 258 bp, Oryza sativa
gccacaaacacaccccgtaaactatagtctgatatttaattggaccgcgagcattcaagtctgctgacatgaacatgagatgtaaatatactccttaacatcgactaataggggggacattcctatgcacacatgcttcaagtgcactttgtgcacaacaactaaccaatgtcaccagagaatcttaaataaaaatgtgcatttacttctaaatctactccacctatatataagctttggaaatcaaatccattaaat

SEQ ID NO: 1269 - DNA, 327 bp, Oryza sativa
atcacattgatgttttgatgacattcttaggcccaactgtcatgcatagattggatgctactttctgatttaacatgtctactatgttatggatgaacatttacagaattaaaaacaaaagggccatatttgttctgttggaattatatttactttaattggatgtgcaataagcctctcaaactgttcatcacttaaaaaagggaagttagaaatattatgaacagaaacaaaagctaccatctctccttttattacttgcaccatgagatttacaagacatattatgcagccgccaaatttctaattgtttaattttccattgac

SEQ ID NO: 1270 - DNA, 384 bp, Oryza sativa
  unsure (1)..(384): unsure at all n locations
actcaagcttatgcctcatatacacatggacgaagtattctatcagtagtgttattttatttatctaactctaatctggagntccttctctcttaatcgaggcgactgctaagttcgttttgctctttcttctgctgtttccagcatcactgcattagcctcaaggttcttaatttatgcaagatatgattcttgcgaaactcttttgctgtgtttgattgattggctcttgctttatcattggttttcagtcttgataaacactccttccaacagtacaactgcttcagcgccatcttactgaacatgtggattctgatcatttggagaacaaaatgtaacaaaagatgtatttttatattagtacattctatagaggtgctt

SEQ ID NO: 1271 - DNA, 172 bp, Oryza sativa
tatattacacgtaccaacaacctattttcttcttcctctgtccaacataaaaaggcacacccacgattttcgtgccaactttcatagtgcgcctatatgacaattgtttataaccagtatttttattgtcgttgcacgaccaacatgatcaatacttcatgcgggacctatc

SEQ ID NO: 1272 - DNA, 177 bp, Oryza sativa
agcaagatcctttaatagggtgaatctcatctgcaaatctgagtcatcgacagacagatcatatggctccagtgatgaatcacagcaggcatctatgctcattatctcctccatacatacttcctctccgaaatgcccattcacgagggaaccagacgcttcacaagaatctagtga

SEQ ID NO: 1273 - DNA, 302 bp, Oryza sativa
  unsure (1)..(302): unsure at all n locations
agctctctacacacagtgaaaaggtcctacgagtctatccatatgaccatatctgaacaattttgttaaactntacacgaactgtaagtctgtaacagcgtacgtgcattggacagtatcggtaggtgaggtgcanggcatggacggacgggagaacgcgagaggttgcatgccatgccatggatgccacgcgcgcgccagagacggncgtggcgccacggcgacacacaagcgcgccatgccaaacccagcgcgcggcggccatgcgtggcgaaacatgtcagacggtgcgctccaacgcg

SEQ ID NO: 1274 - DNA, 452 bp, Oryza sativa
  unsure (1)..(452): unsure at all n locations
nnaaataaacccaatcgcccactgcagaagtattttctgatctgtgctgatcagcctgttgcttcatgcgagtctgagcacgcaaaagatgatctctgatcaaagcttgcatcttctcacgttcatgcagccactcaacaagatcgtctgatcgacatgcagcagaagctgaaagaccaaagtagcgaggcttatgtccatacagtacttcaaagggagtggtgcccacagcagagtgaaaggacgtgttgtaccaatattctgccaacgcaagccagcgactccactgtgaaggacaggcatggacaaaacaacggaggaatgtctctaggcatttattcacacgttcagtctggccgtcagtctgaggatggtaagaggaactcattcngagttgagtgccggctaacttgaatagagtagtccacaatgtactactgataatgcgatca

SEQ ID NO: 1275 - DNA, 436 bp, Oryza sativa
  unsure (1)..(436): unsure at all n locations
gcttgagctgaattataagatgctctattgttctatattgtacactataataggaagagagttgagtataagaaatctgaagaattccggagttgtcggtaatcctctcctatttcttttattctatttattactctgaattcaatataatattcttcttgaataatttagatttatcttgtgagaattatctcttggctagttcctanatagcatacgggattattgttcactataatcaactaaaatatagcgattgctttgatgagttataaacactaaagtagatattaattgcttagacgtggtatttaagtaattgttatccagtaattgctgcgtatcccacggtacgtttgaggtatgtgtagaggtggtgacagcccttgagatcacttaagtcctccctttccgggtacgtactaaagcgacatct

SEQ ID NO: 1276 - DNA, 389 bp, Oryza sativa
  unsure (1)..(389): unsure at all n locations
tatgacaaggttcaatgggactntctatttgatgtcctacttagaaaagggttttgtgagaaatggattgcgtggataaaggcagcaacaacaaaggggagtgttgccattaatattaatggagaggtggatcaattctttagaactcacanaggtgtgcgtcagggagaccctctttcccccctaatgttctatctggtggctgatgcccttccagagatgctaaataaggccaaagaggctggacacttgcaaggactggtaccacatctagtccctggaggattaacacacctacaatatgcagatgacacgatccttttcatgacaaactcggaggaaaacattgtcacagtgaagttcctgctctattgttatgaagctatgtc

SEQ ID NO: 1277 - DNA, 435 bp, Oryza sativa
catgcaagctcagccaccaaatcaaaattatccttattaatattttcgaaatttcaaaagcctcagccaacaagtcaaaacaaggagtaatgatgggttggttggcttgttacatggttcaaccaacaagtcaaaagtgagagcacttaaatgctttctcgggaagggctgattcacttcacacagttgcaaaagggttggctgttggtggaggcaccaataaatgcatttaagggtggctgatgtggtgatgagggtgctgctggttgtggtgaacaaaaatatggtggtgttgaacgtggatttcctggagaatatgatggtgatggtggcagcggaatgaatatgaatgaagtggtggtggaagagtttgtggtgaccatatcctgagcataacccgatactctaatgacaaaactagtataactagcaact

SEQ ID NO: 1278 - DNA, 317 bp, Oryza sativa
cgacggcgaacttcgggttgacggcgacgatggagctccggtggattttggtggcgacgaaagggcggacggtgtgcagctccttcttgcgaacctgacggaggcaacggcgagcagcagcggcgaccacagcgacggcgctgtgcggctggagacactgcggcgactgcggcgctccggttcacgacgacgggctacctccgattggatttggcgcaaaacaacagcggccggtgtagagctcgacgttgcggagccgatggaggtggcggcgctgatcggcgactgccggtgcgatggcgagatgctgctggagc

SEQ ID NO: 1279 - DNA, 415 bp, Oryza sativa
  unsure (1)..(415): unsure at all n locations
accacctacaaacctagtaacaaataatgtntcatcataacccctattgtacaccaacactaaatgcatcaactcctcaaacttattatgacattcctctacactaccagtttgcttcaagttttccaactcctctaagtggtgctgatatggatctctaccaaacttgctattcactgctacacatagctctgcccagctctccacactatgcaattcttcatagggttgcaaccagagcgctgcatttccagtgaaatgcaacgttgcaaactgcgcccaggtctcatatgccacattgtacatcccacaatatttntcagcatttntcttccacaantttggattctccccactaaacctatggaaatcagtcttgggtaacctctgtccaacagatcgaccactcgcttga

SEQ ID NO: 1280 - DNA, 407 bp, Oryza sativa
  unsure (1)..(407): unsure at all n locations
acgcttgatcaaccaaataatatctttgtctttcagcaggagtaacaaaaagctctttgccctgatctatgctcaatgtttatcctgagattccagcacatcataatatgtatcctagactaagggtatcttgtaaatcccctgtttgagtaccaccagatatccatcacatccatgttatctcctcacgtataattggtttaagggtagaaaatggtgatgcactatcatcagatcgaatgtcatctacacataaaggtagacctgactcgcttaacatgctgcttaacttagcctccatattgatatcctggacgttattgtaacatgtacagatcagaatcttgcccatccttctccatcctctgctcatagcacatttgaactcccacgcaacnttgttgata

SEQ ID NO: 1281 - DNA, 460 bp, Oryza sativa
ctcagcttaatctacagatgctggtagctatgtgcctcacaagaatattgtgggtgcatgtctgaagctcaaagcatgcccatccgtaacttttccttttatcatcaagcagtgagataaccaccttgggcagatggccggccgtaaggtctatatagttgagtttctccaagatggcatgtttgacacattctggaatatcaatggggttgctgagttttgccccattgtccttctttggaaccattcctgtagatatcttgtgaatcagaatccaaattctgggtctgtcgtcatatgactccaggaagacatattgatcgatttgtccatgccacctgttagcaataatgttagaattgaagaaggataatattaggttctccatgcagcggtttcttgtacgctcatcattccatcgcgcatacatgcacacaaggagtaatcttgtccaatctga

SEQ ID NO: 1282 - DNA, 421 bp, Oryza sativa
tccgcccgacgccgagttcttcctctgtttcgcgcaggatctctacatcttccacgtgctgcgctaccctccccccgccgccgccgatggcctcaccttactctgcatggccaacgacaccttcggaagtacaaactctcttatacttactagtattactctactaatctatatgatctatggataggataagatggattcgttcattcatcttcttagtatgttcttcattcattcaagatggtagactgtattgcttcattagctaatttaggcatttttgcatgtacttattcatttatgttcctttcatacaactatattactgttactactctattagtagcgagccagcgaaatccagacatactagtatgatagagcatcacttgttgtactaataattacaggacgaattccc

SEQ ID NO: 1283 - DNA, 414 bp, Oryza sativa
  unsure (1)..(414): unsure at all n locations
tattactaagtaactcagagtaaatgtaacaatatantttctttgactgtgctactctgggtcatactgtttgtcaactccaaggggcataatgatttggccatttgggtggtgtactactatactctccaatcacgaccaagtgtcagaattggaaatgtgcaattaaaccattttggctatatcattatgaatagttgtagcagtcaataagatngttgaaagccaacgcagttcagatttcttttatcctgatgatctaatgataggcacagtaatctcattgntgagcatacagntaactaatatttcttttcanagaaaactgatatgctcaatagattttcgaccatttcatatgttaaaatctactgcaaaatgctttgattcagtgcttcactgatgattactata

SEQ ID NO: 1284 - DNA, 436 bp, Oryza sativa
  unsure (1)..(436): unsure at all n locations
gcttcacatgtaggtctccaactatggattcattttctgtatccttctgnttcaattgatcatgctcctccttaacagcttctaactcttgtttaagtgattctactaaactccgaagagaactttcctcctctgccactttctgtaacatttccttagcatcatccaactctgtgctgacagtagcaatagactccaaatcttgagctcgagcatcttcaatctttttctgcatagatgaaatctccaaattggtctcatctagcttttctttgaggcttttataaacagcaggatcaaaatcctttttcaaagaggataatttcttctcggcttcttccaaagcttgtttgtatgttttcctagtaacatctttctcagcaaggatttgagcctcttcttcatgtgcttgttcagtggctgccttcacatgcgt

SEQ ID NO: 1285 - DNA, 386 bp, Oryza sativa
  unsure (1)..(386): unsure at all n locations
gcttctatntataagctcattaaagtagttctctcctacacgttttgtgtttgaaccccacattaacgatgaatccttcagctatccatctccctataaggacttgtctatcaatttaatacatcctctggatacatatttatttagataatggaatataatcccggcctttactcaaagagctacagccaatccactggatacatgcttagatacaacggatatattttccggggataaagaagatcataataactgagcattaatattttcctcactctagcctctgagtttaatgaagcaccaatagtatcatgcactcgcacccactggccctctgaatcggattaggatgctatcaagctcactatcgagattataactaa

SEQ ID NO: 1286 - DNA, 224 bp, Oryza sativa
atgacgcgcggaatgatgccaattgactaaaccgcccctcaaccgtcattatgaaaacatctaaagcgaccacaccaaaacctagatgcaacgccgttaaccaaggtgtcggcaaaccatggctgggccatatggcctccaaacctggtctatgcctacttctcatcctgccctatccaattcatggaaactttgggcccgccttatggaaatataacacccca

SEQ ID NO: 1287 - DNA, 449 bp, Oryza sativa
  unsure (1)..(449): unsure at all n locations
ctagcttatcactttgcatatgaatatttctcaagtagncaacaatattgtctcttttctgtcctctacatgggccataaatggaagccataagccaagactcagaattatgctttgagacagaattcatgcataaagaataattattagcaagaactaaagaacccacaaaatattttcacatcatagagccactagaggcccccatagaaggtatgatctgaaaacaattaaatctcttatggaccacttttntgaggaaatttatgtcaattgattctctcttagtttcctgcaagcatatgacctgacattcgctatcatcaatgcattgtttcagagcatctcacttgtactctgagatcatccctcttatgttccagcacaaaatattccaactacgaacttgatggatattcattgataacagttagttaaagagaagcaca

SEQ ID NO: 1288 - DNA, 345 bp, Oryza sativa
accggaccggcaccgtgttctgtatgtcacgcaaagacgaccctggcccgaccagccttagccgagctgccactgtcaccaccaccgccgattcccaactggagtagtacaccccctccgataccgcaccgccgtcagcgccgaatctcttgctcgccgaactgcacgcccctgctaacttgacggcacgtgagcacagtaaaacaagcctggaatgtgaagaaaccaacaccgagtttctcgcaccggtgtggcgaccataccgagggaagctgagaggaggatggtgaggaggattacaagcgtgatgtgaccatgcctatgacggatacaaccatagaacat

SEQ ID NO: 1289 - DNA, 422 bp, Oryza sativa
gctttgcatgtactttaacgcatatcctatctatgtagattaattcacccacaaccatacatcttaatgtgtttcaaacttgaaaaattttagagaaatgacaaaatatgtatcatagtgttgggttacatatccaggcaaagctaacaagtatttgtaaactgagagggtaaaatgtcaaaaagaaaaaagaaaaaaaaggaagacgaacatgttctaaagtccccatatggtgtagcacaatgtaatgaatttatcatgttctcaaaaagatgtgagctgagggaaatatgtggtgaatttataaacttgttctgatctgatgtaaggtttagttacacataaaaccaactagatagggtaaaaaactagagtaaatttcagaaaacttgcgttttattgactaaactatcactttgctg

SEQ ID NO: 1290 - DNA, 420 bp, Oryza sativa
  unsure (1)..(420): unsure at all n locations
tatggtcctgcagtgtttgcaacacgggacggacgtggcttttatgttcttatcacgatgatctgtaaataagaatatcgtcnaagaaaaccaacacgaaccggtgcagaaacgggaggagcacgtcgttcatgagcgcctggaacgttgccggtgcattcgtcaatccgaatggcatgaccaagaactcgaacaggccttgatgcgtgcggaacgcagtcttgtggatgtcgtcggggtgcattcgtacttggtggtagccggaacgcatgtcgagcttggtgaataacttgacgccgcgcagctcatcgaacagctcctcggccaccgggatcgggaactttgccttgatggtctngtctgtgagggcgcggtagtcgatgcataatcgccatgcgccgacctttatcttgatcaata

SEQ ID NO: 1291 - DNA, 401 bp, Oryza sativa
  unsure (1)..(401): unsure at all n locations
agcgccgtcctcttccccggccaggccactgtgtcacccgaatntcgccggaacaccgccgtgccgcgccggcctctccatccgcctcgccggaatttccccggtcggcccttactccacccatgcgccgtcggccgcgccaccaccacctccggcatcgcaacggtgagccggcgacgtcgtccttggcttcgcctccccttcagatcaacctgccggcgttcgtcgtcgcctcctcgccggttcccatcgtcgtcctcccgtcattcccggtagtcgtggtgttcgtccctccgtcaagccgtgctgttcgtcgcccgcctttggtcaaagttgctgcagccccgtcgtcgtcttcgtcctctgctccgcgtcgtcaagcgtggcgccggccgcgtctc

SEQ ID NO: 1292 - DNA, 475 bp, Oryza sativa
  unsure (1)..(475): unsure at all n locations
tggctaggagagcttggntgaaaagcctcatatcccgaatacccaattctcccatgaatttaggcagaattagctggtcccaagcgatccaatgcactttccgtttattggtctcatcaccccaccaaaaatccctgatcattttggtataatgtcggctcccaaaactaatgattcagaaaccgacatgtttagactgtatcaagccctgcatcagtagattgatacaagttcaataatctggatcgtctttgcatacgtctaggcatagctntgaaggagatattattatatgaagtaatagggtatttacaagattgtgtctaactattacagcagaagctttagaatggactacctctgctgttntgctatagacttaaactatctatctaatctataattgagaactaagtagaatgaactaactatatgatgaactccacatcgatagaaggacttgaaaaaggggtga

SEQ ID NO: 1293 - DNA, 191 bp, Oryza sativa
gccgccgcacatctatgtgagctatatcaatttgctcatcgtataactatcaggacaccgcgtaaggccatacgctaaaaaaccccgccgcatatgagatgtgatataacacgcacggacctcaacgtgagacgatcccgataactggctggataattgcaggaacggcgaaatgcttgccgtaacaacgg

SEQ ID NO: 1294 - DNA, 444 bp, Oryza sativa
  unsure (1)..(444): unsure at all n locations
agnctctgttgctgatacttgttctgtttcttactaacaataaagaacattcactttttgtaacttgataattcatcttcttttatatatactgaatctagaaacactaaataacattatgttattaaaaattattgtgctctaaatataagcatcaaactattttcacgttagtctaataatttaaaaacgatcgggatcaaagtggtcgctatttataaacggatggagtagtaattaagtttgaaaaaaatgctgtactatcatgtactactacactagtaggattttgcaggttatttgctccttggctagctactggttgtatgtcgcggtgtttgtactatgagcttaagagtgctcaaaataaaanaaaactcttttttttatacctataaatacaaaacttcattaccaagtgatactgcatactgtatgcatgat

SEQ ID NO: 1295 - DNA, 412 bp, Oryza sativa
  unsure (1)..(412): unsure at all n locations
gacactctcgctacccctcgtatggtctagcaacttctgatcaaacctnttttcagatnaagttaacttaaaaaatttatctactactcccactattctaaattgatctacatatatattttttttgaggttattcctaaatgatctacatatttgtgttcattcattaagtctattcgttatttgtggattagagtagatggacattgatacatgcatccatgtacacaagtatttattacccacatacaatatttagatttgctattggttaagaaataatggggatgctgcatgccattgagttggtgctagagtaaatatagtatgagagaagtattnagtnttttgatcttggtggacctatgaaatatgtagatcaattagaatggaatggggggagtactactac

SEQ ID NO: 1296 - DNA, 330 bp, Oryza sativa
gcaatgctttctatatcttggactatgttagtctcatgatattttatgaatgccatcatgcaactggaaaccacccttatacttgtaatgaaagtattatgaaataccatcttatcatgtctttttttttgttttgacactaccatgaatatttgcattcaggtttttcttttttgtgtttgtcataaagtataacttatcacaatctcaggagttttattacaaattagaacataagccaagtgtgtttggtatgacagcatcacctgttataagaaaagggaagtattcagttttctgcaagaactatatagaatgcttcttcttctt

SEQ ID NO: 1297 - DNA, 462 bp, Oryza sativa
  unsure (1)..(462): unsure at all n locations
tctaagtaggatatgtagaataatgtgatctattattatatcattattaggcgagtacaaattaatagctaccattatgagactaggttctggctcttgaaatatcaagtgtcatgtggtcgatgaagaacagagtgtgcctcacgaacttgttttggaccagacatacactgattccaaacaaagcaagcaaaatttctcggctgatcttcaaacagaactcccaacgcctaccatgctaagattccaagccaaagcagagcttctgaatatatgcatctcttcaaccagaactctcaatgccttgcatgtaaatcatctatatgtaacaaattggctacacaagtagatgtatatttcgaaatatctatattccatgttctagaggtctcactagctatataccaattngacaaggtggagatatagtctatatttatcacacagagagtatgtgatcag

SEQ ID NO: 1298 - DNA, 410 bp, Oryza sativa
  unsure (1)..(410): unsure at all n locations
aattcaacttattctactgtaattgtgagttatcacccttatgaccttgatgcacttgctcaactgcacatggtgaaaataagacatcttgcacataatatgaaaatcatcacggcaataataacatgttgacgattcttcctcaaaaaagttaacgattgatccatcttctctttcagatatactctgaaatgattggtaatgttatgactgatgcacgctcaaccgggaagtactaccactgtacgtttctgttttggttgtcagacatatgccatactatgatntatgttctcctaaacatggaaagagagttgataggagcaaactatgtttagtttgaagagatcatggataataattgccacagtagctgacatggctattaaagatacttgcatttagttatc

SEQ ID NO: 1299 - DNA, 441 bp, Oryza sativa
gcttcggtcagcggcgtcgatgctaaaaacctgtggatcaaacagaattagtgcccgcatgatgcaattggcagcggcgcactatatcatcatccagctaaacaaggcgcaggacatcccgtagcgcctcctccgcacgtcgcttaaaggccgttgtctagcacttgcgtcgctggattgaatcaagctgagtcaacgggcttggctatgtttcctcaagcatattagcaccagcactcaattcttctaacccaagatcaatgcacgacaacacaagaaagcaattccaatattatgtcacgtccgcgaatgggtgacaacagaaagcaacaagctgagattggttcacgacttcttccttgacatcatggggcgccttcctctccttcatcaagcattgatctagacggcattgacttgcctcactttgacctatcaaag

SEQ ID NO: 1300 - DNA, 449 bp, Oryza sativa
agcttcaaagcttaaatgcacattctggaagattttccattcctttgaatccatatatgccagcatgagatgaagaaaaattccaagaagcattttcgtgaataatgtaaccaagccaacactatcatttggaagaagccgatatctatgtaccacgttattcctagatgctgtcaacatctctggctgaaagtacaagtgaagaaaaggtgcaattttgtttctctgtgcccccttgaacatagcacacaagtgagatcacatattcattcgcaaaatgataacaatcaagcatattccttatattaagcctatcactgagcaaaagccacgctaacaccttggtcttcatcacacagcatatcttccaaagccaaacaagtgggcttggggatacaaaggcaggacgtctaacttatagaacttttgagcagtttacctctctgagt

SEQ ID NO: 1301 - DNA, 326 bp, Oryza sativa
  unsure (1)..(326): unsure at all n locations
actcatgtgtcacctctgatggcgaataccgaggcgaangcgcgtctcgcctgcctcgcctccaacagaaatgcggccccctgtggtggtggccaacagtggtggtgccttcctccctcccccctctccggcaagatacaggcatctctccaacgtgagaggccaaatcccctattgcggtggtggctggcgatggtcatgatggtagcaagagggacgaccagatttggccccttctagtcatatctggcgcgtcccacatggggtcgggcaaggccaaaactcctgtgccaggtcgttcggcagagcttggaagacaatgatgc

SEQ ID NO: 1302 - DNA, 368 bp, Oryza sativa
ctttacagaattctgttacatgtgttttcgtgtcggctgagggtcctaagtgggttggattaacaattacgacagcacgaatcacgcgggcgatgcctcggcgtggaaccttaccctcgggtaagcctcgatggctgtgctgatgcggccttcttgaagaatgggtgccctcctgcttgagcaattctcttggcggtttcacaccgcgctttccgccgacggggacatccccctcggcggggcggcttttctccggtgaagtgaggggaggatgctgctcgccccgccaattggttataaaatatctctgggtgcgcttggatgcgaggtggtaaatttgtgaactggagatgggtattttttttttg

SEQ ID NO: 1303 - DNA, 371 bp, Oryza sativa
ctgcggctgcagcttataagagaccaggagtacgacttattctttcacccgaagggtagtcttctattaccagataatactctgagtgaaacttatttgcataaagcttgcaatttaaagcgtagtccattgttcaagttgtgagtaagtgtagcttggagttccacgtggatattcaaccttaattagactccatcgaaccggtggtctattaacagtacattggaaaaaggcatatctcagtgggattttgagaattggtgggggtagttggaattaataaatgagccttatcccatttaaagaatatttctttggaaaaatacaagcccacctcacttgatggcatgcataaggtgtttaataccacc

SEQ ID NO: 1304 - DNA, 351 bp, Oryza sativa
acgagactatatagctatgagttgggtgtgcgattctttatctatccgcaaaaatatttttagatgatgaaataaaaaaatgtgtatttatttttaaaaaaagtaataaaaaacaggatcattcatacaaagataggacaaccaattttcataataaattttttatgaatgctcccgatcaaaacaaatcattgtcctattaaaatttcaaataaaaattttaatttattaccttttttatttccaaaatttatgtcacaactttctgcactaattatttagtctcattagtttcataaaatgcacgtactgtgcactcaaacaaatatttcaatcgcttttaagcttata

SEQ ID NO: 1305 - DNA, 304 bp, Oryza sativa
atggagttctacaataaaaccatggcaatcgcacatcactgtagaaaacttatcgtgcttataattgaactatgaaggtagcccgcgcattcttccgggcatgtgtcggacgctaagtttaagatacttattaaagtgaaacattaaccggagaacaccactcatgatctctctatacatcgttttcatggcactaaatgctattataagcttataacctattagctgtatgttcaatcatatctaagtgatagctataagcaatcatctataatcctcttcatcatttggaaagacagtagac

SEQ ID NO: 1306 - DNA, 385 bp, Oryza sativa
cgcttgcaagcgtaatgactatgttgtcaccttcatctgaactgcaccctgctatgttgcgtctatacgcgacccttgaaatctttcctgtcaaccaagtaaacggcattgccagtgagctcaagaggtgtgttagggagatttttcatgggcagcgttcactagctctaaatggcatttacagtgtgccgcggggaggcggcatccacaatattacttcatatatgatgaactatatcaaatatatgtgggaacatgatagcttgcttaacgttattctcgctcaagatgacggggagagcgagaatcccttacacgatgggaaatggacgcgactggattattttgtgcagaccttgatcggatacctagactccttgcttga

SEQ ID NO: 1307 - DNA, 413 bp, Oryza sativa
  unsure (1)..(413): unsure at all n locations
actaggaattgaaacaaaaaatatataagttaaagcctcacatgctaaccgtatacttgttactacacaaaagtagaagtgttactacataataggtgcatgttaccacttccaagtagctatgttactgcatgataaatgcagtgttactatgtcatttttacgagatgaagatcaaataggtgggccatacgtaaagtctgtaggtggctttgagcgatgtctgattgatgtatgagtgttntgaacaattttatacatttggtaaaaccatgttactacatgtatatacccctgttactgtaaattacacattctgttactgcatgtggagggctaaagttcacaatgtcatctttgaaaagcaatatcttacaagatatgtattattctctaagaccgtctccaccatg

SEQ ID NO: 1308 - DNA, 274 bp, Oryza sativa
ctgaattcgatctacttgatatataccaatcgacaattttgatttctgatttgaagtgtgctgaatgctgaatattctaaaattttaagtgccgcgcaataatgggtgtgaatcctctatttctgattgagatgcggtatgaatcttaattctcttcagaatgtgtctgcaactctacattctggatactgatttgagatgcggagtgctgcattggaagggtcctccaacgacttaactggtggttaattttacagacaatctcctcgacgaa

SEQ ID NO: 1309 - DNA, 480 bp, Oryza sativa
  unsure (1)..(480): unsure at all n locations
cactcaagcttgaagtctctaaaataaattcagcatagtccatgaatgagtttaccgnanaattcatatgattntttggataaatgcaacctaacctcttcttttagtgccactcactcagaaaatttacgcatgaaaattccaggtgaagtagataagatcgtaacacattcacatgttttatgtagacaaagctagctaaagttgtcctatgcatttttaccttacaatactcattcaaaccatatacaaatctacagtgaatgtacaaataaatcttgcattcttgttataacatatacacaccaaataacattacactaaatattgtgttgtggaggggttttgttaaataactaggagcatatatctaaatctacatcagagacattactaaattagagccaccactatcccaacattctgaattataccaaactcacatcgaacgtatatactatcagaagcctaatttctagt

SEQ ID NO: 1310 - DNA, 339 bp, Oryza sativa
gcttcctcttctacctcgcccttatgggcgtttctctgcgacaacgcatcctagggccctgcagtcgcaatcagtagtaatgggaagggcacttgcccctacatggacgttgtgtggctcgtcgcctcctttttttcggcgccggcgccgtcggtgcttaaataggtgctgctttcctacgcgtacgtgaacgtgtggatcacactcagcttttgggtgatcgtgtacaacaagtacatacttgatccccagatgtacaaactggccttttcccatttccctcaacatgaaacacatggggttctgcgcctccctccccgtggagctacgtcgcgttct

SEQ ID NO: 1311 - DNA, 437 bp, Oryza sativa
tcacggctctgaaaactggtagcagctgaggctgtgctgctctgacaggggcatgttccatgacgacatgctgtcgtctgcgacgtcatcgccggcgtcgtcggtgtacttcccgtcgccgtcgccgtcgaacgggtcgtgggtgcaggagctgagccatgaccagcagagcgttcggctgatcggcctgctttaccagtgcgccgccgaggtgtccgccggctccttcgaccgcgccaacctctgcctcgagcacatcacgcagctcgcgttcctggacgcgccgcacgcgctccagcgcctcgccgccgtcttcgccgacgcgctcgcgcgcaagctgctcaacctcatcctgggcctctcgcgcgcgctgctgtcgtcggcaacttcgccgacgcccaccttcgtcccgttgcgcggccgcacatgttcgacgt

SEQ ID NO: 1312 - DNA, 423 bp, Oryza sativa
agcttctacaagctatgtaccagacttatggtccttaggttcttgagcttcctggcattcgacctcttaggcagtaaggtgatgaaagccttgttaaccttaccaaggctggacccatccattcgatgaagttgattcaaagccgccataatgtcctccttaatgatgtcccaacagcagtaatagaactgaccagaaaaaccatccggccccggggcgttgtcacgagggctgtcagcgattgccttccacacctcatccacagtgaacggttcctcccagtcagagagctgctgcccccttggctcaaagtagtcaagatccaccgaacactcacgatgactgacagagccgacttcagagaagaaattatgggcaagggcggccttttcatctggtgctgtggcgatctgcgagttgtgc

SEQ ID NO: 1313 - DNA, 307 bp, Oryza sativa
acacaaatactcactgagattgctctcatttgtgcgtattatcacgcctttatatagcaccaacagtgaaggttccattctgatgactgctactattacgtggatctagtaagtgtgacattttctctgatagggaatattttgcattctttggactctcagcacttctaaccaattgataactgaaattactcatccgcgcggagttctttaatggtggaggtggcttcggataactactgcgtatgctgacgttgaacatctgacgacagggcgaaccataacttgaggaatgattacttccatg

SEQ ID NO: 1314 - DNA, 417 bp, Oryza sativa
ctagaaattatgatagtatttatacgaacttgttctttatacgaacggaaattacttatgttaagtactgaactcaccagttcctgatagacgacggcatcacttttggtctcaaatgagacagagccgtccgggttgaccttaccccttgcccgcgcccagttgcgagctctttgttcaaggatgtctgaaaacagggcatggacattcgctgctgcagcggctgcatcttcttgggcccatattgcctccttgccgatgtaccctgcggtgcccatccgatgcgggtgctcattccgctgttgcaatacgcgatgtgcctcgctggattccctaaactctcgggtggtcttgagagagcagaattcctcccacacccgctccgttatttgatggtattcatcaaacggcgtatga

SEQ ID NO: 1315 - DNA, 467 bp, Oryza sativa
  unsure (1)..(467): unsure at all n locations
agcttaactaaactatctatagctaacacagttattcacacacaccggcctactcctgctaattaaaccatgcggtaatttaattagttaactgcccaatagatggtttagtatgtgatcatatgcatggcatgctcatgccaatgatcagtggtgtgcatcaattaatttaattaaacaactcgtccagatacagtgcatcacacgcgcgcgcgcctactagtactaactgtactggagattaatcacactttataaagacattagttttgccagtatctattattgcctgtttcttgaagggaagatggaggcatctctctctttaatntgctgataatttaactacagatgagtccctttcgtattatgcaaatgccatcactcatgcacaataatgcagaatctgggagggtattaataagcttgttgcctaagtaatacattgctcaaagttggcaacattt

SEQ ID NO: 1316 - DNA, 325 bp, Oryza sativa
  unsure (1)..(325): unsure at all n locations
tacanaagaggatatgagagctactagagccatacccgttctctttctttgtacttccggactccgatttctattctatttctactccactagcttaagactactaaactgaacttgagagaatatgagagagctcttgcttgaagtgtgtgaagaaatggagagagtgaagggtttatatatattgagaatgacggttggaaaggtctgtaatacccaccaaccatcatttgggagtgatctcagccgtccctccaatccctatatcaaacggncgagagggggattctgtcaaacccgatgttcggcccaaccaacccacaat

SEQ ID NO: 1317 - DNA, 415 bp, Oryza sativa
  unsure (1)..(415): unsure at all n locations
gcttctggggaagatgacatcataccctatgtacacacgcatgacttctggtgtgttcagaactntcccaagcgaccatagcagtgctccatagactctcatgagctgaggataaatttgtcagaagcaaagtcggtatttgctttcaatcaacatagctactcttttttgtctccacttgaaatgtaaaaaacaaatcaaatggttcttatcacactccatgattttttttcctatgcataaagaggatgaaaatggaatatgttatcacactataaagggatagcaataacactcactggttgtgcatcaacttggtctgcttgttcagaactatacgtatnttatcatcatgccctttgagtgacccaattacacgcttgaactcatcactgatgtcaagcttatgtggatc

SEQ ID NO: 1318 - DNA, 447 bp, Oryza sativa
  unsure (1)..(447): unsure at all n locations
actaagcttatatattattaaaatttaacatgatcttntatgtatttatgtaaaattgacaacaaactaaatacaggtactttttaacaattttataaaaaaaaagatacggttgaaaatagcattaatctgaacacgccctaattaaacttccatggactcatggtcaggtacgtaccggtgaaggctggcgacgttgacgactgtggcgttgggcgtgccggcgtcgacctcgtggaagtagaagtggagatgggtcagctccgcgtncacgacgctgcaaacgatgatcggcangaggcagaggacaaggagaggaaaccgagcagcggccatggagtgagctaattatctcctcgatctgtgcgtggtgtcagtgattgctgagccaatattatggtgaggaaatacgaataagaggctgtgttgtctattacattgactcac

SEQ ID NO: 1319 - DNA, 370 bp, Oryza sativa
agcttgctcacttaccgatcaaggtggttggtattgatttgtgaatgcctaaaatggcctatacttacgcgagggattgatccttctatgtggcatgaggtaaccctgggtcggcttgggaaatgctttgttgcgaaccttcgataccgacgggtgttcggaataagttcgtatcttgtgggtaaagtgtacccctctgcagaggttaactaactgttcgaacagccgtgcccacagtcatgggcagatgtgaggtggttcccgttgtgtagattttttgcctgcgcttttgaaaagttgttgggtgtgggaatcataccagaatagccttgtggagatggatgacctggtggcacaacaatctgtgtga

SEQ ID NO: 1320 - DNA, 432 bp, Oryza sativa
  unsure (1)..(432): unsure at all n locations
gcacggtcaagctcttccatcgaactcaagagattataagaacataatacacactattacatagaatttagccccacattgaagccttacatcagatatgctatatattccttactataaaggaactgtgttgaacacaaatagcacaacttatacagggtatttgcatcttcaggctaacagtcttgtcgaaccatgatttaaccctattttgcaagtacaaaatatgtgcacctcgaatcggtgaatggacggtctaatacctaaagaactaatcgacacgatgataaaaatcgtggaaaaggttccccataccctatgctactcggaagtttttttttgagggaatactcggaagaaattcgcccaataaccacatacgcgagaatttcgtcccaggaggagacgaatngaacggatccaataaacagc

SEQ ID NO: 1321 - DNA, 472 bp, Oryza sativa
atcctcagagtcacctgaggctgaagcttgtataccgcggtatcatgcatccattatacacactcgttaacgttaaacctcacggtccctcaaccgacggaccacgtggccggcatggacgatggcccacgaaagccgtgtcagtgtgtgtcaccgcaccgggttgtgtgtgtgagcgtgtcaccgcatccgatagatcagctagtagctagtagcgaccactcgatcgtaaatggcgcatccggatatgtcacgctcgcgagttccaggggccccggcccccatctggctgctgctgggcatccccatcaccatacggtgtgcgagtgacaccgccggccgtacgtgtcgccgctagctagcaggcgctcgagatcgcgtatgcgtctgcatcgcgtcctgtaccgtccacacgcatacgatggcatcaccgcgcgcacacggtcgtctcctcagctagtaagccgatgca

SEQ ID NO: 1322 - DNA, 355 bp, Oryza sativa
  unsure (1)..(355): unsure at all n locations
tcggggcgtcgtggctgcgtgcagtgaagcgtggcggtggagactggagtgtgctgcgctgctcgtggtttaatcggtgccgtgcagtgctcggactccggcgctttacccgttatgtcatactgtcgggcatacgtacgttcgccgcggcgaccgctctcagcttgagctctcgcgtgcgcgcggcggagcgtancggatggcgagcgcgcgacggcgacgcggatcggtgctcgtcaccagcttatgaagaagcatcaacagcatcacgtacgacacggtacacacacctcgtcacttcgtcagctcgatcgctcgccgccgctacggacgacgaccgggagggcagggtgcg

SEQ ID NO: 1323 - DNA, 249 bp, Oryza sativa
ctcaagcttaggcctgacaggactatagtagagaacgatgttttctgtttgttaacggcttgtctcagagagaacgcgaacattcctttgacactgactcacctgtagctagattgagcacaatacgtgtgctacttttcttagcaacctaacatggccttctcgttaatgagatggacgtaaatacaacatttgttaatggagagccggatgaggagaattatatggatcaaccacatgggtatgtgc

SEQ ID NO: 1324 - DNA, 317 bp, Oryza sativa
gcatgcaaacttcccaggatcttggtctctttccgatgctttgaggctaacaccgagaagaatccagctatagagcggatgctcccacccatcaaacttaaggatgtgcaatgcgtcacccggttgctatggtccgcgcctcaagactggtatcataatcgagtgcttgggagaagaaggcgctacctcttatttaaactcctcaaacgctccgggccgtgtacttggactgaggaagctgagcgtgccctcactcagttgatagcgtatctcagctctccccatcttattcccccggagccaaatgagcccttgct

SEQ ID NO: 1325 - DNA, 373 bp, Oryza sativa
gcgatgtaaaaccgaatccaacggccaggattgaaccacgatggcacgatgttgtgaagaaaggaagaacaaaattggaaggagagaaggaagatgatggtgatttaaagccagagggcaccggccttcttgaggatgggcacgagctcgccggagatgtggacggccatgaggcggtcgagcccgccgaggagcttccccccgacgaacacggcggtgagcgccgcggcctccccaccggccggcacaacccccttgagcgcggcctcgccggcgacctcgtgcacggccgggttgaccccgagcccctgcagcagccgcttcaccacgtggatgaagcagcacccgcgccttcccaccaccagcaccgggc

SEQ ID NO: 1326 - DNA, 337 bp, Oryza sativa
tcctaccttatagagttagtgtatttctctaaatcctttttagtccttttttctaaactctaccattacacgccttcacagtaagaaactgccgttgaactgcttggaaaagcttctaattctgtaagaaactgtagctaatcagaaacttctctacacaggcttttaaatctgatgcccgcaatgctgaaatgatgaattataaaaataagtctaaaattcttatacggatgggcaaaaactaaggcacactttttttcaggaacattactggcacatcggagtctccagttgcaacattccgcaacagaccttacctgttgtttggcaattgtga

SEQ ID NO: 1327 - DNA, 435 bp, Oryza sativa
  unsure (1)..(435): unsure at all n locations
tccccttcgtgaattcacatggcttgatgggtacagctaattgcttgcgcattttccttacaacaaatgtttcggtttcttcacatattgtgaccacaggtccttttcgccctagacggccagttcggccagctctgtgggcatagtgtgttgagtctgttggaagatccagattaatcacaaggtcacattctggcacattcagtcctctggcagagcaactcattgtaactagaactctgaattcaccatccttgaactttttcaagacagatgaccttgcaagctttccaagatctccatgtagttcagtagctttcatcccacgggcctncaacttaaatacaacatccttcaatggcttggtggttgtcataaatgcaattactgtctgagcctccagagcatggatacatctncttaaagtggccactt

SEQ ID NO: 1328 - DNA, 442 bp, Oryza sativa
  unsure (1)..(442): unsure at all n locations
agcttctattcttatataaaatgnccgtgctttaaaccaccgctgacaccaccactcgcgacaccggcacaactgatacttatgcgtggcttgtatgctcgagaataccaatgcccacctatgccgcacctgccaacggcaccactgcacggctcccaatgcccatgtgccaccttggccactgataagcattatgtggatgccatccatcattgccattcggccaaatctagcccatgggattcactatccctattatgagccgaccgttgcactacatccaacacatgggttcctttagcactcctgcgtgtggccacgacagcatcatcagctcatcacccttcatgccgctcaaaccatgctcattgtccctcaactctggtggtgctcactttcagtcaaaaaaaaaaaactctggtgntgctcactgtccctcatc

SEQ ID NO: 1329 - DNA, 433 bp, Oryza sativa
  unsure (1)..(433): unsure at all n locations
aatttaaagaatagaggatgggaataccatatatgacgcgggacagatgatgaagaagtcattaaggtcatttgtccacttctctcttactagctaaaggcccatgcgctgaaacagatatataagagataaaagcaaaaacaaaaattattaatttatagcataattggtggcttaacagatgttggaggtagcggcggtggtcactattccttntgagttccaatgccctcacccttccattggtagcaattctagggccatccacgtgtggggaccttatggccccacatgccagtttgtgatactagaggcagactcgagcaccagcacttgcattatntaaaatagtataggtagtcagcanaatataatattttaatgccatgggtgtccaccgctacttgcaaataaacacaaattgngagtgtct

SEQ ID NO: 1330 - DNA, 417 bp, Oryza sativa
agcttatccctaagttaccgagcttaaagaggatgcggcgtggcagtctatctattaattacgaatagtttgttagtttcctttatctttaggaaagtgtgtttagtgtcccatcaggactttatattttccttttatctttaagatagtttctttcttgtccgacaaggacttgtatcaacccatgggtataaatatgtacacccggggtctatcaatctatcgatcaataatactcttggcgcattcccaccctcttccctaaggtttttacttatcttccggcggaacttgggcacctgacgcaaggctgcatcggctttccatctctagcgaaggggtaagtcctacgttctgtcgggccctggtgaatctgtcggctacgtttgtgttgttcaagcctgcatcaattcgatc

SEQ ID NO: 1331 - DNA, 409 bp, Oryza sativa
  unsure (1)..(409): unsure at all n locations
gacgcggatctgtatgtcaacaattgtccgttgtgtaccctggctggtcctggacaggggtttaatgcacattcagtttagaaattctggttcgtgaatttctgggcgtgacatgcatggccatgacaaaggtgattgagaagtcaatcacaagttataaaatctatcaacaggtccgagtgaatgattgagctattagaggatggcacatatctagccttgagcttaatcgatatcgtgaggcaaaggggttcatacaagtatacactagaggttcaaccgatatgatctntatgtgtgtccggtgggtcaatacgttctgctangggccgcctgtgatgcgtggaccgataaggagttntcgggttacagccgagtatgcatgaacctacagggtcgaacgcttaat

SEQ ID NO: 1332 - DNA, 403 bp, Oryza sativa
  unsure (1)..(403): unsure at all n locations
tgactgaacctttagcgtanagataaaccgatgaaatgacatctgatctgatctaccttcaaatccgattaaacatatgcatgacaagagttatctatgtccggtgcatatggattcngacaatatttaccatggtatggatgcagatgcaatatttagatggagaagtcacatattggttaggcaatatggccgtatatttttgttggattataagcgaggtgaattatatatgcgtactttatcgccatcgctgaagggaaactttaacaagggcagctcttgaggaaagcagtggtgatgtctgttcagatctagcttctagtgatccatacgtatgtgctccgatgccctgacagagttgtcatcggacctgcgggacgcttctatnctatccatcatt

SEQ ID NO: 1333 - DNA, 454 bp, Oryza sativa
  unsure (1)..(454): unsure at all n locations
agctcgaaagaataaaanaaacataagaccttttgagtgtttctgataacgcccaccatgatcagcagtagaaaagggccatgcccctttatatatgtggcggtaccactgactaagatctccagggcagttatcgattacctttcatgataaaagccacaggtaagtaatgagatggcttgaaagtcgattattatacacgtataacggaacatgcatgaggcatgcacctgccttttctttatgtagccatgtgctagtttaagagtaggaccaaattcttcaatgaggccagtaaccactatatctngaactgtgaaagctgtgtcccacaactggctttcattataaccctacagcggtcacaaatagaatctatagttaaagtaaacacaacacacttgatgcaatgcttctctaaattatgctttgtaaacactcaatggcagaaata

SEQ ID NO: 1334 - DNA, 472 bp, Oryza sativa
  unsure (1)..(472): unsure at all n locations
aactcagctanatactgctacatttttcgatataaactacattcttgctctatttgcccttgcctggatcctgaaagaaacatgcatatttgtgcagctaaggcatcgttatctgcaaatacacatcttgatgcatattttaagttcaattaagaacgaaatggcaagtgctcacctcatgtacatctctaggatgatgatatcagagtttaactatcttcacataaatcataatggtggtggcaaaatagtagctatcatgctaacataagttcagaatacgcactggaaaccttctcaacatgtgacatgtacatcaagagtggttaattgttcacataaactgtgatccaagaaattgtatataccttcaccgtgctgtgctctggatacctggtatattaaccaagatctacgaaacaacgggggccatggcatgactctctccgatttaatgatgacgtattgcttt

SEQ ID NO: 1335 - DNA, 463 bp, Oryza sativa
caagcttttatattctggatcagctatttgtccaagtacctccctacagtatcgtcaccgcaatagagtataaccaccaaattctggatggattggtgtggttcctctacgcctaggacaccagaatatctaaccatgaacgaggaaaggcatgagagaaatattggctattaattgtgaagccccaattcttgactggaagggacaccaaaagcctctgccctccctctttatctatccaagagatggaagggcagagcttttttttggttttttcatcttttcatcaaagagttgaacaatgaagatagatggcaagtgcctgatcgatttgatcaagtcgtgtaagaacaaagttcaaatcagtcgttcgttaggatgcctcagctgcatacatcacttgactttcacttgacacctatttaaacggctcgtctcgccgctaccatatcctatttccatg

SEQ ID NO: 1336 - DNA, 464 bp, Oryza sativa
  unsure (1)..(464): unsure at all n locations
actaagcttngataaaacggatatacccaatacgtcgaaactcattgttcaatggtatagaaagaaccgttccacatcaaaaacaacaaaaactagcgcaaacatgttatagcgtattcggaattgtaaccaagccccccccatgggttctatacccgattcataactagaaagcttctctggtccttcacgaaccggagctaaaagtgctgaaatccaaaatgctaaaataagaataaggcttgctattattagaaatgcccaaaaaatatcatattcgtgaagcagaaacataaatgtactcccattaatgtggaataggcggaactgaattagtcaattcaagtcagcattgtcaatttatacagaatttctctcttttcctcggtgaaacaaggatcggtttttctcaaaccaaagggcttagtttagcctttgtttcctctntgccacgtcttctttaa

SEQ ID NO: 1337 - DNA, 345 bp, Oryza sativa
ctgaaactcccatcggctgattccgagatgctgcagccgataatgattctaagccgatgacgtctttgccgattaccaaattacactgttaacactctcactcttctagtgggacccatatgcaagtgaccacgtcatcttcttttctctatgcccttttaactctctccctcctctcttctctcttgcctacattagcgccgcagtagcaacaccgacctctaacaccgtcagcaactccatcctcaccactactgcataacaccttataggtgccagttgcaaactggcctacatgttcggttcacatccgacaccaatgacattagatcattggttaatgtc

SEQ ID NO: 1338 - DNA, 454 bp, Oryza sativa
agcttgccctcgagaacacccttaaagactacttatgagtcatcccttctaaatacgggcacatcaacatcggtaaaaagacaattgtagctcatggaacataattgagaaacggacaacagattgtagtttagagattttaccaagaggacgttggagatggaaagatcattggagattgcaatcttactcaatcccattacttttcccttttcatcgtcccccgaagattatgttctcttgcgaagagccatttggatcaagggaagaaaacattgatttttctccggtcatgtgatttgtgcatccactatcaatcacccaacttcttccatcggagagatattactacaagagatcaatttctagttttaggtacccatacttgcttgggtcctctcatgttaataacaagtgccttatgcacccaaagcactctcttgatagaaatatt

SEQ ID NO: 1339 - DNA, 444 bp, Oryza sativa
  unsure (1)..(444): unsure at all n locations
ctcagcttgtgacgagccgagccaagctaggtttctagctcgttatgataacaagccgagccgagttagctcgttatcctaacgagccagccgagttagctcgttatcctaacgagccagaccgagccgagccgagctagctcgacatccacccctaacgacaacataatatttgctatcatcataacaataattagtcaaaaatacgatcactcgtatcgagtagtaaacatgatccacaataatatagataagctacatgttagcataataaatagtacgtactactgcaatctgcatataagaatggagatgaatttatatacatcattgtcactatcaaagtatcccacagtcaaaggttaacttcgatatgatcacaagacaaaatcatgtcttagtgccggttaacgaactaagattatntcagtagctctaaatcat

SEQ ID NO: 1340 - DNA, 363 bp, Oryza sativa
  unsure (1)..(363): unsure at all n locations
tggagtcctggcttatactccagataagcgcctgtgatgatggagccgtacgcccgctactccgctgctgattattcttgattgtcaggccttaagtgcctttgttataatgtaaatattatcgatataataaagatgtgtcttttatatcatgtttgtatggtgtaccccggcttttcctgggacggggattaatacactagcgttcgggaaaatgcaattttcacggtcgcgacagttcgattcaagatcctccatataaactctgttatggacattatgtntgtttaccatgggaagttcgaattggctcaagaaggataaacttacaaaatgaggttacaggcgatgaatattacaata

SEQ ID NO: 1341 - DNA, 482 bp, Oryza sativa
  unsure (1)..(482): unsure at all n locations
tgcctttgggtgccaatagatttgatcctgctttcaacaatattaagacaaggaaaccgcggttaaatccataaatgatagccgatcggctagttgccgatgacatatcatttatctgtgagccgatgtcatatttgaatcgatcggcaaatataaataaggaaggactaaatctactcgatcggctgtagacattaacaatatataatttctatgtcgatatatacttaaaccaagtgattgggatagatcggtcgccatgccgagacagtataaatcacttatgtcgaagtatatattaacaatgagattatagatgttcatagcatagccgatcagatagatctagcatgcatcggctaatactctgatatcactctatattaagatattaaagcaacgtaaatacatcanacattagcctaacatactttattgaatgagatcttacataaagggtgatctagcatgtaatcatcata

SEQ ID NO: 1342 - DNA, 330 bp, Oryza sativa
gcagctgcagctcacggcggataagggatgctgcttcttaagttttatgcctatcatggatacttagaagttgtaaccatttttctgttgctacatggactggatcattggaccaactggtgcaccggtgctgtgggaacacccgtctgttttcatatgggtgctctaaatggcaaagcaactgtcctctgctgaacttgttttagaaactactacggaaagatacttgttcatcccgaagtgctgatctgccaatctacaccttcataccactgcatggtgggtcatgcagctaaatgaacgtaattgtgcatttaacaactttttgct

SEQ ID NO: 1343 - DNA, 314 bp, Oryza sativa
  unsure (1)..(314): unsure at all n locations
ttgaattntgtagtatttagccgaaggtctaaagtcatcgtgatatggggcgattacccctgttgagaaagccaaaatacgaagggatgatataaatcttaccttactctctgggcttctcggttaatcgactcaatccattccccgaagtagggaatgttcttttgatcattgtagtcggcgacccacttgcaaaacaagaatgtttactcgtcatagaaacaagatggattaccacacacagaaactgcatcaccaccacaccagatattgagcaatcatgcatgtgtgggtaattgatgactctgcttctc

SEQ ID NO: 1344 - DNA, 357 bp, Oryza sativa
gtaagtcagcgagagacacaacttctatcatcaacgacaattctatgctgacgctgcccgtgcatagaatggctggtgctatagatattaatgctatgatttattgcacagttacgtggagcatgaggagcattggcgttgtggatgatatcgtccatgttgctgttggagctgactacctgatgagacaatcatatggtcgctcgttggatttctgctgtcttggtcacaacacactgagttggcaatacttgagcacatggtttgtaccttcacacagaacacatgtgaccttgcgggtgggacactcactggggatggtcttcttacaatgagcgcagagtgtgagcacatgct

SEQ ID NO: 1345 - DNA, 375 bp, Oryza sativa
  unsure (1)..(375): unsure at all n locations
ataatctgtagcagaataattggctagttgtttctttcctatgttcctagagcctaaattattgggtttgccagtctaaagagagagtgggtgacatggtcggtaattttttacctaataaactgaaaaagctcacctaaatgagcttatcatattataataagctaggctctatattataatagactacttcaatgaggtgtgtatttcttttagcttactcccaataatctggattataataatcccaagctaaaagaaacaaggccagaatactaatatactatattttactatatttcgntctatctatgataatttaagtgttcagcacgcaaacgagattcttaaaagcaagggcgatgagaatgagat

SEQ ID NO: 1346 - DNA, 400 bp, Oryza sativa
cgacctatatttcatctataatgggatcaaagtgatttatccaaatttctcgcatctgaagttgcaacgaaaaaatgctaattatcgaacggggcacacgtttccagcccatcaagtccaattcttcttctatctcctcagacttctctttccactctcttcatttatgaatattatttatcattttggccgcgtatattagagaaatatgtggtgcaaacaaaatatgtactgaccattggataaaaaacggacgctccaatttatccacatcacctagagtacatagttcactcccaaaatcaactataaataaaaattttaccagaaaaaatacttactctcgatgaggtaataaatctcaagcgtcattttaattcactatatttgtacggttaac

SEQ ID NO: 1347 - DNA, 365 bp, Oryza sativa
ggcacttgatcacgcgcactttggcgctagcaaaatgtgcctaagtcccttaaagaacgtgacaggccacacctgaaaatatgggctgcagacatattaagcctatgccacacaatatgccttcgacaccctatataggatgacgcatgtaacatgctcccgagtaataaatcttctgggtaatatagaccaagtgtagctcatatgaatagcttctgatctgaatgattatcccttatgggatacttcacaataaatataataattgaatcccgactggcgcaagtattctgatgatagcccttactgcgaataataattggtccagtctttgagcatagatcatagactcatgactatgaatc

SEQ ID NO: 1348 - DNA, 434 bp, Oryza sativa
gcttggcaaagtgattagcggctgaagtaacagttctttttcccccttcatttcatattttatcatagaaaaaactcatagtgatcaacattgtaaaaagtaacatgggtatttggaccaaatggtgaaggaacacatccaaatagcttacttccagcaataaggcggttgaatatcttcaaaacaacagcttgaaatatggcagaaaaaatgaaaaattccaacctattgaatgctgacgttgtggtttattttacataatctaagctaacatccttttatgtaaaattttgaagcacgaagctggccacttcttgatagcgtatttgcttggggtcctttccaaaggatacactatcacaagtttagatacattcataaaaagggctcactgaatgtgcagctgggacagctcttgttgactttgagtcctt

SEQ ID NO: 1349 - DNA, 459 bp, Oryza sativa
  unsure (1)..(459): unsure at all n locations
cttcaaactcagcttactccttggccctacaatgagccagacatggagaagacttggcctatctttngagagtactgacactgcacatgctcaccgggatgtggcatacaagcattatgtcaatgagatggactgcttgcagcctcaacatgtaagtacttccaatattacttctagatagacatttacttctttaattgagatactaaccaacgacatctcttcaacttttgcagattaagtggttaccataccacacaaatgaggcttcaagcctgaccctgaactcgatgtgcaatcgagactctgactatttcatgtaccagtgcccattgatttgnttctgggcaagtgagtaccaccttccacaccgtgtcatgcgacagttcgggaagaaacaagattggccggttgaggacatctcaactgggagtgaattacacaagtaaatatttctta

SEQ ID NO: 1350 - DNA, 200 bp, Oryza sativa
taaaacttgtcgattggataaaatcaaggcttcattactaaaaatgtttttttacatgataggctaattatcatgctatataaatttttatgccgatattccaataatcaagggcttaaattcacaccaaaagttatttctctttataacctaatatattctgaaagatgttgtgaaattaaaaaaaagctgcaattatt

SEQ ID NO: 1351 - DNA, 467 bp, Oryza sativa
  unsure (1)..(467): unsure at all n locations
actcaagctaagcatggcaatgtgtggcctnaaccancacaccctattctttatttgtaagtttcaaaacttgacttaaaaatcttctaatctaaattggaagtttcaaatatggagttgaaagttattaaatcttgagttgacagtttaaaatctgaagttaaaggttttatatatcatgtaaactttttcaaaattgagatgacaaagtttgaaacattgacttgaaaatttaaatttccagttgagagttacaaaatctgacctcgaagttaaatatcgagttgaaagttttcacagttaacatgaaagttcataatttgacttgaaaattttcaaatatgtgttatagttgaaattttagttgatgtttacattcttgatgactatagttttaataaaagttagatttatttaatgttctttacgatagattcttcatctgtactctagtaaaaaccttaaga

SEQ ID NO: 1352 - DNA, 478 bp, Oryza sativa
  unsure (1)..(478): unsure at all n locations
ntagctctactgtcttctgaagcatanagattccatgggcttacctttgcactatgagctcttatcctcctcctatcatttctaggcatcttgatctcaaccctattccttacactgtactcagtaattgcttgtctcaacttctcaacagatgggaaaacaagaccaaccttgaaattaggattgttcaagtcctcttctgcaaatgactngaacttgagcctgacaccctcatcatcagaatctgctgcattaagctcttcctcatcagtatcttcactttcatctcctctaggcacaattgcaagatatcccttncaacctgcttctctggctntctttcccttcaatattttctatcctttggccaccccctcatctatcacattntcatcaacataatcaacaaacaagtcatcatcaccatcatctaattcatagtcactatcatagaattcctcatcacttgcatcactct

SEQ ID NO: 1353 - DNA, 242 bp, Oryza sativa
tgtaaaagcatatttgtccctatgaattacgtatgggaatatgatgtttttcaaatccctctaattacgtatggaaataacactgttagtcttgtttgtacttttgcacgcagaatactttttttgaacaacatacttatggaactcagaacatgctgcattcatccaatatgtgttactttctgttttggtgatcagatgcacaacttggtctcctttctcttatatatacgaattgggtg

SEQ ID NO: 1354 - DNA, 282 bp, Oryza sativa
attgcctgcttcgtgatggtcgctctcgaccacggcgttctttctctctggtctcatttgcaatcttgtctacccaacaaatagcttaaatgtgatgtttacttttgctttaactattggaaatgctgagtgcatgtatagtagctattgcagtacttatgataatggtgtctggtttgacatgtcgccactgttatttgcttttagaagcagtgtctgtctcatcacgtgtcatgttcaagagcggagccctcacccacttgaatcaaattgtgagctgat

SEQ ID NO: 1355 - DNA, 244 bp, Oryza sativa
  unsure (1)..(244): unsure at all n locations
atatactcctattatagcgatactccactaccgntcattcgtcatggatgcgatggtggctagctgccatatggctatgaacacgggccaacaacaccacaaggtcggcccacgaaacgaaacctgccatctgggccccactttcttttttcctttttccttctctctcacctctctattcagtgtgagaatttcgaacattattaaatgagagatgagatgagatcgggccgttcctaccata

SEQ ID NO: 1356 - DNA, 365 bp, Oryza sativa
  unsure (1)..(365): unsure at all n locations
gtcagtatgaatggttatagctcatgtcagattacttctcaagacttttctcttcaagggtagttagaacagaacattcagttgtttgtgcattaagatcatattttaaatgtcatttgtgtatttcttggagactgaattgatggagcttctttccgtcgttcaacttaccgtgttgaccgattggaccaccctgctgatttgacaaacagttggatctcaaggtatgtgaacattctcaattatttttaccggtcatataacaagttatattaacgagagtatgtgcatcttcagttcttctggttgactagcctagcattggtagaaaaattattggaatatactngttttgactgaattgc

SEQ ID NO: 1357 - DNA, 431 bp, Oryza sativa
  unsure (1)..(431): unsure at all n locations
gacttaanactctcagctgccacttatccaatctatatcttcttccctgatatcccccattattttcatctattttcgggcctactatctctcaaaaatattccactcacgaagctctccgtcaaaaacaacatatatgcggttttgctgtattacttcatttatctccgaagttggcattatatcattcattagatggaaaatttctcaagactgtttactatatggtagcctaatagccctttccttccctctttattattaggatgtgctactcagaagttatctaataatgcatttctggactttacctaatattatgtggcgattggctctaacttataagtatttcggtggaataccttgacttatttgcttctccaactagagaactcaactccttatatttctgactccttattctgcacata

SEQ ID NO: 1358 - DNA, 425 bp, Oryza sativa
  unsure (1)..(425): unsure at all n locations
ttgtcgagatgagcttctgaagtgggcagtgaggtgtggaatctacaagcatgatgatggacatggcagcatgcttgttagatattgcagtcaccttgcaggagcctagaactgggtgatacaggatggtgtcctgtccagaacatgataactccatgagaggtgtgccgcacgacggagattgtgatgcaaggcggagtgggaaccggacttttggtccatgtttgctgcactgatttggtggacaactcttgaagttgaagaagctctcggcatcccatgctgtggccgcatagatgagatgagatagtagcagcacaacaactagaagtttagccatgtctctgtagtgctgttgaagattgaaggcacaatgagaatgccatgaatgntaactatatgaaatttactgggagtatatgctg

SEQ ID NO: 1359 - DNA, 307 bp, Oryza sativa
gctcgttgtcattatgtttataaaaagtgtgtcagtggtatgttaaccaattggtcgattactaacactagactttcttcatttagagactttcgagccgaataaaagatggaaaaatttcaccatctcccaaaaagagatgtggcaatcttgaagagaaaattatctaccttgcacagatatctctgcgggatcaaatatatgacgaggttgcctgacattgtgatcgtctcgatcagccaaaagagtatatagctctttcggaatgtgcccttttggggattcatactatctctttagccgatac

SEQ ID NO: 1360 - DNA, 259 bp, Oryza sativa
caaagccacggcatggctgcctaataagaatgtctgcaactttactatttataaaataagaaaggcctaaattacagaagataattgcgacacactgaaagccctctctaatataccataccgccagagggaaacaagaacgacccggactcacgatgccgtggaacaaagcaaccagagactatacatggtgcttacacaaacatctcacgacgaaaccaaggcactaatatgacatgagagcacagatcaacacatc

SEQ ID NO: 1361 - DNA, 305 bp, Oryza sativa
cgcacatcccccactttccgatggcttacgcaccaatgactgggtcggctactcactccggatagagtacttcttcgatgagacccactttgagaatgataacgagcccttctcgcatggactgtttctgatccggtgcaaatctccgcagctattgatttactggcatggcaaccggttgcaccatgagattgtactcaatcacctacccagggacccctggcatgtctgacaggcgccaagcgaatacgtcgcattatctcggatgaaggcgatgaaacccaagacctatttctcgtcagtga

SEQ ID NO: 1362 - DNA, 359 bp, Oryza sativa
tatcgtcacactccttcataatatgggcgtggatgtgtccacctctgacctccttgcggacaatacccatttgtcgttttgcccatgtacattacctccttacgggtgttcgggtagtcattcctagaatgacccgtgttgccgcacgcctcacatgtaatgtgagagtccaaggccttgacggtgccttgtggctgtttctcgtggtcgtccaaacgttcatgatgaggtccagctttggcagcaagtaacttcgtcttcttgacagagtgcatgccttgctgacagtgctggaagtcgtcctcgctctaacccatgtcggagaccatcttctctattgatcaacggcagcttcttga

SEQ ID NO: 1363 - DNA, 315 bp, Oryza sativa
tggtgtccaaaagaggaatagaggcgaatcctgacaaaatcgcaacaatccatcacatggagccgccaaaaaacacaatataagtgcagaggttgacaggccgaatggcatctttgagtagacttctatctaaatcaccagaatagggattacccttcttcaagactttgaggggagcaaacacgttctagtggaccgctgaatgccaacaagctttcgatgacttgaagaaatacttgcatgaaatgccaacattagcaagtacgccaaaaggacaacctctgttaatgtatgtggcagcaactccagcgacag

SEQ ID NO: 1364 - DNA, 348 bp, Oryza sativa
  unsure (1)..(348): unsure at all n locations
ctataagagttgagatccatgctctagcagcaaacgncaggaaagaatgtgttacaatcaatttactgccgtccggagaatgaacgaacaagtgccatagtttgcctttggctcgggtggaaagagaggaatgaattctgataacgaggaataccaatgagcccacctgagctctcacacctgaatatgtcacacgcatgagagtttgttacgatgaatgttaacgaaaatagccccacaacaggagagagtgcatttggagaccgccacccctgaactttttgaaaatccactccgaccgagcatacagtattaacattgcgcatggatgatgggggtttgtgatca

SEQ ID NO: 1365 - DNA, 339 bp, Oryza sativa
  unsure (1)..(339): unsure at all n locations
caaactggctatactcgacgaccgacacgttgccgatcaatctacgggcctcgnttcagcctggtcgagggtcacacgctgcaaagtgtgtagatatgttaacagtcagacaaggcaagataacacagcacaacagtgtatagcaagagaacagtcttactggtcatcccctcaggaagaaccaggtntggcaaaccgtcaacctcttcgccttgatcaactctgacttgccatgactgggagaggggaaagatacgaagcatacagaattcctncaccaagtcaaggcagctaatgcgggagcagaccttccacagaagaacgaaccgcgcctccata

SEQ ID NO: 1366 - DNA, 394 bp, Oryza sativa
agcatgcaagcttcaacgtgatgccgattatttctttctctccttgatcacattctgtaggcgcccacgttccactatctccctctttttctcttcttctatatgacgcaagaccatgcgcataggcgacgcccggtacacgcggacgccctgcctgcgcatgctatcatagaacctctctggattccagacggcgatctaaacgccgatggcgtacgtgaagttgccactccggccgcaaaagcctacgatggaccccgagtgcttcatggagacctcgaaccgcgtccatccagctctgtcttctccaagattgccgtatggtgcgaacgtcctgttccggttgctcctgaactggaaccaccggatgaagtgtgtggataggatcgcacat

SEQ ID NO: 1367 - DNA, 436 bp, Oryza sativa
  unsure (1)..(436): unsure at all n locations
ggaccaagcaccgagctgcacttcaaatctagcaattgatttttctgctcgacatctgttaatatttactaactactctcatgtgttgcttgtggtaaaaactgatgctgattacttttatctctgcatattcacaatgggttgggtttgattgattatcttcgtcaagctgcaccctcacaacaatataggcttccactgaagccctagaagaccaagatatattagctcttccatccttcatgcctgcctttctgaagatttcagcagaaagagaagagctgatcactttcgtgagatttagttacatggatacttcaaatcaaaactcccttgcagtncatctgctcatggctactgatctgatgatctcttgtcctgttcttctcttaaaaatgagcgggcctgctcatttattactagcctactacaccat

SEQ ID NO: 1368 - DNA, 310 bp, Oryza sativa
  unsure (1)..(310): unsure at all n locations
gcgggcggagcggagactctcgaaagttctcgcagatctgaaagtacagnttctcggtcgcgcgtcttcacaaccaagtcatcgacataagcctcaacattacgtcctatttggctacccaaagaaattcgagtagtacggtgaaaagtaagacctgtattctttaacccgaacggcattgtcgtataacaataagttcctatgggggtaatgaacacagctttatctcatcctccctagccatgcgaatctgatgggtaccagagtatgcatctataaaacacataatgccgcaccccgctgtggagtc

SEQ ID NO: 1369 - DNA, 266 bp, Oryza sativa
acacttaatactaattagagacgaaattaatgctaatcatgagatagcggggggttatggcgcctgcctcaaaaatgggcgattgttttaggataactgcgtgcaaaaaggccatctaaagttcactcctccgtttacaatgcaatgccaagcattctaatatttcacatattatattgagggtaatataaatgtgcgaaatgcttaaatgatctacgccgcaaaacggaggaagctaaatcttacataatatattaagactttcc

SEQ ID NO: 1370 - DNA, 410 bp, Oryza sativa
tggaaagtgatccttgtggcacgccttgttgaggtcggtgaagttgacacacattcttcattttccgttgcccttccgcaccatgactggattagctagccactttggatgaagtacttctctgatgaagccagctttgagaaagttgtcgagctcttctcgtatggcttgttttcggtctggtgcaaatctccgcagtctttgttttactggcttagcatcgggtcgcaccatgagtttgtgctcaatcacctccctgtggacccccggcatgtcggacggctgccaagcgaacacgtctgcattgtcgcggaggaaggtaatgagcgcgagtttctatttctcgtttagtgtcgccccgatcttgacggtcttgtccgaggtggcactggagagtggaacaatttgat

SEQ ID NO: 1371 - DNA, 393 bp, Oryza sativa
  unsure (1)..(393): unsure at all n locations
acaggagcgcaagaaagcatttgaggcattcttgaacgcgctcgaactggatcctgcttatgccgagattgagaaagtgacgtggtaatgcttctatctatgatgtctcgtactattcctatgtatgggtttatctgtggagcttggacgacaaatcactttatttctttatgtaagccatgtcgatatacacggatacagatattntggttgcttgcacataccatgttattaataagctttgctgcccataatagtttagccacaatgcattgtttggtgcatatattaaatggtacaaactaatcattcagcctacgaattctctgtttacacttacattcctatcaaaatcctatggtctttctatatctatcgtttctcaatcctgcg

SEQ ID NO: 1372 - DNA, 435 bp, Oryza sativa
gttattacataaatgccttaaatactcgagtttattagcggttgcattatctcttctgagctcaagtgaaggcatggtctttataatgctgatctagctcgtagacattacctatttataacggtctatattcacctggtcatatggtcaaaatacatgttgatctatgttgctgtctgtgacaactgataatcctcttattgagttacgatatacttcagttctggataaaattgaaatatgaattgaaatgtcatgtcatccttttggtactgaattcagcaaattatatgctgaaattaatttttcttcgccccttggtcccttgctgaagttggatgtcttggggttttatcgtatggatatgagctatgctaatattacgctgctgacttgagcttagtcctcacttggttattttttctcatcattatg

SEQ ID NO: 1373 - DNA, 376 bp, Oryza sativa
aatatataaatatgggaatattcccacccttttcgcttctttccaaaaaactatttatatcaatataccgtttccgaccattttcattcttatgcgggggcaggggttaaagccgccacaatactctttcctttctttttttatgggaccttcaatgggttctatggggtaacttcatattactttccccatgtagaactttaatgtaagtgtgaagttaactgttcacgttagacaaaaccgctgactatcctactacatagagcaaacccctcatagacgcgaaagaattgatttattataattgcggattttaatatccggctctgtggtatgggaaccaaacagactcgttcacattatagagagggaaatc

SEQ ID NO: 1374 - DNA, 301 bp, Oryza sativa
ttttttatttacctttttattatgcgccagcaattgagagttgtactggccgggctcatgtcctaactgataagggcatttcaatgctgctgagttgactgatatcagtatgccataccccctcatatcctattggaggaaaccttgatacatgtgtggagagagttgctgcattggactctaaagaacggagatactaagggaaacttccaccctctaatttgaacaccactccacacaacattatgccaaacatccatctctggtcaaaggtaatagggaacaatccaacccacttgaa

SEQ ID NO: 1375 - DNA, 446 bp, Oryza sativa
  unsure (1)..(446): unsure at all n locations
actaagctntgtggttatgcagcgganaaactaggtatagcgaggagtattccattattccgcgacccaaggttgaggtcaggacagctcatgaggggtgtgagttttgcatcagcagggtccgggtatgacgaggccactgccagaagttcggtaagcataacctgcaaagcacaaatatttcacccgccgaaagtaatgaaaagctattaaatcaatctgccagggacagaattagaagctactaccaaatatnttntagtagtcaaaattggataaccaagcagataatgcatgatcaacctagtttgatatgtgaatcatgactacttagtagtccaagttaatttattattgagggcagcattgggtagtgactgacaggtttctttcttttcatggagaatgactgcatgacggttttcttcttttcatgataaatgcct

SEQ ID NO: 1376 - DNA, 351 bp, Oryza sativa
agcttgaagtgctacaggtatttttgaaactttttcttgagcacaccatcactgaaacgcgacggttacaccaatgcccatgaataatcagaaacctttccaggaaacggaactgagcacatgccaaatcacttgccatgacagcctaaaacgctgagaacaggatctgggtgttaatcatatacgcattgtagcgggcataaggaataagctcgttcacaagactcacaaagcatcaaattgtgaacctgcattcccttaacaccactaaggccaacccctatatcagctttctgaagcatgccaacactacttgccccatcaccaattgctaatggcactctatttgta

SEQ ID NO: 1377 - DNA, 339 bp, Oryza sativa
  unsure (1)..(339): unsure at all n locations
agcttncctggatctgggaagattctctctcacggtattgtgtatcgttgatcgatttccttgatcgctacttatgggcgtgcgctcaaaggatacaaacagggattcgcaaagaaaaaggggaattcgtagtcactttttcctgtcgcgtaaaaaaaaggctgtacgcgagagcaatagaggttgggatacatctatctcttctgagcaacctcttttggattcttaagaccacccttgcagtangataccgtctgctttgggttctttattatattatctccttcgagggaattttacgatcgttcacgctatatttaatctattttggcttttact

SEQ ID NO: 1378 - DNA, 486 bp, Oryza sativa
  unsure (1)..(486): unsure at all n locations
tnctagaagaattcacccaaatctccatagactgcgaccaacagtcaagctcacaaacgtgaattctttcaagaatgctttgcaggacagcaccttcgctaattaaagccagcagaactcattaaggcattgccaacctgccttgcagcaacgagagtacatgcatcttcacttagagagggtataaattggtactctcctctactttactaatggttagttcttcccaggttctaatccacgggatctccgatcacatagactgggttaccaccatagtataactcacatgggtctcaaacccatctccttcgatgcattgtctatcacgtttcgtgatagtcccttcgtgaagggatcttccaggtttctagctggttggatgtaatccaacgttataactccggagtttctcaatttcttgacagacttcaatcgtcttttcacatgtctagacgatttcatattatccttagaactattcac

SEQ ID NO: 1379 - DNA, 449 bp, Oryza sativa
  unsure (1)..(449): unsure at all n locations
agcttattcaagggccatccaaaccatgaataatccatccttgaaacacaacttatgtcaaggataaagggctcacactccaaaggatatccaccggacatacccacaagatgtcactcactcctattggacatgcccacttatctcttggtttaggacttgagaaaactcatcacacttggttagacaagcccacaaaatacacctacatgcatataaactaatatggcacaagttcatccacaagctcgcttcatagacccctcttgatagtacggcgcctatctagcaaatccggtctacaccaaacaccaagaccgggaaaagactaagaaaatattcttagctacattatacctttgccttgcgccatccatcttggggtcaagcttgagccgagatcaacacttgtgaccatccggntgaaccatgtttatgccgaggtctta

SEQ ID NO: 1380 - DNA, 471 bp, Oryza sativa
  unsure (1)..(471): unsure at all n locations
cactcagcttgagaggcaactngagttaatagaaactcaccagaaagatgtgggtatggatgcatatatttcatgtcttctgcatactctagttatgacttttgtttgtggtgcatgcttgtttgctctttcatttgctgatccccatggatgacatcataatattgactagtgaattgctttcctgtaagctcattatttatatgctatgctgccaaggatgcatcatatttcggctgtcatctccttttttacacaattgcgcacaatatggttaatgaagataggttgactgaatttttttttaaggatgacaagctttcaactgccaagctgcattttagaatgcattaatatggaatgccttttctaagttttatgtcatctagaatacattacaattcttatattttataatcgtctctcataagctgggttattggtatgganngaatttttttcatggcatcg

SEQ ID NO: 1381 - DNA, 390 bp, Oryza sativa
  unsure (1)..(390): unsure at all n locations
agcttagcagactagtatggaaaatttctgttttagttgcatgtttatgcctaacaacattataaagacatgggtattgttctattaaataagcattccctaactatttatcttctcaaaaccgtacttgagagccatctttgatgttgaaagagtcaaatatgtgaaaatcaggcttagccttcattagactagcccaaaagtgtgactctcttgttttccaatgagaaggctgtgactccaaatattntntccttagcatttattgccacacaccatctatagtgagtagcttatacaactacttactaaagagaatcttgttcttaatttcaagatcttgaattcccaacccccttgatctttacgatgatgtctcaccttgctagt

SEQ ID NO: 1382 - DNA, 357 bp, Oryza sativa
  unsure (1)..(357): unsure at all n locations
tgcactncttgcgccagcggcactggtatgtgtttcttttctcttaaaagtttatggcctgctcacacagggcttnttaaattgatcagcaatagtgtgtatttatatgctttcagcatactatgtgctgctcgcataatggtgctcctgtattctacttaagtactaaatccttgtcctataccaagtaaaaccattcatgcattagcaaattgtgaaccaagtaatagcattcagtgtgcattatccaactgtgttgacaatacccaatattagtggtttaaagttaaactttctatgcaatctgaattattcgtcttatgttctcataggtacattcagagcacatgtgctacc

SEQ ID NO: 1383 - DNA, 418 bp, Oryza sativa
  unsure (1)..(418): unsure at all n locations
agctngtcataaacaaaatgttgaatattcttttgtgatacatcattaaaaacttatgtcaatacacatcatgtgtgttctttctatgctacatgctgaacctccattgagtattgatgacaaatttgattataataccacaattgtttcattaggcacttaattttttggagttcagaattaacatatttgtttaaatatatcatgcctttttatactttatgtgttatgtaccacatgattttacctcttatgttatggacacaagattcctaggtttgtcccagaaactattgtatcgtacttggtaatcctactatttcttgcaatattacatgcatngtgttcacatataacacatattgagttacttggtaatgtgattctgaactttttcaattggatatttgagactact

SEQ ID NO: 1384 - DNA, 385 bp, Oryza sativa
  unsure (1)..(385): unsure at all n locations
cagcttatgctattgtccgaaaaaaatccaatactagctcttatattatatactccttgaagaaatgtatttaagttacatgattctacagcgaaatgtgaagggaatctagcaaaacaaatgtgtgtgggctgccttgctagttgggtctaaacagtgcacaaaagtaatacccctcttttgtgtgtttgcgtctaattcctcaatccgggtgcacctatnttgcaacttcctgctgatcccaaactttttgcatctgcaaattgtgacagatctgaaaaagaaattgattatgccaagacaaaacaaaccaacatacggaccgtttttttctgtgaaatactgagagtcaaaaaagctggntgtacagcgtggagggttcttt

SEQ ID NO: 1385 - DNA, 456 bp, Oryza sativa
  unsure (1)..(456): unsure at all n locations
ttaagtcacctgaggctgcagcttattaggtgagctatctccagattattgtgtgaaaaattatccaccatgccaccccactttctctttagacttacaaacccaataatctaggctctaataatctaggaaagaaacaactaaccgcttattctactacagattataacaatctagtttatagtaatctgacttaataatctagattataataatcttaagctgaaagaaacagggcctcaatgtcgctggggtcggcatcacgttaaaatatagatttagttgtgttctatatttacttattttaatttatacatgctcagaaatctttaggatctagataatattgaattatcgattcttttaagaaagacttggtcttttttccctttgaccactatctgtntttgggattttaatatattttctagtttggctaattttaattttcatttc

SEQ ID NO: 1386 - DNA, 370 bp, Oryza sativa
  unsure (1)..(370): unsure at all n locations
agctntgcggtgatcctagagtcgccaaaccgtttttatctatcaaaagctcaatcaagatgggttgtgataaactaaaccggctagcgtagccgatctaaatagaacgatggataactactcgtctcgtgggcaaaacggaaggtttttatgacaaacctacaaagaggtatcacactctcgcagcggcggcggacgatttacagtgcaaatcgacaaagatggacaaactaaactaaaactagaagcaaaattaaaagaacgattcgattgattgatagttggttgagagattacaattgaaccggccatatcccttatatagggggtggtcttgcctctacaggccctctccacgtccaactcggat

SEQ ID NO: 1387 - DNA, 443 bp, Oryza sativa
  unsure (1)..(443): unsure at all n locations
tgcccgcaggtacaccaaacacacacttatcggtgttcagttttatgcgggcggagcggaggttctcaaaggtttccgctagatctgaaagtaaagtttcttggttgcgcgtttttacaaccaagacatcgacatacgcctcaacattacgtcctatttggctacccaaagaaattcgagtagtacgctgaaaagtaggacctgcattctttaacccgaagggcatngatgtataacaataggttcctacggnggtaatgaacgcagttttttcctcatcctccctagccatgcgaatctgatgataaccagagtatgcatctagaaaacacanaaggtcgcaccccgcagtggagtcgacgatctgatctatgcgaggcagggggtaaggatccttatgacatgcctngttaaggtcggtgtagtcgatgcacatccgaagc

SEQ ID NO: 1388 - DNA, 337 bp, Oryza sativa
agcttaagcctgagctgtacacttatggtgtcattcataaattcgctatcaaaatctggcaaacttagtgctgtagtaaaactatttacagccatgtgggacagagggatcaatcctgatgtggcaatttgtaattgtatcatcgatcaattgcgcttcaagagaaggattccagaaacacttgagatttttggtgagatgaatgatcttggttgttaggccgatgttgctacctacaacactctgataaaacacttttgcaagattaatcggatggagaaagactatgagcttttggatgacatggaggttaacggcgtctcttcaaacaatatga

SEQ ID NO: 1389 - DNA, 493 bp, Oryza sativa
  unsure (1)..(493): unsure at all n locations
actcagcttcaggaagcttctagatggagatgtgatgagcttgctggttcagaagctgngtggtgaagcggacttgaaggaggttgagagagtgtgcaagatcggttgctggtgcattcaagaggatgaggttgatcggccgacgatgggtcaagtggtccagattcttgagggtgtcttggactgcgacatgcctccgttgccgaggttgcttcagagaatctttgagaggccgtcttcagttagcaccagcacaccagttttcctttttgtcggtagccctgaacgccaatgagaatacagtatcagtttggaatgtacagtatatctgaatgtctctctctnntttctttttcttttgntntaagggtgttatgtctgaaactntagttcattttttgagtatgtattgtactatcacaccacataccacaagcagcttataccactgtaattngatcatcanagtgtgtatattcctgtattcattttg

SEQ ID NO: 1390 - DNA, 271 bp, Oryza sativa
agcttctcctgtgaatgatagcattatgcagttctatcacatcatcacagaaccaatcaaggatgcagtcactaaaacaatgccagctatatctctccagaatcaaaatgagcagccatgtttgtgggtttcagttcgctacttatcatggtgtaatcgaaagtttgcagcaatcatgtaattcataaatataatcatgtctgtaaacagtgagcttgctatgtttagagatgattcatgttgaggatacaatgtaccgatgttaagcacc

SEQ ID NO: 1391 - DNA, 226 bp, Oryza sativa
  unsure (1)..(226): unsure at all n locations
cttcagcagcgggcgactcactctattgtataccttgactgcagcaacgaaaccaacctctctgagacggctccaactgagaagaacttcaactctggtgtgggggaaatgagagagagagctctagtgagggttnttatgggcgagggaggggcggaaacagctggggatggcccttatatggccggcgacgtgaataggtggacgagagagagagggtgttggg

SEQ ID NO: 1392 - DNA, 94 bp, Oryza sativa
atgtcgccgtccactttctccaatttacttgcttgacctctatcctcctttatcgccttatatacacaataatcccttttctgggatcgtatct

SEQ ID NO: 1393 - DNA, 294 bp, Oryza sativa
  unsure (1)..(294): unsure at all n locations
ctcattggtctccgaactcgccaaggccctgggttcgaatccacttcacgatttgaaagcctgtctcaattcatgctcgtctaagaagctggtcgccctacagttctttttggttggccgctaagtgaaatgtaagctctcttgctttctcctctggagattcatataagtcctctcaattcaattctttaccgttcgtaccttccttcaactcttttcagcccagnggagtgaaaaagctaggaaaagaaaaagagactaatgcgaggaagtagacctagttcccgtttctac

SEQ ID NO: 1394 - DNA, 406 bp, Oryza sativa
  unsure (1)..(406): unsure at all n locations
ctcaagcttctccatgtctatatctgtccgatggaccaagatcaaaggattactttttctctactgcatcaaaaaaccaatccaagcctgaaaaggagagttgcggttaacgattcctattaattgagaaagaagcatgttcttcatgcccaaaagcggataaagtagatggaacctgttctctaaccttctttntgtagcagatactgcataaagtttacctgccttgtaaggcttttgtaggattaatcaaatttgctttttctcgttctatctcagagtatccattcattcgatcttgctatccgctctcaattgaatcccttctctgttgtcgacaggtgtgtccgcatcaggaccagaatcacggtctagtacctccgtactcgaataccttctactttat

SEQ ID NO: 1395 - DNA, 405 bp, Oryza sativa
  unsure (1)..(405): unsure at all n locations
agcttccccccatccgcaactacctcggncggtcgtggtgcgagttctcccgcaccgtcatcatggagtccgacatcccggcgatcatcgacaaagccgggtacatgccgtggaacggcgagttcgcgctcaaaacgctctactacgccgagtacgccaacaaggggcccggcgccgacacggcggggcgcgtcgcgtggccggtgtacaagaaggtgatcaacaaggcggacgcgaccaagttcaccgtcgacaacttcctgcacgcaaagccatggatcgatcccaccggcacgccggtcaagtacgacatcttcacttgaatccgaacgaccctagctacccgtagcggatcggaggaagtcgagaggacaggtagggggggttccctcgatatatccttga

SEQ ID NO: 1396 - DNA, 474 bp, Oryza sativa
  unsure (1)..(474): unsure at all n locations
actcagcttacaagaaaccgctgggtntactatcggcgaggctgtgtttatttcatgtgggtccacgaccctacctcatgtagttatatgtgcatgatgtgtactacagaggagctgagcatcggcgtaaaattttagtgccatacgagaaatttacccacacagtatatgcacgcatgtgcctcatttaaactttgggttatatatgtaggtgctccttttgtacctaccagcgctgtggtgtctcttcatttaatatatcttggtggatattggaattcatctaaataaagttctgcgtagtatttttatcggttaaaatttattcataaatataaatattttaaaatattatttaccgctntaccgatccaaccatcccgngattcgctgcatttattggtttcatcattaagtgtgtctttaatggagtagtagtgttaaactatggagccggtaacgcacacatatcta

SEQ ID NO: 1397 - DNA, 441 bp, Oryza sativa
  unsure (1)..(441): unsure at all n locations
agcttcttccaaagcatacggctttctagatgtatattactatctctatacagatggatcttatatgaatcgtatgatgaagtaccacatgagtggatatataggaaaggaatccaaatctgccgaatcgctcatgttatgatcttctacatcctangtctccgcgttccgtcatctggcttatgttcttcatgtagcattcagatcgaatgactctatgaaattacgtcgatacttctacatattatgggtaacgtaagagacatccctattntcccccggnggtcttaattaccactgcttagctttcaattcgcctttgaccatcaaattaaatgtgaataaccccgcctcctctctttgaaacaaggggcgcttccggttctgtgcgtgcttcaaacaattttgtcttctccatattaccatatctctagagtcaat

SEQ ID NO: 1398 - DNA, 339 bp, Oryza sativa
  unsure (1)..(339): unsure at all n locations
tctcctgtgaatgatagcattatgcagtcctatcacatcattatatatcctatctangatgcagncactggaacaatgccagctatatctctccagaatcaaaatgagcagccatgtttggggttttcagtccgctacttatcgtggtgtaatcgaaagttcgcagcaatcatgttatacataaatatattcatgtctataaacagtgagcttgctatgcttatggatgattcatattgagaatacaatgtaccgatgttaagcaccgtccctttntgtttaaagcagtgcctcgtattcatgtaatgagggagaaatgtgtaatacagacaagttcca

SEQ ID NO: 1399 - DNA, 407 bp, Oryza sativa
  unsure (1)..(407): unsure at all n locations
agcttncatcacgcttcaagcccaaagactctttcatctgccgatccgagccaatgccagcaacaaccgttctattatacttgctctaatgttgcctatatatcaccattgtcgaccatcgaagattcccccgccattgttgcttgaccctggacgccgtcgtctcgtcgagatatatcaccatggcagtgaaatatttatctgctggaattaatggaatatataccaggagaatttgcgactgtgaattgccgtacacctacacttcgtcaactatagcacctcattacttcgccatcgcgattggaacagagaaagaagacagattttttgtgaatctggatgtttcatgagttaaattatgggagtatatacacttctgaattcaacacttctactaccaacac

SEQ ID NO: 1400 - DNA, 491 bp, Oryza sativa
aactaagctgctagggcgacgtcatcacctgacacggtttcatttctgttctgactagcatgagggtctccggcactctccaagcaagcttctcccactcgtctagtgccgccgatcgagctttccctctccctctcgctctttctcgcttcggtttgggcggtttggatggagaccataatggtgacgcaccttatagacaggcgctgctggaggatgagaaatgtggcttgctgttgctcgtgaagacacggaaaattaccgcttctgtgtcactgacaactcctgcacacgcagctataattatttttaactgcgaagtattacatattccacttggtccccgaggcgaatcattccgttacaaccagtggccccaagtattctccatgctggctgctgctactatattatctcacgccgcgagaggcgaatgccttcagaagcatattgccgaacactcaccgagcgagcgagagcgagagcgacat

SEQ ID NO: 1401 - DNA, 358 bp, Oryza sativa
agctgccgacgtccacaatccaatcatctcctcacaagcttgccggcgtcctctcttatcttctgatctactgacatgtgagagcatccagtccaaagtgaaagcttttggtaaaagaaactggcccaaagtgaaaactttgtctttaggattgtccatgttgaaacttacgtaaaaatacctagaccaatgtgcaatttactctttaaaatttaaaagttattttaaaaattgatcttgattttttttatcatactctatttcagaatttatattaaaagttaattttatagttgattttgattttttttaatcgtaccattgaattttaagtcgttcaaaatacatataaaaaagt

SEQ ID NO: 1402 - DNA, 450 bp, Oryza sativa
cagacacaagggttatcttcaacttaattacgtgatcttttatgcactatggtctcataatataagggagtttgagtctttgctaatagtgttcgaccactcgtcttattcaaaaatatttgaaattattatttacttttttttacttactttattatctaaagtactttacgcacaactttttaatttttatatttgcataaattttttaaataagacaagtggtctacaagtaaaaactcaaaaaacagagagagtattagaaaggcaagatgaaaacgattacatctagaaatcaacctgtcgtagtaccacaattatgcgaatcaacatcaaatctggtctggcgttcaggcgtggctaagctagctgctaactgcttgactgggactgatactgtccactccatgaggaagaaagcacaagccaagaaacgcacgcaagcaagca

SEQ ID NO: 1403 - DNA, 389 bp, Oryza sativa
  unsure (1)..(389): unsure at all n locations
agcttactatatacactctggttaggcttttttttctcatttcatatattatttggggcatatatagatgacttttaaagacgccacatccatctttttctttctataaagataatgctcactaaacatctaaatcttaacgtgcaagcataatatttattagcactcaacctacatgcaaacatgccacatcaacctattaagcacacaaaactcaacatgcaagcatatagtaattataattatatctataatttatttcattctaaaactaaacatacatatgctaaatcttcattctcaaatcatttcaattatattntaacttatatcaattcatcatttctctattaagcagcatatattccgcagcaaagctttgagcatca

SEQ ID NO: 1404 - DNA, 463 bp, Oryza sativa
  unsure (1)..(463): unsure at all n locations
tgcagggagacatgagatggaacgggctgccccgcttgntttcaccaccccgcccgcacccgcattgaagggaatcgcccgtcaccctccccatccccgcacttgggtgcaggttctcccccgtccccgtccccactgcgggtacggggcacccgcgggtcctcacacccgacaacatcaccggaatacaaattgcagcagcaacaatccccaattaaccccaactcaagaaacaagcgagcaacacaatagcagtgagaccatcatcaaatcggctgatgaaacacaaaattgacccaaagaataggaacaacaaacagaattcaacttcagtgcctgaaaacaacgtcaagcttccgtgctgttaaagaacagcaagttgtttcagttcatttcaaacagaaaggcatgaacgtcatgtangtaactaactcactcattcacaggtacaaatcatctagct

SEQ ID NO: 1405 - DNA, 414 bp, Oryza sativa
  unsure (1)..(414): unsure at all n locations
agctngtactggtgatgggagtaaagagctgttattatcactaatcactcgaccccctgtgctgaaagctgattcagatgagactgaggtgatgggaatagtaagaatatccttggccaactttgccacaattggatactttaattcattcatcctccaccactgaagtagattgaaactttttgcaggaatatcctcaacaggatcatctaagtacctctttaaatctgacttaggaagactagcagcattctttgatttcatatactcatngaaatggctagcagcagagaaatgactactagtagtgcccacagatgtactattaaattgaatggtggcatcattttcccttgatgtgctctggagttcactttcatatgatgcatgcaaagattcaatgtggatccacat

SEQ ID NO: 1406 - DNA, 408 bp, Oryza sativa
  unsure (1)..(408): unsure at all n locations
ttatgtcctcttgtcaggctcctaattcattttataaagctcttgacggtagcattgtcggctcgagaatcaaagtactgtggcctgctgatgaaatgtaagtgtgataatcatcaaatatgtttcttatttgaagagatgttctaaaacatgcatctatattataattagtgctcaatggtctgttggttattcattggacttgtttatataaaacttttggcgacttaaacctggtgtatggagctatgtaccaatgttttaccattngctatattgttcaattgctaatgctggctcttattgaacttccattgctttagtcctctggttttataacgaactctcatgagttatactggagttatgtgtgtatggtttacgcttctcttattaatattgaattca

SEQ ID NO: 1407 - DNA, 349 bp, Oryza sativa
  unsure (1)..(349): unsure at all n locations
agcttctagaaagagcggagatctcttctgctctttcttcctactcctcctcctcctatcctctcgcccaaagaantttttctcttctctccttttctgcggcgaatgtttttagctcgctctctctatcacttcttgttcgctgtgttgactcgtagccttatattattcgtggacgcgataggatcccacgggcgcctcccggccgttcgatcgggccctgtgcgcgcatcctgccgtctgtcgccccggctaaagcgtactacctctggagccaaaccaaaacccgcggtggctgacattgtgggcccgacgtgaatggcgactcttgggggtgtatgtttgtccg

SEQ ID NO: 1408 - DNA, 431 bp, Oryza sativa
  unsure (1)..(431): unsure at all n locations
actaagcttataatcccgtgcgttcacttgatctatctatttattgtgtgttcctaacctcatacttattcctaactactcccttcgtgtcacgttataaaatatttngactttgttcaaagacaaaatgctttatgtttaaaagttcgtagaaaaaaagtagttacattttcaacacaagacaaatttattatgaaaatttattcaattattgatatgatgatactaatatagtattataaatattactatatntatctataaacttagttaaccttgaaatagtttgactttaaccaaagttaaaatgtcttataacctgaaacgaagtaagtaataactgtccgcttaaactcactgaatggggccttggatctccacaatccagatcatttngtccgacaccttgtgtctcaaacaactatatagac

SEQ ID NO: 1409 - DNA, 350 bp, Oryza sativa
gcagcttctgctttgcttcacagagagagaactgaattttggtagtactattggggtacggcaatagcatccaaagttttttttaatgaaattagcatgaaaagtcaatcccttcaggagaaaacaaaataatatgtcaacaacgagggtatgtatgaagtgaagctaaattgtcccattgtcaactacttgtgcaaagtcagaacaatatgttaacatttcaagttgatgtcaactgaacttttgctcccaaaagggaggctggcagacaaacaaagacaagaaagcactaaacatagcatttgacctcatgatctaattaatgttcagctatgtacaatgtatatatc

SEQ ID NO: 1410 - DNA, 393 bp, Oryza sativa
  unsure (1)..(393): unsure at all n locations
tctcgggttcttggtttctgcccgaggcatcgaggccaacctctatttgatacgagctatagagcggatgcgcccccccagcaaacttagggatgtgcaatgcgtcaccggttgcatggccgccctaagtcggttcatatcgaggctgggagagaaggcgctacccttatttaagctcctcaaacgctccgggccgtttacctggacggaggaagctgaacgtgccctcactcagttgaaggcgtatctcagctctcccccagttctggtcgccccggagccaggtgaacccttgctactctactttgcggcgaccccgcangtagttagtgcggcgttggttgtggagcgcgatgaggacaaccctcattccgcgcattcccaccctgtgct

SEQ ID NO: 1411 - DNA, 377 bp, Oryza sativa
  unsure (1)..(377): unsure at all n locations
tgcaagcttcatgtagtagctagtagcttcgtttatgtgtatattgtgcttgacgagtaaaattgacttaaggctgtgttcagttccacactaaaattagaagtttaaaaaaattagaacgatttaacggaaaagttgaaagtttgtttgtgtaaaaaagttcgatgtgacagaaaaattgaaagtctaaagaataaaaagttgaaacctaaacagggccttacaaattgtctttgatacgatacatcgatggtcgatttggttcctgcgtgactacaacttaaacacgtgttagggctgtaggatgtaaattcaaatgcccaaatttcaacaggacaccgntatggctgtagcaagactactgtagcatttaatct

SEQ ID NO: 1412 - DNA, 463 bp, Oryza sativa
  unsure (1)..(463): unsure at all n locations
ctcagcttgtgttatcacttgatgtgggaacatttctagtgctgcctttctctctaccatatttgaggaccagtgatgtgttgatgactgatgaagtgatgatatactcggactatagaaattcagtccacctattctgtgtgttcctatagataatttcctgctggntaatactctttatatttggtggatctttaggttgtgttgtatggatttatttggtatattctgcttcggttgtattttcccagtgctattcatatacagtacatgacagtcttgcttttttttttctgaaggaagtttttggtttgttgatctttgtctacaaaacatagctaaatatgggacaaaggaactgtatttttccgacttttaagaattaaaatgacagatcaatgaaatcttgtgtgttttagctcttgcaattagctaaacttgggtcatatctgaggcttactcg

SEQ ID NO: 1413 - DNA, 258 bp, Oryza sativa
  unsure (1)..(258): unsure at all n locations
aaggaaagcggcttttttttttatttcactatatngacttacttgactcactaaagaaaaacgacatctaaaagaattgttcgccggcgaaaaaacaaaagatttccttgctgtcatttatggaggaagaagacagtcctgctttacactggtggagaaaccattttggcggcggacagaatacaatagcctggtgtttaaaaccgggactaaaaaactttaatcccgggaaaactaaaagactctttgactttattc

SEQ ID NO: 1414 - DNA, 375 bp, Oryza sativa
  unsure (1)..(375): unsure at all n locations
ggccgcagccgcaccactactgcagcaccatcttatcttgctaggtttaagcatncactctgggtggaaatgcggcctcgcccggtgcgattttcttgggattttatggccaaaaattgcatctttattttttttttgttgggtgaggaggtggtgttctttgatgttcggaagattcttctgacgaaccgcctactggggttngttcggaatcgaatcttggggtggtgattaggagcaaagagagagatctcgatgctaattcaattgccattggatgttattgtttgatgcaaacgaccttaaacctggaccatatttgcgcatccagttgaacctgtagtacacttgggcctgtcttgattaatccccatc

SEQ ID NO: 1415 - DNA, 437 bp, Oryza sativa
  unsure (1)..(437): unsure at all n locations
gcttgagattcttggagaaagcctcgtatatcttgttgtagtcttccttgttctcagcgatctcaaagaagagctccacgcacttcttcacaaggttcttgcggatcaccttcaggatcttgttctgctggagcatctcacgtgagatgttgaggggaaggtcttcagaatcaacaatgcccttgacaaagctgagccactctgggatcaactcctcacagttgtccatgataaacacccggcgtacgtacagcttgatgttgntttgcttcttcctggtgtcaaagaggtcaaatggcgctctctttggtacaaacaggatggccttgaattcagctgaccctccacagagaagtgcttgacagccagatgttcctcccactcgttggtcaagctcttgtagaaagcagcgtactctctcttggtgatctcctctg

SEQ ID NO: 1416 - DNA, 353 bp, Oryza sativa
ctaagcttacaattttgaaaacctgcgatggcggttatcttttatcgcaactatacgcaaacaatcgaatacctagacaaaagaccatgaacaagaccctatttaggctaaataatagtgccattaaatagatctcaattttacggaattattagaagtggaacggagtcaatcggaagagcggttgagaagatatggattctctaaggattaaggaatttctgtctaaaggaaaaaggatttaataatttattaaaccctctttggaaagaaattggagggatatgatttagacttcctcgggcggcttgggtgcggcccgagaggagaggcacggctcggccgaactaatg

SEQ ID NO: 1417 - DNA, 72 bp, Oryza sativa
tgctcttgagagggtgctggcgtcaaacattgacaagatagccctataatagcatttgactcatgatctaat

SEQ ID NO: 1418 - DNA, 388 bp, Oryza sativa
  unsure (1)..(388): unsure at all n locations
gatttcacagaatgctgtctggacgattntcttcttcatgagatttttctttgtggacaatcgattcctgacgagaagccaggcgaagatgttgatttttagcggagctctgcattcccaaataaatttccaatttggtgaagatgtgcccgtcgaaaaccttgactcatagattttcttagttgttaagatgtcgtggctaacatttagtcgagtatctgattcattagtcaaggtaaagctctgaagaatagtgtgcacgttctggagctctggcatcgctgcaactgtagccttgaggtgacaaaatggagattccatagagaggatttgtgaacggtggctaaacgtctgtgagtgcgagaaagggattcaaacttgatgcgag

SEQ ID NO: 1419 - DNA, 477 bp, Oryza sativa
  unsure (1)..(477): unsure at all n locations
tcggaagacctgagcaggcaagccacctntttacatattgagcctatatttgaacttaattatattgcttgcaaaatattatgcattgataggattacacttaatctgtttgccccgtctgcaaggcagaccggtgggcctacctaacttgttgcatctaatccttccattgttaattgttatatcatgttcccttgtaaccacctagttgcgcctcggtattcgtgcactttgcacgagtatcgacggtcgccttcaaacataaaatctgagaaacatcttgggtaaaacttggtttacaaaagctttggaaaacccgacgcctgngtcggtgccttgtgaaagaaaatgaagtttaaaaatataactcgcgacacaaggccattcttgggcggaatacttgtgcggtcgcatctaaggaccgattcctttggaatacatccgagcatacaatagtgcgaccacatgggtggaatg

SEQ ID NO: 1420 - DNA, 386 bp, Oryza sativa
  unsure (1)..(386): unsure at all n locations
agcttngagtagttattggtgatatatattactaattgcactctgggcaggcccaaagtaatacatctcaattgctaactccactgtttttggcaatttggcagaaacactgataccctttttgaaaaaaaggataggaattcctatatgagtcatttagattgtaggattgcttcaaaggaaaatcaaaagataggaaaaattcctcccctttttgtaggttaaacctcattgtttcaaaaacctttgagatttccaaggcttcttctctcaaaattcctatggttttcctgtgatatatccaaacatatgtattaaataattctttctgctttctttcctatgggagtttacatgtgatggtaatcaaatcctacgtttttcta

SEQ ID NO: 1421 - DNA, 393 bp, Oryza sativa
  unsure (1)..(393): unsure at all n locations
ctccatgataaccgtgaggataatattgcagaacagcgtctaactcattgtaatcaaaatcctacagagaaatgtagttacaggcattatttatagccaaacaaaatccaaatagttttataggcacaagcaagaacactaacctcaacaattgtatctgtaccgtactccttcctccatttaagcatgtcagtccacatttgctttgctttctcaatgtcaaatctccttgcttttagaaatctacacaaatcaattagtcaagtcatcagcatgtttgcagttgggttaaaaaaatgatggtaagtaatagggtatatatacctcagcatcatatgatagtcatcatgccttgcaggcaacaactcatccaanatcagtgcttgtctaaat

SEQ ID NO: 1422 - DNA, 58 bp, Oryza sativa
agcttcaaattaaatcaggtgagtggacgctgagacatgtgagagaaggagggggggc

SEQ ID NO: 1423 - DNA, 328 bp, Oryza sativa
ggtaaagcgtaccccctcttcagaggtcattaaactgttcgaacagccgtgcccacggtcacgggcggatgtgaggtgagtcctagcgtagttttgtttgactactgctcgtgatattgctgtgtgaaaaggggttcggcgtttgaaaaatctgcagctgatgtgatcagctatgcccgggtggccgcttgaaaagttgttggcctgagtggccgtttgaaaaagtgttagccgggtggccgttgaaaaagctgttggccgggtgccaaccttgtttaaattctaaagactgatacattgcacatactcccaccggacgagacgcact

SEQ ID NO: 1424 - DNA, 381 bp, Oryza sativa
  unsure (1)..(381): unsure at all n locations
agcttgggtgggggatgctgtgtggttatgcttccgacgggngagaacagggcgacgcgggcgccgatagtggtcgacctgcatagggatccggggctgagcaacaaatccatcgtcctgcagatcgacagcaagtcgcagcaggtgtcggcaagtgagtgagatcttcccttggctagctggatctggcaatgggcgccggctggttggtgtgctgagattggaggccctttctggtggcgttgaggcgtgcaggtgctctccgccattcgctgcaggacaagctgagcaagggggcgtccggtggatcatggaaaggccgagacgatgagaattacctcaagctgccgacaaggacaggtttgttgtgggcttcacttt

SEQ ID NO: 1425 - DNA, 458 bp, Oryza sativa
  unsure (1)..(458): unsure at all n locations
ttcggtccacacaggatctgcagcactataagggtctgattagtttactggaagaacatgccatacattgtcctcaaacttcagccgcgttgaataggcagggacatatctaagttgtcaagaaagttaataaagcaatcagtaaatctccaagtagaaatagagagtacaacagcaaccaatcaccacaaaaatacaagcatgataacaaaattcagtacatgttagttaatcaacaccagtacatgttagttaatcaacacaaaaaagagtgcgagtcaaaattactttagtgtcagcaaattttatttctttctatatacaaaaactaactgggatatggatgctccagcatacatagggatgcaagtgtgcccttatcacaattctagttaattttttcttccaaattgtgtactagaagccagaanatgaactattaagcgggtttttatatg

SEQ ID NO: 1426 - DNA, 449 bp, Oryza sativa
  unsure (1)..(449): unsure at all n locations
tgtggtgaaagagcactcaatgatgtttgtgtgtcctatgatacattatcaaacagcattgatgctcttcataatctacattgaaataccttaaattgtcttttataaaacctgaaactgaaggttttcagtccttgtctatcccattgcgcagnttttatcataagcttcctactctgattcttcttggagggtcacagtgtgatatacctttgtgctcggtgtttttaactgtgttcagtgttcataaggaggcaaatgtttccatttgttcttgctagattcactggagcctcttgattatcactaattntcaaaaaggaaagggtgttctgtgtttggttagcatctaatactcaaacaaacgggagaggcagctgccgtgtcaccaaaagcattagggtatatatcacatgagaacatgtgggaaggaatcatccaatgaaaca

SEQ ID NO: 1427 - DNA, 405 bp, Oryza sativa
  unsure (1)..(405): unsure at all n locations
acctatgaaactaagcttgatagggactggcaatggtgaacagacctggagactttctgtgttaactttggcctgctgacaagtagtacactgagcaacatattgctgcacatccttttgcaaccctgtccatgcaaacagaattttgattctctgataggtagctgtaacaccagaatgcccaccaaccccactgttgtgtaatgcaagcaaaactgcctgttgtgcttccttatgatgcccaagccatattcttcctttgtatcgaattaccccattaaccaactggaagtggtcacatcctttatgctgaaggggcagaatttccaagagctgnttagtttttggatcatgctcattgacggagcgtggggctcctcaccgggagaccgcgctggcccccct

SEQ ID NO: 1428 - DNA, 390 bp, Oryza sativa
  unsure (1)..(390): unsure at all n locations
atcatcaacagngaaacagaaatgcgcctccagatatcttcgtcagtgaagtaatgtatctctatctgggaggagctaattccattatgttagagaacatgcactgngggatgcactgacagatatgcttgcagaaactaaattaaatggcgcttatacaaaataaaaacacaactccgaaatatttatgtagataattccatatggaaactactaataaggtatcaatgtcaaattatctaataaaacaaaacgaagcccataccatcaagcttgagagaggggaaatgtttcgcaattgtcgatgctcttgcagataaatgcgtgcggaagaatctggttgcactgcacttggagtatcataatccgatggtgataaataattgacat

SEQ ID NO: 1429 - DNA, 456 bp, Oryza sativa
aatgcagatagttatgtgcattttgttatattgcttgcaaaacgaataagaaggccccagcaaaagaaaaagaatagaatggatatttcaaatgatagtatcccccttttaacatgatagttttcaaatatattcatatgaccattggccaagctacacataagcttcactaattaaacagcaaaagttattcatcaagaaggtattgacagcagcaaagttcaatttaaggatggctgtaattacaaagatgctgtctgcttatattgcaaatctaacataaacaaggcatttagtgactgtattgcaatgaagagttgcttcagataaaatggacaagtcatacaaagttatgtaatgcagaaacaagctgaaaatggtatgccaattcgagaagctgaaaaatggtatgctagcattctgttgaagtgatgtgagtattagctgtgtatatgc

SEQ ID NO: 1430 - DNA, 258 bp, Oryza sativa
acatcagaacatgcatgttacaaatactatcaaccaatgttcttattatctcaataacttaatcatacctatctcctgttaacattttgtaaccctcttacgaagtattgtccgtctttaatagcaccacaccaccagggctgaagccctaatgcccaaaaatattacaccatacgtggtggtctttcaacaggaatttactatgatcaaatatatgtgcgttgtgttcgcctcttagagcatgtgttgagggacaca

SEQ ID NO: 1431 - DNA, 464 bp, Oryza sativa
  unsure (1)..(464): unsure at all n locations
cataactgattcaccaactatgtctataagtgaaattatatttatcttatattaagtatactcatgtccataccttatgagttatactactgtcggtagagaccattatttgtaaaaattaccactataacatgtacatcaatttatgtatatgttcactatccatctgctttcaccttgataccttattatcaaccaggacatcaatgggcagacatattttccacaaaatcagctcaacgcgtcgaccgttgctacaagacaataggtcatctgtgatgggcagaacaaagaaaaagtttgagaagctagtgcaaattggtgaatcctgaactaaattctaaatgtcttatctctggctaccgggctataccgcagcctggtggatgaacaccatatttagtcttanatnggctgtcattcaccatcattcaatctaagtcgttgagatggttctgctagct

SEQ ID NO: 1432 - DNA, 415 bp, Oryza sativa
ctgcagcttaagaataaaacaggaaagatcccagtttatgcctttacagcacataaagacttaacagtgaataccaattatgtttagctttcagaccaaagtatttccttatcattcaaggtcagacagaagaatatttgatcagagtctagacgcattcatgacttgattagtgttattacatgaaattattgctcatagttgagttgttcagatcaatcacaaaaaataattcagtgttcagactttcctttacttgtttacaccagcaggttctgatttctgaataacttaatttgctagaatggaatggtctagacaattttttttactctctgtaccacgtaaatactgctttctgatttcacatataacataataatctggcagcgggaaattgaccctaaacattggg

SEQ ID NO: 1433 - DNA, 270 bp, Oryza sativa
tgtgcgggtaataaatcgggtacttatgtatcgcgtgctatgctgttgcatgattattatttcgcatcatgtgggtaaagtgtacagactctgcagagttaaaactaatcgattagccatgctcgcggtcaagagcgatgtgtggatatgtattgagtatagacttgtgtttattcttcaaaatgctgaaatttaccttcaaattgtgatgagaattgagaatgatcttctcgctaccatggaaggcaatgaggtgcatatttatacatg

SEQ ID NO: 1434 - DNA, 327 bp, Oryza sativa
tcggtcatgtgggccacgctggtgaaagtaaatggagtggtctttactctaataaggttgagagggtacaaaaaccaactattgtgtgacaagaggattgaaatgaaacacagaatgggctctgtttacagactccttcctcctctcgatccccaattttctcgtgtaagccaatgcatgcctattcctttgacctatgtaagcttattcaggatataacacacgtggcaggacacaagtgggctagactgtcttttatgattatggaaccttgttttacgggaaacagcaagaacactaccataaatccataatatatgaaagaaa

SEQ ID NO: 1435 - DNA, 425 bp, Oryza sativa
  unsure (1)..(425): unsure at all n locations
ttaatcaacttaatcaaactcttgttagatgccatgacttgtccattagcttgcgcataatatggcgaagaattcaacaacttgatacccatgctatcggcaaactgaacaaactcatcggacacaaagattgacccctgattggttgtgatggtttgcggaacaccaaatcggtagacgatgtattctttaacaaattgtattgcgtctcccanatcaaccttcttcaaaggaactgcctccacccatttagtgaaataatcggttgctaccaatataaacttataccccttgctcgaaggtggattaatgtcgggaccccaactaggatccctctgtgtataatgtgctagtcccagatcaacgctagcacacacagtaacaaaagataatatcacaaccacatcatgagtatattaataaat

SEQ ID NO: 1436 - DNA, 425 bp, Oryza sativa
  unsure (1)..(425): unsure at all n locations
gcttatgaattatgatattccgttccttatgtataagttactaatccagnntgaacgccttctacttccacatcaattgtactcatggttggtgattattgtctgtaacggccgaggtgatatttgcaatcacatcggcagtgaaggatgtatgtgggaaaccgcctacggagaggctctttcttgacaaatacgggaggatctgcttgtgccttgatgagattgattggaaggtacaccttggggttgatcttctagtgtgtgaagntgtttcccccattttctgtgatctactctagtacctgagagcttgatgatatatatattgcacgttgttgatgcacggtctgctggagaacacggagaaagacagaatcctgatgttgatcatgctaaaaccgcctgctgaccatgattttttatca

SEQ ID NO: 1437 - DNA, 485 bp, Oryza sativa
  unsure (1)..(485): unsure at all n locations
agcagcagaggaagacgacgagggagacggagactcatacgcttgttgtgcagacgctgcaaatggcggagcgcgggaaggtggaggcggcggtggcggaactgctggtgggcctcaactacctctgccgctttcacaaggagatcaccacctgccgtacccgtacgtgccaccacgacgatgcaccatgacaacgtgcatgctgcttcaagacgacgatgtacgattgccaatggaacagtatgcatccatccatccacaccgatcgtctgatccatgctctcatcttctcttctttagtttttcttttgttgttttgggatggatcccaattcccaagtacccaattggctaatggagtaggagatgcatgggctggcatctgggtgatctccagtactagttaagtcgatcgatgagaatggagttntctgataattggagcaggatggaatctngcttcattatattcatgtacagatagc

SEQ ID NO: 1438 - DNA, 271 bp, Oryza sativa
atagtgctggtgctcgcatcatgtttattgatgagtggccacactgagcattaacgacgtgtctgccatccttgtgtttgcgctatgtgttccgcgaggtttgtatggatctcccccgtttgcatatcaagggtggtcattctcctagttattttacccaagtccccaccagaagaactcgagcgccattcacttggagatggatgcacaccacttgatctggaggggtggttgtccccccaacgagagggaactaagtgccattcactta

SEQ ID NO: 1439 - DNA, 285 bp, Oryza sativa
  unsure (1)..(285): unsure at all n locations
gcacaacgacgagcacaacagccgattcgatttgctgctgcancccnnacacccgcggaggccgacccccagacggcaaacgccgggcaccgccgcaaccaaacanaaaacaccggccaccagacccgaaggagcggagcggcgagccgngggcgaacgggagcgaggcgagaagggaggagcggngagcaacacggggaggggagcgacnggaaaannggcgcaacggagcaggcagcggaggggagcgacaggcagaagaccgcaacaacagcggcgagcgga

SEQ ID NO: 1440 - DNA, 419 bp, Oryza sativa
gatcttaagcaccgcggctgcagcttctataagtgaaagaaaagttttttttattattgctaataacaatcaattgtacagattgttttgtgaagtatataaggagaaatttgaatacccttagaaaggatgattctgggctcaagaatgcttgcttttacacaaataatatcacaaaacacataatatagctatgaaatcataagttccaaaaaattgaggtacaactataactcatgtttcattggcacacccatggtttctaatgaacacccgtaatcagtgtcccgagatataaattctagcacaatctcattagtaaatatcatatctagatgtggttaagtatctcggtgaatacttatgacgtatttacgagtttgataccagatgtttataatagctcgcatgatgttgga

SEQ ID NO: 1441 - DNA, 459 bp, Oryza sativa
  unsure (1)..(459): unsure at all n locations
agtcacctgcggcatgaagcttgcaagtatgtttatcggcatgtttttatacatgcaagtttgttgtccctactgatttcctgtccaaaactccaaattgaaccattttagttaaaatttattttactagaacctaatataatttgatatatattctcaaaataaccgagtcagtaagtatggtttttcatctgctccattttctcatcaacattttcaccaatgtctaagaatgcttgttgattcccagtttcccaccttctcatgaggtacagagatagatgctttaaaccatgttctcacagttaactggacaagagctatctagattatctcatctccccctttttaacacatgaataaaatggcatcatatctacagtggtcttattgttaagacaaataaactcaatttgtgtaatttcttttntcttccttggatacctgtcaaagagaatg

SEQ ID NO: 1442 - DNA, 495 bp, Oryza sativa
  unsure (1)..(495): unsure at all n locations
tgctcttttctgctcagcttttgcaagaactgtgaaaatttgtgttatgatggnaacactagaggtttacaatgtctttatagatcctctgttctaggaaacgacttaatgcaactgcatcaacaatccctctttaatatagtcaaatatttagccttttttttcctttcctggcttgacagttaatactaaagtaatagtgctatatgtaactcttctccagaatagatttttggtagtgttaaaaagctacatcctttctttctgtgttaactgttaagtactgaacaacgtgaccatactttctacatactttctacattgtaagctnttgtgtcctggtcaaagagtgttctgaggctgttcaccanggagggggaactacgactctaatctctagaggggatgtcaccttattcacatatatattccctagatgtaatgtactcccttcgtttcatattataagatnttctagcatttgccacattcatg

SEQ ID NO: 1443 - DNA, 357 bp, Oryza sativa
agcttgccagattaccgatcgagttgttggatgttgtattgtgaaaactaaaatggcctatatttatgtgaggatttgatccttctatgtggcatgaggtatccctgggtcggcttgggaatggctttgttgcgaacctccgataccgacgggtgttcggaataagttcgtatcttgtgggtaaagtgtacccctctacagagggtaactaactgttcgaacagccgtgcccacggtcatgggcggatgtgaggtggttcccgttgtgtacatttttttgcctgtgctttgtgaaaagttattgtggtgtgggaatcgtaaccagaatcagctatgaggcagatggatgacctgagt

SEQ ID NO: 1444 - DNA, 454 bp, Oryza sativa
tgtataaatacacagaaagcatcttcaataactcatcaacttttcctacatcagaccaaaagatagacagttccgttggagaagaaaataccttgcaagtaatataaagatctggatgcataagcaaaagggaaaaaaattaaggaaacaagaagaaattattgtattcgtaacaagcatgggtaagaagtggtgtgtaatcaatgcgaaggatacaactgagaaaaaaatgaatccaatatgtgaccagctttgacgctccatcgcaatatcaaatcccatgtatatgaacctgtgtaaatgcattacagtttcagtatttggacttgttaaattattgcacttgaaggtcttgcttacacgaaagcctctgctagtgatgaaagtagatggaaaaaacgagctgtaaaacgctgagaatcttctgataagttatagaaggtgtatctcttca

SEQ ID NO: 1445 - DNA, 298 bp, Oryza sativa
  unsure (1)..(298): unsure at all n locations
agctntcagacaagcagcaccgtttgtgtgcatactgcatatagatgccaaagcagatggcactggaccagcactactcaccctgccattgcactaaccatttgtgcagtagtcgcggtatgtagtatttatagcagaactgtatttacaactacatgatgggtacaaaaagaaaatggagctagtcacgttgtgacatgagtacaaatcattaagcccattagccttggttacaactttacattacctgatttcaatgcccccatgtagtattatatgtgggcatgaatcatgacat

SEQ ID NO: 1446 - DNA, 347 bp, Oryza sativa
  unsure (1)..(347): unsure at all n locations
ttctcacccttgctctatataaatatatatatatagttcctccgccctgaagagaagataaagttaagtgaagattatggtttcgttctggttcccagccgtcgtctgtggtgttgggtgttagaccgtaggttccgctgctgctgctgctgttggtgtattctcgtccgcgtctgcagttgtattctcgggctgtctgagcttgtcacgcccggaatttttatccaaaatctctaacgcttacatgtgtgtgaacccttgttcaggagtcagccgaggtacacaacaaccaattgataantgagtacaattattactcttattaataagcgaattaaatgttatac

SEQ ID NO: 1447 - DNA, 446 bp, Oryza sativa
  unsure (1)..(446): unsure at all n locations
agctnggcttcagtggaagaagaggactaatatgatatatctcanacatagttggtccaaaatgcaatctcctgtcactaggagcctctgtatttagatataaataaactagacacaaacaagtgaacaaccctgatgcttaatggggtaaatccaacagaatgaacccaaaagtctctgcaaataacaacagagcttgtcacatgcattacaggattgtctcacagttcaaatcttcagcaattccacaaagaaacatcaaacatattctgaacattacattgcacgaacttcctccgagatgagcctcaagcagaaggcggccgcagatcgtaacattccttggccatgcgaatacattgcaaccaatgcatcaccttcacattatggtccttctccagaacaacatctctaacagcaatctggatcgcaccacggtacaatac

SEQ ID NO: 1448 - DNA, 331 bp, Oryza sativa
ctgcgtggcggatcaatcaacctacaaatggcctcaaattattctattatcatgttatcttcacacacaagattgtatagagtgtggttatagacagaactagctttgacagagcaataaccggatgggtcaccgtagttcttcttacaactccttgtcacatgataatttttttacccttagcaagatgcacatccatgcatgttgcgcaacggttcaaatgacatctctattaaaaaccaatatatttattgtaccacgtggtctaacaaaaagatcgattacattcctcgtatataacatggatgcaaccaatgacatgctcacacat

SEQ ID NO: 1449 - DNA, 343 bp, Oryza sativa
  unsure (1)..(343): unsure at all n locations
gcttcgtgatcttttgtctagggctgtcgtactagtgcactatgttcgnnttgcttcttcggggtgtgttttgtggtgttgtacttccggcggggggggtgtcggagtttatctctaacgccatccacctttttttctctatctcaatgaaatgatacgcagatctcctgcgtgttctaaaaaaaagtgtggctttgacaagccatgatacttccttgtacaatggacagttacgaccaaacagagttccctaggatgagtgcaccattgagtatacctaacaagaagggtgatggtgttgatagtactcgccagtaaactgatgatcaaattcataataaat

SEQ ID NO: 1450 - DNA, 456 bp, Oryza sativa
  unsure (1)..(456): unsure at all n locations
taagtgaagctgatcatgcaatgagttttatatgttagtaagttttatgtgtaaacagtatgttgcgaggaacaagtatacttattttttaagataatggatttatattaaacccggcctttacacctgtgaaagtaaacttattggtcagcatcattttcatttacactgtaaagttgttttcattctcagcaggaatttcatttctgtttatcaccgttgcctaatgaaacagtgcattttctgtttgtcactgttgtcttatgaaacatcaccgtaacgttagtacaggcatattactagtatttataattagtgtcaaaacattcgatgtgatagggacttanagttttagtcccatctaaacagggtcttagctgcgtggatggtgtttcgggctttttgggcttgggaggcacaatgtttagaactatcagccggtgagggaaacacgaa

SEQ ID NO: 1451 - DNA, 391 bp, Oryza sativa
  unsure (1)..(391): unsure at all n locations
agcttacattacatcacaccaaagccaatgggtgttatatttgctngaagagttcgaatacaccttcgctttctctcactgattaactaacctttattctcaagtttttctctatgcaggtgagtcatccaaacaaaccctcttcggagaataactaagggagctaaatttctctagagactcaaccagatacaatattcatcgggtgttttttttttcttctcttgagactcaaacaagctaaattattcattatgcatttttcctatttatgcactgctaaaagattactgcaatgttaatcctggagtactcttttttttttctgtgaaatttggaggagtgttattggtcatctaaattactcttaaaaattggttgagaaaaaaat

SEQ ID NO: 1452 - DNA, 500 bp, Oryza sativa
cactcaagcttgccaatgatcatctcccggatttgtgacaaaccggctcatcttgcttacagcaaatgagatgtcaggcctcgttacgctagccaagtacatcaatgaaccaatgatttgagagtatctcagctgatcccttgctattcttcggtttttccttaatagcacgctgggatcataaggagtacgagctggcttgcagtcactatatccaaagcgactcagaaccttgtccacatagtgggattgcacaagtgtaatcccaccctcatctcctctttgtagtttgatgttaagaataacatcagcctctcccaaatccttcatttcaaaactcttggacagatagtctatgacctcctcaatcacattaacgctgagcccaaagatcagtatgtcatcgacatataagcacaagatcaccccttctcgccaccatagcgatagtatacacatttgtcagtttcgttcacaacaaagcctgcagatgaaacgtg

SEQ ID NO: 1453 - DNA, 417 bp, Oryza sativa
  unsure (1)..(417): unsure at all n locations
agcttacataagatntataataattcaaatagtattatataattatgatttaaatgtaaaagtaagatgatatggctntatgagataaaaaaaggatggaggtaatttggaccatagattaatcatctaagggctaaaaacaactgaggtgatattatgacttaatgagagtaaacaatgaggaagataatttggaccatagaatatcatctaagtgctaaaaacaattaaagcgatatagcttaataagagaaaagagaaataacattaactaagcgaggatgaattgttaggcatataggatattatagaaaatgatggagatatatatatatttcaatattatgtgaattatgtgggaatggtgattaacatgcttggattttaaagctttacaattaataaattatagataat

SEQ ID NO: 1454 - DNA, 248 bp, Oryza sativa
cacattgtctgcaggcgcctcggatcttggctgttttgttcgccatgcgcgccgcgagctcgtcggcggccgagctcatcttgcgcacgacgccgttgatgctccccttgacgatcgccagcaacgacgcagggcccactccgggcgacttgggcgtctccatggtgatagccaataccctcaagatcgccaccgcgttaacggacttcgccgacacgtactccaccggcaccagcgggctctcgtcg

SEQ ID NO: 1455 - DNA, 343 bp, Oryza sativa
  unsure (1)..(343): unsure at all n locations
atgcaagcttctccaatatctgatccagagctttattttctattttctcctcttgttcatggaggaattgatggggacggccttacatatcttgagatcttcttgggacacctctccttggcttgacatttcaccgaacaagttgtgggcgttggtgccatgagcagtagccttgcccaaatccaatgaccaactgcacgggacgccgcagcggtactttcccattgcctccatgcttgaaatcccatggatcagcggctctgataccatatntttagcaaccacatcaccaaacaacaagaatttcaccacgaacaactatccagtcaacagtgctgttttt

SEQ ID NO: 1456 - DNA, 457 bp, Oryza sativa
  unsure (1)..(457): unsure at all n locations
ttatatactgttaccaccataatccgatctcataactttatctattatatcactagcatcctcaatcttaaatttcttgaaggaaatccgaggttgcttatgagtaaacatagccttatgggtaaacatatccaaaagctatctattggcctaactcttaacttagagaagcttcccttatagcttaaataacttaaaattaatccaacggaaagaaaatctccaacttatgagacgttctaacctcccctatacattgacatcaatgacaatgacacaatttcaatgacgttacatcttttgtcattacaaacaattattataatagtcacatggtcatccaaaagaacaaatatgactgtcgtgcacaaggacaagaccaatcactntattatcacacttaatatatcatgttctatttggacaaataacagacatgacctcgttctcacatgac

SEQ ID NO: 1457 - DNA, 407 bp, Oryza sativa
agcttccttctgactgctgagtgaagctgattattgtcttctgcctggtatcgacctccggacgctgattgcccttggctcggcctgcggtatgtaggggagagacacaacttcttccatcgacgacaatattttgctaaagctgtcggtgcagagaatggttgctatgatctattgcaaagccaagtgcaccacgaggagcactggtgcactgtttctgctatgggttctgactaacacgaggcctcacgggtacagagtttgctccaatgaccacaatacgaccggaatgtctgcttcgagtgaattggcggcaatgtggaggtcgattgtgccttggctggagacaactgttggagtaattgcctccttcattgcaggtgcaacgaacaataacttgactacac

SEQ ID NO: 1458 - DNA, 486 bp, Oryza sativa
  unsure (1)..(486): unsure at all n locations
ctttcagcactttttntcttccctctatgattgccattatcttctttttgtcggcgacaacttgtgtttcttttcggaactggaagagtcacttaagcatcacattttactcgagattccgagagcgtctcaactgctgcgccagcttaccgaccccagagctcttttgatttacaatgaaaatactgtcatggaacgtaagaggtctcggagacaaagaaaagagggatttagttcagtcaaccctgtttgagcacaagccggatattgtttgcatccaagaatctaagttaagcaatatagacagcttcacagccccagcttcttaagatacttccactaccagtcttccaccggttcttcaggaggactgatcacagcctggagaaatgcaatagtcaaagctggcctcacctggctcttccattccaccatcgatcaacattctttctatcacaacatctatgctcccatgcaactccagag

SEQ ID NO: 1459 - DNA, 283 bp, Oryza sativa
atcgatttccttgatcgctacttatgggcgtgcgctcaaaggatacaaacagggattcgcaaacaaaaaggggaattcgtaatcactttttcctgtcgcgtaaaaaaaaggctttacgcgagagcaatagaggttgggatacatctatctcttctgagcaacctcttttggattcttaagaccacccttgcaataggaataccgcctgcttgggttctttattatattatctccttcgagggattttaggatcggtcaggctatatttagtctattatggctt

SEQ ID NO: 1460 - DNA, 418 bp, Oryza sativa
  unsure (1)..(418): unsure at all n locations
attcgttctttgttcaaaaagataaagatcggatagattcgaaccgcaattgcaaaggtaatcactactatgccagcccaaatcatgatcttcaccaacttggatttggttctctcgcgaaaatcgcgagttgcagagatgagaaccatgaaaagcaagatcccgaataagaaaacagaaaccgaggaaaccacaagagtgaagactagtagagtctcgtcttttgtcattctttgctcctttttcactcaatgattcattcgaatttcccgaccaaaaattctatatgtctattcatagggcctcgttgctaagtgctacaagatctagtgcactggaactcgtggttatggacccgaatcctttagtatggaacattgtctttntccaagtaaaacccccagtatatgaaagaatg

SEQ ID NO: 1461 - DNA, 300 bp, Oryza sativa
agcttgaatgaacttgagagcaaactctggttatgtgttgaaaatgtgttgaaatgggggtgaagttcactctctcggccggttggcttaagtagtgcacccacaacggtcaaaattgacatgtggggcccactatccgttgccttaaaggaagaggcagtcgaccgttggcctggccggttcggccgaacccctgatgggcccaaccagccccacttttggtcgttggatttcaacggtcaatgtggtcgtggcacagtgaattttcttgaaaaatttattttgggttgctctgaaaaa

SEQ ID NO: 1462 - DNA, 465 bp, Oryza sativa
ctggggggtgtgtgacggtcgatatcgaacagtttcgattctttatattactaacatagacataaactagtgatacttgcaatgcatatatctgtgataatacaaatattccactagtattaggtatactaacctttggcagagaatgacaataaagtggaggagaattgtcacgtcctgataaattcatcccgaaataaaaatcattctctaaaaggaataatagacataattaaaagttcaaaagaaatcggcaaacactaaaatacgtacaagaaaaattccaatatggcccggagaatttttgcaaatgctccttggtctaaatgatccctcaaatttacttgaatttcagagcaccggaataattataagcacaacacattatcaaagttactaaaagataagctaaaataaccctcttctccttggctgacccgccaagtcgtcctctcctctttttca

SEQ ID NO: 1463 - DNA, 381 bp, Oryza sativa
agcttgtcagattcaatgatgaaccccgtggtatatttttgtggagtccggtgatgttcacaccaaaatctactgcttcgcaccaaacctctcatatgtgtcgtttccgtggaggcagccgaaggggtttaccaattcgtcaagcggagtacatatcaataaaggcccttggatgcaattgtcgcggccctgccacaataccctatcgatttgctccttcattgctgcttagtttcattataaaggttgcttctttttttcagttgacctctctcttgttaaatatggtccaactcttatgtttatcctgggcgatgtattggggaattcaattccccctaacgctgttggttaacaaagtgtgttgtggtttaaaaaaaa

SEQ ID NO: 1464 - DNA, 315 bp, Oryza sativa
tttcctgttcagcccaatggccgaacgagcaaaggcgcactttctctcttcgagtgttagcggtgacgacggggagccaaacccacgccgtcgagctcgtactccaccgccccctccacgccaaagtcctaggcgggaggaggcgctcgagagggtccaaggatccgcgacttcgacgtccacgggtgatggggaaaggcggcgagatggggagcgtcgtctcctcgtctacggcgacggcagcacgccccagggcacgctccaagctgcgggcgcgctcctacgtcacccgcccgttgtccctgacccggagtc

SEQ ID NO: 1465 - DNA, 366 bp, Oryza sativa
  unsure (1)..(366): unsure at all n locations
taaatatagctagacccaaaataaacactaaagtaaacttttggtgatctggtcggtgcatacaactgagacaaaaaatgtaactttttctgggttaattggtcagcgggacaatatgactctgacaaaagtctatgttttatatgttaactggttggtggataaaacctgatgaaagaaaatgtggacaatcacatcatggacacagccttgaattactganacttattgaaattccagcgagtgaattaccttgcagttttgtgcaggctggtacttggtgacctgcacgaggtactgctggaactctgccggtgcttccctctgaatcttcagaaacctctccgacgacaatgtcaacatcta

SEQ ID NO: 1466 - DNA, 489 bp, Oryza sativa
  unsure (1)..(489): unsure at all n locations
actcaagcttgccaaataatcctataggatgggaagaccccaagaagtattatggcnaagtctggatccttgccaatatttttgacatcaaaccaaatggacccattactactttgccattaccaattattcctttctgttgataaggttgagaatggatgcaatccacaagcccccctaatcccaggtccccgcaagtgcacctttgatttggcggagaatgattaggttggttggagtgctgtctcagactcaaattctcagtgcttggcgctgacagtgaaggaaacatcatccagatgtttgttggttggcttttttggtttactatatatactttggtcactctggtgagtactagtggcaaagaccagataagtgcctcattcttttctttcccgaatgtattntaccttntcaatattaacaataaacatatcacattttagttttaacaatatgaacattttgccacactatcctgacgtg

SEQ ID NO: 1467 - DNA, 347 bp, Oryza sativa
agcttggtcaaggatatacatcggccgatccattggaggaagtagacatcggagatggaactaagccaaggcttacttttgtaaacaaaaacatgaaagctgattataaggttaaaataattgagttgcttaaagagtatgttgattgctttgcatgggagtaccatgagatgccaagtcttagctgtgatgttgttgaacatcggcttccaattaaaccgggttttagccttataaacaaccacctcatcgttttaatcctttgctatattatcgggtcaaggaggagatagaccggttattaaaagcggggttttttacgccatgtcgttatgcggagtgggtgt

SEQ ID NO: 1468 - DNA, 345 bp, Oryza sativa
tggacttctcttcatgcacacagtgactgttgtcttggatattggcctcaatgtccttacgttctcgccgttcagctagtcttaacttggctttctccagtttgaattggtgttgctcaaggtaaacggctggagtaaggatatcggctaactcatctaggattaaagcctgaatctcgtgtagctgagccctgaatgagccacagtcaaccactaagttgtctagcgatgatgcttctagccgatctaaaatgcttccttgagttttcttcacatcatcagataaaggagccaaggctctgcttgtggtatcttcttctccttcatcaagatagtctctgatgt

SEQ ID NO: 1469 - DNA, 256 bp, Oryza sativa
caattagccctatctggtacctgatttgtttcttatcactgaacaaaatcagctagtagtaaaaaatatgctggcctttctttcctcaactactgggttgacaatgttatgcgagggaatgatgtgttaacatgagacagcatgatgaacttgatgcccctggtttaatccaaagaaaagtagctactgtggttcaagagacaagcaactaccgctgaaaaacctattgctaccgagtctgatgactaaactactt

SEQ ID NO: 1470 - DNA, 494 bp, Oryza sativa
  unsure (1)..(494): unsure at all n locations
ctaagcttgcacgtcaaattgaagcatttggtaaacatatatgtatattctttttttataaaatgcaatacagaagtgcgtggccctttgtcagtgacatagaanatgaaccatataactttactccagtacgcgtagcaattgtgcttttagggccccgatagttgtctaaagttgtgttcgttgctgtgcgttgggaacacatttccagcgcacggagaatggagcggtccattagcatatggttaattaagtagtactagctttttttaagaaaaagattaatatattcttttaagcaactttcttatacaaactttttttaaaaccatatcgtttagcagtttgaaaagcatacgcacggaacatgagagaggtgagttgggaaagttaaggaaatacttcagcctaatggtgtgttnagtttacgctaaaattaaaagttcggttgaaattggaacgatgtgacagaatagatggaagtctatgtgtgt

SEQ ID NO: 1471 - DNA, 403 bp, Oryza sativa
ctaaagccatgaatcccttttatacatatctggtattggatcctacagaacaaatagataggatgagttgtatctgatgtaaatataatactccagaaagattccagtattttaaaatatttataaatatgtatttcttctcttgtcaattttgatttccccgagcagatgactcattacgtttaaacactctgtccgactagtcatagccaccaagcaccgggagttggcctaagcactttccaaacatgcatatgagtgacatgaggtcgtcattaattgtcacgaccggaaataacccaactggcgctccttatgtgcgtgcattaatacttgttccacgaggcaaagtacacctacacctgatacacatcagagtttaacaagcggaagcggaaatagt

SEQ ID NO: 1472 - DNA, 470 bp, Oryza sativa
  unsure (1)..(470): unsure at all n locations
tgggctatcccatactagcaaatgtggctgcactgtatacgaaacgtactgacattgagtgaagtccttaagttggtcagggaacactctccccctatcggcacacaactaaatatcatatgtgtaccacatgaggcccaaacctaaagtcctcattttccaacattttatttaacaaatatcacattttatcattttaatccagatcgtaaagtagttcattntatatacataattgagcccaaatggtaagtaaacacatttctaagcatggctaagcatttttatagacttgtgtccttaagtatcaaacttaatgtgacaattttaattgttcctaaggcttggaatagtggttaaggtctttggtggagtttacgtaataatgcaagttaacgagttgttctaataaattttacanagttttaacggattagtgtacaatngacatacactatttgcaattcttt

SEQ ID NO: 1473 - DNA, 283 bp, Oryza sativa
ctcgattgagttctaggtacaactagatggacttcttgcataactgcacatatgttgcaatggatacgtttgtttttcagatagatgtgtatttgactatctgttaaacccttttttggtcccagtagtattgagaaactgctttttttatttcctggattacaaagaaagagactgattttttttatcacaaattgccaaaatctgcaatcaaactcttgtgcacataactttcatatgcattcactatgatatatgcttcttaattgaatgcatgctgtac

SEQ ID NO: 1474 - DNA, 426 bp, Oryza sativa
  unsure (1)..(426): unsure at all n locations
atctttctaccttcttgatagcaacaaatttatgtcacatctacaatcattttcaataagggaagcagtgtccactgaaggacgtgagagatgctttccatgtatgcaagcatatatttgattctaaggcatatcactacagtgatctatcgactggccaggaatattggagagcatgaccgtcccacagtatcatgttgatacccaccctgacagtatctctgatctatctaccttcgtgatacccagcaatatctctggtaatggtgctctgactaaccaaaaggataatctgatttttggaaatcgacaatggatggtgtcttcaccgtcaaatccttttataaagctctgaaattgcaatgagtcccttacacttcttanagacttttgaagttgaaaattcctctaaaaatcgaagtttta

SEQ ID NO: 1475 - DNA, 370 bp, Oryza sativa
  unsure (1)..(370): unsure at all n locations
ctggtaacagaatatgaaaatcttactttttctaatgaacgtccacataatgcctgcattgcactgttgaaatcgtcgtagttctcaaattgcacccacactttgcaatttagtccagatataatctccttattggttccgtcttgttttgctccccattcatcatcactagaaatattaaggttcctgaaaattggcagaagaatgccaaagaanagggtatgcggagtaagttccccaaaatgtgaagggcagttcataacctgcagaatttaaaagaaattgggtgcagtgttatttaaagaagtcacatgtatacaatagacattactccattattgtgcttgatgcactannggtatgtcgtatg

SEQ ID NO: 1476 - DNA, 502 bp, Oryza sativa
  unsure (1)..(502): unsure at all n locations
tactcagctagtcgattaataaatntattcgccgccgtctcgagctcactcgtttactcgacctctggattaccacacgtatgccacgcagaacaaaaccgcttcggattgggtcaaggagagttatacgtccagtattgaaaattcaaggtgggtaatgtctggttttcggattcacgggtaattcggtcgaacacgatggttcagagggtgaggaggtaattcgtgctttttcctatnttttatnggtgatagaaatttatatgccgaatatagttgatggacaaatgttatacactattgaacccaacactaagtgcaatcaggcgaattagttagtgtaaattagtttgtgaaaataaaataaatacattcttagaatcagtaagtgtgtctcgtatagtaataaagatnttaataaaatcgtagattaaagacccgtgacaacacantcagtgtggcacttgatggtagtggttctttccaattctactatgtacgt

SEQ ID NO: 1477 - DNA, 315 bp, Oryza sativa
  unsure (1)..(315): unsure at all n locations
gacgactcccatcggccgattctaagactctgaagccgatactgactctatgccgatgatgaatttgggcttaccaaattttggcgttaactgatagattatacttaaacaaatatgcatgcaagcgttgctacttcttatttctggatatattgacggtcgaaattggtctataacgaccgtcaacagtcaactatcgatgttctagatcggcaataagaaaaggattaattggatccatgccattgtaaatatgctgattcagagaaatgccnctgcaattcttctactcttaacccggcgcttgaaaaaata

SEQ ID NO: 1478 - DNA, 400 bp, Oryza sativa
  unsure (1)..(400): unsure at all n locations
ctcaagcttggagcggcgcttgcgaacgaggaacaggtctaacatctaaagtatttattggatangaaccaatacatgctccaatcccaattaaacaaagcaacgaatgactcaagttactagcccagcatgatgatttttatgcatggaacatttttcatgaaccccaactaaagatacttatgaccaaagatacttatgacactgactaagccataacctaatgcataaaatagatgcatagctattatgatacgcctaaaaatgccccatcgaatctagacacaacttaatgcataacacccaacaaaattctgactggcggccaaataaattccaaataattttgttttctaaaacatcatactattcctagtcgattaatccaattaaataagcg

SEQ ID NO: 1479 - DNA, 377 bp, Oryza sativa
  unsure (1)..(377): unsure at all n locations
atatccttacatgactagaacggangattcttatcttttcttctttgtctgcacagtgtgagctcgacattatgttccatctggagaaggtgcacttcatgctggaagagatggtgatgaatggttgcattgtcgaaactagtaaacagaacatcttggcaccaatccacctgatggagaaaacttcttagaaaaatgctatccaacaggggagtgcctcatactgttctgcttatcgccaccgcctctgtgcttctatagaattttcatctcaatgtgtgaccatcaacgatttccatgtgcatagactattanacttgacctgataggaaataatgagaatatgacagatgacgtctctgttctttaatggtatc

SEQ ID NO: 1480 - DNA, 448 bp, Oryza sativa
  unsure (1)..(448): unsure at all n locations
actaagctgccaccaattctatttgctaaaacttcgattttttctaagtatctttctaacccaaccacctggtcattgagtatatgaccaaaagcaagggaaaacaatgaacattacatctctcacaagagttattacttcgattgaggtcgtataacgcgttcaatccgtcctcatgattagagtgaacagccaagctgccatagtaaaacaaatccatacttttccatagctaggctggccggcaagtagaaaccggaagatgaaaggcaaaagatccaaagtgatggcgctgtcagaacaccaggacctacagtccaaccaagcaacaataaacacaaatactacatgattctgagccagagagagagagaccaccataggctagaaaattaagattatgccattattagaattgggtttcaccanaatgccatcctcgggagat

SEQ ID NO: 1481 - DNA, 399 bp, Oryza sativa
  unsure (1)..(399): unsure at all n locations
agctntngtcgcagtacagtcttgcgttgttcttttgcatgtaacataatgagcaatgagatttcatttatcaaaaaaattagatattaccccgattggttgttggttggtttaaataattatctctggtgttgaactgaagtttaagatttacttagagtgtacaccatttatgaacagaacagtttagtgctaaataccttgcccatataatagattatacaagcctcgcagtatttttgtcaaattcaataaatttggaaatttgcttcttcaaattatgtagaattgttctgtaagtatttttttttgtttcatatgttttatttgcttaatacnttcagttgggatcaacagttcatagcatgcagccttttatttattactggataatactga

SEQ ID NO: 1482 - DNA, 496 bp, Oryza sativa
  unsure (1)..(496): unsure at all n locations
ggctatatatntatgtgggaataatatgtgggacctacatcatggtgaaggaatcttgccataaatgtggcacgaaccaaacggatgcctaaattaatcaaacctggctaacttgagtccgtgcgagtgtcgttatgtcaaatccagtgtgtccttatataccatgtaaagaaatgctactccctccggtctcattntaattgacgctttggacaataacacactntacaagatatacctttgaccttatttttctattataatatatacaataaataaatgcatgtttacttttattatagtgttttgaaagacaaatctatatatatttttctagtttctttaaactaaatatttntaaagttattgatggtcaaagttataaaagtttaacctcaaccttgtctaanacgtcaattaatatagaaccagagaaagtatgacagttcatttacttctttntaatntanacatctattagtatataacgacatag

SEQ ID NO: 1483 - DNA, 363 bp, Oryza sativa
  unsure (1)..(363): unsure at all n locations
agctngctcgaacactcgaatagtacttctgatattctcaactagcatatatactactaagatacaagtcttctatttattaataaataatatcgctgacttttggacatatatttgattattcgttttatttaaaaatttcacataaatgtataagatataaatcattcttgaagtacttttaatgataaaacaactcgcaataaaacaaatattagttatgtaattttttaaaataagatgaatggttaaatatcattcctaattaaaatagcgaagctaacgtagctcaatggggtggttttcccgtagaaccaacccacccgaatctagtcctatatctgacacttatgggcggattta

SEQ ID NO: 1484 - DNA, 431 bp, Oryza sativa
  unsure (1)..(431): unsure at all n locations
tttatagcaataaatatagttaataggttgtattttatatatttgctccaaaatccaccagcagcatggcacatagganaataatgtgagagctaaacagtaaaagtaaacgcaccaatgaacagagatgagagagagaacgatataatgatggaaaaatgtacatgatacaaactaataaaaagggcaagaattagataccgcatatgaatccctgtgtccaactcaagcacataatcacaaaaaaacaatggatccacaaagaaggaactggtatacaaaagtttcattcaaaatagcatgtcctcattctaactntaaggtaaaaatgatncaactaatttaaggccaaagctacctttggggatgcttatgctctangcttcacggacaattggtgataaanaacagggaagatgtccatgatcgta

SEQ ID NO: 1485 - DNA, 335 bp, Oryza sativa
agcttgccggcggcggcaagagcgccgccatgacgacgccgttcgtcaagagctctcccgacgacatcaagagcctctattacctgatcaatttggaagggataaaagccggcgacgaggcgatcatcacggtgccccagagcggccgcaccgtcctacttcagaccttctcgccggtcagcttcctggtcgacggcgtgtaccaggacctcaagaaggcggtgacggccgccgtcggcgggccgacggcgacgccgccggagcaattccaatctatattcgacctttgcttcaagagaggaggggtcagcggagccccggacgtcgtgctcacg

SEQ ID NO: 1486 - DNA, 493 bp, Oryza sativa
  unsure (1)..(493): unsure at all n locations
gacctataaaactcagcttaggcaagttagaaaagaaaatagtgtttatggcatgtgttccagntggctaagagttatgcaaaatagagttgtggcagaaactaaacattgtctatgaaaactggcttacttaaggttaggtgtgacaaatttagttaccaatcaaacagccattcgtcctcaaatataatcatttggcaaaatctcttataagacactttagaatatgtggcatttgctataagacactccaacttttttgttctttagtataggacacttgttgatgcgaaaaacacacactagcctggaagatctgcttaacttcagtgcagatccaaaaacttgcttttaggttcatgagcgtgctagttgatttaatcctgcaatcaacaagaaacaaagacgagaaaaaacacgggtaaatccataaacgatagccgatcggctagttgccgatgacacatcatttatctttaagccgatgtcatat

SEQ ID NO: 1487 - DNA, 348 bp, Oryza sativa
agcttaatgtgtgagctgaaaagattatgtgttgtgtaacttgcaagagacagtgaaggaagaggaacagctagcaaagtgcttgcctcccttgagagctcggcgggatggaggtaatggggatgggtgggcggcaccctggaggagccgaagtagacggcgccacggtcgaggcggcgcacgaaatcgaagcacctcgctatctactccctcacctgcacgggaccaaccaatctatcaatctgccaaccaatgagaaagaaaggacggtgacctcatggggactgcttctctccagctccatggccgccggtgccacagccatctcatgctcatgctctactagct

SEQ ID NO: 1488 - DNA, 344 bp, Oryza sativa
  unsure (1)..(344): unsure at all n locations
tcagatgtgccatacctcatctcaatgatcttttgtttcgctctccaggcctttgcatagcttatggtgacttgaattagttctcgatgtgcctaataattgattgtggttcatagccaatgttaccaacaacactgctgtacatctcacttgccacaaaagctgaagtgatgtttcggtgatacttctccaccccgtgtaagtagcacttgtgctcggtcacaatgctaactntccaataatcattccatttacccttatatgcatggacacgccacgggaatattccttcatgcacctcacttcatacacataatttgttgactcgaccaccctatactctc

SEQ ID NO: 1489 - DNA, 343 bp, Oryza sativa
gcttatatatattccctaacagtgaggtatctttatttttgttttgtgaaaataaacacctcttgatatatcaagtaataaagagggaatactaaattatactaagagaattgatacctcttggtacatctcagatactataaaaattttttttaaattttatcattctttggtgacagatgaagctctaaaagaaaatgaatgatggagatgttgttaccgaacacaacacataccacaccatatttatatatttatattgtaaccttagaaagtaaaaataatttgagtcgtctagctataacagaatgatgtctataacactgagtagaaccagcatcgc

SEQ ID NO: 1490 - DNA, 417 bp, Oryza sativa
  unsure (1)..(417): unsure at all n locations
catgtaaccaagatccatcccagtatccatatccaacaccctacatgcaggaatgaacgttcctagcaaggataatcaagtgtcatcatctctgatcagtctcacacaataataattaatgagatagatcattaggcatgcaggggcatggactaatgtctataaaatggttgttggatcactaacaagtaacaaccccgtcttgttatggaacacattagctagctttagctagtgtagccatctaccccttaatcagtttgctaactggacacatggaacgagccactaaccaccttttaactcgcctaatatagatctctgctttgttaaatcatatgtcatctcaaaggagagcatgaggcacactgagattattgnggtggtggttctctacgaacatatcatatctttgat

SEQ ID NO: 1491 - DNA, 308 bp, Oryza sativa
ccttgttaccccctcacctatcacctttcgccagttttttttcttactgtgctagtgggcatgtcttggtgaaatcggcaatggcttggtgaaatcttggtctattgcttttccagaacttcacagcaggctcgctgctggatccttggtaacatgcctcccatttgctgcgggtggtccacgacagtatactgtcagagtccctacgtgggtcgaattttgtattactcggagggggaggcttctttccacgctagggcttgaagttacccctgataagtttctgcgctttttgaccccctgaattg

SEQ ID NO: 1492 - DNA, 401 bp, Oryza sativa
  unsure (1)..(401): unsure at all n locations
tggatttctgctccggctntcttaacgggttctcctaatgggcaatactcatcgctccgcgccttggcggcctcttcctattattcaaagaaacacaaaaccaccaccaggaagaaaaataacctttntacaatcaaccctaaacgaccatctccccatacccatcctcattgttccctatgatccaacaaaatagaacaatctccctctggatgaagccagcaggtctcagacaagagtagtatctgtggcttcatcgaaaactatcagccaaaatccaaataaaatgcatcatagacccagtatcatccttcactgggaactacaaaagcaacatccaacttcaacctggcgacctctgcacacaaaacccccgatatatcagaaaagaaaaccccctt

SEQ ID NO: 1493 - DNA, 373 bp, Oryza sativa
  unsure (1)..(373): unsure at all n locations
cccagatgattgttctgctggttgtttcttataatcaccacagatgatgataaaggggccgagtctttctctgcgtataaaatcttcaacccagatagccccgggtatgttctcgatttcttccttaataaagctatagctctgcttaaacatgaaaatgaaaagcagctaaggaaaatcctaccgtgcatgctgatccatcttgaacctgaaaccttttttatgaagatgctccttcggtacctgtattatgggagatatgctacgttacgactgcgtgatgcactgcagcatacgtcatcgctgcatgattattggcctaagaatatggtatacttatgctacaattattngcctgataagtaccggagct

SEQ ID NO: 1494 - DNA, 421 bp, Oryza sativa
  unsure (1)..(421): unsure at all n locations
tccgcanatctccatataacagcattaaacctctgatgatcatatcttgggcatacgaactccgaatcgacccgttcaagtctcttaatgtttgttataacctaaagaaccctgtgctttctttntatgtattgntattgcttctttataggcttgtagctttgcttgtgtgcttcgcgtagcttctgtcgtcccggaagttcccgaagcgtggttcgtggtcgtcgccgaaggttcggaagtccgttctctctgagcaaggcaagtcacatcatccttgaacatattgaatcccagtttgtaaaattatgttgatttaaattattgcattaccgctttatttaaattcccgcgttatcactgttttatctagccatgcctaattacctttngtatgaccttattattgntattggtatta

SEQ ID NO: 1495 - DNA, 73 bp, Oryza sativa
gctgaagatgaacagtttcggagaggtgatgttgtctttcggctggctgagaggggggaagggggaatgttgt

SEQ ID NO: 1496 - DNA, 473 bp, Oryza sativa
  unsure (1)..(473): unsure at all n locations
aaactcacttcaaaggtattgacacttgaaacccttctggtttgatgttgccatagattattttactatgctcatttgggtgccaaccctcatattgctagagcattcgatggactttcatttgaaaacaagatgcattgggttgctatggtcattattgaaaagttccctggatcaacataagcttcttggatgaagtggataggtcttttggtgttatgtggtggtggttggcttatttacctattatatgtaagactntaaactgccaatatgtttgaggcagagaacttactagacttaanattgctatcatgtgcaagaattaaaatgtgctattatgtgtaagaccttcggctgctaatatgtgtaagactaaaatttgctattattatgtgtggcttggattatatgtgccctgtgaacctactattgcagcaattagtatcggcatacatgacgtttaataaatc

SEQ ID NO: 1497 - DNA, 406 bp, Oryza sativa
  unsure (1)..(406): unsure at all n locations
cttactacaagaattgaccagcttttatagaaatcttgcttaaattcatcttgtgcaggcccataaactgccaccaggttccattggaacgcatcttctttatttcttaagtgaaacttaatatagaactctccttcatcgatactagcgacatcaaagagttctaaatttatcccaagtaagatacctccacttctcccttttggtctagtccaatgccaaagaaaatctttccctccacagatgttatttaaccatgaatcagcaaacttatctttacctggttgtaggagagcaataaagtctagcttttgctctttagataactcagaaagaaacctaganttagccaagtctttgagacctctgctattctagaaaatacctttcataatgaccctttttt

SEQ ID NO: 1498 - DNA, 490 bp, Oryza sativa
  unsure (1)..(490): unsure at all n locations
tagttcctgagcatctgggtttcttcttttccccgtctgctcttccctccagatggtctacaccaggactggcaaccgcacgacaggcgagggcagcaacggcgaagaacgcgtggatggtgtgcaccccaacagtgattctggcaatggtccgccaccacttcccgagaatccgacccttgcccaagttatggcacatcagactcagatgatggcagccatgatgcagcagatgcagcagcagcaccagcagatgcaccanaggatgatgcagcacgccgaacagcaacaccagcagtttggtccccctccccctcagtccaagttgccagagtttctacgcgtcaggccacccaccttctccagcaccaccaaccctatggaggcgaacgactggctccatgcaatagagaagaagctgaatctnctgcagtgcaatgatcatgagaanggtcgcttttgcacacaccagcttcagggtcccgcgtca

SEQ ID NO: 1499 - DNA, 372 bp, Oryza sativa
agcttcttcttgaacacccacttgcaccccattgtttacacccatagggtcgctctgtcaccttccaagtcccggtagcgataatggaatccatttcactacggacagcctcctttcagtagtctgcatcaagagatgcatatgcttctgaaattgacttaagagtgtcatccacgaggtacacagtgaaatcatcacccaaagacttagccgtcctttgtctcttactccttcgaggagcttcactgacatcctcctcagagacaagttcatgtgtatgttcagtttgttctgtgggtgtgattgaactgcgaattatttcagagggttgggtcgaaccactatgtgtatccttcatgggaaaaagctctc

SEQ ID NO: 1500 - DNA, 489 bp, Oryza sativa
  unsure (1)..(489): unsure at all n locations
taccatcacctttgctccactagtgacaacaagacctatgaacatgcgatgtgttagagaactaatattactgaaactagaaataaaaaatagatatgtataaagaatttgacggagcagaacaaggtttggaatacagcaaataagcagagttccacgcagtaacaaatataaagcaaaagagctaaaatacttagggcaccaatagaaatttttttatcccagtgatcattcattntatttataatagatatcccgaaacacataaaacaatagtataagagggtatgcagaaaatacaatactatatacaggcatagggaaggtaccaaatcagtgaagtgccaagatgagctaagtaacacattggtaactgtaatgtactaatgtagaatggaatggcctatacaacccattaagtcaagggttttgcctctttnccacgtattatcagatcaatcacttgaaagttcacaattcnaactaaca

SEQ ID NO: 1501 - DNA, 428 bp, Oryza sativa
  unsure (1)..(428): unsure at all n locations
agcttgatatgcttatctgaaacaatctatttatattagtggcaaatatacatgaaacaagtgaaagagacatgcatattatgtaagatcggctaaaacccttatactattcttactatatctaattgcatgctagtttgcatggttctaagcacgactaaggatgatgcatctcaaagtatgaaaataggcatatagtctagacgcatatagtctagacaatcaagtaatcaaacacttttcaggatgctagatgccttagctaatataacctagcatatcaatttagccgaaaccagcataaaccctaaagcgagcagctgccgataactaanacactaagattagattaaccaagacatatgatagccacgactcgcgatatcgagtctaacatgtctaaatggacattttatccccgatagcgc

SEQ ID NO: 1502 - DNA, 196 bp, Oryza sativa
atcgaaccgaccaccactatatggccggatcgatcgaagttctggtactacgctcacggtggaacgcttaacccagttgatggctccctggtgttcagcgatcagatatgcgaggctgccgatcgactaacggacgcagtggaagcctctacgcagggcacgttccgacccgacagagagaatggcgagctgtttt

SEQ ID NO: 1503 - DNA, 436 bp, Oryza sativa
  unsure (1)..(436): unsure at all n locations
agctttaacaagagagcagcgtggatcttcttttttatgagtggntgagcctcattggctaatcttttctcgcactctttatctgagagaccaatgaaaccacaaaagaagcagaagtgcggcaccctctcataacgaagattgaaccttctgatttcctcaacacctttgatcttgattttgattgcaatctgtcttttcaggggacgattaaccgggagatcaacactaatgcggaagaaatcatgcttgttgctgccatcatgctgcacatcctctttcctgaccttgcctgagttactcccatacaggtcacctctagctttgttcatcattactaagggcaagatcatatatccttacccaaattggcactgactccaaggtgaccatcgatggactcaaaaggccattgaaattagctacaatcagagca

SEQ ID NO: 1504 - DNA, 443 bp, Oryza sativa
  unsure (1)..(443): unsure at all n locations
tcctagattcatctatgagaaattatagaagcgagcataatttcagtttgctatcccagaattctcatggaaacatttatcagagtggcattgcatttcaatctcctgaggaaggattcgcacagagcaactctcttactatgttggatatgctatctaccggtgagtagtatgaagttatattacgctgcttgtttaataaattcttaatgaacagtgagatgcattttagtactgcagttaatgtttttattttaatatttattntatatatttgaggtaatattaatgtgtcacaaaacaaatagatgtgttcgctaggatacagaagggatccaatgtttgtgcacccattcccctcttttaattcaatgttggcaatcttgtaacatatgtgatagaggtgtggagctattaagtatataatgcactgcactcttatg

SEQ ID NO: 1505 - DNA, 282 bp, Oryza sativa
aaagcattactcctctgcttctaactcttggcttgttctcttactgatgctgcaatgctgctacactacttgtcaatggggtaatttgtaagtgctaatgagtaatggttttcaaattaaataaggtcatcaattacctctttgagatcatttactctcttttcctaattggagcagcgttgtggaaaacgatgttaacggccattaatacgtccgataatacggatacggagatcagtccgtcacgtcacgccgatgccggcatcattagtcggtaacaaa

SEQ ID NO: 1506 - DNA, 377 bp, Oryza sativa
  unsure (1)..(377): unsure at all n locations
tgatagtggcgggcgacagggagaaaggcgtatgcatctatgatgatgtaaccacatcgtggtgtaaatggagttgatctcgaagatgatgcggcggagccgcgcgtgctcctccgcggaggagaggcagagctcggggacacctgaacacatcgacttttgagtagctcagcagggatggccctgagctcgagggataggagctgggccagcgtgacgaggcggaagccctagccctcgcgcacatatgtgaagacgacgttgctgttgtagttgggacctggccgtaccacgcgtgcacaagtccatgacgcgagcgctncangccgttgtgagcttttccccaccggctaacaccattcttcccaccgattcac

SEQ ID NO: 1507 - DNA, 263 bp, Oryza sativa
agctggtggacgcgccgccatcgccagatcggttcgccggatcagaggagctccatgcttctccaggctgctgctgattgagagagagagagagagagagagagagagagagagagaaacaggtgttttttttcaggaggaattcatcaggaatctgctgtgctccttttctctgggagagaagcaaagagcagggacttcactaccccctccccccactgatgagggagttgtgctttgcctttcttgcatctgaaatgatg

SEQ ID NO: 1508 - DNA, 431 bp, Oryza sativa
  unsure (1)..(431): unsure at all n locations
tctcctagtttatgtacagaataaacagcaaaatccaagatgtaaatgcccccttttttttttattgtcatgctattttcagggatgaaaagcatcaacttctactaggaatcaggcgtgctaacagacaaccgactaatatatcatcttcagtactttcaagcgacagtatgcacataggagtccttgctgcggctgcccatgctgctgccaacagtagcccttntaccatattntataaccctaggtttgcgtgctgactttatactcctgtctgtattgtttactgtacattcaatagctaagttgtatagacaaaactgaatagctctgagtattgtgttttgacgtgtatgaactttcagggccagtcctactgaattngtatcccatttgcaaataccagaaggcactgatagtaatcagatatc

SEQ ID NO: 1509 - DNA, 354 bp, Oryza sativa
agcttctgatccaaaacagcatttgatttgttttagaaaccaaaggttggttttcgaaggcagagagctctctcgcaatgatagccatatccgtgactatggggtgaggtatggaagtgtgcttcatctcgtgatccgactatcagatccacgacgaaccgctgtgaggactgtttatggaaggaagtttaaattccaagtggaccaacgtcgaaatgctagatatatgaagcaagagaattcaagaaatgttgaaagtcccaatggtattggagagagcatgactctggtcaatggtgaaaagcttgatgaaagcacattaatcttcaccatttgtgagaccaacacttctga

SEQ ID NO: 1510 - DNA, 460 bp, Oryza sativa
  unsure (1)..(460): unsure at all n locations
ggctacgttaataacaggtgccatacgggaataatgatgtctcttgaaccatactgctcacatgttgagtacattatatctacgaactatctgcattgtgcagattatgaattactccctctgtttcgaaatgtttgacgccgttgattttttaagcacatgtttgaccattcgttttattaaaaanaattaagtaattattaattcttttcttatcatttgattcattgttaaatatatttttatgtaggcatataattttacatattttacaaaagtttttgaataagacgaacggtcaaacatgtgctaaaaagtcaacggtgtcaaacattntataacggagggagtatgtattagcagcactagtatctagtgagatacactttggaagaaaatactgacaaatagacttgtagctgagttccacatttgtaaaacctttgtataatgatgctta

SEQ ID NO: 1511 - DNA, 367 bp, Oryza sativa
  unsure (1)..(367): unsure at all n locations
tgggataggcgagactatgtctcgttttctgaacaactgacgangtcaaaacctggaccggcggcccgctgaattataaagaaggattcttcacccagttagccaccgatgagctggcaaaggggataaacgaagaggtggtgcgcgcaatttctgccacacgtaatgagccggagtggatgctggagtttcgtctaaacgcctatctcgcatggctggagatggaagaaccgcactggttgaaagcgcactacgacgagctgaattatcaggattacagctactactcagcaccatcgggcggaattgtgacgacacttgcgcgtatgaacctggcgcggtgcacaaactggcgcgaacgcctttt

SEQ ID NO: 1512 - DNA, 263 bp, Oryza sativa
agtaactatacaattagtggggaataatttacaagatatttgattctcaatgccgacattttctggatctaacacaacttacatttgtaggatcgaatcataagaactaagcccaccagaggggggtgaatggttgatatatccaaaaaccaacacttttagtggaaataaaagataccctcaaatcctatggatcgcggtctgaccgaagtggatgcgccggtctgaccgatgtaaatcgatcggtcgaaccgccgagaacg

SEQ ID NO: 1513 - DNA, 486 bp, Oryza sativa
  unsure (1)..(486): unsure at all n locations
tggagtagatctcggccttggtcggaataccaaacggggctgagacctggttctttcccgactggtttggatccgagtcaagaggagagatcttgccaaagtcgttggtgatgaagtcgaagctgccgaaccgaaacgcctgcccgggagggaagacgaagtcgtcgatgccggagacggaacccatcgtactgatcggcaagaaacttgacgctacccctacctggcgcgccaactgtcgaaacaagatttcggcaatactaaaagggggtggctatcaagctaaaaaagtggatgggtttgaagacaagggaatttatacaggttcaggccttcttattcaagaagtaataccctactcctgtccgaggatgattccgccgagtgtattattgattgtatgatctgcgagaaaaatcgtgttcctagagggacccggacccctncttatataggggaagggagtcgtattacaaatacaacaca

SEQ ID NO: 1514 - DNA, 371 bp, Oryza sativa
ttcctggggagttatacatctgtgtattgataagaccgctcacaatttcttgaagctcgatctcccccccagatgaaccatatagccaagagaaaccatgaaccagaatagaagagcttgccccacccatgagtaaatatttcatagtagcctcattagaccgtagatctctcttggtatattcagacaatagggtggaacataaactgaaacattctggagctacaaagatagttattaaatcgttagcaccacataaaaacattccccctagagtagctgttgatacgaataacagaaactctgttatagccatttctgtacattcaatgtactctacggatagaggaatacataaaggtgaacataat

SEQ ID NO: 1515 - DNA, 498 bp, Oryza sativa
  unsure (1)..(498): unsure at all n locations
tatgccattttcaatccaatcgtggatattatgcctgacatacctgtactctnttttctattagcctttgtttggcaagctgctgtaagttttcgatgaaatctttactactctgtctgcccaattgaatcatgtattcattctaaaaaaattcgaaaaatggataagagccgagaagtcttatattatgaaccttcgattctaaaaatcaaattcttctacattgaatgtatagctgcagcaataaatttggatcagcctttctactccctgcatctacgttgagcaggtatctttaggtaaccgcacaatacctaacctaatttattgataagagtgcttattataaatcaattcttgcacattttttcaaacattgatttttggcattttaggtgtcaaaataaacaaaacccatcctagtggatttgtgtggaaggaacaacgggtatctattccttaacaaaaaatcttggagattatgtaatgcttactctc

SEQ ID NO: 1516 - DNA, 392 bp, Oryza sativa
  unsure (1)..(392): unsure at all n locations
gcttgctcgggctggaggaggaagaagacatatatttggggtgggactttagtcagatcccggtgatctttaataccgggtggtaacaccaaccgggactaaagttatgaccaaccgggactaaagatcccagggggcctgagatcaaatatgcccgttaccctttttaaccgggactaagatcggtttttattgcaaccgggattattgtggaaatcggccgaccgataaaagatggtttctccaccagtgtgtacgtatccagtggactcgggctcctgggcgtgccacgcctgacgtgatcgatcagtcccttggtgtatgcccttgcgttggccacgctcgtgcgngaaccctcccgacaacgggcacccgctctccgacagcagcac

SEQ ID NO: 1517 - DNA, 493 bp, Oryza sativa
  unsure (1)..(493): unsure at all n locations
ttattttaaagaccatggcttatttagctgaagataaagcttgattattaatattnttaaaataagtacattttaaataatgtagacttactaaaaaaacactttntaatagctatgccataaatagattaaaatatgatgatctttaattgaataaatctacatgttaaatgaacaatttaatgaagttggcctaatcctaccaaatcttttgaaatttctacgttcatgcataagaacatgctaaatggggcgcgccatttggcgcgagattntctagtatagtactaatatttatctgttcgacgcctccaaataattcgttctcgtgtagtcgtcagctacgtaccgaaagctttgcgctttgcatgcagcaccatcaccatctagttctactaataaccagtaagtccatacttctcgatcaactatggataaaatataacatgtaatttaatgcaactaaaaataatataacaccgatgttaaattc

SEQ ID NO: 1518 - DNA, 208 bp, Oryza sativa
  unsure (1)..(208): unsure at all n locations
tgatcaacaatagcttgtgtatctggaattcaagaaccaacaacaccacaacatttnaactcaactcctttgagagcactcattgtatcacaatgtacatcaaacatcacatgtacaactagttaatggcagtaattagagatggaattgtgataaaaaaaactacactcatgttttttttatatatatgacgccggtgacatttaca

SEQ ID NO: 1519 - DNA, 130 bp, Oryza sativa
ctgtatgaccacaaatacaccatagcatacaaatctctgctacaatcaacttctcgatgtggtttcatattataaccagacataatgtgagcgaagaaccttctgtaagcaaaattgcatatatttgcaa

SEQ ID NO: 1520 - DNA, 400 bp, Oryza sativa
gcttaaagccatgaatcccttttatgcatatctggatctggatcctgcagaacaaacatataggatgagtagtatctgatataaatataatactcgagaaaaaatcaagtattttaaaatatttataaatatgtatttctcctcttgtcaattttgatttccccgagcagatgactctgtacgtttaaacactctgcccgactagtcataaccaccaagcatcgggagtcggcctaggcacttcccaaacatgcatatgagtgatatgagttcgtcattaatggaacaaagtttcacggattagaatttactactcaggtacttttgcaattattaagagcagaaaataaatttatctcatctctatgctcttgattaattccgaataatacttagcacc

SEQ ID NO: 1521 - DNA, 346 bp, Oryza sativa
gttatttcatgtgtatgttactccatgcctcggaagagtatttgcggtgatggaccgggagtcggcttggggataagacgacgtccgtggtggtcagagatcatgcgggatacttaggctagagttgatgcacgtggttgatggagattctatatggcatacgatggaggtattgtgtgcgtgtgggatgcagagtcaaatttggaatgagtccaaatttggttcgattggttatgtaaagtttctttcttgtactagacggtttcctaatgtgtttaggactcttagtatgagtttggttcgtggctttaagctgcttaccttcggtataaatagagggggagcg

SEQ ID NO: 1522 - DNA, 397 bp, Oryza sativa
  unsure (1)..(397): unsure at all n locations
atttatgttaacttctggtcttgtctgcgtctctatgaacctagagttaaacttgttataaatgtttgaacttaaattatcaattcaatttggtttgatttgtcaagcaaaatattgtacatgatgcttgtttgtcgaccaaagtagaatggattntgcaaccctcactatagggccactgacccgaaattatatggaacacaatcctgaatataccatcttgtaccattgtcccatttcggcatttgtgttacatgtggttctaagcctgctattttgtgatatttattcaaaaattttatttatcgacaatggtagatagcttggtgtagattatttatccatctaatggaagggaaagtgatagaacaagttaccattctctcgtacactttta

SEQ ID NO: 1523 - DNA, 434 bp, Oryza sativa
  unsure (1)..(434): unsure at all n locations
tactcagctntaagatatctggttatatgggtgcaactgtatgtcagtgtggacgcagctacaaaggaaaccttgaaaactgtcgatagactattattttcagaattccgggagcgttttctggtaattcaaaagtacttccagatgtacaccatgaacataaggtttgcgtatactgatctgtattgttttccgtgctatttaccttgattttatgatgttgccctaggattcactgaagtctctgcatcacaaagatcaatgaacagtctaccggctgacattggttaaaggctagaatgcagaagagatagatggttatgcaaagttactgccttggccaatctgatttcattgaaatcaagggtgtaacatattgtggctcgtaagtgccttacaatcttctttcatgttgattgcaacctgtctcttca

SEQ ID NO: 1524 - DNA, 436 bp, Oryza sativa
agcttaagtctcggggacttcttatgcatctttacccgcgaaaatagagctactgtccggctggccagctgcctgcttgaatatataatatatgcataattaatatatatggtcatttttgtatatatatttcatggaacctactggctggcttttggccacttggcatgtgattctctctttcgagaggttttacacccatgcagctgcttaattagcatgtttggcgtgacgattttgatgcactagtgtcaactgtcaaacatgcatgcaccgtacttatgtgaatgcatgtgtatgaatatgccggaccggtctgaagggtgccatgaaaattggtctttattatatcctctcgtccattctgataggtattttagtttatccgaagtaaatttttttattttgacgagttataaaaaaaaacgctatattt

SEQ ID NO: 1525 - DNA, 206 bp, Oryza sativa
  unsure (1)..(206): unsure at all n locations
ntctttatctcaaatttacttaatagctaatttttatatgctntcaagatgccttattaatatatcatagtgtacttttagtctacttcgtatacattagcattgttatatttacagtgattatcaaatatttttaaggcggcgaccaataccctaagtcctagatacgccactaggtgcggggaggggggaggctggacctgtgg

SEQ ID NO: 1526 - DNA, 410 bp, Oryza sativa
agcttatgcccagtatgagtaagcggccctattactcgtcagtgggcaaagagggtggcgtgagtgttcaacctgtgtatataaaggctatgctgtaatcgagctagttatcgaattgaaaatagaaaaactaatccccaacaacctttgcttcttccctctctccctctgttcatctctcttcctccccaagtgctcggtcaaattcctgagagaggttgtgacaaaattggtatcagagcaatcggccctggagtatcttgagaagccacgctaccactgtcgtgctcaactcaaggtccatgatatggagcagcagttgggagatctcatggcagccatggaggcgattcaaaacataatgttgcaatccagacttcggtgggatcaatagaagatatcaaacccat

SEQ ID NO: 1527 - DNA, 449 bp, Oryza sativa
  unsure (1)..(449): unsure at all n locations
agctttattacaaaggaattaaaactgtaattgttctgatctgaattaaaacacttaaagagcaagcaaaaatccttattaagacagccatatcataggcacatgatatcgactgtcgactaaccccaaacaagcaacctaaacacacaaattaacaagcagaagctagacagtcgataaactaatggaaaacgagcctaatgctcggaacggctcctgcggtcggtggagtcgaagacgtcctcctgctcgtcaccaagtccctctgagcgactcccggagcctggcagataagtctcgccactgcctgactctgagccactgggagtagcagacaaccaacctccattgtcactggctggacccctggcggctgatgcgggagcgaaagagagagcggacgcangagctggagctgcaggaactgccggagctgcgggcggaactgg

SEQ ID NO: 1528 - DNA, 433 bp, Oryza sativa
  unsure (1)..(433): unsure at all n locations
tatctcttatgctccaggaatggatcagtcagaacatcacttccggcttgccgncgncaccgccgactggtgtcttcgcctatacggttggttggtcacaccaccgttattaggtgtctacatcttcaccgccggcttgccttcgccgccgtcgactggtgtcaccgcctgcacggctagcctattatgccaccgttgttgggcatctacgtcttcaacgaccggcttgccttcatcgccgccgactaatgtcttcgcttgcacggctggcctattataccgccgttgttgggcgtctacgtcttcaccgaccggcttgccttcgtcgccgccgactggtgttttcgcctatacggatggttggtcacacacaccgtgttgggcgtctacgtcttcaccgccggtttaacttcgcccgcaccgactgatgtct

SEQ ID NO: 1529 - DNA, 360 bp, Oryza sativa
agcttcgcgttgctcgctcgctcgctggctcgttgctgcggatgcctttctgctgctagatctaaacagcctcatgttctgggggtgcatgcatgcaatgcgaccagtgtcgatcactcactcgcttgctcacaagcaccagcgcatgcatgtggagctgggttttctttcgctttgcagagaccggtggaccccaaatcaaatgcattgctgctcctgcctgactgcaactttctttttttgggggaaagattaaccagatcagagatgagttgtaacggtgggagccaggggacagacacgtattgtgttcatttcgagtgctgctatacgtacgaatattattacgacgtttatacg

SEQ ID NO: 1530 - DNA, 287 bp, Oryza sativa
gacacatgagactcagctttctggacgccgattgtggcactagatctgtatacgatatcatatacgggtccgtgctgactgcagagtttaccatgacagatggatgcttcggacgggtggagttatcatcacaaatgacctgacctgggagaatttctgtcagcttgatcaacgtggttggagcctgtacggaatagctctccctgatctcggttgttgaactaatgctcggcgggaaggaccctaaaaccttagttattgaaatattgaagacccttgattgaaag

SEQ ID NO: 1531 - DNA, 357 bp, Oryza sativa
agcttcatgagttctaacacgcatgatatctttctgtgcttcgacatgcatccatcatacagcggcatctggcaatcttacaccaactgactaaacctctcataatctctgtcgttgacctctgcggcttcaatgtcatgcaacattgtagatagacattgagcgtccaaatctatggactctccacctaaaggagaacgaacgaacatgacttgttgagctgcggcggtgttctctacattctgatccaacacttcttgagatgcgacatcacgcgccttttgctctccatgcttgcgacaacacggatatgtcttcatgaatacattcattatcaaatgagcatgcacttcatcc

SEQ ID NO: 1532 - DNA, 192 bp, Oryza sativa
  unsure (1)..(192): unsure at all n locations
ggggggacgggcccccccccgccgntatgtagagcctcgggagagagccacacgcacgcgggacggaaccacaggcagaagccaacccgggggctcgggaaaccaaacgaagagcggaaacgcacccccgggcaacagcccgacggacggaaaaaagggacgcacacgaccgagggaacgcggccaaggcgg

SEQ ID NO: 1533 - DNA, 395 bp, Oryza sativa
  unsure (1)..(395): unsure at all n locations
cacctaaattcccgtgacttgctaagtacgattgtactcacccttgctctatataaatatatatagttcctccgtcctgaagttgaagatgaagtaaagtgaagattaagggttttgtcctggttcccagccgtcgcctgtggtgttgggtgttagaccgttggttccgctgctgctgttgttgttggtgtttgcctcgtccgtgtcgtcngatgcattctcnggctgtctgagctgcaacctaagttaaggtaaataagtcctctatttattttaaggattgtaatgattcatatttgtcaccgtgggtaccagcgctatgttctgngactggtactgagatcgcggtttcgtatggagcggttcgcgccgtttttctacgacacgctcctatc

SEQ ID NO: 1534 - DNA, 252 bp, Oryza sativa
acgacacagacaacggccacagagacactcgcccaaccaagaagcaaaggtgaagggcagaaaccaggcacatgaagaaaagcgggcacaaagggatgagaaggggggaacaccagaaatccagaagataagagcgaccaccggaagacccgcagtcgcaagaaaagacgaaagacagcccacagtcagatccgagaccgaagacaaacaagggcgtcagcacaaagacgagggcaacacagaacaccagaa

SEQ ID NO: 1535 - DNA, 360 bp, Oryza sativa
  unsure (1)..(360): unsure at all n locations
ctaagcttggagaccgagaggcaaccaagaaactgccaagcatgctactctattgatgaaaacatccactcgtcctgtggcgaagatcaggaagtctactaggtgcaactcatataacgatcttcctcgcattgatgcgcacccattgcggtaataatactgatatagatccgtctgggaaagactctgtcccgactaacatggacacaagttcttccaaagaaaccgggccaactgttgaggatcatccaagcgacaatcagtcggcaaccgataatgtanaatccggtgatcaacccccgactagaaaccagtcggacgaagccgcagccggagttaatcatgagcctctgactggaa

SEQ ID NO: 1536 - DNA, 152 bp, Oryza sativa
accagacacgcgggacgccagagggcatgcgagaaaaaaacacgcgaaaacaaacaacaaaacaagaggaaagccgacgaccagaagaaagaaacaacggcaaaccaagggacttggcggacgagcatcgaacacccgaacggaagaaaaag

SEQ ID NO: 1537 - DNA, 471 bp, Oryza sativa
  unsure (1)..(471): unsure at all n locations
tgtgtcccatatatgatggagagccactattgttgtacatcagaaaggtgccgaaccaacgcggtaagagagaaattcgcaatgtgaacatctgagatagaccagacgggtcgtccgtcaagcaagcaacacccccccactccggctgaccgcaggcaagaaagaataatccaactcgaggcctagcgcattaccaacctctacgcgccaagaatcaatatatgggacggttgctgcacaaccatgcgaatgttanttanttaattaattagtactttattatacattgtcatgcatgcatgatcaattaaattcttgtgcacaggaggtaggagagtattacaaccgtgcgtacgaggggctgaaaacacaaatggagtctacgatcgccgaagaagcgcttcggaattatctcatccttataataaatggacttttctttttgttaacataacttaatctggataaaca

SEQ ID NO: 1538 - DNA, 387 bp, Oryza sativa
tactgaatatgcccgaaccacctccgcgatcggcgctcggcatagtgggcatttgccaccactgcgaattagctcgtttgcacattttgagcaagtacacatgtgcccgcatctgtcaccatcaccaaatgggttttacaagtacatcagacaaaaaaggttagagatgagtaacatcaaagtatcagacatgtttagctgtgaagctgacctgtataatagagaatcaatttgcgcatcgcagcatacgcagcatgttcccttcctcacttgatcccattgtgatacatcgtcagatagaaccgtcggataccctgataaataaaagggacaggttggttcagtgatttctgtacatacagagttgtagcgaaattactgtatgac

SEQ ID NO: 1539 - DNA, 478 bp, Oryza sativa
  unsure (1)..(478): unsure at all n locations
agcttacgaatcttaagattccacgatcgacaanatccggttatttatttatgcgcaaacaaacaaaaacctaaacaagagacctagaaaaagaccctatttagactaaataatagtgccattaaatagatctcaattctatggaattactggaagtggaacggggtcaatcggacgaatggatcgagagatacgaattttggaagtttaatagaatttctggcgaaggaagatatctgtagaacaaggggagaatgattcatgancattatagaaataatattctcaagaatattattgaccatctctgacatgcgggaccacaggaaatgatttataatgaaaatgattcatgacactttggaatagagaattgtctatgggatcagggaaaaagattattaacccatgaaataagataaaataatctactgaatttatagaagagagacatatttgtggaatattggaaagacat

SEQ ID NO: 1540 - DNA, 343 bp, Oryza sativa
  unsure (1)..(343): unsure at all n locations
attggacaatgaccgacctcactggaagtaggtcatacctacaactaccttattttctataggctttcacaaacaaatagatgaatcaaaataagtatttccataggtgataagagggagcttgcatgttctattgagtactgaccgacaaggcataattaggataacattcttatttatgccagggcaaaataatggagttgtctaacgaatgatgattgatgaatccttttgttcttctctttctttttctttttccatccatgcagccggttaatccgtcatttntaagtagtcaaacagctatagatcatatgagtagcagttagtgggccaagatgta

SEQ ID NO: 1541 - DNA, 405 bp, Oryza sativa
  unsure (1)..(405): unsure at all n locations
actcagcttgtctatacctggcgcanacagcacatcaatagccaagaagtctttaagttcttgcgcaaatctgatggccaggaataacaccaaaagcatgctctataggcctcccccaattcctgtaaacaaaagcggatatcatcagtaggaacagtatcgaaatgttttttttttggggggtcagggtttcatctctgttctttnttcgttgaggattttgttgacaagcatattancctgtcacggatgtaagaggatttcgttctctgccatatacagagagtcgtcttgttcaaggagacatcgattctgtttgtaaatactacaatgaaattttcattggactgcctgtggatgatgaacagccttctgtcgaaatttaaagcatatgtctgcagtaca

SEQ ID NO: 1542 - DNA, 488 bp, Oryza sativa
tcacgtcccactgtggctggaccaaacgagttcgatgtatttttgccgactttgagcagtctaggtgggtcaagatgacaacattgggggatgagcaggtgttgtttctagggcgaaggtgctccacggctatgtcagtgtcgcagtatgggatgtcaggcgatcagatcttcttcttggatgacgaggaggagaacctcaagcagtattattacagcacggagatcacttctttctgtgtgtgtgatatgagagacggtcaggtcgactcctctctgccaaaggcctcctggaagcgctgtgacgagatgcgtccggtggcatggctattcccacaggactgtagccaacgttgtaatgcatatgcaagctgggtgcggcttatgttatccgagtccactgtctgttgtgtggtggcatcatcagtatttgccttgcctgaacttgtattttgggatctctattatctgagcttggattggtcgtat

SEQ ID NO: 1543 - DNA, 316 bp, Oryza sativa
  unsure (1)..(316): unsure at all n locations
tgtgatcttaaatagaaaataaacaaataaaggaagttttctcctttatatgttaatatgctaacctgcgacgtacatgataaactatatttccaacatgtgaattcacatggcaaacggggacccaaagtcaaaataaaaccgcaaataaccccggggaggagcatgcatgggaggatggcggtaagaatacgggtgtgctccttgggaagaaaggccacctacataannaagtcttcgctagtttatagtggcacccacagtctctctctctctctatattactcaaccactctcatacccatcaaaatattat

SEQ ID NO: 1544 - DNA, 374 bp, Oryza sativa
  unsure (1)..(374): unsure at all n locations
acgtcatctaaccccccatgcataaacctttgctcgtcccgagtaaaggacttgcataaactaaacttagttgttgatcaagagttgctactatgttgtccatctcanaggtactaagtgcatagttgttgatggctcttaagtaccaaattcatgccatcagtacctgcataaaatggaaagcataaaacatccaacatagtggtagggtatatttgtaacaatttccacgagtgttggtgtatatttggatgtagatgacaaactaccaaagttgagagaaaatatacatgaagaacaaggagagtcaaactcatatccaaacttacgaagttttggaccgaatagcccaattaaactaccatggcaatgga

SEQ ID NO: 1545 - DNA, 480 bp, Oryza sativa
  unsure (1)..(480): unsure at all n locations
attcttggagaaagcctcgtagaacttggtgtattctttcttgttctcagcgatctcaaagaagagctccacgcacttcttcacaaggttcttgcggatcaccttcaggatcttgttctgctggagcatctcacgtgagatgttgaggggaaggtcttcagaatcaacaatgcccttgacaaagctgagccactctgggatcaactcctcacagttgtccatgataaacacccggcgtacgtacagcttgatgttgttttgcttcttcctggtgtcaaagaggtcaaatggcgctctctntggtacaaacaggatggccttgaattcaagctgaccctccacagagaagtgcttgacagccagatgttcctcccagtcgtttgtcaagctcttgtagaaagcagcgtactcttccttggtgatctcctctggcttcctcaaccaaatgggtntctgcttgttcatcacgttccactcgtg

SEQ ID NO: 1546 - DNA, 237 bp, Oryza sativa
  unsure (1)..(237): unsure at all n locations
accaggcaacagcgccgtctgtcgaacnnnnnngccgcaagccgccgaagggccgggggcatacttgcgcatgtgctcgagtgcttcgactcttacccccttcaagagttcgagcgacacctcgcgcccctctttgcccctagagaacgtcacccttggtgagttagcccctagctctgttggggtcattgcctcatcgccataaagaagcatgaacgggctgaactttggtggtct

SEQ ID NO: 1547 - DNA, 459 bp, Oryza sativa
  unsure (1)..(459): unsure at all n locations
ctttaactgcatcanaccaatggcattcgatttactcaccgtgttctgattaccacccgattcgatagcgataatcgccgtgatcaattgtggatcgacgccccaggctgcaccggctttctggcttattggcatccactgcatcgcacgttgcaccggaactttcgcgttccacggcgggttcgtatagtcatgctttgatgaacaacccgctaataacacaatcaaaaaggcaaaccatctcaatttcacttcttctatccttatagcctggaatcgccgttgaggtgacaacggcacacctaagcggcatgatatacatttcgtttctggtgtcagcaaggaatggccatgtctctgtttcacttaattgccccatcgggttactgcattaaacagcacgccgcgctgcgtggtatccagcgccttaccgacgcggtgcatcaagtcaataacgtc

SEQ ID NO: 1548 - DNA, 495 bp, Oryza sativa
  unsure (1)..(495): unsure at all n locations
tctatacacagttaagatacctggtgccacaacagatcattcttggaaagtagatacgttggctaaaatgtcaccattttgtaaggtggtatttcttggcatgattgaggatgtctacaggctgcatcggtccggtttatgtctgaatggaaagttctccttgaaagatttttgttggactttgagtcaaaaggtgaagtttagtgctgaactgaagaggtctgtgttacggaggaaacttaaaagaatgagactggattaccaaaaactttgcgaaatcatgatagaagtgctggaggagtgtaaagttaaaatccccgcagatttggaatatttgttggaccttatgagagatgacccagtgaaacatcagttcttgataagatataatntctgtctcatggatgacatcttgaaaagagaggagactntaaccatgttcactcaatatgagcagctcaatagagaggacagagaaaagcacggaaagacaac

SEQ ID NO: 1549 - DNA, 283 bp, Oryza sativa
  unsure (1)..(283): unsure at all n locations
attttgaaggcttcggacatccgtcagaaagcatttttgagaaaatatgagtgacccctacacatacacctacctactgagaataccgcattggtgaccataaaaaagattagaatgctctcaacacgggacaagaggccaagcaaataaggatctggcgtatctgaactggttatgattaanagattgttcgttcggttccttatagttctattttctaaataagtgggcactcanagagacacggtgaccagctttttatgcattgctgccaccacacgag

SEQ ID NO: 1550 - DNA, 442 bp, Oryza sativa
  unsure (1)..(442): unsure at all n locations
tcgctccctcccagctgtgagccattcataatgaatttcaacatgaacaacctgaacaggaccttggcagaattgcatgtgacgctaaagactgccgaggaaagcattaagaaaaactccaaccatgtgatgggtatgcataagcgcaagccaaacaataagaagagtggtcaaaagagaaagctaaactctgatgagatcacgactactagcaactctaagaccaaggttcanaagacagggccagctaaggatgcagagtgcttcatttgcaaggagataggtcattggaagagaaactgtaagaaatacctagagcagctcaagcagaagcagcatgatggaaagagttccacctcaggtattaatggttatagaaataatcttgctacttcctatactgattcttgggtatttgataccgggtcacttgctcacacat

SEQ ID NO: 1551 - DNA, 238 bp, Oryza sativa
  unsure (1)..(238): unsure at all n locations
ctgggcggcggccgacacanngactccgtcagcaactttgcttcgttaactcaaaccaggggccgcgaagaagggtgagccctgcgggcttgaatcaacgggtgcgccgcgcctcttctgacggcttgtctcgcgagtctcgagaactgtgatgctcgcgacgtataagaacactttggcagggtggagtgagagcgcatggagcatactgcaagtgtgacccacctgcaaaatgacg

SEQ ID NO: 1552 - DNA, 416 bp, Oryza sativa
  unsure (1)..(416): unsure at all n locations
tataaaactcagctgagtgactggagcctcgcatgttntcatacatttcttcgattcactaggcctagttagttccaacttttcttcaacttcaacttttcatcacataaaactttcctactcacacaaacttcaacttttcatcacatcatttaatttcaatcaactttaatttggtatgaactaaacacaccctagtcagcctcaaataaaaatataatacaacttcgttatcactatgtaccggccaccactactagatacacatagaaacctactcctcctattaacagggaaagctcatattatctgctattcacagaagaacgttgaatctggaggataactaacacgctgacagagaaccttaagatgctgtttggatgatggtgaatacgatcaggaatttaagatat

SEQ ID NO: 1553 - DNA, 472 bp, Oryza sativa
  unsure (1)..(472): unsure at all n locations
gagcgtgnagaggatatgacaataccatgantgactgttattatattatagcaaattcacaaattctatctttaatctatactgctaattcccaacttccttctttgccagaaatttttagaacttgacattttgatggagaactcatcacatgaaacaccagtttatgtcatcactgaagggagtgagccccaatttttcaccaggttcttcacttgggactctgcaaaatcagccgtaagcttaagcatttcctagattccaatgttttggcatcgtgtaaacttcangatcaattacctcatatgttgtcttataaactgtttcagatgcatggaaactcatttgaaaggaggttatctatagtgaaggatggagtaaaccaacattagatgtaagatttctacaactgatattgatgatngtctctggtaacttgaatctcgtatcttctcttgcctactttctatga

SEQ ID NO: 1554 - DNA, 362 bp, Oryza sativa
  unsure (1)..(362): unsure at all n locations
gtacaatcaaggcacaaccttacaacttgttacagtagaacaatacaattaggcggaataatgtacctaaaagatccctctgatcattcatccctatttcaacatctaacaatgcaattttggaagaaatgacctaacaacactacagtatgaaactaagatgaaaagagcagaaattatggggcattaccttctctagaggatacgctgttttactgcaagtggcacacttctcctgtgtccctgaaaacatgcgtgcggctttgctaggtgatcttgtctgaaatgaatgtttcagacaaaattagttgaanagcgaggtagcatcacatagaaacatagaagtactttggaatgaaaac

SEQ ID NO: 1555 - DNA, 456 bp, Oryza sativa
  unsure (1)..(456): unsure at all n locations
ctaagctgccagaccaaacaattagtaccaaagcaggcacagatttttatattaatgaaatggcacacatcacagctgtcaaagaatcgctccatcactcttcatcctcagaatctgcattatgatagcatccgataattttagtgataagatgcagtcagaaaaaccttagctattagaattcctggttcaatgaatgttcgattctgtatgttcttgtaacggaagggagctcctaacatttgcaccacaacgacttgccacatggtgatctaatcaacatgtgatttgtttatcacatattgcccatgctcatgtgaaaaaatngaaggccagtgtttattatttcaatatgtaagccattgggatctcccctattgaggcagattctctttatttttatttatggatgaacaaagggtaaacataaaataacgaatatagatcaccaacgag

SEQ ID NO: 1556 - DNA, 462 bp, Oryza sativa
  unsure (1)..(462): unsure at all n locations
taagcttacgtgtaccgatacaatgaatcggttttgtctttctttttttaatgtgaatagtaatagatcggcttgaatagcctgatcttttctaacccgtgtacagtaagctttggtcaatcaaatctttctgttgccgtgtggaacaaaaaggaaacaatgtngctaatccggctgctgctccctgtgtgaacacagtttaacgtctagccgtgatcgaacagaacaantaagcttaagctttgagacaaaaccaatgtctgcgacaataataattacagtgtatgttaattccggctgtttagccgaaactaattcgatgattcgacgaaacagtaattattagaataaacgaaatttggccgtagtatggccgattagatcgttccccagcgaagtcaccaaaaatcgtgttggaactttttgtgacangtcgacangcatgatcacaacacctaaacg

SEQ ID NO: 1557 - DNA, 353 bp, Oryza sativa
  unsure (1)..(353): unsure at all n locations
tcatatattgtaatcgtaacgaaaggacgaaattatgacagattttaaatcttaaaactgtcaaaattttcacttttttttgtacagctaatatatagcgaatttgaatataagactgtgtagatatgtgtaatactattaagagtacatgtcatatgttttctagaattttccgtgatatttggctgttaatgtgcacgggaagcttgtgcggataggatatgttctccataaacatacagttaanagcttaaaatagtaccacgttttcagaaacacgctaccattattatttttgcctattggcagcttcatatttagcgttaaataataatattattgatcatctatca

SEQ ID NO: 1558 - DNA, 493 bp, Oryza sativa
  unsure (1)..(493): unsure at all n locations
tcttcttgtcttccttgaagtgggggcaatccttgatgtgatggttatccgcaatgaagtgcccgggctctttgcacacatagcacacccttgcggagtgtcttccacttgacttgttagaggaatacttggacgaacttcccttaaagaagccgctttgcttcatgaacttgccgaacttcttgacgaagagagccatctcttcatcatcgatctccgccttgctcttgctcttgcgactctcttcttcttcttccttcgccttcaatgccaagtcttccttcttgatgattgtggttgaggtttggttgatgtattggatggcctccttggactattgctcgagcatgtcatgggcaaggatacgcccgagcaagtcatgatgtgtgagagtcttgtagtctcgacgctcacgaatgatggtcaccaanggtagagttctttggagtgatngtctgaaccatcttcttgaccacaacctcatcggtcatgt

SEQ ID NO: 1559 - DNA, 297 bp, Oryza sativa
  unsure (1)..(297): unsure at all n locations
acagaggagaacaaaaattgctgggtgcctcaagcccacagagaaaangggcaaggggtcacgccacacaaacaaccgtaaagcttagaccagagacccgaggcctgacacctgaaaaacaacccaaaaaaaacagtcataaaaggaactgcgagcaactcccgcgacacactcatggcacaagcaccacagacgaagacactgttcgagacaacaaccccggcgcacaaacaccacgagaaagacaaaccaagcagcccccgggaccaaagagtgacagcaagcaagactgcacag

SEQ ID NO: 1560 - DNA, 407 bp, Oryza sativa
  unsure (1)..(407): unsure at all n locations
agcgagctngtatgtctaggctcgaacgagacatatgttttttntttgagcctatgccaccttcgagcgtttaaacatgctcggttcaagctctacctcgatcgtaattagtataacgtatatttctcattggataaaaatgattatcttctaactaatcacactaataaaagagaataaaaatgatgctaatgcatgctaatttatcatggaaatacatactaatatatattcgatgtctatctatctattatatactaaaagtccattaaacttactacaaacgctcttaagtcgccatgtggaactcctacataccgtcctagatcgaccggtgattttcatttaaattggtggtcccgatattctaaccattagaatagatatgttattagaaataatacctt

SEQ ID NO: 1561 - DNA, 484 bp, Oryza sativa
  unsure (1)..(484): unsure at all n locations
ctcagcttatggcagaggccgcgggccgtctcactgaaacaggttgttattccangatgcagcccaatagtactcgcgcagcatgcctcacggtacaaggtacggctggccgacgtggcgtgcgatcacacggttcgccatttttccggcccacccattgcttctgcttttcatnttggaataagttcactttagttctctcaatttgtccttcagtctgaaatttgtcatgctggtatttctatcatgaatagctggtattgtgacatcccttaactcacagaaccatattaactntgatctctcgaaaatattgtgaccagttttagctgacataacaagtgtgacccacgtggacctcacatgtcagcgggccatctattcttcatcctgggccgaggctagtcgggctagcacgactcgacctacatgtcgggctaggccgtgcctgcacatgggctgcacgcacgacccaataagtctc

SEQ ID NO: 1562 - DNA, 422 bp, Oryza sativa
  unsure (1)..(422): unsure at all n locations
tctccgcggccagtggcgacgctaccctacgcggcgtctatatatttncacacctctcccgacgcctctcgacgtacggcgagggtattnttatctctccgaccaccctccgccctcgctcttcttccccccgcacacgaagaatttctcgcttcgtttcatccccaccattttttttttgtttgacctcgaaagggaaagcagaagaagaaaaaaatatcccaaaatatccccgaaattccaccacctgtagcagcagcgatcgcgtgtgttcttggttccaattcgtcgcctgatactccgattcgagttcttgatcaaagttgctggggttaatttgggttcttggttgtgaaaggcgggagggggggtcatggacccggcggcggcgggcattgtgaaggaggagatgctggagtcgc

SEQ ID NO: 1563 - DNA, 472 bp, Oryza sativa
  unsure (1)..(472): unsure at all n locations
tcgagacagtggtacttgaagttgatcggcaatatatttattgggttttaagagaatgtcgaggacaactgtatttattcaaagtttaagaatgagagattttttttcctaattctgtatgtggatgacattctactggccagtagtgatgtcagtctactgcaggaaacaaagaagttcttgtcctcaaactttgacatgaaagacctcggngaagcttcatatgttttgggcatagagattcaccgagatagaataaagtatgcattgtgactttctcaaaagacatatatagaaaatgtgttgaagaaattcaacatgtacagatgcagtgctacacctgctcctatagtgaaaggcgaanaatatggggcatcgcaatgtcccagacatcagtatgagctcaattaaatgaaaacaaagccatatgcatcagctgtaggaagcctacagtacgcgcaagtgtgcacac

SEQ ID NO: 1564 - DNA, 480 bp, Oryza sativa
tgactctccttggtgagcctgttacgtctagacccagtattttaaataaaaacattctgagttgagagagtatgctgacaaatagattaacaacatttcctctctaaaactccaacaggtttctttctatagattagtaactgtatcatacaacgcattcgcatgcacaaacatttatataacttgaaataaatctaaagttgggaaagttttgcaatatgacaccgctcgcagggctccagaatgttgaatttcacactggagggaactttgccctcaatatatttcttggcaacctccacagcactgagggcatggagtacatctaacttattcatccttttacacatgccactagtgtcaaaaccatagccagcgtccagcttaaggcattgtagcgacgaggcatttctcaataatagatatgttagctcaatcaagctctttgacgggaaaaatcggttgatggatactttctta

SEQ ID NO: 1565 - DNA, 482 bp, Oryza sativa
  unsure (1)..(482): unsure at all n locations
ccttctctctcacactgcatacgcaagcataccctatatactatataatctgcttcccaaaaacagagagagaagggatgagaagagacagcacaccatagatttccagtggacgccaaaatgaccgttctgcccccacaacaaacactgtgcttttcgctttcatgttcttgccaaccacgcacaccggaacacattccttcctaaccgcttcctgtgtctcaatgttatccttgtataaaactaaataaaaagctatgcactatgtcatcatatgtaaataaatntctaagttctggtgagaaacatcaacacaacattcctcattataactgtatcactatacaaaacaaaaaanaaattggtcttcgcatgtaattcagtctaaaattattattattttcttcagcaagctnnttggctcctttgaaacaaagtcatgaaatattatagaaaaattgcatatatagttctttggataa

SEQ ID NO: 1566 - DNA, 357 bp, Oryza sativa
  unsure (1)..(357): unsure at all n locations
agtgtgtttcgtgtcctataagaactttatattttccttttatctttaggaaggtttctttcttgtccgacaagaacttgtatcaacccatgggtataaatatgtacacctggggtcattgtaatctatcctcacaatcaatacaattcggcgcatcgccaccttttaccttttctactttattttatcgtccggcgggacttggcacctgacgcggtgctgcatcggtgttcgatctccagtgaaagggtaagtccaatgttccgtcggcccangcaattgtatcatctacatcggcgtcgttcaaggctgcatcantacattcgacctcttggatggctctggtttggatgatat

SEQ ID NO: 1567 - DNA, 476 bp, Oryza sativa
  unsure (1)..(476): unsure at all n locations
gaagatactggttgaagatgatcacgatagtgagtgttgtatgtgctcttgaaggaagatgagtcccctagttctttntctttcgttgagaaatgcaagttggatgattaacaatcaaaagtttatgactaagatatttgagatatctgttagatcaaagttttggctttggcttcatgtcaaaggattatttggcttcttttgtgctcgagttcaaatctatgaacaacaatgtcatcctgagcggaagcagttntgtcgtgattttgttctagattatatgcgtattaatgtcgtcgtgtcaagaatattntcgtatcacattgcacgggcatgactagaacatacgatacagaattcaagagaaataaccaagaattattaatatgccatgaactaccattcanacggatcanattggcagagcctcacaatgtatgtctcttgtcggccatatttaactgaaacataaacct

SEQ ID NO: 1568 - DNA, 292 bp, Oryza sativa
caagatactaagcttgcgatatgatgtgtccggtcgccgacgcggggagttttattttttcttcccacacacctccccggcatgatgctttgccccacagcgttctatgctaccactgtcatgaaaaaaaactcaattttttgagcccctgcgggaaagttcattatttttctacaaaaaagtttacctatgactcactaggccactatgtaaaactaatgtgcgtgacttgaaacttcatttgacaaatataccccattttaaaaccctataagggattgtatatctttgt

SEQ ID NO: 1569 - DNA, 400 bp, Oryza sativa
  unsure (1)..(400): unsure at all n locations
acggaggagangaattacgagtgggaatnaactaagcatatctgcaaatgtacgagcatattgctaattacgagcacttgcagtgagagaagagaactaacgagacttgtgatacatataattggcgaacatatcctatgcatgcaagcttcccatatacaccaactagcaaatgtcatgaaaaattctagaaaaaattgggcatttacttctagtactactacacatatatgcaaagtctcatattcaaacttattatnatttgagagaatcccttatatgccactagaatttgaccagttcccttatatgccactcaaaattggcttctcccttatatgccaatagttgaagttttttcacccttttatgccactcacaccactatagngttagttga

SEQ ID NO: 1570 - DNA, 324 bp, Oryza sativa
  unsure (1)..(324): unsure at all n locations
tcgagaatcgcgagatcgttcgacctgcattggtttctcgcttgattttatcatggcgatgcgttgcagttcgggcaggacgcgtcggcggtgagcaacgtgtggaacttcgtgctgtctgcgccggacgccggcgggtacatctccgtanggttctcgccgaacggngggatggtggggagcagcgccgtggccgggtgggtggcgtctggcggcgtgggcaccgcgaggcagtactacctcggcgggacgagctcccggtcgtgcccgccggggcaggggaagctgtcgctgtcgaccggcgccgccgcgccgaccatcgtg

SEQ ID NO: 1571 - DNA, 508 bp, Oryza sativa
  unsure (1)..(508): unsure at all n locations
tataaaactaagcttaacgaataatttaaataaataatataacatatattttattattatcggttataacttatcaatntattcctacagtgatatcatactattattatattggtacttgtttgtaagtgggagctaatgaggagcaaaaaaaaataagaaagatttaaatcaaaattttagtatatatgtccaaagtgtatgacatgtgatcaaactcatccaacttatatacaaaatagataaaaaccactatgtaaaaccatcttagggggttatataaacattattgtaaagtttaagggttgaatgtgcgattntagagttcagagtgctagacggactattatctaaagtttaaggggttatttggatnnttttccataatataatcaatgggggttgtggcctatnggagccttggaacaagggatgtgaggatctattgtggtaaatatataaaagaatatattatatntgtagatatgttgcaatgattataaatgag

SEQ ID NO: 1572 - DNA, 486 bp, Oryza sativa
  unsure (1)..(486): unsure at all n locations
tagctgtatacatattattgcgttatgagaggtatgtttattatttctagtgataatttttcatgcatttcatacagggtggagatggcagaaagtatggaccttgtgtgggagcacggngaggattttgcacctggatggcgttgtaagtattgccatcagaggaagaaaggtggtggggccacacgactaataatgcacttgggacacaaagggaagggggttacatattgcaattcagtgcctccggatgtccgtgatttcttcaagcgtgaattggagaggataaaacaaacaggtgacaagcgtcagaatgatagcaatagaagggttgaagcggcaggggtcaactattatgacctaacaggtgatgccgacgaggaggaacaaatggaagcagtcatggcagcctcatgacangaggaaaacttcatgagccacgtggaggagcgtggtggcacttatgagcatggtggtgggagtgga

SEQ ID NO: 1573 - DNA, 317 bp, Oryza sativa
  unsure (1)..(317): unsure at all n locations
ggccgaanncacaggaggcatgccagtggtcggagaccacgcaccactcaagatgggccctgcatgcaaggagttgcatgggtactacatggagaatgccaacacatgaacgaaaaatagagagacctgcatgttgggccatcacaatagtcagccgttcctcgggccttctaccttcatcgctgtagacttcaaagatcgatgggacctctatagggtgcgagcgatcgacaccaacctccttaagtgctactcctacgaagtatttctggggacgtgatattnggagaactacccataaattacgcttacccgga

SEQ ID NO: 1574 - DNA, 456 bp, Oryza sativa
  unsure (1)..(456): unsure at all n locations
taataaaattgtctcgcggtttacaggtggattctataatttgttntgttattagactacatttaatactttaaatatatattcgtatatccgatgtgacacatcaaaactttacatctctaaatctaaacacggcctctatattgcaatcaaacggagtaggtacatctaacacaacctctatatagcaatgaaacggagtaggtacatcttacagctgcattgcattacgatatattctctccgtcccaaaatatataagagattttgggaggatggaacatattctaatactgtgaatctggacaggcttctgtccagattcatagtattaggatatggtcacatccatctaaaatatcttatattntgggatggagggagtaatggactggacccatgcctggtggctggtgcaatatatatacgtgtcatgcatatgaagttgatgcatat

SEQ ID NO: 1575 - DNA, 478 bp, Oryza sativa
atattttaatacaaagagcattgttcactggttctgtactaaatttattcactcaaaaaggatgtaaaataaattagttatgaatctttgaagtttacactttttttagttgggagggcatattggtcatttaagaaaaaactaacatttgactaacagtcaacaaacataatagtggtgggagtggcataaaagggtggaaaaacttgaaccagtggcataaaaggaagaagccaattttaagtggtatataagggaactggccaatttcgagtggcatataagggattctctcttaatataatcatagatagatggtgaaaaaatatacaattttgcctcttgtccattcttttccaaacataacactcaaattacagaagttttattcgtatatttattcactccattatatcatactcatgcatatgcagataccaatataaatcatcaccttttattggtttttaaaagacac

SEQ ID NO: 1576 - DNA, 377 bp, Oryza sativa
  unsure (1)..(377): unsure at all n locations
actgtcgctcgtgacggcgcgcctttcaaggcttatgctangttagagattacgaaacagtcactaattaagctcattcatgataagctagtatgtgagcagagttcgatcgaagctttgtttgtaacatgcggtacagttccatangcttgagaggcatctggaatctgaacacaagacgcggcaggttgcgttgtcaattgtcatcatgtcctggtctctaatcaagctgcgaggatcctggagaatggactggaaggttggctatgaactgccactgttgcatatgtggngaaatcatgctccctgaagagatgttgccgtcagattcattaatgaagttattggtcatgagaacaagttcttcttgatcaatc

SEQ ID NO: 1577 - DNA, 485 bp, Oryza sativa
  unsure (1)..(485): unsure at all n locations
tatgctgctcctcgccggctacgcaggtccgaacatatatgtctatatcttgtgtgttccccatttcctttcttgtttttactattcaaaaattttttcccttcttgttttgtgttttggtttgttcgatttgctgtttttctactgcttgtttcatataaaggactgaatccggatatcacttgtagcatgttagggctcctttggattcaatgaaattcctacggttttttggggggattacaatcgttgagagaatttttctatcagaagtcagaacttactcttagaacaaagaaatatgattgcaaaaatcgtataggttttttttttcatttgccttattcataggatatatattccctctntgtcgatctattctctccccttaatccgtcaaagtcctatgattaatttcgtatgaatttcagattcctgtgttttgagtttcttcaggttttgcacacacaaacgttccgatcttg

SEQ ID NO: 1578 - DNA, 392 bp, Oryza sativa
  unsure (1)..(392): unsure at all n locations
aacagatggacganggagttttcgctcctaaataatcggaggatctagactaatcacctatctaattcaatcaatgtataggatctcctagtaaacaattctattaacttgtaacccagcagctcaatcgtttcaagtttctagattacgaagaacagtgtaattaatatgccaaatgaggtaccaattcacgtgaattcctaagatgactgtcctgaaacagagaagaaaaatagaaaagattgttttctagcctgtaagctaatgcatggaaagcataaaaaacatcaacaatattacacaatatgatgcacatttcagaanagcaatgatgtgaggaaggaaagttgtcacatgtgacaccatgcatgcatattgnattaacctactct

SEQ ID NO: 1579 - DNA, 428 bp, Oryza sativa
tggtggaagaatacacaattctcagcaccaaatgtgtttacttaagaaaattgtattgtttaaaaatgtacattggagcgccatggcattttttttttattatggtatggcctacgggtaacaggtttaggagccttaaataaggtatcctagtgtttaagcacatttaattagcaggaaaatatatataactaatacacagaattatactaaaaagctggaagcatggtaaaaataagcattcggaatatggaatctgttctcattatatatctatgcacagcgaaacataaaaagtgaatttgcaatattaaacggctccataaaaaacttacctgcaaatggtgatagggtattctccttgttgaaatatggtggatgtgtcaggtacttgacaatggcttatgtatgcaactttgtgcatcagt

SEQ ID NO: 1580 - DNA, 489 bp, Oryza sativa
  unsure (1)..(489): unsure at all n locations
ttgctcccagccaccaagtatctcatctaaagtcatatgtctaccatcccacactacatagtatgacagctcgattaaatatttcttctctaaagtcttctttaaagcagcagcccctatggctggatcttctctcagcttgttgataaccttgtccttaacccaagaattgctggtcatgcaattattctccaatttgcctatgctagcacacatatgctcatatggcatcttctttatctacagtagaaaagggacagtacacaatgcatcattgtccagttgcaaaacagaaatgacaaagaagtaaaaaaactatttagctacatacctgccaagttctaccatctggcaacctagaagtatggatcctctattngcacctctatgccttacaataagccatgtatcttgtggcctcagagtanggaactgcangttcaacctctttcagaaacaacatattatcttatacacctcttaaaacaa

SEQ ID NO: 1581 - DNA, 405 bp, Oryza sativa
  unsure (1)..(405): unsure at all n locations
tatatcgatcgattcacctgctattgcccggcccatatgatgtctgttttgcaccggntcttaattgggccagaataagttcattctaggtacctcactttcacgttgaggttgagttattatacattcttataaaccacagtatcaaatgtaacgcgtacctcaatttctaaaaccgaaacatccgaaatctcctggcagtactatgcctggttttagctgatgatgagttgattgcagtaaacctggctgagtcagtaacctagtccttcttcctcctctctaccctctcttccctatctctctctaggtcttcagtccgatggggaaatggagatgggctgcggtagatgggagaggagccgggtggcatccggcggngagaagagcggtgatcgacgggag

SEQ ID NO: 1582 - DNA, 494 bp, Oryza sativa
  unsure (1)..(494): unsure at all n locations
ctaagctagtagccattntcagcttgttagctgagctcggctgctctcttgctgagcgtgccagagcattttctgcacaccgaggcctgcacgttcacgttgtgatagcgtcagcacgtccgggtcacacgccataatattatctctgtagtagtgcatactagctagggttggacttttttttaagaacggaaagagtatatatgggatcgatggcacatatgtgtacacgctaatccagatgggtcatgtgcttgtagtgtgcgtggactgcangcaacgaatacgtacatgcagaaaagctgcggcaaggttagcagcagcatcaaatcatcaaacaccttgcgtgcatgtgttactgtgttcatctggttgcatgtcaatcttgtgtttgagcgagagtgtgaatcggtaaaataatagctngcgagatcgatcgaggatcccggtgagaatggtatatatacaagtacatgcgcagctctagtgcatat

SEQ ID NO: 1583 - DNA, 367 bp, Oryza sativa
  unsure (1)..(367): unsure at all n locations
ctaagctagcttcaacctctcgatcgacgaggtacgacgacccctgtttatttctatctctngcacntatcggggggaggctccgatcaatttgaatatcggctgatggatcgatccaccgacttggcttcggcttcgcggtccgcatcggcgtcagagtacagcgggctcgcgcgcgcgcgcggcggcgagtcgccgtcgactttaccgaagctgatatggaaaccagacggatttcgcgacacacatgtagggccaacggtcgatcgacgctttgtgaggaggcgtgcattggaggagctggtacattgtgtcccacgcacaagttgagggatgacactgacgcgcgcgctgcggacatttcaca

SEQ ID NO: 1584 - DNA, 401 bp, Oryza sativa
  unsure (1)..(401): unsure at all n locations
gcagcggacattcttgagttaatgaaacacccacctccgacattagaaaggtagagccctcttttattggaataacctcttcccctagaatttactgggtttttttttcccattgcattcacaggcatcnggaagtttgctccatgcatctatttcttgtttagttgtgttacatgtgttgtttgttcagacttcaaaaacagcagttatgtagatggatacgccatgatgatctggacatgctaaccgatgagctagaaaggaaacgtgtgtttgacaatctagtcggctgtgaaataatactcggccgttcgaactgacccaattttttaacacccaaccccataatgatgcaggataccgaacattgatactcatggctgacacattttctggctaac

SEQ ID NO: 1585 - DNA, 284 bp, Oryza sativa
  unsure (1)..(284): unsure at all n locations
cacatccaggcnaggcagaagaaanggcccggncagnanggancactatacaaagganccactnggggagaaagcanccggcnaaagaggagagaacgctnncgaaacaccnctgcgaagnnnncagggatctntgccatatccttgtgtttgtccttttcttatctcacctggctatcaggtcataagtttgacattctgattgtttttatataggaaattttttactaaaccacctgagggtgatgacttgcggaagagtattcccttatcaaaattcatga

SEQ ID NO: 1586 - DNA, 439 bp, Oryza sativa
  unsure (1)..(439): unsure at all n locations
taactcagctnggtagactaggagagagccggtgccctttgtcatttgatagagttntaccttaccttaattaagattattgacccataggaatcatctctatcctaagcctaccatttagttgctatacttggatgaatcattttcttaggttatatacacactttccctgtgaatcaatacccttgaaatactctgaggtgaagtgcaacgtacgtcggtatccatgagtatgcggatatatctgtgaccgtaacaaataccaacacgactatattttcattntcctggtggtagtgtatgttttagtcttggtctttgatcaactctctagccatctttntgcctaagattgagcccagtcaaaataaaacatatatttagacttatgtagttggtgtaaacttcacatctatctacggctgtgttcgggaggtga

SEQ ID NO: 1587 - DNA, 165 bp, Oryza sativa
agacaagaacaacgcgaggatgaatagacgactgctgaatgccttccgaagcaagattaatgacttagaaaggaaggaaatgtacatgcttggcagacgctatacccggagcagcgaacaagccagaccagacggggtgaagcgggacacgaagcgtgtgacaac

SEQ ID NO: 1588 - DNA, 493 bp, Oryza sativa
  unsure (1)..(493): unsure at all n locations
tagtgttgattatatagttcattttaaaaaacaatattatttatcttatatgacttatattaaaaatagtaaatcttacattggaccacattttgttattattgatgtttagctctcgaccatcttttaattaaggttgtcacttaagactgaataattttatcttggtggtaccttagaccaccctcaatctttatttccatctacatccaacttgtcatatgtcaggaaaaaaaatctatatctttttttagataatacaatagaatatcccggcctttgctcaacgagctacagtcaanaaaaaatctatatctaactgtcaaagtttattggcgagtaggagccgacgtattcgaaatccgtcgtatgtttgagaagagagtatagtggtctaaagtgaaacacagcaagattactccatccaagatgaaaacattaataaaaggatggtctaaacaaaataatggtaataaaaggtgaaacacattaa

SEQ ID NO: 1589 - DNA, 474 bp, Oryza sativa
  unsure (1)..(474): unsure at all n locations
ttatatgctcccatattatcttattttgttgaatattaagcagttctcataacgctgttgtgtntttgtgtgttaatgcatagtgtttttgcaggttatggtacagtatggtttcacggaaataccgaagaagtatatcctgaagaggtggacaaaagatgctagagattcaatcccaaagcacttggaggagtcgtacttgaaggataaggaggcggcatcatcgagaacttatcggaacaccctcctgcacaagtctgcacttgatatggttagacttggtggtactagttcggaaacatatgagaagacagtggaagtgttgacaaagctgattggagaacttcatgtcatgtgtacttcgcaagttgtaaacaacaaggaaattcactgcggagatagaacaattgggaagaaacctactggtgtgcaactggatgatagtgtagacagttctgactcggagcctggaat

SEQ ID NO: 1590 - DNA, 389 bp, Oryza sativa
  unsure (1)..(389): unsure at all n locations
catgttctgaagcgcgaccactggtttgatgcggttgcggtctctgctgaggtatgtcgacttatattgtcatttcttcagcattatatgcttttccatgcataccatgctcgtgtcatatactcttatctattctgttgaagtcagctttatatataattctcttattcccattaataatctacaacaggttgctgcagaaaagccaaacccaacaatatttctgaaggcatgtgagtctttaggtgtcaaacctgaagaggccgtgcatgtcggcgatgatcgtagaatgatatatggngagctagagatgcangctgcgatgcctggctatggngaagtgatgttcactctttcagggangtatttcttctgtacaccccccaaca

SEQ ID NO: 1591 - DNA, 443 bp, Oryza sativa
  unsure (1)..(443): unsure at all n locations
tctgctctagactggcattgctggcaaggagatgctgcgtttttgttttaataggaaggtttcgacttcagtcgggttgcatcagatgagctgcccttttttggggggctcccacgagcttcgatttccttcataccgatggtcatattggcggngtgctggcaatgcagcttaagataatcaccggaacatgcaatggataaggaaatgtaactacatttgtggaggttttgatgcttgccgaatgtcgatgggggcatcgtgaagcttgcctggttttgacctgagaatggctctgattacggctgaatggtgtgtcagatgttgcgtggggtttgacgtgatggtgacacgcgtgaattgttgccgagtggagagaagaattgagggcgggagatttgtggcatggtaaccgtgaaggataatttggagcacaaatgata

SEQ ID NO: 1592 - DNA, 350 bp, Oryza sativa
ttccactcgggcacagggcgagatcttgcaatagcccatactcggcccttcagggactcccctttatgtaacacttgaaaattttgatatagatgcctcacacagaatctttgttcagcatcagataactcccttctcacagctggaacaagcccctggaaacgaattataaagaatcatagttaggaactaaaatgtgagttatgtatattatgaaaaaaatcagacaaagtcataccttctgcctatcagtcatcactgtccatgcagatgtattctcaatgccaaggtcctcttttagagtgtcaagataccaactccagcttttcaagctctcaacttcaactact

SEQ ID NO: 1593 - DNA, 465 bp, Oryza sativa
tgtgtaagcccgcttcacgatatttcatctggctattttatttgatttccaacatcaagccttccttgaagatgatactgctattgatttgtaaatcatgacaatggaaactcagtcaggatcaaactggcaactgaggtggtttacaaggagcaacctatcacagttgactgttgcgttcaccaacaagaacaggcatacacaagtgtaactaacacaaacaaacgtgccgctgtgcgatgtcacgagtatattcatcaatcaccattaaccaagctctcagagaagtaaaatccttatgcatatatagtgtcatgtaagttcgacggaaccaagtggcattcatgtatatctcttgtcgcagtaatgcagacctgttggtcatgcaaacctgacaagtaagaactaacaaatatgaatgtatgatcgtagatatccatatgacattcaacacagtgtagatat

SEQ ID NO: 1594 - DNA, 498 bp, Oryza sativa
  unsure (1)..(498): unsure at all n locations
taaaactcagctggcgtcatgaaggctaattgggatagatgtatttttatgaatttaactngcacaatcacaaataatctaaatatatgggagtatagtgtatatgcctaataaagagcgatcgatcgaatcatgcaagtatgcatgcatctcttcgccaaaaagaaaaaggaaataaaatacatcataaatggacggagctaactacagaggtgagaacagaacanaactatatatagctctaggtcaacgccctggaatttagcacgggaatgtactaagttaacactttgatgagtngagattacgacataagctagacaagttgctcgcagccactggttgattgattgctttcaagcattntgtgtttctttaaaaacatactccaagctagcaagagcacagacgtgtgcaaatcatcacgtgtacgtgttcatttgcatctgttccaagaaaataaaataaagtactcttgtagtaattaactacatacat

SEQ ID NO: 1595 - DNA, 423 bp, Oryza sativa
  unsure (1)..(423): unsure at all n locations
ctcaagcttgtcgangatgctgacttgcctatattcggtgcaatatcttatattatctcttcttcaagaaagaatcttctgctgataatgcaccgagatttgttattgccttcacaggcactataactgagaaggaaaccatctcaagggatatcgcccttgacctccaccttgtccaaaatggtctccatcggacctcaagatttacaattgcaatgcaagctgtccaaaacgtcgcctcggttttccctggctcaaacatctggctagctgggcactcactgggcgcangtatggccatccttactggaagaaacatggttaataagggtgttgctttggaaagctatctcttcaacccaccttttgttgccgccccaatcgagaggataagtgatgagagagtgaagcatggtttccgca

SEQ ID NO: 1596 - DNA, 453 bp, Oryza sativa
  unsure (1)..(453): unsure at all n locations
tttatccatgctgcagnacattacatcattttttttctcaaatcacgtaagacataaggtactaaatggagttacccgttaggtcttccatgtttggaggcttcacgtcaacaatattgaagctctggntatttatctccaaattccatagatttatacgcagatcatctgctgatatgtatgtctcgccatcactgacaattaaatganaaagagaagcanattagcacaatgttcacaaattagatcattgaacaagtatatggaatatacaggtagaaaaactgcagataactctattgcgttactgttgtaatataaaaaagtgtatgcctctacaacaatggtttgcactgantttaaagctgattcaatgtgtcatgactattgcactgactattgtgtttacaataagagcaatccatgagaactggatgctcggctcgatattat

SEQ ID NO: 1597 - DNA, 354 bp, Oryza sativa
  unsure (1)..(354): unsure at all n locations
gcgcgccacgggcgatggtggatacctgtagaccggacatagacggtattgnggtacgctggtacgaggatctacgtagtacgacatcaagcaaacatgaaacagggattatactggttcatgccccttggtaggtaatagccctaatccagttgatatgggattatatgatggaaatcacagattacaaagggaatagtggaactcgatgataccgacgagatcgtagtcgagttggtttgactagatcacccggcgacttggctcctgtatctccggcttcgtaggctgtgatggttgtcttggctgtgagattcgatgccttatgtcctcccggatggtcccttttatacc

SEQ ID NO: 1598 - DNA, 486 bp, Oryza sativa
  unsure (1)..(486): unsure at all n locations
gcgctgatgatgctcagccactctgtattcaactacctttcttgcaactggngatccaacacacagtcagggcggtcataaacagcagcttgcacactggccataagcttcgcaatctctctgccagagaatccattgatcttcctggcagcctccctgagcaaatcatcacttatgtccttaacttgtatcttctgccgttgctttttcagcagtgagtcccaaaacgagttttttccatcttccttgagcatatagtggtttaagtataacctgagcagctggaacctctcctcctccccaggtaaagggaactcaataacttcatcaatgcggtccgtaatagcagcatcaagatcactangtcggtttgttgcaaggacaaggacaatatccctcgactggtctccagttcgaaatagtagtgcattgagagcactccgctgagcttcgctcatngtgggtgctgtgcgcctagtaaagtgc

SEQ ID NO: 1599 - DNA, 267 bp, Oryza sativa
agaacgaagagtgccgctgaggattgttttacaagccagatatatgggagggcccaacccaacagcaagtgtcgtactgcggcatagaagctgcagctgcgatacgttcttgaggcgcacactgacaacccgggatacatgaggaatatgacaacaacgcctcttgaaagagcattggatcgagatggattatggacttgacaggttctttgaataacactcgtggtaattaaaaaaataatgaatttgattcaattgaacaaatca

SEQ ID NO: 1600 - DNA, 457 bp, Oryza sativa
tcttagcaccagcgctttctggggcacactattgttataatcagtaactcgaattacaaagatatcctagtggatcacgatgattcaaagaccacaagtaaaatcgtatacctgcattcgccatatgtcaatctatcactatgggtgctcaagcaggaaaaaaaaactaagttccatctgaaatatcacattctttcatcctttgattagttatatatgctaagaggacacatgcgcgcctttctgacaacgtatccttcgattattcacacacaactgtacactgttacacacttatacacacaataacaagaattcacacaaggattggaaggacaacataagaatctttagtcagctgcataatatcgtacagaactatcaccttccaactctggtaaatctatctgcagtgcatggatgaggagtctgtggcaatatgcatctatgctgcact

SEQ ID NO: 1601 - DNA, 456 bp, Oryza sativa
  unsure (1)..(456): unsure at all n locations
tatcgtgcacactccatgcaaatcaactaccaaatgctatgtattgttatataaaaaattgagtaaatttcacaaaactacatgtattttgcacaatttatcacataactacatattttagagcttgttttacaaaactacagctttagtgtctccgtttatcacaaaactacaagtgctttgtataatctatcacaaaattattgatttagtgtattcgtttatcactgaacgacacatttagtgtcttcatttatcacaaaactacagatttagtgtcctcattatcacaaaactacaggttttagaaatggagacactaaacctatagttttctgataaatgaagatattaaatctattgttttgttaaacaagttcttaaatatngtagttttgatatattgtgcanagtacctgcagttntatntatacgaagacactgaatctatatttt

SEQ ID NO: 1602 - DNA, 360 bp, Oryza sativa
acaaatcacattttataataccaacccgccgcattaaagagaggacagttcaaattgtcagctggcagtaccttcaacctctttcaaggccgagtccctttgcgcagctagttctactttgtctcttttcaaggcttcaatctgtttctccatttgagccatcctggtagcttgcgctgtttgaaatccaaatgtttgaggatacagctatgacagcataaattaatgggacagatctagaagattaccttgtgatgaaccacttagctcgaagttcgaatcctggagctgggcaattcggtcccttaactccttctctgtctttttggcatactccttggcctcatgcagctggtccct

SEQ ID NO: 1603 - DNA, 112 bp, Oryza sativa
  unsure (1)..(112): unsure at all n locations
ggaccgncacgcggcgccaaagccgccaccacaccgcacccgggaaaagtggcaaaaagccaaaaaaaagacgatgcgcattgcccggattcccacttcgatcccccctcac

SEQ ID NO: 1604 - DNA, 470 bp, Oryza sativa
  unsure (1)..(470): unsure at all n locations
tgaggagcggtgggagtgattggacggagcaagggatatattcttggcggnggcatgagcggaacaagaggagcaacgagggtatagtaggcagcgagcgccggaagggattcacgagagcagtatcgaaccttcttggtggagcggcggcagagcgaccttgatgacgagagcctttctctccccctctctcttttggtcattnttgttttaattttctacatttacccatcattaatacaccaaagttattgtacaggataaactcaaattgataattattttttttaaaaaaaactcgctgaatttagatgaattacttcgtaaactgctcgtaccatgaattntagatggattctcacagtgaaaaaaaatgataacaatgttaagcttatctaaatggaaggacatttcttccacaagttctagctggtaatcacctcaatctttaaagagtactcatacgtaga

SEQ ID NO: 1605 - DNA, 498 bp, Oryza sativa
  unsure (1)..(498): unsure at all n locations
tctcttactgaagggaggggaagatagagtaagaatgagtacttttacagtactcagcaagtcacaccgggagatgtatgattaatgcaatatggtacaacgagtaataatatangggttaagttntgcagtaaacagcatttaaaagtcacttagttgctcaaagctattatataaaggcgatcctagggcgacacaatattattaatcaaggccgtgaacccgcacgaacctgccttaacccaaggcctacgatgattcagaccgaactagcaacccgacctgtgtcctagctcgtcccaagccaacccaggccaaccctttcacattttagttgttaatcaagttttaagaagtaaaccactaacttangtacattgctaggcttgcccgtaaccgacggcgcgactattcgaatagaatatactctgatcagaggtgtacatctntacccacaagacacgtcttcctcacgtgtaaccacgcacaacataccac

SEQ ID NO: 1606 - DNA, 361 bp, Oryza sativa
  unsure (1)..(361): unsure at all n locations
aaagaccngcaagggctgcagcatgcaggacaacgacaagcatgagccanattattggtgacatgaacactgctgctgatgctgctgctcaaagacaaagccatggcagggcagcagattgttccttccttccttccttccacaaaagcatattggaaagaataaaaaaattgagataagtagagtaaaggtaatctaatccactgtgcactaatcagttcttgcaattatcagttgtgcctgcccatccatatgccaaagccatatactactaggtttatagaatgaaagaaaagatctgctagctacgtctatagtaaccacacgacatatactcctacataggcaaagatatctaaag

SEQ ID NO: 1607 - DNA, 443 bp, Oryza sativa
  unsure (1)..(443): unsure at all n locations
tgttcgagtagcatggtcaaccctgtcagtgtgtttggtcttttctcgagtggagctggtagtaatatgaagaaacctactntgcatgaggttgttggtgccaatgaagtggaaataagaagaagctccatgggcctttccgagatttgtgatgatgctgcaattntggcccacaagcttctagggaaaattctggacaacacgttgcttgcagaaaacaaggtcaatggacttgccggatactctcttgatggttctacttcgcatggtcctcaaggtacattntggaccaccattgaaccttcattgttttcgtttggtcttggtttgtttagcttgcaatgcccttcaaggttcatatgatatatntgccatagatcctgcagaaaagaaccaaaaagctgacattgtgattaaagctattgagaatgtcttaccgaatc

SEQ ID NO: 1608 - DNA, 485 bp, Oryza sativa
tgacaccatcttctctgggtctccatgggcgagaagctatctgctgcggatagtggcatcgccgacgccgacgagcacgccggcggcggcggcggcggcaagcggagctgcatcgagagcaccgacaattacgaggtcacgtgctggctcatgaagggcgcgttcggcgccgtcatcatggcgcgccaccgcgcgacgggcagggacgtcgcgatcaagttcctccgccgccaccgctgcggcatgggtggtaaggccgtcggcgaggacgcgctgctgcgggaggcgctctacctcgcgcgctgcagccaccacccctccatcgtccactaccacggcctcgcgctcgagccgcgctccgggatgtggggcctcgtcatggagcacgtcggccctagcctgagcagcgtcctgcgcgagcgccacggcggcggcggcgggcgcgccgtcacggaggaagaggtgcgccgcgtcatgctgcagct

SEQ ID NO: 1609 - DNA, 86 bp, Oryza sativa
  unsure (1)..(86): unsure at all n locations
cacacagancgacggaggcaagcgacncgcncccgncaaagagnncggnggggaggggcggcgggggaggccaccaggcaangggc

SEQ ID NO: 1610 - DNA, 464 bp, Oryza sativa
  unsure (1)..(464): unsure at all n locations
tgatgcgctgatgatgctcagccactntgtattcaactacctttataagcaactggggatccaacacacagtcagggcggccataaacagcagcttgcacactggccataagcttcgcaatctctctgccagagaatccattgatcttcctggcagcctccctgagcaaatcatcacttatgtccttaacttgtatcttctgccgttgctttttcagcagtgagtcccaaaacgagttttttccatcttccttgagcatatagtggtttaagtataacctgagcagctggaacctctcctcctccccaggtaaagggaactcaataacttcatcaatgcggtccgtaatagcagcatcaagatcactangtcggtttngtgcaaggacaaggacaatatccctcgactggtctccagttcgaaatagtagtgcattgagagcactccgctgagcttcgctcatg

SEQ ID NO: 1611 - DNA, 367 bp, Oryza sativa
  unsure (1)..(367): unsure at all n locations
gttatctgcgcatacgcgacagaagagacatggtgtgaatcagacatatcaacccttatatatgtactatggctgtttatgtcttgcaaagaatgatttggctatctcgatcttcttttctttggtttcagactntaagtacagtcatgtgtaaatgaactttaacatgattcattatcgagacgtatatgcatacactgattaaggattccttgaaaagttaaaagagttgtcacgcccggaaattcactagtaatttccgaagttatttatgcataaaatcctcgtccagcaatcaaccgaggtacacaaactgacaatttaatatacaaatccatcataataataacgttacacacttacaaat

SEQ ID NO: 1612 - DNA, 424 bp, Oryza sativa
  unsure (1)..(424): unsure at all n locations
tgtttgaaatcattttgaaatcactaagtgatttatttctttttaggtttgggttgaaaagagacttgcgtctcgattcggcttaagagatgcttttcaacaactcaattggtaatgtaccgacctccaaggtcagatcattacttctcggctcccagagccatttcacttgattaggcggctcccagagccttttcattnttgtggactcccagagtccagctgcccagcagcacaacaatccgcttccactcgggaagcctagtctatgatgcccgcagacatcccgaatcacacagattcgtttctgaccactcangtcatccatctgccacttaggctgattctggttacgaatcccaatccacaacaacttttcacaaagcacaggcaaacaaatctacgcaacgggaaccacctcaca

SEQ ID NO: 1613 - DNA, 267 bp, Oryza sativa
  unsure (1)..(267): unsure at all n locations
agcactcgaccaaccaagcaccagccaaaaatatggaaaaaataaaagaagagaaggggcgaaagcaatatgctgatagaagaatcgtgcaaaagacgaatcgcgcgaatggaaaacaaggggagagaagataggaagagggagtagcgaacatataccctaagtgtgtatttgggattgagggttnagaaaccctggtcggcgacatgcaaaacggagcagcggattagcgcatggtgaattaagtatgagataaaaaaagaaaat

SEQ ID NO: 1614 - DNA, 490 bp, Oryza sativa
  unsure (1)..(490): unsure at all n locations
taattacaacggtacataaatccaatgcatttaaccagtattattcatcttgaaagtagtagcatttattattacaggatacacactacaatgatttcaataactagatatgagtatatagctgaatggataaaatggcatggtaaaacagtgaaaagattcttacagcatttccacccatgagtggaaccagtaaggtggggatcatcacagccgtccccaggcaaaggatgtaatgctggaaccccagggcaattgcctcccctgtaccatgaaaattaaatcacacaaaattaaataccagacaaggaacagacagatgaaccctacaatcctagtcacttcagtgaaatcattatctgtacataaaacanaaggagcttgagtgaaatgacaaacttaccccaggatgggttggagtctatgcagtactccagcccctgcagctgatccatnggtggatggctgatctcctcttgcttcatgtcag

SEQ ID NO: 1615 - DNA, 497 bp, Oryza sativa
  unsure (1)..(497): unsure at all n locations
gcttagatattgcttttaagtgagatgatgcatgacactaaatcttttacttgaattacgaaaatatgcaatattgatgctagcatatggtttgatttataaatgctctatatatatgcattattgaattgttattactcaaatagctttaaatgctcattgtgaaaagagaataaaaaatatgaaaacaatgaataccgaatccttggaaacagtcttgacgacaaggacgtattcgatgtgagcaaaataatgggtgccgaatccctggaaacagtcttgacgacagggacgtacccggaataaaagagaaaattatgagcaaaaaggctcaagaaaaagtaaaaattctcttggttgctntgtgctaaagctaatttgagaaagagtgataaatgcaataggtatatatgtatagtggttatttttcaatctatgtgcttgtgaatatattgcattataaatcacttgaaatcatgaatcatttattgctgatt

SEQ ID NO: 1616 - DNA, 484 bp, Oryza sativa
  unsure (1)..(484): unsure at all n locations
cactcgtggagtnagggtttatgcgccgaaatcgctaataagtcgcgcggtcnggttttggtccacaaattattatttcggtacgtatacggttgtatatgagtatatctataaagtttggtacatacatttatatcattttttatacatttgaaatgtatacgtaagtataaaaattatacatatgtaaaaaactatataaacataatttatatgcatatatactttgggtatatatgtataagcttcatgtatatatacaactctcttgatgtccggactagcatgtatcacatccttcaaaatcccttatattttgggacggatagagtatatagataaattatataataccttctgtttttaatagatgataacgttgantttttgtcacacgtttaaccattcgttttattntaaaacaatatgtaatcataattcttttgtgaagtggttatccctcacagatttttacatgattata

SEQ ID NO: 1617 - DNA, 433 bp, Oryza sativa
ggccgttcgccttgggaacgacgaccgggttcgccagccactccggatggataacctctcggatgaatccggcctccagaagtcgcgccacctcctcgcggatgaaggcttgacgttccggggcctgccgccgcactttctgccggaccggccttgcgcccggccgcacggcgagacggtgctcaatcacctccctagggaccccgggcatgtccgccggtctccaggcgaagacgtcggcgtttgcccgcaggaaggagacaagcgcgtcttcctatatgccgtccagaagaccaccgattcgtgtggtcttggacgggccatcgcctcaggcaacctccttgaccgggacctcgtcgcacgtgatcatccgctgcctctgggcggctgggacggaggtgctgagcctctcgttgccaccctcgggcttgga

SEQ ID NO: 1618 - DNA, 326 bp, Oryza sativa
  unsure (1)..(326): unsure at all n locations
atcatgaagacgaccaccgcacagactgnngattgttatttcaaggacaaccaacacaagcctttccgtcctcatgctcccactacttcagctactacttctaccagggcaactcgtgcttttacctcagctgctccttcttcctctgctgcaccacagngttctgagtcttcttctcccataaagaaggcatcccnggctatcttttgtatgtgtgctaagaccgctaagaaggtgaagaagatagagaggcgtcagaaggaagattggattgcagtatgcaaggatgtctctgattattntgatgatgaagagatttgtgatcc

SEQ ID NO: 1619 - DNA, 415 bp, Oryza sativa
  unsure (1)..(415): unsure at all n locations
tcattggtcgcgccncttcatcatcatcaacaacatgcctataaggaggctaaggaccccatgccggccagcaaccttcccgacggcctcccctcttcttggttgccctttntggccatgagagctagatccagtgggtgccaccatacctcataagcatgaggcgaaggaggaggccacatgagtggtgccggccgccacccttgtagccaacatgcacctgngccagatccagcagtgaggagggtttaggcctctacatccattnttcgtggcttgctccaccgtcgtcatgcctacacatagctctctgtagctgagaggacgagaaggggaaaaaagaatgacgaatgaggagaggtggaggaagaggatgatgaaagcttggatagagaatactcccgtcccataatat

SEQ ID NO: 1620 - DNA, 432 bp, Oryza sativa
ggtttaataattctgtaatggtgccacagtatgtactccttttcttgattaaccatagagcatagtttgaccttgcacgagaaatcaaggattaaagaggtgacaaaggtgatgaaacattagagaagatgacgtgggtgcactctcattattgattcagaaagatgagcgagcatactttgtggcagtaacaaataaaagcaaatgagaaggagtaaaagacatgggaatggtagaaaaagctcatatcttatatttattgctgggtctttggaatattaatgggaggggagtacaatacgtatggacaagttggcatggcttgaagtagcctatatagtgatggcctgatgggcgaccacaaagcatcacattcaatacacatgataaaaacctagtactattctaataagatgaaataggtgcaatgca

SEQ ID NO: 1621 - DNA, 447 bp, Oryza sativa
  unsure (1)..(447): unsure at all n locations
gtctactttcaaatggatccagccacatgtccatatctgttctggagcggccgcaattgtcattttactcccgactattttctgtccatggtgctgcgtcacctcttttggcccaatgggctgtgtatccatgttgggcccattaagggcgcgtcctaaggttggagcacgaccctatggtcgttcttcccctctttttatacctctagtcgccgccaagaacangcgggttttgatgatagagttagcttcttgctaccggctcgcagcgcgcgtgttggctaaaccgcccgtctgcctgtaatcggaaccccaccatattgtgtttgatagtgaaactttcatctttatctagcaatttcagtgcttgtcctacttgttcttgcttgttcttcgattgcttgcacgacgagtgccctcgtggccgggttgacgcgcaccacaagt

SEQ ID NO: 1622 - DNA, 401 bp, Oryza sativa
  unsure (1)..(401): unsure at all n locations
tgggtccaggtcgtggcaaactaagctatggtgatagggttgtgtaagaatctgggtaaacttgatttttagatcattnttttttctgaattattttctcctctaactttgtagcttcataacttaatgtgtagatcagaagaattagtgtagaatttactggtggtagatgattacacctagatttccatttctctggctgcactcaaaaataatgggtggactgctcacagaaattaaacaaagatgggctattataaagctagattgaattttatgacgcttaaacagaggaggaaaaatctataaaaattacatttattcatgataactaatctagtatttgaaaaataatttccatgctcacttatgtgcacgtaatgtacttttggatgaaatat

SEQ ID NO: 1623 - DNA, 214 bp, Oryza sativa
  unsure (1)..(214): unsure at all n locations
cccgaggcaaattcgaaagcagatgcaaacaccccacacacaaaggaaaaatttgccctaggacacccaaaaattgtggaattgaagaggagacactggaaaattgcgtcgctgccgatggacaccataaaatttgtggaatttgctgtaggacacccgacacaatnagcgatcatggcgtagaaaaagaggagagagaaatgcaaaaatacaa

SEQ ID NO: 1624 - DNA, 495 bp, Oryza sativa
  unsure (1)..(495): unsure at all n locations
ngatgaaatatgcaatatatgagatatcaacagcaatagaaagaaattaagaatcttccaataactacaataagcaaaagcgcaacactgaaaggaccatcttacctgtcgaacaatagataccaatgtcccaagcttccaggtaatgaactctttcaaaccaccatcctcacacatgcgaacagcgcggaatagctcatggagaaccttcagaagaaagggtaaagcatttcagaacaactgggccttttcccacaatgacaaattgtcttgcatccaanagcataataattatattgcctcagttcacaacttggcaactaccatcagaggaagcagaanatatggctaacattntgaagacattntctcataanaaacagtatccagtgggttaaattacactcctccanttctttataccctctaacccgcataacatcatgaatagtttgacaggacgcaactcagaaactntaatactgcagtgtactg

SEQ ID NO: 1625 - DNA, 336 bp, Oryza sativa
cgtgattatggaaccatatctaagaagtagcatttttactatgccatctatgaatagcaaaatgctaatgcaccattcccaccagttttcagcaaaagagatgctgatttaataaatgttgcattgaagtaccctaattttgtgcatagatatagacatcttatgttcgttttcctaatttagaatgctgattgtgaaataccaattgttctcatttatcatggcttgtggaatgcacgaggcctgtcttgattaatagtggaacatttatacattgaagtcccttttacatttttggtgactgttctgtattttgcagtgcaagatctcttcatc

SEQ ID NO: 1626 - DNA, 432 bp, Oryza sativa
  unsure (1)..(432): unsure at all n locations
atcgaacaggacatttgttaaatgagccatgacaaccatttagtgtttatatcagttagaaacaaagagaaattgtcacccataattaacaattagatgctgtcatgctgggaagtgtaagtgcgagcttcatttatttgcataacatcaacaatcaagatgacaactgaacttgatctgtatgtacttttgattactttctaaacaaataaatacatctgagaatgaatacaacaaactaaattcattgcatgatggcaagtagaattatcttatagtaacatatatgataaacaagagcagaatagagtggattctcataatcaagcaagcacttctgtagtgtcaagaagcgagcactattaaaaattattcactggacacaacgaacttgttcgctttaacacttttgagatanaaacacatgtacac

SEQ ID NO: 1627 - DNA, 287 bp, Oryza sativa
  unsure (1)..(287): unsure at all n locations
gaaaaaaaaaagggagcttgggttnaagccccccccccgccggacgggggaagagcacgggaagggaggaagaacgacagaagaggggaaaaaagagaaacgagaacgacagcgggcgggaccagacagaaggaggtaaggagggaccccaagacgaggaagagggagggaggagaaagaaaaagggcaggtgggaagagaaggagataaagaagagaggggaggagagaggaaggaagggaaagggaggacgagggagaggagagggaggaggggggagagggaaa

SEQ ID NO: 1628 - DNA, 424 bp, Oryza sativa
  unsure (1)..(424): unsure at all n locations
atacaccatgacacgacatattaatttcttaattcattacaccagttagcgaaatactccctctatatgtaatataccctgtggtaccaatggatcagtgttctacaaaaaatcatgccgaattggcgctcctccaagttgcatggcttcttaaaacatacactgcctgatgtgaaaacacaggacaccatgcaaagttngtgtggttgtttttcccctgtctgcctacagcagaactcccatacaatctgatcaggcatgtggtggctctgcaggcccacctggttttgtattcagaagaggctggattgccttcacgacgatcgtcatgttcggtcggaagacggcttcgtactgaacgcacaatgctgcaactgctgctagctgaataaaaatcatgaaagaacaaaccatggcactcact

SEQ ID NO: 1629 - DNA, 393 bp, Oryza sativa
  unsure (1)..(393): unsure at all n locations
ctccaccatgnnatgagaactaaacgacctctgagaaccgagcgttgctcggttggctagcttcgctggtgagcgagcagcccgcgcgggttcgatccctgggatcgtcacccgcgtgtctcaccgggatttattcccaaataaatttccagctctcccgtgccagcgccacaatagtagagtgacgtcctcgtcacacacaaggttcttaggtggctttgtgtatctcattagtacgtgtgtgtatagttgataggtctagcatgcgtgtangggtgtgggtgtgtgtgcgtggtggagtgcgtttgcacgtatgttcagatactacagcttgtactcaaagtggagagctctcannaaaaaaaatctaaagatctcttaagagagataata

SEQ ID NO: 1630 - DNA, 428 bp, Oryza sativa
  unsure (1)..(428): unsure at all n locations
cttgctgtccgattcgtaccgagatggaggcatgcagaagaatggatggctccgcagattggagaagaanacacacaaagaatgggatggattcgcccagacattaccagaagaacacaacaaatcgggcctagagccgcacgagcagagcaagaaaccgagaaagaaaaaaggtggcgcctttaggagcatgcagcgactactaacctctaggaagtggaggaggagagcggcgtcncagtggccgtctccgccgcggtcgccgggctggatttggagcaatgcgggtgactggatatgtggngagatcgccgccgctgcgtttgggcacctcctcctcctcctcctctcccttcttctttccttttttttaacttttctttcttttggattctttatgtacactgtactactcctacactgtggag

SEQ ID NO: 1631 - DNA, 286 bp, Oryza sativa
aaccacgcccacctcccaacaaaaaacgaactgatggtcccatatctactgccaggtgactactgcgactgaagacggcacatgcaaatgcatgcacataacagtctgtaccgaacaagctaaaaacccattgcatgttgctcttggccgtagtgcttgttgttgaaggcaggccagacatgcacattacaaaaggatgaactccccaaagtgaatctgatctgcaatgctggcgtacaggcatctaccggatccacatcaacaaacagataaggaaatgtggaac

SEQ ID NO: 1632 - DNA, 479 bp, Oryza sativa
  unsure (1)..(479): unsure at all n locations
tatgaaacatttgcataccactatgtactcttttctgcttctttcaggatctttggagtatttcttacttatcttgattccctccacgttaaatagagtttcttcatcagttttgctcctctcctcaatagaaatcttatcaaaatgctcctcccaagaatcgatttcgtcgactgtctttttcacatcagcctaaaattaaatgtacacccaaataacaaaacacggtgaagtaattcacagggtcataaattagtggaacacaaaaacgttgcgtttgtctcgaaattaaaggttctgaanattgtatattcttcttaccgataaggctgaagagaaccagtaatctttctgacggttcaaggaacatatcgtctctgcacaaatggtgcatgaacatatataacattctcttctactctaagtatcaaattgtgcagtgtagaatcaataatgtataacagccgactgcaagaatg

SEQ ID NO: 1633 - DNA, 365 bp, Oryza sativa
cacgtaatggtaggtcagtagcactttggaagtttgacattatatcagtatttgacatacgagcgccaaagtatatacagatacatgcatagttgcacatacaggataggaggctgcagcaccaaaaataaaggatgggtactaaatggcccaatacccaaaatatccaacagaggatctaaatcagcaaaaaataggtatgtcaaatcagcgatagcatcctacattctaacagtgcatgttcacaagattcaagatagctggaaaaaaaataacatgctaataaaacaggtgcacaaatagatcgatggcatatgcataccaataccacccaactgatatgatcgtacaaatcatgggatgac

SEQ ID NO: 1634 - DNA, 403 bp, Oryza sativa
aaagcttgttccttccaatacaggcaaaagttcagcgcctctaccccacaagaggcgatcgcgagacactacgctctgctgctgcgcgcatcgccagcagaaaatcgcagcatttgcaggctctcgcatcatattcagtcgccacgtgatccaggtaaagtcgtcagtctcactgcggctaccggccgccggccggtgaaccaccgtagcggtcagcgtgggggctcatcgatctcaccggcgaactgcttggtttttgtgtgtgtgtgcgtgtgtgtttcaagtggtggtcgtctgcgcggctcggcggaggagggcggacatccagtcggagacgtacgtgctgatggagccagtggaggaggaggagttcttgagcaacgaggagctggagggcacgctg

SEQ ID NO: 1635 - DNA, 465 bp, Oryza sativa
  unsure (1)..(465): unsure at all n locations
tcacagatcacataatacatcaagttggtgcatattaagcttcatgttgctcgataacacaatgcttgctaacgcggaagcgttagtgataacctagctagagcgaagcatggagagccttgaagacatggcagatgtccttcatcccctacttggccacatacctgcagaagaaattaatcaaggttgtaccagcacagctagcagagcactgcagccgggtcacacgtggtggctgttcatggtggacaaacggaggcatatactacctctcgtttttaacagatgacactgttgactatatctcacgtcgttgaccatatgtcttattcaaaaaaattacgtaattataatctattttggtatgagttggtatattactcatagtactctaagtgtgacttatatcttatacattnacataaaatattcgctcaatgggagttgatacctcgtatatatcaa

SEQ ID NO: 1636 - DNA, 479 bp, Oryza sativa
tgcaagttgcaacctaatggaaaagagaacgacttgtgtgttttttctaccttctttataagatcatagcaactttcatgagcttatgtcaatttgacaatcttcaaggtgcctttatgcaaaactgcttgtactagcagttgactcttcactacggataactcatgtgatatgtacttacatatctataatcaataaaatacatgagttgtcaaaacaaaatctacactatggcctgccatgcacactattgggcgacgacagaatgtgacgtatgcatgggtgtacttatgggtgaatagcgagctggctctgttcggctcgtttgaaagctctagctagctcgataggctcacgagccaaaccatctaggctgccaggcctctcctcttctcagcgtgtgcagcgcatgggtggatgcgggctgcgagcgaactgcagttcatcgccgccgcaacctcctccgtaatgcctcatga

SEQ ID NO: 1637 - DNA, 283 bp, Oryza sativa
  unsure (1)..(283): unsure at all n locations
aaaaagagagggggggggggaaggcccccaccccccgaaaaanaagaagaatggaggaaaggacaggagggaggaaggaaagacaaggaggagaggaggaaggaacgaaaaaagggaaggggaaaaagacgaggagagagggaagaacgaaaggaagaagaaggggagaaggagaaaggaggaaaaaaggaaaaggccgaggggaaaagagaagagaaaggagaaaggaggaggaaaggaggaaagggaagggaggaaggaggaaggaaggagggaggagaag

SEQ ID NO: 1638 - DNA, 468 bp, Oryza sativa
  unsure (1)..(468): unsure at all n locations
tctcacggaaacagatgctggcatggctggatgtctccatggttngacgggtggcggaggagcttatttttggggatagcgaggtaacatccggtgcatcgtctgatttccagaacgcgaccaaaatggcaagagcaatggttacgaaatatggcatgagcaagcagcttggctttgtctcttacaattatgaggatgatggaaagagcatgagcacagaaacaaggcttctgattgagcatgaggtgaagagcctgctggagaatgcctacaacaatgcaaagaccatcctcacaaaacacagcaaggagcaccatgttctagcccaagcacttcttgagcacgagactctcaccggagcccagataaagaagatcttggcccatgcaaatagcacacagcagcagcatgagcatgctgttgaagctccacggaagacgccagctgcgccgtcgtcttcagctgcgt

SEQ ID NO: 1639 - DNA, 400 bp, Oryza sativa
  unsure (1)..(400): unsure at all n locations
tctagttaattggtatcacatcttatttgtctaanactgtagttggtgacatattaatttaacaaaagggctgtctatgtattaccatgtgaacaaaatcttttcagccaccttttcttatcatttgaatgaaaatctaactgctcatgtgaaaatgtctgtctacattaaataaattaacttacaagaattgtgctaacatatacaaaaaaaatatttgatgatacttcagaagacatgaaaatattcaaacttagggatgaatggaattttggcaaacaaaaagcacatatctacatactagaggtgaacatttctggttagcattntgcatgtcatttagatgactagatcagaaaattttagactactgatgaatgaacagtatataaaatctcta

SEQ ID NO: 1640 - DNA, 442 bp, Oryza sativa
  unsure (1)..(442): unsure at all n locations
tcgtccaatgctactactcctggangttcctttccttccatcaattccaaacttgcaccacctccggttgaaatatggctcataacattggcaactcctaccttctcaacagctgcaacagagtctttacctccaattattgttgttacacccttgccactaagctcagccagcttctttgcaattgcctgtagaagacagttcatgtttatgtttcttagcatgcaactgcaaacaggattttagtgaatcattacctcagttcctactgcgaatttttcaaattcgaaaactcccatgggcccattccaaatgactgtctaagtagttttcaaggcagaactgaatgcagcaactgaatctgggccaatatccagtcccatccatccatcatgaattgcagaagcagaaacaacctaaagaacaatcccatgggcatatc

SEQ ID NO: 1641 - DNA, 373 bp, Oryza sativa
  unsure (1)..(373): unsure at all n locations
gtgcatatctatcgcaccaccaaccgacgagcccacttaagcttgtaagttaagactcaaattttttttattctagtttgtctagggagattgaacctctagtttcatccataagacgtgagaaatattcttttagttgtatggttcaacactaactgcaagtttgtttgcgcaaaaaaaacacactttatatttgttaaagtacaaacatgtcattgttagaaggacaatagtggaatttcattttctggaagaatagtggaaattcaccagtgataaagcataactcacaggaagtatcgtaggaggaagttcctcgcanacaggcgataatgaaggatgttcaattcgggcacaggatatttttcgtgac

SEQ ID NO: 1642 - DNA, 437 bp, Oryza sativa
  unsure (1)..(437): unsure at all n locations
catggtggactgatctcatgttatcagcagataccattagatgcaattgccaagaatgatagcagcactgctaaatgcgtggaacagaatattggcatttgttgcagctcaagtaacacattcaatggcaaaatcttgaacccgttctcaataagtcagcgaagtggtgataaaacaaagatatgctcagagggtggatcatcgcttacagatgtggacagcacaagcactcaatctgtcgaaccgtccactacaatttgtaaccataccagtgacagtctcaatgtggacagtttgtgctctgatcagagactggctaattccactgcangtaccacggagaaggcatcatttgtattgcctgtccagataaaggttgatcatttgtgtgtggagcgtanaaaggtaaatgtggcacggataaacgaattgttgat

SEQ ID NO: 1643 - DNA, 303 bp, Oryza sativa
  unsure (1)..(303): unsure at all n locations
acatacacaacaaaaaacatanaccacatgctaaaggttatgttatcagaacaccgcagatttattggctaatggcactcatccccaaggtattgcattcggttggttttactatggatcaatgaacgttgtcaacaaaattgtccctgcctccaacaaaatcctactaagcttagctttggttgagacacaaccacatgagacaatggtacagtactacagttgttcaccttgctagcagacatcaatttgaacacaagcatatgctacattttggctctggttaggtctatgaaaaattat

SEQ ID NO: 1644 - DNA, 487 bp, Oryza sativa
  unsure (1)..(487): unsure at all n locations
tctgttctgaggtggcctcatgtatacagggaaggacgcgctagcttgtttgtctatgaacatgcttgattcttgtagaaccttgacatatgtgagattgatgcatgtagcaactagcaaggcaatgatgtgttatgttttggtatgattcggtaaaggcagtcgtgggaggacaagtgagaggtcccgggcaacagtgggtgaaaatcattgatgacgtcaacggtatgtttagcagtacagggtatatccagaatctgcgaggtttgcaagatggagatatatgagacctgcgtcactgaagagaaagggcgagcgctatggtggtaatttctttcagtgattcaagcaacgatggttgtctcaattatcangtattcagtctacgaatgctggagaagcgtgcatgttggatatattagctcggttcataagacgacaaggaagaaagggttctcttcgtgtctggtgagtttgaattatctgt

SEQ ID NO: 1645 - DNA, 294 bp, Oryza sativa
cacaggaaggcaaccggcaggaagacaccacccgggcccaaactgggaccaatccagaaagcatcaggcaggaaaattgaatggcaacttagcgcaggcagcgttactaacaatacgggctttgaccaagacatcactgacacttggagaccgactgcatccacacaaaggatcacgaaaaaagagccatagacaccaaaccccgataggaaagagaaaataaaagaaaagcagagaaacagggagaaacagcaaagagagcacaaggaagggcaaagacaaccaacggaaaag

SEQ ID NO: 1646 - DNA, 444 bp, Oryza sativa
  unsure (1)..(444): unsure at all n locations
atctaccaacaacaatctctggcattacaactgtggtaataatggatcgtcctaactgacactaattatagcgcaacattggttcactaaagtatgccaggtcttaaaaaaacaccgatatctatagtatttacccaaataccgtccagataataggtaccggttttaataagtataggtgctgactctatgagtgttgtgaccggctattgaaaaaccgatatttataaaacttaataggtgcccggtttaagtaaatacccgacacattctaatttatacgtgctgggtggatagcataaccggcacagttctgatatatatgtgatggctgtagtataataaccggcacttatcagtntataagtatcgtatattaaaccggcacctatgctattaggcattagtactcttacattggtccgactgagaaccaaccctaca

SEQ ID NO: 1647 - DNA, 215 bp, Oryza sativa
  unsure (1)..(215): unsure at all n locations
ggggcacgggcagcggatagcctgaccaggtgtcctttactggatcgatggacaccttggcatacccagctagcatgtctgcgccgtggaccttgtctgtaaccgatggcttgaaagccatgcnctcagcgacttcaggagcgaaagttgggtggactctcgctagtatgacacactgtgctgcgccctgcataanggtgaaagttgaatttaat

SEQ ID NO: 1648 - DNA, 498 bp, Oryza sativa
  unsure (1)..(498): unsure at all n locations
tctggttatgcacatngacagctgaaactggaacaagtattgttttatgaacatccctagcgacgttgcttcttccatggttggcttccactcgggctggaattggaggaagagcataaggattgtgactgatgtcgtcgactgccattggttgacgaatgggttgcacggttgtcccttgttctttcttggtcaaagctaggaccgagttccgctgacaatccttatgcacatgatctgttccctcacacatgaaacatgtgaccttcctcaaagggcattcatctgagtaatgggtgtattcaccacagcggcatgtggtgaggcataaactagcagtgtgtccgactatcccacatctagtacatgctntgaactccaatcctctttccatgaaactgntaagggtcgcctcatcctcatcatcatcatcatcatcatcatcatcgtcgtcatcagtagagaaccgttctnctgatatatcatcttcnggtctgg

SEQ ID NO: 1649 - DNA, 469 bp, Oryza sativa
ttgagaagttcaacattggtgggctggataagagcttgtcatgtgctataagctatgtgactatattggtttaatgaaaaacaaacgtcacctgtcactgtaacttataatggttccttcacttcgtggtttccttttttacattttctctttttgtattaacttatgcagattatcatcatgttaaagcatgtttctcaatcctcatgagctttgagtgtgcttcaactacccttcattgttcctgcagaggtagtatacttttgtttttgggtagcatgctatgagtatgcaagttatacccgttgtatattattattcatcttcttcagagaactcctatttttatctgtgcattgaaaacctgtatagacaccttaactgtaacattttcttttgatatttagtattcaattctgtcttcacgagatgtgaccattctagatatgcaatacttcagaaattaata

SEQ ID NO: 1650 - DNA, 454 bp, Oryza sativa
ctgcagcttcttgttccaaaacaagtttcatttttgtttttccttacaatacagaagatgttttttacagattaatttcctacgacattcgctggaagactcattcctccatatgtttacctctactatcttcttgtatttgtataactgttacatcttcattcatggacaacttcctcttgattcagtattgcataaggaaggctaaatgagtattcagagaggattgaggaacttgccgcaaggcttgcttctctagtggtatgtattttgttgttcaattcctctttttgagaaactagtagattttactctgctctttcttttgggttcaatttaaacagtgtcttcattactatatattgtaccaacctgtatcttttctacttctgaccatttgatgtactatgtataaatagactagactataagttctcttagttatgtttacaat

SEQ ID NO: 1651 - DNA, 448 bp, Oryza sativa
  unsure (1)..(448): unsure at all n locations
ggtctggctggctatgtattgtcgttaggaccggtttctttgggaattccatccaagtatcttacagtgccaccacacgggtattatgggataccccttggaaagtacttaattagtccatgattattttatatgccagtagtagtgggacactgggatgaggagacgaagttgtgtgtgtaatgagatatttggccatgtgtggcccctcctctattgtggcgatgcagtaccgataggtgtaggagcatccctagtgtacctgagtagacgatggctatggctaccagatgcttgtcgtgcgactcgaccgactatgtggtatgggattntcatggactacgcttggaaaggccttccaacgaatttcctgtgccaacaggtgactggtgtcagttntgtgtcgtgtgggaaagcgtatgacctctgcagagttaaactgttggat

SEQ ID NO: 1652 - DNA, 307 bp, Oryza sativa
  unsure (1)..(307): unsure at all n locations
ggaaacggttctgttcccgcgccgcacgcgacaatgtcactctcaagcatcgaggtnggccctatctgtnggaaaaacttaagctgtgttcgacactcacggttggaaacggttccctccggcacggaaaacggagcagttcatgaacgcgtgatgaattaagtatgagctaatttggttttcaaagatggaacaatatgattgttggaaacaacttctgtggagaaacggttggaaaaaacacaccgtttagcagtttgaaaagcgtgcatgcggaaaacgaggagaggttgggaacccggacaaa

SEQ ID NO: 1653 - DNA, 458 bp, Oryza sativa
  unsure (1)..(458): unsure at all n locations
ngcttctcctttcataataaagcgtcgacaaatttgttccacatttgagagatacacccgaactagttcccttctgtactggccatcaaggcagcgaaatggacggtctgccttctccctcaaatattacaatgcagaagcagacatggttatgcaaagcacaatagataatctcatctccaaaataaatagatatatagataaataaagaacaagggagcagttctcagtgtaccaattgatggaaaataaaagagaaactcaagtaaatagatacctgatcacttgaacttgagctntgatggtaagaacatcatcaacaacaaagccttcatgtaattnggttagctccataaattntntccatccccaatcatgctctttcttccaaaaccggtgcagtgtatctgaaatattaatttctntaaaattcacattaagaattcaagtgaaattac

SEQ ID NO: 1654 - DNA, 384 bp, Oryza sativa
agccctgtcagggttatggataccacatacctaataccactcgactaaatctcggcaggacccaccacataccatgttctatacggagacaacctactgatataggagggagttccggataaggaaagacaaccagagttctacatggaaacgacaaggactactcgaactgtatccatattggttttcctacttctacttggacaatgggacacctatgggtataaatacaagccctcctaggaggacagggggacacacactcaccatggaggatcaacacgatcgacccccaccatgagatgatcaacaccatttatgagacgatcaacactcaccacttagactatctactctcaacacaatcaacatatacgcctacta

SEQ ID NO: 1655 - DNA, 467 bp, Oryza sativa
  unsure (1)..(467): unsure at all n locations
aggctgcaagcttgaacaattaatcctcttacatctacttgttttaacatcttcaatntacttccacagaggagcttcctgataactggaatgacctttcagacatgttgcagttacagcctttggaccgccccttcctttttcctggtaaatgccattttcctatgacttagtctagggggtctggcacaagtgcatcatgattctgcctgttttctagaatctgaactagttcagttatcaggtgagcaggttcatatattggcgtgcatgtccgcttcgaagcaagaaacacaggtcatatctccctttagaattgctgccgtgatgtctaagaatggaaattctttgcaatactccacaaataaatctagtcatgccacagaaaatggtgatagtaatgtaaagaatggagagaatggtttccaggttgttgaggatgacatgccaagtggtgaactcaacag

SEQ ID NO: 1656 - DNA, 445 bp, Oryza sativa
  unsure (1)..(445): unsure at all n locations
gcttgaggagagagatggagtaagatacattatttagatanaggaagtaatgtgcgggggagaaggttgctgtgtgtttggataataatgagtgcgtccgactatttgaagtcttcggacatccgtcagaaagcatttttgagaaaatatgagtaacccctacacatacacctacctactgagaataccgcatttgtaaccataaaaaagattagaatgctctcaacacgggacaagaggccaagcaaataaggatctggcgtatctgaactggttatgattaaaagattgttcgttcgtttccttatagttctattttctaaacaagtgggcactcaaagagacacggtgaccagctttttatgcatngctgccaccacacgagaggttgagctctgagctctgctgccacgcggggaccttgtgtgtgccgccttactgtgga

SEQ ID NO: 1657 - DNA, 278 bp, Oryza sativa
acattacggaccactgggtctagtttatttgggaccgccctcggtggaccactcggtcaggatgatccgagcggtcaaacttgattgccatctctgaccatcgaagatactggggcgtgtccggctgaacagcattgatctcccgttcagtcaacttctgcttccgtttagactcataagccatggggccgccgaagatataggtgagctccttgcggtggtcttgaaatccaaccggagtgtcgccgtcgtccttcttcttgacgtgcttgttcctc

SEQ ID NO: 1658 - DNA, 410 bp, Oryza sativa
agcttccggtcgccggaagcttacacggcggttatggccgtcgtcggcggtgagaagctccggtagagaatgccgtcggcacggtggttgtcgccggcctcgtagtcgtcgtcttcgtcgtcagcggcgccctcgtcgaaattgagcgcgtagctgaggggatcataccggaactcccccggcgagccgacgcggcggcgccactgcgccaccgtgtcgccgaggccacctccgccgccgccgccgccgtagccgaagcagcagcacaccgtggccctcagcctgtcacgcagcgagctcatctgcgacggcggcgaggcctccgtcttcatgaaggctactcacctactttttaccgagctaagcggctcagatcaagtagtgagcataatgagtggtatacggtcaaa

SEQ ID NO: 1659 - DNA, 445 bp, Oryza sativa
agcttctatatttataaggcaagataacacatatatgaactaaacgacactatgacataactgctcaacagcagaacacatcgcaccataccaagaaattcacaagtgtttatgtggtatgtaaactcatgcaccaattgaagtataaattcgggtcacagaagggtattgataagtggtgttgaacatcacaaatatatcacagaaagattaaagagcataccatcctggatagtacttcttcaagtttgctatagaaatatgtattgaaaatgtacaagtctccacatgttctagatttcctgaggtacctgaaatgaccataatcagagtggacagttcaagcctacaacaaagtactgaattttgacaaatctacaatgatacaccccatagcaaaagtgagatatattgacaagtcatgaaccagtctactggacacaat

SEQ ID NO: 1660 - DNA, 441 bp, Oryza sativa
gtttgaggccttgttcttatgaatcagcttgatggtttgcccgggtgcttcacttctatcttccaccgttccatgtgcagaaggccagctcaacgccggtcgccggacgacgagctctgctccggtgacccgttcgctctatccctagttacacgggcagcgtgagcctgcacgatgagttgtttctattttctgatggagaaaatagaatacatctttctgtagaagaatcagatagcttaagcgaagtagtagcataggtatgtgtatatatgggtctgtaccgattcctatcatgtggatgagcaaatgtatagtacaaaacggatgtctatatagccataacattgttcatctctctggccatgggtgagcttggatgcctacttctctgagaagacatcaccggcgagaacacgtgattatgagagagagagagtg

SEQ ID NO: 1661 - DNA, 205 bp, Oryza sativa
tacattacttgatatgcccgaaccacctccgcgatcggggctcggcatagtgggcatttgccaccactgcgaaataacttcgttgcacattttgagccaagacacatgtgcccgcattctgcaccatcaccaaatggggtttacaagtgcatcaaacaaaaaagggtagagattaataaccatcaagtatcagacatgtttagct

SEQ ID NO: 1662 - DNA, 458 bp, Oryza sativa
agcttatggcacactgacacgtttccaatgtatccaccattatatgtcagtgtagcaactgcctcctgttgccattggacaatgagtgagctcactgtaagtaggtcatacctacaactaccttattttctataggctttcacaaacaaatagatgaatcaaaataagtatttccataggtgataagagggagcttgcatgttctattgagtactgaccgacaaggcataattaggataacattcttatttatgccagggcaaaataatggagttgtctaacgaatgatgattgatgaatccttttgttcttctttttctttctctttttccatccatgcagccgtttaatccgtcatttttaagtagtcaaacagctatagatcataggagtagcagttagtgggccaagatgtaagagggccgtgacatctttggcacacttggcctaagtcaact

SEQ ID NO: 1663 - DNA, 432 bp, Oryza sativa
  unsure (1)..(432): unsure at all n locations
agcttggagatttccacttcaccaagaatctttttngtatgcgagtcaaggaagacgtttcccgaagagatgttcaggtgaatggtggcgacatgatggaggaatgccaacccttcggcgacatcgatggcaatcgacaacagccttggccagtcaggcttctggttgtcaccgccagggttgtcgacattgtgcagcagctgaagcaaggttccattctgcatgtgatggtgcagcagcaacgctacgtccttgtagatgacatacccaatgggacgaacaacgtttgggtggttgatgtgccatagacactcgagctcccatatcatttttgtctggagatggataaccgcacgatcaactgacttcagcttcttgacacagactaccataccggatggcatgacggacctgtaggtattgctgatgtcc

SEQ ID NO: 1664 - DNA, 455 bp, Oryza sativa
  unsure (1)..(455): unsure at all n locations
gacccggaccttaagcacctgagctgcagcttgctagttcttcttatttccagaagtattgatggtagaaattggtctataatgaacgtcaacaaaccctccaagcataaacctttgctcgttccgagtaaaggacttgcataaactaaacttaattgttgatcaggagttgctactatgttgtccatctcaaaggtactaagtgcatagttgttgatggctcttaagtaccaaattcatgccatcagtacctgcataaaatggaaagcataaaacatccaacatagtggtagggtatatttgtaacaatntccacgagtgttggtgtatatttggatgtagatgacacactaccaaagttgagagaaaatattcatgaagaacaaggagagtctaactcatatccaaacttacgaagttttggaccgaaaagcccaattaaactaccatggcaa

SEQ ID NO: 1665 - DNA, 420 bp, Oryza sativa
  unsure (1)..(420): unsure at all n locations
agacttgccaacggctatctgtgtcgccttttttcttaagacaggatgaccaggcaacagcttcgtcggtcgaacttttttgttgtaagttgccgaagtgcctgtggcatacttgcgcatgtgctcgagtgcttcgactcttaccccctccaagagttcgagcgacacctcgcgcccctcttcgcccctagagaacgtcacccttggtgagttagcccctagctctgttggggtcattgcctcatcgccataaagaagcatgaacgggctgaacttggttggtcttgtgggggtcatccaaagggcccaaagaacagataacatnttcttctggacattagcccttcgcttgcccctcaagccttttatatagtgcttttacgatcttaccattngcacgattgggcagcccatttgact

SEQ ID NO: 1666 - DNA, 467 bp, Oryza sativa
  unsure (1)..(467): unsure at all n locations
agcttgtaggtgggatatcattcgtcgaaaaacttgtatctcttcgtactaaaatatctgtttttttaagtntaaattttatcaatgattatgacttaagattactaattattccatcaatcacattttatctaaatttctatccattttatcctcatcatcctcccactnttatttaaatgaggagcactatatagtttcgggcccttccatggtagtattacctcagtcccggaaatagtgtagttntgcacttttttatatccaacgtttgaccgtttgttttatttgaaaatttttatgattaatattnttattgttattaagatgataaaatatgaatagtgctntatctatgactatatatntttaaaactttttcataaattntntaaataagatggatagtcaaacgttgtacacaaaacacacaattgcacttaaatanaacggatgtaccatatact

SEQ ID NO: 1667 - DNA, 450 bp, Oryza sativa
  unsure (1)..(450): unsure at all n locations
agcttatcatcacaaccactgcatgttccaatgacttgatgagcataattgaaataaattcttggtaaataagtacaatcaaggcagaaccttacaacttgttacagtagaacaatacaattaggcggaataatgtacctaaaagatccctctgatcattcatccctatttcaacatctaacaatgcaattttggaagaaatgacctaacaacactacagtatgaaactaagatgaaaagagcagaaattatggggcattaccttctctagaggatacgctgttntactgcaagtggcacacttctcctgtgtccctgaaaacatgcgtgcggctntgctaggtgatcttgtctgaaatgaatgtttcagacaaaattagttgaaaagcgaggtagcatcacatagaaacatagaagtactttggaatgaaaacagacaagcaatgcatg

SEQ ID NO: 1668 - DNA, 480 bp, Oryza sativa
gacctctaagcacctgagctgcaactgaagctcttgagttataccattgttctcatcagcttctacttgcccaccattaacccactgatgatctacagcaagacaaacatttacatggtaacgtccatgtcctccagacccagcacgtacccaagcagaaactctgtaagtggtgtgcagcctaagcttgtcagttatcaactgggaagggcccatccacacatcaatgcggtttgtggcaagaatataagaacctcttatatgttgcttagctgaggggtccttcaagatggcagaaagcatatggggtgattcagtatggatactcaatcgacatgaccccatgggactccacccagaaagcccatgactgaaagcactgttatgtattacattagctccatatgaaacattctgcagtataaagaaattatccttgattcagaaatggtgttcacaaattcactggccatcatcatg

SEQ ID NO: 1669 - DNA, 465 bp, Oryza sativa
  unsure (1)..(465): unsure at all n locations
agcttcccgtgcacaccaactagcaaatgtcttttattatntctaganaaaattgaacacatactttaaatagtattacacctatctgtgacatttcatgttcaaatcattatattttaatcgtaacgaanagacgaaattatgacagattnttaatcttaaaactgtcaaaattttcacttttttttgttacagctaaaatatagcgaatttgaatataagactttgtagatatgtgtaatactattaagagtacatgtcatattttctctagaattttccgtgatatttggctgttaatgtgcacgggaagcttgtgcggataggatatgttctncataaacatacagttaanagtttaaaatagtaccacgttttcagaaacacgctaccattatttattttgcctattggcagcttcatacttagctctaaatcataaatattattgatcatctatcaatc

SEQ ID NO: 1670 - DNA, 440 bp, Oryza sativa
  unsure (1)..(440): unsure at all n locations
gcaagctngtcaaccgtgtcaagatagagagaattgttgtatcatgtcagcttctttgctggtcgttgtggcttattagaaatgattatgttgtcaacaacataatcattataaaatcaccctttcatgtgttatgcanaacgacgatggttacgcagaaatggaaaagggttgcaaatataggaggatggcgaccggtggatgggctttccgatgtctagttttatggagttaaaacttaaaaagtgttgatttcttttgccgagtgtttagatgacagactcttttgctgtcaaacctggagaatgctcatcgccaatactagtaagagggtgtttatatttaagggtgtaaatttttggcgtgcacattgtgtatatatagagtgttccatggtgtgttctggtactaataataaattatacataatccgctgtaac

SEQ ID NO: 1671 - DNA, 397 bp, Oryza sativa
  unsure (1)..(397): unsure at all n locations
agcttggtgggaagtagacatgtaatatatatattcatctcatcaagtcctcagcagatgaatatgtagcaaggtgttcatgcaaatactaaactaacgcgtaatagctntagcttttgatgacctgaggtcctgactaccttgaatactcactcctaataaataaacaggttcattaaacaggaagctgctagtctaccttttgctgagcatactcatgttcacaaatgcatccaccaagactgaatgacaatttgttttgagatctacaaacccctgtgtcgtcacaatatcatccattgaagaagaggacatatactcaatgcaagcatccctgagtgacgcaccatgatgttgaacatctatagccaagggagcttgcacagtctgcacatta

SEQ ID NO: 1672 - DNA, 439 bp, Oryza sativa
  unsure (1)..(439): unsure at all n locations
agcttctcatcagatattgattaggagttttcttggaaaatagcacaatgatactataatatatgagagatgagcatgcatagggttttgtgtggctactaaattggtggatgtgcaaacaaagcagctcagtagatatgtatttctaacttgctcagaagattgctgtctaacttgtnttagtttaatttaatttggaggatccatacttccaaaagatatcgactaattcgcatgcgcatctatataaaactttttgtcgctcattatataacagtgttgtggttattggtactacatagcaggagtgcatgagttggcaaaaaaaaatttactagtcactggtacatctaacaaacaaaacaaaatgtacataatcaatagtactactggtacggagcgcatgtgttccttattattctgagcgcccaacatgtat

SEQ ID NO: 1673 - DNA, 457 bp, Oryza sativa
  unsure (1)..(457): unsure at all n locations
agcttggtgaattttcatatattgtagaccataccagtcctatacaacagagttgacaactcagataaaaaaacagtgcttaactgagtatgaacaggataaaatcttnctaacaccatagtcaccggcacagttaggattggtgaatgttacggatagccgcatttatacttttacagtcaaaatccatgatcttcatccagttctcaaaatctccaatttcctataacataattaaacaacagatgtttcagcaacaagaaatggcatatgatcaactaaggaagctgtaaaaattgtctagcactattgaatttattagcagtgctacacatggatacttttggggaaaatgaactacacctaaataactgcaatctatccaatgtcgtctcattttccaagaaatggtgataacaggatatgcatttcgtggtcttgtgacttcagtatctac

SEQ ID NO: 1674 - DNA, 458 bp, Oryza sativa
  unsure (1)..(458): unsure at all n locations
ggatcttaagtcactgcgctgcagctttttttttggctgatacactactgacagntctgcattctatcttatccgcccctcgcggtaacatactaatagtgttgatatttattatgtcttaaacagatggagttctgcatctgcttgcttctcaccatccttggctatgtccctggcatcatctacgcagactatgtgcttgttgctcttgactcagaccagtaccagagggaatatcatacccttgcttatgcagtccacttcaattctgtctaaacctatgctctatccataacagccaagttctgctgttgaattggtatctggacacttcgtctgggttttttgatatggcgttgtgaatcttgtgattatatagtagaaacagtggctcgtatcaatgacgacgaagaggcacctagtcatttggcctgtaaaatctcctatacatctggttt

SEQ ID NO: 1675 - DNA, 429 bp, Oryza sativa
  unsure (1)..(429): unsure at all n locations
agcttctcgatctggcgccgttgtcatatctggcgggccatcangcacgcatgcatggatacgtaccttgctgcagtctttctatgcaatntcggagctatattaaagagtttgagaaatatactcaagccacagctgtcattaattcaacataattctaagttgaaacaacaaaatggattgaattttctgcaacagtaccgtgttatgatactaattcagtaaattgaggtgtgttttcaataaatgattntgttttcacttcagctcctgaatatttcgttttactgaagatgcattctatttttntgtgaatatagtagtacgcatctgtcatctgattntgtcacaactacaaaatatgccttatgttgctggtgggaactctcatctagtacgaactctttgttgatacatgttgtatatctt

SEQ ID NO: 1676 - DNA, 476 bp, Oryza sativa
  unsure (1)..(476): unsure at all n locations
gcttatccataagtgaccgagtttaaagagtatgctgcatgtcaagttatctattaaataggaatagtttggtagtttccttctatctctaggaaagtgtgtttcgtgtcctataagaactttatanttntccttttatcttttaggaaggtttcttttcttgtccgacaagaacttgtatcaccccatgggtataaatatgtacacctgnggtcattgtaatctatcctcacaatcaatacaattcggcgcatcgccaccttttaccttttctactttattttatcgcccggcgggacttggcacctgacgcggggctgcatcggtgttcgatctccagtgaaagggtaagtccaatgttccgtcggcccaggcaattgtatcatctacatcggcgtcgttcaaggctgcatcagtacattcgacctctgggattgctctggtttggatgatatacttgcctacctaattatcat

SEQ ID NO: 1677 - DNA, 424 bp, Oryza sativa
agcttgaaccgggtgatatagtgtggttgcactttataaaggatagatttccagaattgagaaagtctaagttgatgcctcgtgctgatggtccttttaaaattgctgagaagactaatgataatacatataaacttgagttgcttcccgactttagggttagtcccacgtttacatttcagatttgaagccatacttgggagaagaggatgagcttgagttgaggacgacttcaattcaagagggggaggatgatgcagacatcactacctcggttacacacaacaatcctccaatggtcatttaaggaccgataacaacagctcgtgtgcgacaattaaacttagaggtgagctcattcctatgttcttttttgtatgaattcaagaatagattgctatctaatgattatattgttgggata

SEQ ID NO: 1678 - DNA, 472 bp, Oryza sativa
  unsure (1)..(472): unsure at all n locations
aagttgattaggaaaaaaggtgctacttataatacaatatatcggagggagtattaattacgagttgtaattaactaagcatatctgcaaatgtacgagcatattgctaattacgagcacttgcagtgagagaagagaactaacgagacttgggatacatataattggcgaacatatcctatgcatgcaagcttcccatatacaccaactagcaaatgtcatgaaaaattctagaaaaaattgggcatttacttctagtactactacacatatatgcaaagtctcatattcaaacttattatattttgagagaatcccttatatgccactagaattngaccagttcccttatatgccactcaaaattggcttctcccttatatgccaatagtttaagtcntttcaccctttatgccacttccaccactatagtggtagttgactgggtagtcaaggtatgttttttcgtaat

SEQ ID NO: 1679 - DNA, 410 bp, Oryza sativa
atcatccatcaacatatgcttgtgcatggtattgatctcaacataactgaggaaaacacaatttattcgattttgacttgcttgttctcatatagagggatttataaaaatttactacctccattctaaaataggttcactcttattctctagcatttatccccaaataagtaatttatatcgcctacgtaccctcgaccataaatctaggagttctatcattacctcttatctatctaccaaccaacagtattctattaatgagggtcaccttggtttttttttctcttcatactaattttgaatcataatgattagaaattaatttattctggatcaggggtggtagtatcgactatttgttggtttcaatttcgctcctactcatgaaatacactctcaagatcatc

SEQ ID NO: 1680 - DNA, 458 bp, Oryza sativa
agcttgatcttgtcaaggcgctagtagctccttcaaagcctccggccgaattcacattaggcatgccattggtcggagacgatgcattattcaagatgggccctgcatgcaaggagttgcatgggtactacatggagaagtccaacacaagaacgaaaaatagagagacctccatgttgggccatcacaatagtcagccgttcctcgggccttctaccttcatcgctgtagacttcaaagatctatgggacctctatagggtgcgagcgatcgacaccaacctccttaagtgctactcctcgtaagtatttctgggtacgtgatatggtagtaactacccataaattacgcttacccggactcttttcttgcttgtaggttaacctggaagcatgttcatcgtaaagtaccccatgttgccttactcgatccagctgtcgtcaacgagacaacgctga

SEQ ID NO: 1681 - DNA, 387 bp, Oryza sativa
agcttgtgcgctggcatgccgaagaacggatattcgatactatgctgaggcacccagcagattcagtacagtggaggacaatcgataggatttaccaggaattctcaaaagacccaagaaacatgcgtttcgcaatatgtacggacggcattaatccttttggtgatttgagcagtcgtcacagtacatggccagttctgattgttaactataaccttcctccctggttgtgtttcaaaaagaagtacattatgcttgccatgctcattcaaggaccgagacaacctggcaacgatatcgatgtgttccttgaaccgatcatcgatgaacttgaaaggctatggaatgagggcacacgaacatgggacgcatatgcacaagagtatt

SEQ ID NO: 1682 - DNA, 446 bp, Oryza sativa
agcttagagatggctacaatatgtgtttcagttgaaatgagggattggagaaagactaaaaaagagcttctactgtcgcttgtgatggtgtgcctttcaaggcttatgctaggttagagattatgaaacagtcactaattaagctcattcatgataagctagtatgtgagcagagttcgatcgaagctttgtttgtaacatgcggtacagttccataggcttgagaggcatctggaatctgaacacaagacgcggcaggttgcgttgtcaattgtcatcaggtcctggtctctaatcaagctgcgaggatcctggagaatggactggaaggttggctatgaactgccactgttgcaaatgtggtgaaatcacgctccctgaagagatgttgccgtcagaattcattaatgaagtattggtcatgagaacaagttcttcttgatcaa

SEQ ID NO: 1683 - DNA, 381 bp, Oryza sativa
tttttgaacagatggacgagggagtatttgtctctaaataattggaggatctagactaatcacctatctaattcaatcaatgtataggatctcctagtaaacaattctattaacttgtaacccagcagctcaatcgtttcaagtttctagattaccaagaacagtgtaattaatatgccatatgacgtaccaattcacgtgaattcctaagatgactgtcctgaaacagagaagaaaaatataaaagattgttctctatcctgtaagctaatgcatggaaagcatataaaacatcaacaatattacacaatatgatgcacatttcagaaaagcaatgatgtgaggaatgaaagttgtcacatgtgacaccatgctgctata

SEQ ID NO: 1684 - DNA, 407 bp, Oryza sativa
  unsure (1)..(407): unsure at all n locations
agcttgacgccacattgttcgtcgnctggattttctcgaccttcacgtacagcacgccagtgttcttccaatgcgccgtcaccagcggcatggcgtcgctcgctgcgtgcttcgcatgcttcgccacgatgtgctgcttcgctctaatgcaagccaacaaggttcacctgtggagttcccgcgacgctgccggcaggaacgctgtcatggccgaggtaccgcacgcttgggggttactctggtctgagatcaccctcgtcacctacctcgtcgacgcctgcttgctgtgcatcacgctggactcccgggcctcgcggcctgtggcgctcgcgttcctggccgcctgcaacctcgcgacgctcaaagtggccagtcaggtcgaggccatcggctccgcgggcgtgatc

SEQ ID NO: 1685 - DNA, 453 bp, Oryza sativa
  unsure (1)..(453): unsure at all n locations
gcttgtggagacttgagcttnggagctngattagtttaacatctgtgccacagggctttgtgcatcttaggtcactccaaccgctgtgcattggatcattgatgcctgaagagttccacaggaggttaaaaggaatcgatccgtggattgttcggcacatcccctacatcggagacccgtgatcgcgctgctaccctcacaagcatgataaactgtgtatgaaatttcatgattggatcggattggaggctntcttaagaaaaaatgttgtcttaatctgttttaatgccaatttgaagggtcatctaatttatgccacacactgcaatagtggcagttcttgaatccaataacactggagggttattttgcgaaacctgtgaaatgaaaattattctgactcattatgcggaatagagagtaatacttataactatagtagctcttgatctc

SEQ ID NO: 1686 - DNA, 446 bp, Oryza sativa
  unsure (1)..(446): unsure at all n locations
agcttttgcataaagctggccgcatagcatcnnattatttaaatcatggagagcgcatgaaactaacatgagttaatgaaatatttatctctgacattagaaaggtagagccctcttttattggaataacctcttcccctagaatttactgggttattttttcccattgcattcacaggcatcggtaagtttgctccatgcatctatttcttggttaattgtgttacatgtgttgtttgttcagacttcacaaacagcagttatgtagatggatacgccatgatgatctggacatgctaaccgatgagctataaaggaaacgtgtgtttgacaatctactcggctgtaaataatactcggccgttcgaactgacccagttntctaacacccaaccccaaaatgatgcaggataccagacattgatactcatggctgacacatttct

SEQ ID NO: 1687 - DNA, 442 bp, Oryza sativa
  unsure (1)..(442): unsure at all n locations
agcttggagggtggaactcgactgtgttaattctatgatctcagtgctttcaagggagggcaattggataagactgttaaatccacatccaggctatgcagaagatattgcccggccagtattgatcactatacaaatgatccactttgttagaaagcatcctgctaaagatgagagaactctctcgaaacacctctgcgaagttttcaggtatctttgccatatccttttgtttgtccttttcttatctcacctggctatcaggtcataagtttgacattctgattgtttttatataggaaattttttactaaaccacctgaggttgatgacttgcggaagagttattcccttatcnaaatattcatgaaaatggatcaaactctagtgaagtcaaaggtattaataattgaatctcgacgtangatatgcatgagctctt

SEQ ID NO: 1688 - DNA, 431 bp, Oryza sativa
agcttttgtatctggaagaaatgcagttattcttgagatctgtctggcggagtgggtaattgctggcaatttcaaccttatcgctgcagcagaagacaagaacaactcgaggattaataaacgactgttgaatgccttccgaagcaagattaatgatttaaaattgaaggaaatgtacatgtttggcagacgctatacctggagcatcgaacaagccagaccaactttggtgaagctggacagaattcttgtgacaacctcctgtgaagatctctttcctgaggcgcatctgcaggctttgagctcctcaaactctgaccattgccctcttttgctgacatgtggtgagttcaaacctatctctaggaggcttccgtttgagacggtttggacaagattagatggattcatgggagtggtgaaagaatctt

SEQ ID NO: 1689 - DNA, 477 bp, Oryza sativa
  unsure (1)..(477): unsure at all n locations
agctntaagaaaggcaggtgtcaaaactgctgttgtctccaattttgatacccgtctacggcctctgttacatgttctgaagtgtgatcactggtttgatgcggttgcggtctctgctgaggtatgtcgacttatattgtcatttcttcagcattatatgcttttccatgcataccatgctcgtgtcatatactcttatctattctgttgaagtcagntttatatataattctcttattcccattaataatctacaacaggttgctgcagaaaagccaaacccaacaatatttctgaaggcatgtgagtctttaggtgtcaaacctgaagaggccgtgcatgtcggcgatgatcgtanaatgatatatggngagctagagatgcangctgcgatgcctggctatggngaagtgatgttcactctntcaaggaggtatttcttctgtaccccccccaacattagtcattttcttctct

SEQ ID NO: 1690 - DNA, 389 bp, Oryza sativa
  unsure (1)..(389): unsure at all n locations
agcttcactactttatgttcttatctnttccatattggcataccactcgggcacagtgctagatcttgcaatagcccaaagttggttctttagtgtctcccctttatgtaacacttgaaaatattgatatagatgcctcacacagaatctttgttcagcatcagaaaactcccttctcacagctggaacaagcccctggaaacgaattataaagaattatagttaggaactaacatgtgagttatgtatattatgaaaaaaatcagacaaagtcataccttctgcctatcagtcatcactgtccatgcagatgtattctcaatgccaaggtcctcttttagagtgtcaagaaaccaactacagcttttcaagctctcaacttcaactac

SEQ ID NO: 1691 - DNA, 392 bp, Oryza sativa
  unsure (1)..(392): unsure at all n locations
agctntagctccnnttaattaaaagcgngtttgtgaattcaaatggaatggagaaaagcaattaacacgatgcctctgtaatttgttgcagggagtgtcatgtgatctgttcaatgggctgtggtacccaacagtgatgagcattggcccagttcttgacaactcactgcggtgctctgctgatgccaagttcagtccccagctgttcgacctcaagcgcctcaagaccctctccttctacagctgcttcccggcgaccaacccgactcccattccggccaccagctgggacaagctcgccggcagcctggagacgctcgagttccgcaccaaccctggcctgacggngcccataccggcgtcggttggccgcctgtcgagcctccagtcgc

SEQ ID NO: 1692 - DNA, 403 bp, Oryza sativa
  unsure (1)..(403): unsure at all n locations
atgggaaatggtcttcttgttttattcatggagntgaggaaggaggagatgcattggctaaagaaagatgtatacacctcagctatgcttatatctgtcttctttggagctcctgcttttattgctatggtcaccttnggaacttgtttgcttctaggcattccattaaaaacagggaaagtattgtctgctctagcaacgtttaggcagctacaaggaccaatcaatagtatcccagacacagtctctgtgatcatccagacaaaagtatcacttgacaggatatgctcttttatgcacctcgaggaactatcgagcgaatgtgtaactaaacttccaagaggtacaactgatgtatcgattgaggtgaggaacngtcagttctcttggaacacatcttctg

SEQ ID NO: 1693 - DNA, 475 bp, Oryza sativa
  unsure (1)..(475): unsure at all n locations
acctgcngcatgcanngctgtantagtaataagagtagatagctcttctctttcaatctaaaaaaagacctgcaagggcagctgcatgcatgagaaggagaagcatgagccaaattattggtgacatgaacactgctgctgatgctgctgctcaaagacaaagccatggcagggcagcagattggtccttccttccttccttccacaaaagcatatggtaaagattaataaaattgagataagtagagtaaaggtaatctaatccactgtgcactaatcagctcttgcaattatcagttgtgcctgcccatccatatgccaaagccatatactactaggtttatagaatgaaagaaaagatctcctagctactcctataataaccacacgacatatactcctacataggctaagatatttaaagcatgcagaaaacacgatatatgtttgatgattaattactacgagaggaatg

SEQ ID NO: 1694 - DNA, 430 bp, Oryza sativa
  unsure (1)..(430): unsure at all n locations
ggcaatcgggcagccgtggcagcgtccgggccaaaggagttcgagagggagacagagatcgacggaggcaagcgactctctcccgtcaaagagttcngtggggaagtgtggcgggtgaggccaccangcaatgggcctcctgattgtgattagcgtgtggaacctgngctcattgactggctgggccggcctggtctgcgcgctgcttaaagatgctactgctacttcctccgtttcataatgtaagccattttagcattgtccacatatgtctagattcattaacatctatgaatatgggcaatgctaaaatgtatatctagaatcattaacatctatataaatgtaggcaatgctagaatgacttacattatgaaacggagggagtacgtacaagtagtactaataaatcatcatccaatacttctga

SEQ ID NO: 1695 - DNA, 280 bp, Oryza sativa
tgatcgaccattgatgtagataatcaatggaggtcgcccgcatggcatagctgtgataatgctaaaacacttatagttgggaaacctcataaactgaaaccgattcttattattcttgtatgatgcacctcccaacgatctcttatgctgtagccacatacgcgttctgtccttcaagcaaaacccagtacataattatgcatgcttaatgccgtgttaactgctttttaacataatatgagccataccagtgaattaaaacaactctatatccccatct

SEQ ID NO: 1696 - DNA, 461 bp, Oryza sativa
  unsure (1)..(461): unsure at all n locations
tagctnttactggattactgcctatcattgttctactcctgagatcatatccttctttgctaaatcatttctagtgttgacgtatacacatgagcttggaatgaactacaatttcatacgcccagacttgatcgtgggctcctgcttacaggttctcaaacatcatctatctcaaccaatttacagaaagaaacaaaaacacttcttaactctgtctgattagctgcattcatgtgcagagcccacttgatgttgataaacttaaggacattggtgtaaaaaccagtttctgcctgcagcaagatccacaccttgagtatccctattattgatttttttttctcatcatgcctataaaaagagaggagcatgtcacttatgttgcctggtttagagaatctgacactcttgattcttgatatgtatgctgtcacttactgtgaatcacaccaactatatcg

SEQ ID NO: 1697 - DNA, 425 bp, Oryza sativa
  unsure (1)..(425): unsure at all n locations
agctngacgacatagtagtagaaccttgagtactaagtccccctacctagcgcgccactgtcgatgggggatacctgtagaccggatatagagggtattggggtacgctggtacgaggatctacgtattacgacatcaagcaaacatgaaacagggattatactggttcaggccccttggtaggtaatagccctaatccagttgatatgggattatatgatggaaatcacagattacaaagggaatagtggaactcgatgataccgacgagatcgtagtcgagttggtttgactagatcacccggcgacttggctcctgtatctccggcttcgtaagctgtgatggttgtcttggctgtgagaatcgatgccttatgtcctcccggagggtcccttntataccgcaggtcagttggtctctaagt

SEQ ID NO: 1698 - DNA, 363 bp, Oryza sativa
  unsure (1)..(363): unsure at all n locations
tttataaccaccgcagctgcagctgcttgaaagcggaccttttttttgaacatgttttaancggctgcacatgttgcgaggagctatctgagttccacgaggaacagagagagttgcacgctgtagtgcattgcttcatacaagccaaggattattatgggagtggccccaaccccaacgagcaaggtgttcggtactgccgtgccataagaagccttgtcagctgccgcattcttcttcttgacggcgcagcatttctagcaaaccctctgtgattactatgtatgggatatatgatcgaacaacgccatctatggaacagtgcaactctggaatccgatgtatgggatatatgtgaccttt

SEQ ID NO: 1699 - DNA, 419 bp, Oryza sativa
  unsure (1)..(419): unsure at all n locations
acctgcngcatgcaagcttgggcaaataaattaagaaccctcttatctgcatcaatcttttaggggcgggcttgacaaacaaagcgatgtcatcagcgtatagagagcatcgaaacctgctaaaacgccctccaattggagtgagcagggaggcctcttccgcaacttgaaagagtttgtgcagcggctccatattgagaataaacaggagcggagatagaggatctccttgccgaagacctttggcatgctgcaatgcagtgcctggcgaaccgttaagtagaacctgtgagaggaggttgcgagaaggtttgagatccaatttctccatctggtaccaaaaccgtacctttgaagtacttcaagcaagtatggccatcccactgtatcaaaagccttggtgatgtcaacttttataa

SEQ ID NO: 1700 - DNA, 420 bp, Oryza sativa
  unsure (1)..(420): unsure at all n locations
agcttcttgatcttactatccaggacatcattctgagcttgagatttgattttacggtctacaaaacacattttataataagaatctgctgcattaaagagaggacagttcaaattgtcagctggcagtaccttcaacctctttcaaggccgagtccctttgcgcagctagttctactttgtctcttttcaaggcttcaatctgtttctccatttgagccatcctggtagcttgcgctgtntgaaatccaaatgtttgaggatacagctatgacagcataaattaatgggacagatctagaagattaccttttgatgaaccacttagctcgaagttcgaatcctggagctgggcaaattcggcccttaactccttctctgtctttttggatactccttgcctcatgcactgtccctaact

SEQ ID NO: 1701 - DNA, 344 bp, Oryza sativa
agcttcgctgctcttgtcttttaccagcgtgtcttcatcgaatggcaccgttcacgcgtgctccaaaagctcgccaccttagttggagccgggaatagttggcataaagccaataaaaaagacgatgcgcattgcccggattcccacttcgatcccccctcaccttctgtcttctctcgacctctacgctggctctccgatgggctcaacttcaggtgagcgagtacaccctcgttgtctcttgtgcgtcagcttcgtgttacagtgtacgtgctgacgacatgtgcgtgtgatcaacgatcgaatttgaagagcatgatgtcacggagcacctgctggacgtg

SEQ ID NO: 1702 - DNA, 473 bp, Oryza sativa
  unsure (1)..(473): unsure at all n locations
agctntgtataggtttccgcagtgaaatntgtgtggtcggcgggcaatcgggcagccgtggcagcgtccgggccaaaggagttcgagagggagacagagatcgacggaggcaagcgactctctcccgtcaaagagttctgtggggaggtgtggcgggtgaggccaccangcaatgggcctcctgattgtgattagcgtgtggaacctgngctcattgactggctgggccggcctggtctgcgcgctgcttaaagatgctactgctacttcctccgtttcataatgtaagccattttagcattgtccacatatgtctagattcattaacatctatgattatgggcaatgctaaaatgtatatctagattcattaacatctatataaatgtaggcaatgctagaatgacttacattatgaaacggagggagtacgtacaagtagtactaataaatcatcatccaatacttctgac

SEQ ID NO: 1703 - DNA, 373 bp, Oryza sativa
  unsure (1)..(373): unsure at all n locations
actcgattaaaactctcgatcgatatcctggcattcatccattcgtgttcatgtgaccgatcgatcgagtcaatgtaagtcaaatatcgaattgatcgagagcgacaagatgcccccaagatcttgtcgcttatgaactagtattacagtagtaaaacacatgtactatacaggagtaattaacagttcatattgcaatgctacacggtgcagacaatgacaagctaaagttaaccacaaagctagttcgaggcaaagcgtagctactatgctctagcaaggtgctaattgtgcatccttggttctgcatgcataaatggcagctccaacttgcangttgtaaagccggaaaagagcatgcaagaacgacaac

SEQ ID NO: 1704 - DNA, 426 bp, Oryza sativa
  unsure (1)..(426): unsure at all n locations
agctntgcacgtaaaaatcagatggaccgtatgttttatcgctntgtgtagnaggggatagaagggaagaagagcttaagttaggcaggaaggaagggttatctgcgcatacgcgacagaagagacatggtgtgaatcagacatatcaacccttatatatgtactatggctgcttatgtcttgcaaagattgatttggctatctcgatcttcttttctttggtttcagactttaagtacagtcatgtgtaaatgaactttaacatgattcattatcgagacgtatatgcatacactgattaaggattccttgaaaagttaaaagagttgtcacgcccggaaattcactagtaatttccgaagttatttatgcataaaatcctcgtccagcaatcaaccgatgtacacaaactgacaatttaatata

SEQ ID NO: 1705 - DNA, 401 bp, Oryza sativa
  unsure (1)..(401): unsure at all n locations
ccttaagnnacctgccgcatgcgagcttgaggcagtanaanacatcagccgctttgtcttctcctttggctgcatatatagcttgtggtggtaaacgtatatgggggaaagagtacatagctcctgcaacaacataattggaagagcattattagagaagctgcttcattttctcctattgccatagaggaaggggctcatatgttaatgtcaccttctgtgaaattgcatacaacatttccgctactattgaaaccatctgtcatcatgcgtgctctcctcctcaaagactcgaggatagacttgctgcaacatcatcaagaggcacattatacatataacactcgaaattactaccagacgaaataaatactgaataactgaatacccgtgctagtctt

SEQ ID NO: 1706 - DNA, 421 bp, Oryza sativa
atctatgacatatccagctattgcaaagctccatactaagcacgagataaactgcttggctatagtatactccaccggtgtcctcctaagacatgctctaaactagccatacaactcccgttgacaaaacagctttattagacatacactaccaaccgttggccatcaaccaaaggtggcctttatcgctagatccacatgaggaccaagactgggtcaacccccaattttagctgttggcgctatagtgaagagggaatcatgcctattcacagcatctaccctccggcttatttcgtgagatttgcctttaatatatcatcgtcctcacacgacagcacgtgtcaaataatattgagaatattatgctcccataggcactctatgaacagtgtcatccaccacatggaatacacttaca

SEQ ID NO: 1707 - DNA, 455 bp, Oryza sativa
  unsure (1)..(455): unsure at all n locations
agctntagcactaggcttaggttgtgttcggtttatgcattgggagcttcatgcaggacacaatgacttattagcactcgattaattaagtattagccaaaaatattgaaaaaataaaataatataattttctaaagcaatattcttatagaagaattctgcaaaagatgaatcgtgctaatggaaaacaagtgagtagaagataggaagagggagtatcgaacatataccctaagtgtgtatttggtattgagggttagaaaccctttttcgtcgacatgcaaaacggagcagcggattagcgcatggttaattaagtattagataaaaagaataaattaatatgatctttaaggcacctctnggatagaaaatttcataaagaagcatcgttcacaattagaaagcatgttgtggaaactgagtgtgtctatacttcgttccaacttactccc

SEQ ID NO: 1708 - DNA, 472 bp, Oryza sativa
  unsure (1)..(472): unsure at all n locations
agcttaagtttcatcctaacacaatactccttgtactagcaactcgctgttcccatatatcgctctactacatacgcggatagggaggacttaagtaatctcaagggctgtcaccacctctacacctacctaaaacatattgtgggatatgcagcaattactggataacaattacctaaacaccacgtctaatgtctcacaacaatgaaccatggtatacaaaaaaataaagccattgcccatgctggcttgnggttggcacggntaatgtctcacaacaatagctcaccaaccggtccttagttgtcatgagcacgaacttcaaaactatatgctcacaacccaccattgtcaagtttaagttggcacataatttaataaccaatcacgattgacaatcgcgagctatcattctatataaccatatattatatgtgaaacacttaattattccaatagggtgctagtgttt

SEQ ID NO: 1709 - DNA, 191 bp, Oryza sativa
  unsure (1)..(191): unsure at all n locations
agcttgctcggacagctggaggaggaataatacatatatatatatgggtgagactntagtcccggttggtagcaccaaccggtgctaaagatcaccgggatctttatccccggttggtgctaccaaccgggactaaagtctcacccctatatatatatgtctttttcctcctccagctgtccgagcaagct

SEQ ID NO: 1710 - DNA, 376 bp, Oryza sativa
agcttatctggagtgatatctatgagacagtgtgtgagccaaagaggggctgcatctatgctccttatatcatgaagatgattaaggcaaagactgggatttgttatttcaaggacaaccaacacaagcctttccgtcctcatgctcccactacttcagctactccttctaccagggcaactcgtgcttctacctcagctgctccttcttcctctgctgcaccacagtgttctgagtcttcttctcccataaagaaggctctccgggctatcttttgtatgtgtgctaagaccgctaagaaggtgaagaagatagagaggcgtcagaaagaagattggattgcagtaggcaaggatgtctctgatattttgatgat

SEQ ID NO: 1711 - DNA, 467 bp, Oryza sativa
  unsure (1)..(467): unsure at all n locations
acctgcggcatgcaagcttcttccaagatcttcctgtgcctttttcctcataaaagataaggtgaaaaagattaaacttggtcacatccattcttgttcttggttaccaattcctactgcagtctagccaccgacggcattgcccatacatgaagccattagccatggatctgaatcaaaattctcactaatcttatcctacttgacccgatataaaagactaaaagacgaagctntgctgcgatgcttgccgatgtaagcacatggcatatcacccaaaaagcatttcttgagcttcttgtgctcgatctggtaccaaatacccatatataacatcgagaatcctcgtttgagataccaaatagcccgtatgtctaagaaatgccaaaaaanaactaataagaaagaagacaaaagccaagctataaacaaatccttctcattttccatttcttgtntatctgaat

SEQ ID NO: 1712 - DNA, 418 bp, Oryza sativa
atcccgagaagatacacgcgatagagaggatgtgccccctacaagcttagggatgtgcaatgcgtcactggatgcatggccgccctcagtcgattcatatcgaggctgggagagagggcgctacccctattataactcctcaagcgctccgggccatttgtatggacagaggaggccgagcaagccctcaatcagttgaaggattacctcacctccccccagtcctagtagccctagggcccgaggaacccctgttgctctacttggccgcgaccccccaggctgtgagcatcgccctcgtggtggaacgcgatgaagaccacccgcgaaccgcgagcccgcgttcggcacccgggcgggccgaccacggtgaggaaccatgggcccccttacttcgcgatggcccctcgccccctgg

SEQ ID NO: 1713 - DNA, 468 bp, Oryza sativa
  unsure (1)..(468): unsure at all n locations
gcttgtattgtaccctgccagagtggcatattctctctatcangctatcatcactctattcacctctaattaattagcccgtatcaaataaaatgtttttctttgcgaagaatcaaaaatatttttttaacacaagaatagtacggtagtccggatcaaaattcanaggtatatatcttcacgctactcctgaggctcttataaaacttgctattagtaatcaaatctgacataatcatattactactgtccccctccttttagttcaaaatttattattatcactattattattattactattagtatgattattattattattatttaacaagcgtccattgtatcttcgatgaagtcattataaactcctcaatgtcgatcacctgttacacaccatttaananataattagcctcataattcaatgatgagtacaagtttaattctaagactaggcctggtatg

SEQ ID NO: 1714 - DNA, 414 bp, Oryza sativa
  unsure (1)..(414): unsure at all n locations
agcttatccacctaannattgaaagagaatgtttatagtcaaaagtttacatacccgattcaaattcaaattcagattcaaatattttatatacaaaggaaaaatttgccctaggacacccaaaaattgtgtaattgattaagagtcactgtaaaattgcgtcgctgctgatggacaccataaaatttgtgtaatttgctgtaggacacccgacacaatattttatcatttcttataaaaagaggagagagaaatttcaaaaatacaaaattgcccttagctctacctaatacccattgctggcagccgcttcctagcgccgctcgccaaccgcctgctgctgcctccgccgtcatctccgccgatngccgccgcttctccacaagtggtgacgctgccacatcactgctgcac

SEQ ID NO: 1715 - DNA, 429 bp, Oryza sativa
  unsure (1)..(429): unsure at all n locations
tcctctgagtcacctgacgcatgcaagcttgtatcttggcttntgttaactctctgttctttctttaagaaaaaatgtcatgattttccaagacgtgattattgaaccatatctaagaagtagcatttntactatgccatctaggaatagcaaaatgctaatgcaccattcccaccagttttcagcaaaagagatgctgatttaataaattttgcattgaagtaccctaattntgtgcatagatatagacatcttatgttcgttttcctaatttagaatgctgattntgaaataccaatttttctcatttatcatggcttgtggaatgcacgaagcctgtcttgattaatagtgtaacatttatacattgaagttccctttacatttttgttgactgttctgtattttgcagtgcaagatctcttcatc

SEQ ID NO: 1716 - DNA, 472 bp, Oryza sativa
  unsure (1)..(472): unsure at all n locations
ttaagtcacctgcggcatgcaagcttcatagttccctggcatcaggtatctttcagtacgtatatatcctacttaattatgtgctccaccatgttatgagatctaaagattctctgagaaccgagcgttgctcggttggctagcttcgctggtgagcgagcagcccgcgcgggttcgatccctgngatcgtcacccgcgtgtctcaccgggatttattcccaaataaatttccagctctcccgtgccagcgccacaatagtagagtgacgtcctcgtcacacacaaggttcttaggtggctttgtgtatctcattagtacgtgtgtgtatagttgataggtctagcatgcgtgtangggtgtgggtgtgtgtgcgtggtggagtgcctttgcacgtatggtcagatactacagcttgtactcaaagtggagagctctcacacannaaaatctaaagattctcttagagagag

SEQ ID NO: 1717 - DNA, 445 bp, Oryza sativa
  unsure (1)..(445): unsure at all n locations
agcttccaactcagaagggcagagaagttattgtctcatgaagagttcttctttcttcttcatcatcaaactaaaccacgctaatctcctaacaaaaaactaactgattttcccatatctactgccaggtgactactgcgactgaagcttgcacatgcaaatgcatgcacataacagtctgtacgtaacaagctaaaaacccattgcatgttgctcttggccgtagtgcttgttgttgaaggcaggccagacatgcacattacaaaagtatgaactccccaaagtgaatctgatctgcaatgctggcttacaggcatctaccggatccacatcaacaaacatataaggaaatttggaacataagaattatgaaaacattatntataattagtccataccataataagctcttccgttcacaatttcgtgatggtagcctgacaac

SEQ ID NO: 1718 - DNA, 465 bp, Oryza sativa
  unsure (1)..(465): unsure at all n locations
agctntatattngagaaagcagccactattattatacaatgcacataaggcaccagcaaacaactagggactaagcagtgaaggaacaaccatgtaatggtatgtcagtagcactttggaagtttgacattatatcagtatttgacatacgagcgccaaagtatatacagatacatgcatagttgcacatacaggataggaggctgcagcaccaaaaataaaagatgggtactaaatggcccaatacccaaaatatccaacagaggatctaaatcagcaaaaaataggtatgtcaaatcagcgatagcattctacattctaacagtgcattttcacaagaatcaagatagctggaaaaaaaataacatgctaataaaacaggtgcacanatagatcgatggcatatgcaaaccaataccacccacttgatatgatcgacaaatcatggatgactcaaattgattg

SEQ ID NO: 1719 - DNA, 293 bp, Oryza sativa
  unsure (1)..(293): unsure at all n locations
agcttgacntatttatactgtacatctattatgttcggcgctacatggcgatatgtaggttcggtgaatgattcatgcccgcatgggctacactccttgtcgaagccgaccatgaagtgtttgcatgaggcgcctaatgagagagcgtttctctcaaaatggagtagcgctatatgaatgttttcagtcaggacacttgacacgccagacgtgttaatgaagctggagacgcgaacctcttgcgggaagaaagcacatgacccgacactattagatgactgagcatcctaatg

SEQ ID NO: 1720 - DNA, 417 bp, Oryza sativa
  unsure (1)..(417): unsure at all n locations
cataaacgcagtggagcacccatagctggcatcactagccatggatattgccacggaattgaatggttgcttcatgggtgcaagcatctacagtggacttctgaaagcaaatatcaactttcagttttggaggagggctctggccataatcagagaattcaagaagctcaatctcttactctaccgtgcatatntttttgatgatccttggcaggcagttgaaccatcatatattaggaccgtaaacaaaattaactctgaatatcttcttgttcttgacgactatcanatatgttctgctccgaacatgattcattgtcacaaaaactctgctcacagagaagatgaagattccatggtgaatgtgaaagaatttctatattgagaatgtaaacctcaaggaaaatccaagttctc

SEQ ID NO: 1721 - DNA, 322 bp, Oryza sativa
agcttaaaacttgtctctaggggctattcccgcacttataatagcggtggcaccatcaagagagacccgacaacttttggtttgatggctagcatgacccctaccgagaggacccagagtctcttgagatcaaaactatgtatgagagaatgcacaagatcttctcgaatgccatcgtggtcagctatttacacttaatgccagttgtgccatacaacgccttctaccctactccaccggtacgtattatacacctcagcctttctaaaacatacttgatattttgtaaggcgactgaaaaactggaataccgtcacaggaa

SEQ ID NO: 1722 - DNA, 411 bp, Oryza sativa
tgcatatgctttgtgtcccattctcctagtttccaagtccttcgtgatgccctagaagaaatatttgtcctttgtttttctcctgccggctgtaggtaaacttcaatgttcatgcaagttgtatattctggttggaaccttcttatggtctaatttttgtgtgctctgatttcagcaagccattgtgggacataatatcacatttggtgtcaaaagttccattaccaacaccaggaaagaatcgtgttttatttgccattgagaattgccttctttctgtggaggctcctccaaaagaatggcttcctcatgccgatgtatggccctcttttccattgggtctttgtttctctactatattcccattaccattcacttcttaagcttgatagatccatttttaagcatcca

SEQ ID NO: 1723 - DNA, 434 bp, Oryza sativa
  unsure (1)..(434): unsure at all n locations
agcttataagtaccttgaagaaattcctccatttctttggtgtcgagcctttttcagtgactttccgaagtgtgatatccttcttaacaataactcagaagtgtntaacaagtacattcttgatgccagagagatgcctattttgtctatgcttgagaggattagaaatcagatcatgaacaggttgtacaccaagcaaaaagaactagaaaggaattggccatgtggcatctgcccaaaaataaaacggaaggtcgagaaaaatacagagatggctaatacatgctatgtttttcctgctgggatgggagcatttcaggttagcgacatangatctcaatacattgttgaacttaatgtaaagagatgtgactgtaggaggtggcagctcactgggattccttgtaaccatgccatttcctgtctaagacatg

SEQ ID NO: 1724 - DNA, 481 bp, Oryza sativa
  unsure (1)..(481): unsure at all n locations
agcacctgggctgcagcttacctgtgggaacatatcttctttatgttgccccngaatattgatcttagatttataccatacatcctagtgtaataaaaaataaagcagtgcaacattagcttgaaaacatagctattgagaaaccactcaatgattaaaaaaagcaagatataagtgaaggcaagtatttaactacaaactgaacaatggcatatagttcctgttcagaaactatataaccccagatttcagaaacttaaacatgcaaaagaagatgttctgattttagtcgagatgaacatttgagcacattcatccatccaggaggtcacacgcatagcaatgttcctagttgagcttcgactatcatctataatggatccaaattccaatgatgtaattaggtaaggcttcagcattaagacaaccaaatctgngttaagataaaatatgatttagagaatcttgaatctcatgaacg

SEQ ID NO: 1725 - DNA, 429 bp, Oryza sativa
  unsure (1)..(429): unsure at all n locations
agctngggaagtatttgaggttttacactntttcttaactgaaagatcatcacaaagttacttgtctgtgcatatctatcgcattatcaactgacgagcccacttaagcttgtaagttaagactcaaattttttttattctagtttgtctagggagattgaacctctagtttcatccataagacgtgagaaatattcttttagttgtatggttcaacactaactgcaagtttgtttgcgcaaaaaaaacacactttaaatttgttaaagtacaaacatgtcattgttagaaggacaatagtggaatttcattntctggaagaatagtggaaattcaccagtgataaagcataactcacaggaagtatcgtaggaggaagttcctcgcanacaggcgataatgaaggatgttcaattcgggcacaggata

SEQ ID NO: 1726 - DNA, 383 bp, Oryza sativa
  unsure (1)..(383): unsure at all n locations
agcttatcaacaatctataccaagaaacaataaaagtaaagttacaactatattacccaatcaagagaaataacacattaacaagaaaattacataaaccacatgctaaaggttatgttagcagaacaccgcagatttattggctaatggcactcatccccaaggtattgcattcggttggttttactatggatcaatgaacgttgtcaacaaatttgtccctgcctccaacaaaatcctactaagcttagctttggttgagacacaaccacatgagacaatggtacagtactacagttgttcaccttgctagcagacatcaatntgaacacaagcatatgctacattttggctctggttaggtctatgaaaatatatgacca

SEQ ID NO: 1727 - DNA, 461 bp, Oryza sativa
  unsure (1)..(461): unsure at all n locations
agcttnctagagtgataattttgtaatatgtctttgctacatntnaattacacgngaaaaagcaaaccttcagtgaaagatcgaagatactggtgctccaagactgtggacctaattccagataattcattcaggtcaggaataatttgaattgacatctttagtcgcagtgcaatcgttatcttaacacattctggtctttttgtactcatgtacatcaactgcagcacttgtagtatccgcaactgcaattccatcactaaatgtatcatccagaaataagatgtccattagacactctaatatctcccctcaatattgtaaaagaagaaatagataaataagctaacattcatatgatatacattttgaaagaaaatcatgctaatattagaagtcacacagttgcagaggggcgataaagtactatacacatatcggataaatatttatgcatacct

SEQ ID NO: 1728 - DNA, 406 bp, Oryza sativa
  unsure (1)..(406): unsure at all n locations
agctttgagctatatctgccaagtccatatcttctccaccgggagaatgaggtactgacaatgccggtccacggggagcctcaattgatagcttatacttgggaggtgtaagctccgtctgtcgacttggacgaggagtcatcttcacaactatgtcttctttaggccattgtatgaacgtcttgcgcgcatcgcccaaagtcatgatttcatcatttgggggcacgggcagcggatagcctgaccaggtgtcctttactgtatcgatggacaccttggcatacccagctagcaggtctgcgccgtggaccttgtctgtaaccganggcttgaaagccatgccctcagcgactttaagagcgaaagttgggtggactctctctagtaagacacactgtgctgcgcc

SEQ ID NO: 1729 - DNA, 348 bp, Oryza sativa
aattagaattaatgtgtctacgttccaagattacgttcatgaattaatgaaaatgtgcaagagctctatttgcctctcctattctatgagtcagtttcccttcctgcgtatggcaccctaccttctttggcatcatctaatttgaaacttaatttgaaagccatattttaatctagatgttgtagggatgctcttaataaccaactaatgacaaatgttcttccttggttagattctatatcatccagaccttccgcgtagatcctgggattcgagtactttattgaagaaatatcaaagataaaattctcttcctaacttaagaattgtaaaatatatatttgggta

SEQ ID NO: 1730 - DNA, 456 bp, Oryza sativa
  unsure (1)..(456): unsure at all n locations
agcttcttgtaccaatatctagagtttcatattttngtttcttcctttcaattcataatatgtttnttacagattaatttcctatgaaatttgctggaagactcattcctccatatgtttacctctactatcttcttgtatttgtataactgttacatcttcattcatggacaacttcctcttgattcagtattgcaaaaggaaggctaaatgagtattcagagaggattgaggaacttgccgcaaggcttgcttctctagtggtatgtattttggtgttcaattcctctttttgagaaactagtagaatttactctgttctttcttttgggttcaatttaaacagtgtcttcattactatatattgtaccaacctgtatcttttctacttctgaccatttgatgtactatgtataaatagactagactataagttctcttagttatgtntacaat

SEQ ID NO: 1731 - DNA, 458 bp, Oryza sativa
  unsure (1)..(458): unsure at all n locations
agcttgagaanaaagaattgaatggcgactctaatctgatgcgctcaagtggcgaatggtttggaaacggttctgnttctggtttggaggtgacaatgtcactctcaagcatcgaggtggtccctatctgttgttattaacttaggctgtgttcgacactcacggttggaaacggttccctccggcacggaaaacggagcagttcattaacgcgtgattaattaagtattagctaattttgttttcaaagatggaacaatatgatttttttaaacaacttctgtgtagaaaccttttgtaaaaaacacaccgtttagcagtttgaaaagcgtgcatgcggaaaacgaggagaaggtgggaacccggacanacgaactgagccttagtatagtggttcaatattggactattggttttttagtagttagccttttctttcctgctcctattatgcctct

SEQ ID NO: 1732 - DNA, 439 bp, Oryza sativa
  unsure (1)..(439): unsure at all n locations
tattacacctttgagctttttttctatctcnggtttatctcnatctttgtgcataataataggagatatatgtggacgattaactttttataacgataattatttctatttgatcgcactaataaaagagtagaaaatgactaagataaatatattacgctcacacatgctactttgctgtgtaatagatactaatatatatgatatattagtttattacatcaataaagcgaataaaccatttgaactatacacatttgcttagtagagggtcgagctcggttccgtaaagctcgcgagattntgcttacgctctgggtcggctcattgtagctcgagtcgagctcgatcgagctggacatgcaagcttgactgttgcagctcaactttttaactctaactcatatagattgaattgttttcaaaaagaggtgtatac

SEQ ID NO: 1733 - DNA, 373 bp, Oryza sativa
  unsure (1)..(373): unsure at all n locations
taagctatcaagccggtccgtgataagcaagagcgagtggatcttttttcttggccccctaaatattgtggccccaaatcttagatatcttattaagattttcgataatggaaactttatttaaactcagtcagatacacaagatgatacattctaactgagctcactcccggcctctgcatgaaatgcacacagccaccagttatcttatttatgtgctttaacaggaaacaaagaaaggcccatcaacccctaaatatataccccatactgattagtacgtactaatatgttatcttgatgctgattggtcntattttgagccccttctcacaaacaatctgctgttcgctttctgccgcattactcatgc

SEQ ID NO: 1734 - DNA, 485 bp, Oryza sativa
  unsure (1)..(485): unsure at all n locations
cctgtttggagagatcatcataaattattaaagtatgttcttctctgtacataaaatactcagccagggctgctcccgtataaggagcgaggtattgtaatgtaacatgggaatccgccatttcagctactacaatagtgtattccatggccccctcttcatggaaagtagttactacttgagctaccgaggatgctctttgaccgatagctacataaacacatattacatcttgccctttttgattgagaattgtatctgtagctactgctgttttgccggattgtctgtccccaataattaactctcgctgaccgcgcccaatatgaatcatcgaatcgatagcaatatgccccgtttgaaggggttcatatacagaacgcctggaaattatacccggagcacgagattcaattaagcgagattccgaagctacaatttctcctctcccatcaatatgtntagccagaagcattataacacga

SEQ ID NO: 1735 - DNA, 404 bp, Oryza sativa
  unsure (1)..(404): unsure at all n locations
gaattattagaggctctatttcactatattgtatactattataagaagttattangagacaacaagtcggaagaaggtcgaatctgtcggtaatcttctcctatttcttatattctgtttattactctgaattcaatataatattcttcctgagtaacttagatttatcttgtgagaattatctcttggttagttcctaaatagcatatgagattattgttcactataatcaactcaaatatagggattgctctggtgagtataaacactaangtagatattaattacttagacgtggtgtttaggtaattgttatccantactcgctgcgtatcccacagtacgtttgacgtatgtgtataggtggtgacagctctcnagatcacttaagtcctccctgtccg

SEQ ID NO: 1736 - DNA, 399 bp, Oryza sativa
gcgaggttgagtccgcgccgaagaggcgcgaatattattttcttcataggcgctcggaaccaaagaacattctgtccgaactcggggaattggtaccgatgtgccctggaagcatggacttcctcagtacagctcccaatacaggaaacgtgaagtcttcaacgaagagagggaccctcgtttgaaggtcgaacttaaggttgatgccattcaagaactaaaagctagcatgaatgcctcggtggaacaaaggggtaacaacgtcctcgccgacatgaatatacccctagttacaacacctgctgtgcaaccaactcctcgtgtcaacacgacgcgagttcgtcacagcatatgagtagttgtgcatccacagaggtgcccgccactggtcttccgatc

SEQ ID NO: 1737 - DNA, 381 bp, Oryza sativa
  unsure (1)..(381): unsure at all n locations
ctatcgatatgaaatatagtatatcctcaaacatcactttttactaataagtcatagctgcttaaaaggcaanaacataatttcataattgcagtgcatgaaaaatctcaatgacacatacagggcaattttctttgacatcccataacccgaatgtgctatcagttgatgcagacgcaagctcattggtggacaggaacttcacataagagacagctttcttgtgcccaccanaaacatggacaggcgcacttggatttcgcatatcanaataatgaatatggtgatcagcagaacccacctgcaataatgtaacatctggtaatgaataaaaacttatattgatatgaccaagatattcaaggacatactgaacatagt

SEQ ID NO: 1738 - DNA, 408 bp, Oryza sativa
  unsure (1)..(408): unsure at all n locations
gggtaaggagaatggataaataataagacaaagggagggcatactggtaagattcaatatttgagtggatgcaaaggttgatctgagtggtttacctatctcaacatttaagtgacactatcaatgtccccacatgaataactactggttcaacatgaataaacacaatatttttgtgcagaaaactgagatagaagctgaactaacctgcaatccaaataggtaccaaccatgaaccaacaacatgtcccgccaaaacaaacattagaaggttaatcacaaagttagcccacgctgactcgaatatgaatccattggcagatgagtcagactgaccaccaagcaatggtacanatctgatgatgcggtgaacatactgaagaagaacagtgatacgcagtaaattct

SEQ ID NO: 1739 - DNA, 348 bp, Oryza sativa
  unsure (1)..(348): unsure at all n locations
atgctgatgacgtatgccatgatgntatttccatatttaacttccatttctttgtatgtacagggtcatggtttccggaaagaacttgtatcaatgctcttggatttaaaaccacaattcatgaggtttcctggcatgcgaattattctttccatcgttgcacatatttgatcagacatattttggacagttaactacattgaagggaactattccaagaggctgctttgttgaacgccagtggttaagaaatgcattcaagtggcgtgagtcttgtggtccgtggacgagaggcctggacactatggtgatgtctggggttattgactgatgatggcttcgatatta

SEQ ID NO: 1740 - DNA, 391 bp, Oryza sativa
aaaccgtcttgggaagggattaaagaagggagatcaccccgcatacattcaaaacaagaaattcccatcctcatcttaaaagcattccaagcagtatgggctttagcctcatgatcagagagggttgacccatccacatcaaccaaaatagctatagaattcttcctgtatgattcagttgccattgcatggaaaaaatttgtgttttcccctccaaatttagcccatctaatagtacaccttttcttccagtatgtttgcttatatttctaagtatgtaagcaacttagatctgacaaaaactctgaaattccattccaacacagtgagatctctatattcctcaatgatatcaaaaaaaaaaagatcacaacattacattttgtgatgt

SEQ ID NO: 1741 - DNA, 444 bp, Oryza sativa
gacacataaaaactcagcttaaatccccggaagaatacgaggtcggaagagcgatatcttcttataagaaatgcgagaagactacgatctcatgtgtatcatgggtcggaaaagcctcaccgcacgctggccgtcacccgatgatctacttggctgggagaacgccgtgcgccaccatcttcttcaggtactcttcccgtacgtcggaccgcgcccattggccttcgaagctttccttctctttccccatcgattatatccgaatgcgctgatatgattcgagggatggttagggagaaatgacggattaacgcggtggatcacgggaaggattttgatgcacttttcgaacgtggatatgagtggagtggtgaaccctagatcgcctgcgcaattctgcactgtagcaatgagtggggaaaatggccagagataccgcggcga

SEQ ID NO: 1742 - DNA, 210 bp, Oryza sativa
aaccgcgcaccgccaacgaggaattccgattagcgacggggcccaccaacattacaacacacagaccaaaccaggaggccctaacgcaccgacacagatcggggaagaccacgacaggatgcccacaaccgcaaacacacccgacgaagcaccggacaggccagcaaaacacccacagcaagtagcccaggagggcaccaccaaagacgc

SEQ ID NO: 1743 - DNA, 402 bp, Oryza sativa
  unsure (1)..(402): unsure at all n locations
tgcaagcttgctccgacgtggttatttatgacgaggtatctcaatctatccaacaacaaattgcatctacaatagattcatctatggctaatnttaaagatcgattagatgtaatgtttaaggataaagttgatgggtttttaaggagtacgctcggttcttttatggatgattacacattaaaagataaagcctataccactgctgatcaacctcctataggtcanacgggtagtaaaaccgacggaacggcgttcacggccggtccgaccgggcctgacagtcggtcagaccgcgacacagccgtcggtccgaccggccaaatgaccggtcaaaccgggtattatcccatcggtccgaccggccagatggccggtcagaccgggtattatcccaccggtc

SEQ ID NO: 1744 - DNA, 458 bp, Oryza sativa
  unsure (1)..(458): unsure at all n locations
gccatatgacanaagcccttcactgaacaatatgtatgtgtattanattaacatttaagtgtagcacatggccacatgttactcctatatttttgaatatattgtacttggttatcttgaacttctgatggaacctttgcagagatttttcatataaccatctctctggaagcttttctccatgggttactgggaacaatttgcaactggtaggtttatgttctgaaatttcttataaacttttgaatgcaggcagaggggaaaatatacatactctaggttgtgcttacatgtttcctagcaagttaaccactttgcgttctatacgaatttggtggctaatgacttcattcttgatagcaccaacaataggtatgtgtcacattaaatcgtaccgatgaaaacatntgtgcgcgatctgagaatggtgattcaattatttgtgcagcattatacct

SEQ ID NO: 1745 - DNA, 485 bp, Oryza sativa
  unsure (1)..(485): unsure at all n locations
cgctagcctaaactggatttctctatgggagtattctatttattaactactacaaatttcaccatttcacactgctattcggntaatatgacgcacgtttcgcacgtgtcgtcaacggtctctcagctgactagcgtttcgtacgtacggtcgctaattacgtaaagcgggtagagattagtttaaggggttaattacgcatcgggaacagngccaatgatacttttgtcaataatagagcaagtttaatagtatagcctactactagctctaattcatctatagtcaatctaaaagccaattcatataataattgcttactatactattagtatatgggtccacatatcatacacacattacgtcttagagcttgtggtacagctggctacagatctgttgcccgctactcatctctctcatcttatatctcattaacatatgcttatagctgactaatatagtctgctactgtacctgctcta

SEQ ID NO: 1746 - DNA, 295 bp, Oryza sativa
  unsure (1)..(295): unsure at all n locations
ccgagagcagcgtgggtgtttttttggtgctgacacnaccanccactgatacagacaaatgaatgatcttctgtatgtattgtggggaaattatatggaagaggcgcctatgctgaagctaacttgagcaatcctaattatcaatacgtatgcaccaaccagtttaaccaaaaacttatagtgataagataagacggataattcacttcatataccaacaatctagttagagttcgattagtccaaagattaggagttttgctttctctgagaaccctgtttgtttttctgtctt

SEQ ID NO: 1747 - DNA, 477 bp, Oryza sativa
  unsure (1)..(477): unsure at all n locations
ctcagctgtgtaaagggagtctgatgaaagactatcttccttatttaaccagctacatgaatgtttcctggcatgtttattatcaccttttctttacatttttcttaccgcaattctttttaatctggtgtacgacttgtgaataaaggagaggttatgaatgtgtggccaagtgtacatacaagaggaatgggcgcacatccacaatatanctntgctagtngaaccacacataaatttaatatcctttaattatatggcaccggaagatgatttgataatgtgctattcatttattctggtcattgcagtctgcgggacaaagttcaagtggagcaattactccactacattgtctaagaggccctgaagatgctgaanagaagaggatatttccgatacattgcttatggttgaaaaaaaaacactaatgcaatcccacatgtgaaatctacgaattttgtgtcagattccttt

SEQ ID NO: 1748 - DNA, 391 bp, Oryza sativa
  unsure (1)..(391): unsure at all n locations
ataacggcaacatccgaacctctttgtgcttttacaatttagctnccttttctggcggaagcacctagngatacacagattatattcagagntacagatataaaaaaatgcgtacctaaagttttcngaaactaacatatagacatataccagtgattttaccttgtaacctttgtatttatcaactccttgacgcgggccactacgaagagatatccatcctcatctatgtagcagagatcaccggtctttagccatccatctggtgtcagcgttgactgtgttgcctctgcgttcttgaagtaacctgatgagaacctaacttgaggtacacccatttattttttctatagcatgaaaatataagcaccattttgactgcacgcttact

SEQ ID NO: 1749 - DNA, 219 bp, Oryza sativa
ccagctgaattgcccttcaaaggctaacgagccgggttttttctttatagaaaaagaaacgcggttattgtgctgaactcttattattctcgcgggaaattatgcctgacctttgaacgtataaccgcatgaggtgcaaaaactcttggcatgcagactcgggccttatccaatatagcggaatacacacccaaagaaacaagcccatatgtgaaatca

SEQ ID NO: 1750 - DNA, 413 bp, Oryza sativa
  unsure (1)..(413): unsure at all n locations
acatgatctgcagngnttttcttgtggatccactatgtgcattcaaatcccatgccatgtatcctcaggtgcacatggatctcaacaatcctatgttatgagtagaagcctgctgctgcgtcccgtaattaagctcagattgaattatcgatctcctctaccgccaaaatgcgtacaccggtgtttaaatgcgtgcagccggatgtagttgatgcagtctgtattggagactctgcagtacccggtttgccgtgtgtacaatgtcacgctggacattggttaagccctctatgtttaagcttaagcttatnggactaaactcttaagttagcttatcggcttatatgatttataagccggtggacttaatggtctaaagttagtgtgtgagacatacatctacctcacataag

SEQ ID NO: 1751 - DNA, 405 bp, Oryza sativa
tgcttacgcatctaacaaacatcagtctcagttttttcttttatcatccactgcatcagttcacttcaggtaaccaactgacaactagcctctagtataacggaatgaacaaagcacacacacaccaggcaaggttgcctgcctaactactaccactacactactagccacttactagccagtagccactcgcagcgtcctctgttccagtacgtgtggttctggttcatcatcgtcaaacgaagcaaacgacgacgaaacaaactcccggatacggcgcccttctttggtcagaatctttcaaacttcaaagcaagaaaaaacacaaacaaacaagaaccatctctgcattccgccatacattcgcgtcgatcggtgtccactgtacaggttgatcgatctctc

SEQ ID NO: 1752 - DNA, 488 bp, Oryza sativa
  unsure (1)..(488): unsure at all n locations
gcttcatggntggtctccgttcgccnctctcctttggttcacgtagatcttgacggtttctggcgcgaccaatgcgtgcgcgagaagttagacgccatgaattcgtttctcttctctggctttgtttttttattggctcctgttntgcagatggtgtgttgcggaggtgtcagtttctgaatttgtataaaccatatgccctcttcttattcttnttgctgttcctgatgcaatctgcccgtcttccttacgtattgatcaagtagaacggcgcctcgttctcttctcgaattttaaggcgtttcggaatccgaaatttgctaagattttacctggccgtgattcattttttcctcctgttcttggcttcctttcccgtgtgttgtgcttatgctttgaattggggtggagttcttgaggaggtgaagacacggaacttcatggtgatctcgtcgctctcttcgacatgtagtcttgatctgcttccg

SEQ ID NO: 1753 - DNA, 477 bp, Oryza sativa
  unsure (1)..(477): unsure at all n locations
gcgacctgctgctgctgctgctggccttgctgttatctcgccgattccagagctcgtgatgtctgaagggccatctcagaatgaagccgcaggcatgtcatatccatcttgaagacaaacatgccaatgggaggagttagatgacagtgtgaaatgttactgagttatcagcttatactgaatttggttctctattaagtaaaaactggtttccagcttataagtaaaaatatgtcctgttgttcgttacaaattgctgaaaagagctgggtcactgaatatgtatactgaaggaatgagagaaatgagttggttacagaanactatagcatataagggtaggttactgaaatgattatgcgatgcagacaaactttgatacaaaaccagcataactgtacttctntgttcgtcaaaaaatgacctattattattgngtgtggtttcatgaaacacatgtcatcctattataccata

SEQ ID NO: 1754 - DNA, 432 bp, Oryza sativa
agctggctttgctagatggtgatcatggaagcatatttttctcaaccactctgtttatggctggggcagaacgtgtcgagggtgctgtttatgaactaaaacctctttcttatgacgactcctacaagttgctcagcaagagagtatttgacactgaagacaggttcgctccggaattgagtgaagtcaccagaagtattttaaataaatgtggtggtttaccattagctataattactatagcaaggttattagccagtaaaccgatgcatatcaggaatgggagaaggaaataattctataggctctggacttggacataccttgatgtggcaacatgaggaatatactgagtcttagttactatgacctacctccacatctgaagacttgcttatggtatctaagcatatatcccgaggatgcgattat

SEQ ID NO: 1755 - DNA, 487 bp, Oryza sativa
  unsure (1)..(487): unsure at all n locations
actaagctttcaccagctttggctaaggccctcttgttangcttatgcttattggcctagacttttaagtcagcttattggcttatatgatttataagccagtggatttaatgtcctaagtttagtggtggagtcatacatatatctcatataagccaaaaaagcttctccaacctagcttttggcttaatagtggtagagtggcttatggcttcaaaaaaagccaaatgaaaaagctgctcgtttgttttgacttaaacttttcgacttataagtaggcttataagcctaaacaaagagggccttaatagtgttagagtggcttatggcttcaaaaaagccaaacggaaaagctgtttgtttgtttaggcttatacttttcgacttaaagttggcttataagcctaaacaaagagggcctataataagtgcagtcatggatatacatgtccaatatttgaccgtccgtcttatttaaaaatttata

SEQ ID NO: 1756 - DNA, 427 bp, Oryza sativa
  unsure (1)..(427): unsure at all n locations
attcaatcggagctagaaaagaggtaactgaaattgctttcctttttttaatttgntattctattctttcctactgtaaatntcagtaaatacacggaatacataaattttcaaaaaaatttatatcccaataggttttatgaatatcatactatttataagatnttatttgattntttttccttattttatcaattcaaatttgaatttagatgaaactcatcgaaatctcatacggattctactttcgagccttgtcgaaacctcgaaatttcgcgaaattcgaccggttttcgtcggaataaccccgcatgtcagtgtctcatcgttttccatctctttcttttctctcttacttctgcctcctcttcctttctctatctgttctctctgcagtcagccccttgtatctnccccccctctcatg

SEQ ID NO: 1757 - DNA, 422 bp, Oryza sativa
ttggagtgtggtgagctcaggtcactttacctgtctcatattccctaatccaactgtattagttaggcaatcacctcgaaaggcaaccacgagcactgatcttgacctgctctttctctctctctcacccctagcttggatatcatcactattggcacatgttttttttttcaaggaggatacgcaccgcaatagctagcttttagagtgagacgacagctgagtaggtggctagctcatggagggtggccaacacctatgagctcatgataggctcgagggaagatgggagagatggagtttgacaaagatgaataggcgttaacatatgtttcctattataaatctttcttgggttgactagacaccacataagcatggtgataccaccttattttgaaccaacggtaagtgaatggttt

SEQ ID NO: 1758 - DNA, 457 bp, Oryza sativa
  unsure (1)..(457): unsure at all n locations
agcttggcagccatctcttttttttgttagtcatgtctgagccttatatgggagcgcatgttgcctatctctgacattanccgctccaaatcatctataccgtaatgctcatcttcaaatagcttgttaccctctgggataccagcttgcagtttctctgaagcatctgcttgtgtgttatccatatcattactaacctcgcttttgtggctctgaggtaccagtttttcctcagcagtttctgtcattctgccattnggaagaggattggatgccactgaattagcatcagcatccacaacctgattatgtttatcatgagtagctgtatcttcattcaatccctccaagtctcttgacgtacttgactcaccaatgaattcncattgttcatcagatccatgggacagaacttcgtactcaaattncgaantggattcatcatctgtagaatctg

SEQ ID NO: 1759 - DNA, 405 bp, Oryza sativa
  unsure (1)..(405): unsure at all n locations
acacatanaaactcagcttnccgacgaagatcttgggttgcctctgtccactggttcttctgttgtaagtaaaccttcaacctctctacgacaaatcgatgagtagagtagcacgctggcgaggaagacatattggcctggcagggcgatcaacgctggttaaatcggtgctcacttcacaacctggtattcttctgacgggcctgaaagcttcaaatgagtccctagagatcatcgacaagcagagaaggaaatatctatgggcaggcggtgaaactctgacggggggcaagtgcaaaataaattgggcacggacctgcctccctacagccttaggaggactgggcatcctgaacctggaggaatatgcaagagctctatgactgctgtggctttggaacaagt

SEQ ID NO: 1760 - DNA, 475 bp, Oryza sativa
  unsure (1)..(475): unsure at all n locations
tgccgcatgcagcttcgatccttcgtctttttctctgaacaagctggttgtccttgttcttgcacttggntctgtaactgctgcaacgcatggagtcattcttcctgtattcggcatactggtttcaagtgcaataaagatgtnttatgagccacgctcagaattactgaagaactccacgntattgggcagcatgtttccggtgcttggaatttccacatttcttcttatttcaacagagtacttcctattcggactagcaagtgggaagcttgtggagcgcatactatcattgtacatttaaagtgtcatgtaccatgagatcagctggtttgataacctgaaactcttgtatacttatgctcttctaatctgagtggacattgttccttgattgtttatcaaattcctcaagaatagatgcacactgatgatattagactatgatggtgtcatctctcagctctaaaccaat

SEQ ID NO: 1761 - DNA, 386 bp, Oryza sativa
cgcgaaccaccaagactagggcgatacagacggcgcgtcgcgcgggataacgcgcctgtcagaaccgggaactggccaaatcaagggcacgcggacaacatgagagccatgtcccacattcggagatagagacgctggggaccacaattgctcgagacatacaaccctatcagacaggtaaagacgacacaaaagaaaaggaggacaacaaataacaaaggcagaacaacttcagagcttcaagggagatctgtaccaaaagcaatcctgaacgggcagacaccgaactaccacacatctccaaagcaagggatcactatgacgagaccgggcataaaaaaagtgaacaaggcacgcaagaaggaacaacaagaaaggcggcagaa

SEQ ID NO: 1762 - DNA, 388 bp, Oryza sativa
  unsure (1)..(388): unsure at all n locations
cttcttcttttgtctcaagttgattgtacctggagatatctctatatagagtgcggagcataatcatggccaccattccagataagaaaagcacgatcatgagagagttcacaatagagaaccagtgaatttgatcatctgtcataagcagataggtgtcccagcgagaagcccacttgatatcactttcctacaagacccagcgaagaanaccaaaagatattgtttaaataaatataacattggaagcatagctgtgaaggaaaagagtcatagtacaaaaggaaagaagagatgccatgaaaatatcatcacctcanagccaacatcatatgtgaatatgatatcctttccagcttcaacctcttganggagtatctgagttatt

SEQ ID NO: 1763 - DNA, 425 bp, Oryza sativa
  unsure (1)..(425): unsure at all n locations
ngcaattagcacaatgtattagctgccaaagttcgctgcattatctcacgacctagcttggtaagctcttgtgtgtacatccattttatttattcatattggaggactcatatgcatcacattcagaagttttcttaaaaaacaaaaatgtttaaatactataattgtagcgtagacagcataatctgcaattctgcagcaaatatgccggacgagtgggaaaactgcaagcagatttgagaaattcaaagctgcacgaagcgatttcgaaaccatgcgtacgcttatcgctgtggattgctgattcactcatgaactcaggcatcaacagtagaaccaagatgactcacggtgcattgcatngcatcacacatgttacaggaaaataaagtggtagatgcatgaaatacctcagctgcccccct

SEQ ID NO: 1764 - DNA, 66 bp, Oryza sativa
aaaaaacagcggggaaacacgcacaagatatttttatcaacaaagagaacacgagggacccccacg

SEQ ID NO: 1765 - DNA, 313 bp, Oryza sativa
  unsure (1)..(313): unsure at all n locations
attctattctcatggccctgcgacgctcgcgtgttgggcaaatgctaggccacacggtggtaagagcccaacctaccatccatctacatgaacgaatattcgctaaatgtgggggctaagacaactagccttgtcctatccataagatgagcaccgggtgccatnaaaacccaagaccccctgtgccggctcttacgtaacggctggcattggacccgacagatggctatggagcccggctcggctcaactgtggacggcgattgctggctctaaataattcggctttcacactcgtgcgaaagtaatctgcc

SEQ ID NO: 1766 - DNA, 448 bp, Oryza sativa
  unsure (1)..(448): unsure at all n locations
acttattggagatgcccagtatgtcttactaagtatttgaacctataatgaaancagtgattaccaggtatgctaaccaagatgccttcccactgatcaaacagagctccttcaaatttagcatccctgagctgcacgagaggattaaataaagccacctctgtatatgccatgtatgcaaacggatatagaagtttcacgggcatacagaataatagataagtcatatgatcaacaagactgattccacaaaattaaattccccatttctggttttctactaacaagtagaacaagatgaaccagcctcactgtacagtatgcaaacgaactgtcattttatcatgcncaatcctacatatagatcatattggctagctaatagcgaatcaacaaaatactcttcaatagttccatttgtgctaatgcagtttcacatgactacttt

SEQ ID NO: 1767 - DNA, 371 bp, Oryza sativa
aggtcaatcatgtctttccctacatctatggatctgatgatgatgatgatgatgatgatgatgattctgaaatagctacagccgaatgggttataagcaagaagtttataccatgccaatgggtgaagaattctggaaaagaagagaggtatgatcttgatatcaccaaagctgataagatctttgatctgctacttccggagaagcagattcaatttcctgctggtcatacaattccatctgctgaggaattaagcaagaggaggtattgcaaatggcataattctgggtctcattctaccaatgattgtaaagtcttcagacagcagatccaggcggctattgaaggtggcataaacaagtttgatgac

SEQ ID NO: 1768 - DNA, 182 bp, Oryza sativa
  unsure (1)..(182): unsure at all n locations
ataatcaaaaaacaacaaccccaaagagggggatgtcatcatgccacccnnaaaaaaaaccacaanaaaacaaacacgagagaactttattttcaacacacaacaaaccaggggggaagacaaagacaacaacccacacaccagcaaaaacacaaccaaaacaaaaccaaacgagaccgaga

SEQ ID NO: 1769 - DNA, 147 bp, Oryza sativa
tttactctataaagggatcataataaaaaaacgtttatctaattaaaaacatcccccttatggcacggaagacaacaccccttaaaggctacagttaagacacaagtcgacgtaacacggatcaaaattaagaaccccctcaaaata

SEQ ID NO: 1770 - DNA, 440 bp, Oryza sativa
  unsure (1)..(440): unsure at all n locations
cggacctggcgaatacctgatagctgacaatggtttctactactccagtccaacatgctgattaacctgcccatcgtctgtgttgaactggagagttacttcagccaccttgccctgttcagatctctctgcagaaatatatgcatcatccgtatcccatacagctgaatcttggacatgtccgaaattagaaaatcaacggcaaagttgctgaggctgatcctctttgatgcaaacaaacctccttccatgtatatgtcgtaggcgtatgcgtagtacagattgacagattctactccccactgacctgtaatccaccatntcggatgagggctctctgagggatgaacgagaagacctccagtatgccggctacaatgtaaggtattccctggctactcaccattccatagaagaattttagagatgggacaagatgt

SEQ ID NO: 1771 - DNA, 370 bp, Oryza sativa
  unsure (1)..(370): unsure at all n locations
gacaaattcctacctctatatctatctctgaggcgtttgggttttgcaaaactccatagatatgcagaagagaaatgctatccccactccgaccaagacagaacttttaccaaaagtttattgtgatctttttgttcaaataacaattaaggtgaagcagggtcaggaacaacgaatctctntatgataaacagatccattttgcaagctcgttattacgggtagttcctacaaagaatcggactaatgacgtatacaatgcttgaattatcgacgtagatgctacatagtgggttctcatccttcagagactacgagtgtaataggagcatccgttgacaaaaagatcaccctaagatgatcatctcat

SEQ ID NO: 1772 - DNA, 485 bp, Oryza sativa
gtcctacagtgatggatataagcgcaattgatatttctgtggagatatacatttgtgtattgataagaccgttcacaatttcttgaagctcgatctcccccccagatgaaccatatagccaagagaaaccatgaaccagaatagaagagcttgccccacccatgagtaaatatttcatagtagcctcattagaccgtagatctctcttggatatccagacaataggtaggaacataaactgaaacattctggagctacaaagatagttattaaatcgttagcaccacataaaaacattccccctagagtagctgttaatacgaataacagaaactctgttatagccatttctgtacattcaatgtactctacggatagaggaatacatacagttgaacataatagaataagaaattgaaagatttctgtgaaattgttccgttggcaaattaccgacaagctaattatatgttcttctcttcatc

SEQ ID NO: 1773 - DNA, 356 bp, Oryza sativa
  unsure (1)..(356): unsure at all n locations
tttccacgaagatatttgggccaggatatataattctattntgttaacctatatttctttntctaactatcactgctccagaaaaagctcgatcggtagtaattcagtctttgaagtacacactgaggtatttcaaaaaaaatatagcatgaacatgggaagactcgatagaaccgagttaagaagaaccaatctcgcaccatacgaagctgttgttgcccttccatgtgctaaagtatctttgaaacctattctccacacatttccaatcagaatatataagntgtcgatagtgtatggagattcctagtatttgaatggaaaggaaccaaagtacaaccaaacagttgtctata

SEQ ID NO: 1774 - DNA, 187 bp, Oryza sativa
ggacctaataacagaatcgcgctctcctaccgatccgtgaaggccctcgtggagatgcgcaattgaaaagcaatgctggagaaagatcacgtgaagggctgaaaaccttcttgagtacagcatccgaatgagagtgtatgtagcgttgaacccctagaaagcactaaaattcttgtgccacaggcaa

SEQ ID NO: 1775 - DNA, 341 bp, Oryza sativa
  unsure (1)..(341): unsure at all n locations
agcttacctcancctccccccatcttggtagcccttgggccggaggaaccgttgctactctacttggccgcaaccccccatgtggtgagtaccgccctagtagtcgagtgcgaagagggcgaaccggaggcccctttaactcgcgatggccctacgtctcccaaaggcccggagcccgaggcccccgtgggatgaatgtatgtcttttngtatggttctaatgtctataatcgccacatgattatatacaccctcgggtctccaatcatggcacccatatcctctgcaagctattctaatccatccaaccttgcaggaatctcgtttttggcttttgggct

SEQ ID NO: 1776 - DNA, 489 bp, Oryza sativa
  unsure (1)..(489): unsure at all n locations
tctgattgcanggagttgcgtggactgtcgtgccggtgttatgtttctcggttatgggcacttgtcggcgaaatgacccattccttgacaattgaagcaacagatgtcttcccggactcggcattttcttttctcatttcgattcctctgtcctggcactggagttaggctggaactgtaatcttggcgaggattggtgttgccatgatgcttctctccgatggaactggcgggttggtagccatcttcttcgtcagcagaaaactgaattgacaatcttttggtacatgatcagatccttcacaaaagaaacaagtgatcctgctcgttggacacctgtcgggtggatggtctttctcgcaatgaacgcatatagtggcacatgagctggcgacatgaccgatctctccacaacgagagcatgccttacgttccatgtcatcttcatcatctgaggagacttgatctgaatcttcactatcagacact

SEQ ID NO: 1777 - DNA, 63 bp, Oryza sativa
aaaaaagcagcacccgccggagggggttttattacgcgcaaagggggggaccacaaccccaca

SEQ ID NO: 1778 - DNA, 487 bp, Oryza sativa
  unsure (1)..(487): unsure at all n locations
agcttactagacactaataatatgaagatcttgtctctctatgttactagaggggaatttgtttcacaatacatagtgggagtatcttttgttaaattgtttaatgaaaggttaaatgtaaacatggtgctgattntacatatatttctattgtagatcatggcagctcctgcaccatccaattttaacttgcggtctattcttgagaaagagaagttgactggaacaaactgtatggattggtattgcaacctgagaatngttcttagacaagagcacaaagagtttgtgcttacacagccttttccagctgacttgcccaacaatgctccggctgctcaacgtanggagcatganaggcgatgcaatgaataccttgatataagctgtctcatgcttgctactatgtcccctgagcttcanaggcaatatgaggcattggatgctcataccgatatcacgtgtaacaacccaatttgtatatcac

SEQ ID NO: 1779 - DNA, 461 bp, Oryza sativa
atgtcctttatctctaagattagttattgccttgattataatagggggcactgcattgtaatcaaacaagcaagatcaatccaatctagttctctacacattcagagcctctcgctggctggggatgagccctattttcggcctgagggcgatcgtgagtatcactgttaccccctccgcaatcatccctttcgagcattcgccgctacaacaccaccgccgccgtgcgcctatcagcttggcatcatagccattcgccgctctcgctatgtttggcgagcacgtctagccaaacgccgcgtcacgcggtgttgaagccaagctcgaccagctgatcggacacatcacctccctcaccaccaggcttgatcggcatgaccaacacatcgctcgcatggagaaatatcatgaatgagaacgttcgccccaccttatcatcgtgaccgatctccgctgatcac

SEQ ID NO: 1780 - DNA, 408 bp, Oryza sativa
  unsure (1)..(408): unsure at all n locations
tccataaagctagactaagcaatggagtactgtgtatattatcttctgcttctggctgtctcgcaataccttctacagcttgtcctgcagcagtaccttgaccaactccaggcccaatagaagcaagacctactgtcaatccagcagcaataacggaagctgcagcaattagtggattcatgatgagttcctcgcgctaaagaaaaagaaatggttaaggatacaatcaaccaagaaattcatatttctaagctctattggacagaagtaactaaaacgaacaaattgaaacgataatctgaattctccgaactgcttcgagatctcctttatagtttctactcattagangtttgtgtactcattattctatgtctctctctttccaaccaactgatctttcattca

SEQ ID NO: 1781 - DNA, 383 bp, Oryza sativa
  unsure (1)..(383): unsure at all n locations
gctttagatttctcanaaaattatcctaagttttgttgaagaagaaatagaaagaactcgactcctatacttctaatatacaccctgtcacacccggaaattcactagtaatttctgaactaattggtgcataaaatcctcatccagaaatcatccgaggtacacaaactgacaatttaatatacaaatccatcgtaataataacgttacatacttacaaaagaaaagaaaacagcagcggaattaacggtctagcgatggcttcagctccactcccacaggcagctcaactgtggtataagccaaacgtcttctccttctggatcctttttcttcactgaggttgannttgatattgcaggtgaacatatgacatactccgc

SEQ ID NO: 1782 - DNA, 435 bp, Oryza sativa
  unsure (1)..(435): unsure at all n locations
tgcccgcangcacgccgaacacgcacttatcgtggttcagctttatgcgggcggagcggagactatcgaaagtttccgctagatccgagagtaaggtctcttggttgcgcgtcttcacaaccaagtcatcaacataggccttaacattgcgtcttatctggctacccaaagaaattcgagtagtacgtcgaaaagtaggatctgcattctttaacccgacaggcattgtcgtataacaataagttcctatggcggtaatgaatgcagttgtttcctcatcctccctaaccatgcgaatctgatgataaccatagtgtgcatctataanacacaaaaggtcgcaccccgcggtggagtcgacaatctgatctatgcgtggcacggggtaacgatacttangacatgccttgtatatgtccgtgtaatcgatgcaca

SEQ ID NO: 1783 - DNA, 371 bp, Oryza sativa
  unsure (1)..(371): unsure at all n locations
cagttaggaaatgcagcgatcgatctgagggcgcangtggagatgatggtgctgagtgcggatgggaagaacggaatgcggacgtgcgtgttgcggccgagcaatatgtttgggccgggcgattcgagcctcgtgcggttcgtcgctggatatgcgaggtcttcccttggcaaggtactccaaacccagctagtagcttggtttctggttgctagcttgatagcttggtcaatttcatactgatatgatccatgaagtaattgtatttaagggttcatggtttcatggtgtggactgttgagtgtaaaatcagttctctcattttggtggtcaatacaactccggatctagcagtcatgctttccttttga

SEQ ID NO: 1784 - DNA, 471 bp, Oryza sativa
  unsure (1)..(471): unsure at all n locations
tgactagcatatataatgttgttttggagacacaacgcggttgtattttttatgataattgattaattcgtttttcttgtggacgcattgagaatgtctagatttatggtagagcacgagaaaacagttagtgtttgattttaatctgcatactgtggtggtgtctctttcagacttatcaaattttcagtttttccgctgtacttttcatgatcagaaagataaatataattaaaatatactgtattactgtaccaaattatgtttggggcttttagtccatatccataataggacttttactttgtttgctccctccaaattngtactcagccatctgttgttgcctcattggcattttgcatgcagaatgtgcaaatttcttccacgtctgagtttaacaagcaacaaaacatggtggcatgtaaaattgccttccttgtatgtgttagcgcatgcattcatttgatg

SEQ ID NO: 1785 - DNA, 387 bp, Oryza sativa
  unsure (1)..(387): unsure at all n locations
aggacatcacnaacgaaagngcacctagaaccacagccatatcatttatttggtccacctcttatcctgtacctaacattagtcacagctcgagaaagtctgttacataacaaaaccaagtcctccttctcgaatagctcgagtggatcatcggacatggcattaaacaaagccaatgcggaagactttgacgaagaagaaacaacactccacagaagatgagaaagaaaccaaagcattcgacttagaatcaactttacaagaaagaatattcatcttatgtgtcttcaatctcgcttaaagcgaatccaaagccaaagaaacatgtcaacggactactgaatagatgtaactttcatctgccaaaaagacatgtcatgaccattc

SEQ ID NO: 1786 - DNA, 357 bp, Oryza sativa
  unsure (1)..(357): unsure at all n locations
cggaaactccctccaactatcatngggagttgatcctgtgagggttcggctgaaccctgngctggcccaaccagcccagtttttggcaggctctccctgttgctgcgtcacttcagagacatgaaatcttgggccttttgaggttattgctctggtttgtagacccatttacccataagtctgtttctcgacagcgtccgattgattgttcgttagtttttatattgattcttctccatttatgtagaaatctctgcaaacaattaataccccaagttcaagtganaatatattactttaaagcacaatatgcattgcaagtatagctagttctcttttatttagttgtattgacag

SEQ ID NO: 1787 - DNA, 488 bp, Oryza sativa
tgcttcttgcttggctcatggcggatatcaaatcctcggtattgtttatacgcttgctagtcaacttgctgatgttgcgtcataatgttgaagtttgcgagatgtgcatcaacagactgttgctattcccgtgactgttccacatgatcctccagcgtgtgctgcatgttccctgcctgcagttcaagtgtatccgtcctccgggtgagtccttccagatgccctcgagaggagattgagtgatgcatccaagaggatggaggtagaccacttgaactgaatgagcgcgagtatccccagtgcagcccttgcagctcatgcctcctgctgtcactggcactctgccagaacgaacctccggcgtcatgttgcatgaattgggtccaaccacacgcatgcgcggtatggtctcaactgtctcggtacatctgcaatggtggagaatgggaagatgcctcttgcggtgctctttcaccatacgccgcgtt

SEQ ID NO: 1788 - DNA, 478 bp, Oryza sativa
  unsure (1)..(478): unsure at all n locations
agtcacctgcngcatgcaagacttgttgctggtatatataatcaattcatgtgatttagctcgatgtgtattactgaagtgctgaacctaatctcgatagtgtaagtacgtcttctcctaatatctacatggcaaccgagctaaacacttgctaggcagattacaaggtggctcagataattaatgagtttgcatgaaacttttctaatacaccccaggaaatgctagcttcatcctttgtgctagctaggctttaattttggggcttcatgtttaatatgcgtagttctatgcagtggcttatccagatggacttaactacatcagtttgacaattaccatcgatctgcatgttctaacaaacgagttgccctcatgcgagaaattaaatcctttagatatctcatagagttgcaattagcttagttcacatctagaaacctctcgagcacttagcataacttacttaagtccatat

SEQ ID NO: 1789 - DNA, 109 bp, Oryza sativa
  unsure (1)..(109): unsure at all n locations
catacaaatgctactgatattggagttcataatgaatgtctatgctgcaccctctctctctctctctctctctctctctctatnacaccacacacaccatacacatctt

SEQ ID NO: 1790 - DNA, 332 bp, Oryza sativa
  unsure (1)..(332): unsure at all n locations
cagctgaacaagggagatttataattagatgacgaccncgncnncccacccgggcagacgaaagggtgcggcagccacccacccgaaaccaagaacgacggcaagatctcacgacgtgacacggagtcggaccantcgggagagaaccagatnccggccccgccaggactcccaaacgcggcagaaagccacccaaaccagacgaccgagcccgcgcaagcacacaggcgaatcgcccctcccaacgcaccagacaagaagagggctacccaccgacccgagaagcccccgacaaagacgcgcaccacacgacagcgccatcccgagagcca

SEQ ID NO: 1791 - DNA, 368 bp, Oryza sativa
aacgtagttgctcacacacccagcgtgatgaccccgttccccgttgatgcacggagaatttcagtgtgggtagggtagaacttgtctggcaatgtaaattagtagtaacatgcataaaatctggctatttgcatttactgctatcacacaatccaatgcaaaactcattcatgatcggtcaactttacaatgtttaccatgtgatagaactatagaaatgaatgagacgtcatggagatattgatgtctagattttcgatgcaaaatggatttctcttttcttctctgtacccagagggaacaaatgctaatcatatttcagaaaagcaatagttattttctacgcacatgaaactgactatagaatt

SEQ ID NO: 1792 - DNA, 293 bp, Oryza sativa
caaaccaaccaaactgggtccgaatttcacttacaattatgatgtgtgacgggggataaatttcctacctctgatacgacatgcttagtttaagaggtcttattcagtttcctagttctcttcactgaagaatgagttaaatcatctagctgctcagatgaatcccatttatcaagttcaatgaggattactggtggacacttgataataagccttcttgaaatgtttgatttttttcattcttcaattagctagtgtaaataagtaattctgcattcacaagggctcatcta

SEQ ID NO: 1793 - DNA, 439 bp, Oryza sativa
ttaccatcagatcaggggggtgttagatcgattcaacataattatgttatgccaccggtagatctaaaccagatcttcgcagaaggagatccagcgatgggcgtggccctggctgtagagatgtatagtggatacggagaaagtatggatggatcgtaccggccggcaagtaagccggcggagaagcgagcggccagtgatggccggcggccggcggccggcggatcgaccatcttcccagcggcggttggtctccccccgcctatggcccaatgctcgtcgtgggccgtgcgcggcccgccaaaatcccctgaaaaattccaactcgaatcgcctcctccctttggccaaaacacgggttatccgcttgcatttcgcttctcaaactcagcttaccgcctaaccccacccacggagccgccacatcacggatccccac

SEQ ID NO: 1794 - DNA, 398 bp, Oryza sativa
  unsure (1)..(398): unsure at all n locations
agcttccaagtctagctcgttttatcttntccgctgtcatttgaatctgttatatttttgtaagatgtggatctgtgtgtcaacaattatcgtttgtgtaccctggctagtcctatacaggggtttaatgcacattcagcttagaaatcctggttcgtgaatttctgggcgtgacaactataattataggaatatgatctttctatattctttccacttagcttagataatcatgaattagagtataaatgcttctgcttagtgtcactctacccttggaattatgttaacccctgcttaacttttggtattacaagtaatatataaattattagtacggttctctctattataatcttcccacgggattaatcatataccatacccttggaatactc

SEQ ID NO: 1795 - DNA, 421 bp, Oryza sativa
  unsure (1)..(421): unsure at all n locations
cacaaaaactcagctnggatacacttacttgctgcctcagcgactcagtttcttctatattcttccttgctgcctctttctggtcctctaatagcttctgtagatcaactatctgcaattgcataccggctgatcccatcttctcagcatgcaattcactctctagctcacatacacgatcattcattgcagcagctatggcatcattcttcatcactgaggactgcatgccaacattgacgaaaaaagatgatattggcagaacatgagctacagcttcaacaggagtctttggatctttgccttcttactgtggctgagcaacatatgcctccatttgagcctagcaacaataaaaccaaacaagaaatcagactttctatgctacttatgtatgcgtacccagaacaatatatgcgta

SEQ ID NO: 1796 - DNA, 334 bp, Oryza sativa
ctacgatagaggctaatgtcactgaaacacttctcatgaggctgtgtttggacaacaagttcccatcttctcccctcgtattccgcgcgcacgctattcaaactgctaaacggtgcgttttatgcaaaaaataagtttctatacgataagtgcttaacaaatcatattgacccatttttgaacaaaaaagctaatacttaattaataacgtgctaatggaccgctccgttttccgcgtgtagaagattggttcctatctagcccaagcgaactcagcctggtaagcactcaattctttttggactttgttattcatactactactaggtattat

SEQ ID NO: 1797 - DNA, 441 bp, Oryza sativa
cttgggtctatcatgttgaatattatacctgtacagctgttccaaaaataaataatcataaggatgaccaaagcaataaagttttgatttcattgttaaccatgaaagacaacgttacaattttgctatgtttagagtttttaaagaattaaatccagctatgacacatgtggacactacatgtaaagagaagagttctgtgtaaacatctataacagctacagtatgagctagataagatattggtgttgatgttgatgcccattccaccaacaaggcaacaacaattgatgttgatcaagctacataagacaatacgagctcatatacaaaacatatgttgatgattgatagagcgtcttatggagcttaaaattctcacaggcacatcactaccaagatatgaataatcggcacacaatggcttatatgctaatgcaa

SEQ ID NO: 1798 - DNA, 450 bp, Oryza sativa
  unsure (1)..(450): unsure at all n locations
agcttgtggaaatggtgcattttctgaccaatgggtttngataataactggagatcaaaggatatgcgccacttactagaagatgcctgagatttatactcatgaagtttgctggaatcttgcattgttcttttgagttgcttcagtaatgtactttgagttcgagctttaccgtttcagttcttgtggataccaacaaatatgaacggcccaagtaacatatctatgcctttcatgtttcaaatgcttcctgtttgtctacttttctactttatttatgtcttattatagagtgacaagagcagaagaattacgttataaaattgtaaaaaaatacatcaaagagagcgaactactgaattctgaatctctctgcttattctagaactcaaatatctctacaagtttttattttccgtcctgatatgtacctttccgatttatctttaa

SEQ ID NO: 1799 - DNA, 439 bp, Oryza sativa
tactttagtgccattgggaacaagctgctgaagtattctcattctctcattaatcctttcccttctcctctgttaagatggtcagaaacgccgtcagaaaaaatacttcagattcaaacattagacaaattaataacacaattaggtcctaaccttagcatagaggctttgtgtatccttggagcactgcttatggcctcttgaattgtcactttgtttcagcactacagatccatcagttgcagcaattgaatcctctccgacgctgctcccggaggaacagctatgatggacaagttcagagctagtctcatagtcagtaatgggtgaactacttgatacctaaaataaaatgaatgttagtcattacaaccagttaagcactgaaccaaattctcatgccaaattgacctaccgagcgagaagttacgggtttctt

SEQ ID NO: 1800 - DNA, 401 bp, Oryza sativa
  unsure (1)..(401): unsure at all n locations
tttttttttttacnncanagaaccaacanaggtatataatacattcacacatgacagcgcgaatagntcacacgattttaaatttcaagttcgaatctaatttgttccgatccggcctatacatttccaaccggtcttaagctgtgtttgaggagaggagatagagaagatcgggaagacacgcaaaacaagatgagtcattatcacatgattaattgactattaactatntttaaatttaaaaatgaattaatataatttttaaagcaactttcctatagaaattttttgcaagaaacacaccgtttagtagtttggaaatcgtgcgcgtggaanacgaaacaaactcacttacaatcacccagatcacccaggaaagaacatagccttaatatgcaatg

SEQ ID NO: 1801 - DNA, 396 bp, Oryza sativa
  unsure (1)..(396): unsure at all n locations
agctntatgttctgcgcagactattactggaacctangatcaangaatgctctatcaatcacgatctactttagacatatcttctgaaacttctttcaaatccaaaagtccagtatcttcctacaaattagtgaattaggaggagctctttgtgccgaaaaagaaagagcagggcaatatttcaaacttgcattcgaactgcgaaatatttatacaaaggaggagagatcaagataatgcagcagggttggttatctaattggctagtcaaacatgaaggtggtcatagatctttgggcttcgatcatcgaggaatagagaacttgcaaataaaagcagaggattggggatccattgctgtcattntatatgtatatgggtacaattanttacgtt

SEQ ID NO: 1802 - DNA, 477 bp, Oryza sativa
cggacactataaaaactcaagctttccctgactgtgctcaaaactaatccattcttctgataaaaacgggtggttctagcgagatgtgtaatatgagtacctatacgctttgtcgagatgtaaggggccattttaggattccatttcttaataccatgaccaaaatgaactcccgcttctatcatctctttcaaattgatgattcaatatcatcttgtcattttttccacacttccctttgattttttcttttttttcatcctacctttccattacgaaatttctttcttttcgaagattaagaaagagccgaaatagcttgacataaataataattggttcgatggaaccttctacatggtataagcattaccttaatgaattaactaaacttcttttaaattagaataaaatagaaaactaacctttagtgtctatgtcaaaatctatttaagtaaaaaaatgcttatgatccta

SEQ ID NO: 1803 - DNA, 390 bp, Oryza sativa
  unsure (1)..(390): unsure at all n locations
taatcaaaaggtctctatacactcacagtttccaagattcttctggtattaatctcagtattgaacaatccgttatgtcagcaggaaccaccatggcctccaacccccagaacaaaggtggtaaatatgtggtataaagtaaacttacgtaatagctcatgtaaatcctgactaaaaagtcatctaagttacacaactatataaaacttgtccaaatttgacttatataaaaataacaaattttgaacctatctcataaacaaaatcgagtttggacaagattgttacatgtgtaatctcttcatctgaattatgatgactntagtcaaggtctacacgtgattntatctaagttaaagggtttcaccatatatntacctaaacacaggt

SEQ ID NO: 1804 - DNA, 382 bp, Oryza sativa
tatctcttacgctccaggaatggatcagtcagaacatcactatcgtctcgtctcgaccgccgccgactggtgtttccgactgcacggctggactattatgccgccgttgttgggcgtctacgtcttcaccgaccggcttgccttcgccgccgacgactggtgtatccgcctgcacggctggcctttatgccgacgtttgtgggcgtctacatattcaccgaccggccgcctcgaccgccgacgactggtgtttccgcctgcacggctggcctattatgccgccgttgttgggcgtctacatcttcaccgatcggcttgccttcgccgccgccggctggtgtttacgcctgcacggctggcctttatgccgacgttgatgggc

SEQ ID NO: 1805 - DNA, 519 bp, Oryza sativa
  unsure (1)..(519): unsure at all n locations
acctgcngcatgcaagcttcccagcttctaaaattaatgatgaatattttttaatanaattattcctcatcaacaagttttggaattgtcgtacatcaacttattattaactctttaatatttaccccattcatttatacactcaaattaataatggttataaactcggtatcaacaagcatccagggacaggatctagcatcaagcaagagggggctcgaggctcatcttcttcttcctccttaactcatctacttttcttcctacgcctcttttntcaccttccatccctcctcttcttcatcaagatctagcngngtggngacacacgaggccccccagcatctacactgaatccacctcacatgcatcatcattatgtagcaatattatccanagaaaaatgatcaanaataacaaatgccaacaacagagagttataagatagtaacttncatttatngcgaacttcaagctgtatacaactttcnaatttnttacttcatgtactnacataat

SEQ ID NO: 1806 - DNA, 419 bp, Oryza sativa
  unsure (1)..(419): unsure at all n locations
ataaatacgggaaggttcgctgaaccgcctgaccgtatgcatattcatgctctcgtactctactacagtactactagtactccagttaaggccattaattacaggatgtcatcatagactaaaaccgtatctcatttcttgcttcaaaaaaggttatttttagataatggaagtatcttaatcttctgcaagatactngtgttgaaaaaaatcccgcgcaactattttccacccgttgcttgtgggattaacgcgcttttatttacgattatttctataatttagtgattacgcgcattgatcggtagcgccaaatttattttagcaagatatatcgaagaaattaagatgtactaatggtgcaaaacatcattctcacacgaccaaaagggagtactcctatccagtaccattcacag

SEQ ID NO: 1807 - DNA, 237 bp, Oryza sativa
cacacagcacagcggagacaaaccacagatcgaaagagatgagagcagaaacaaaaaagagatagatgagatgcatagaatcgagcaagagggcgcaagagacgagcggagaaaagcgacacagcagcggccaggggataaaaataaccaccacacaaagcgcacggcccgaccgaggcagtagagggcccacacaagcgcaggaggaccgacgaccacacagcgacagagcaacaa

SEQ ID NO: 1808 - DNA, 433 bp, Oryza sativa
  unsure (1)..(433): unsure at all n locations
catgcaagcttctanctgtcaccttttgagggagaaagttctttctcattggaccttatgagagagctagctcgctctcatttgtgtccattgtttcttcgcgtttgaatggagggaagggacggatgacnagggttaggaattcgtcccgtttgatgcggccgccggccaatggttacgtacgaaccttggagcctggtaaaatggaaatgctgcaccggccatgacgacgagtcgacgatactggcatgaattggcatattgcgtggtggtgagcacgactcgngcaatgatggccgngcaaaatctggggtgattgtctccagtaaccattggattctctttattatggcgattagtgtcctgtcaaaggtagaccatctttaatttgcattcgttggaaaatggtcggaatgaaagagaactggcttat

SEQ ID NO: 1809 - DNA, 437 bp, Oryza sativa
actaagctactctcttgcatgatcgatgctctcctacgagatgggaatagttttattaatgcaagaatgaacatttacattgaataagttaatgaaaaggaactagccaccataagcatacatatagcagctacctctgatcctgaagtgtttggactgagaaaatttttcaaaattgtaagcccaacagctgcattaaaacaataatgggtatgcttagaaaaatctgaagtatctatatattctgcgttaataagtattaacagaccttggtgatcaataccagtcaagttatcataactcaagaatctacatgtttcaatcctgtcttaaaatacattgtacatacttggctatggcatatcataacacattcaatatcaaactgcattttacctccgctattttctggggaaactgacagcctgaatgttgcc

SEQ ID NO: 1810 - DNA, 464 bp, Oryza sativa
  unsure (1)..(464): unsure at all n locations
agctngtcaccaacactagtgaatgcactaatcagtccgtcatcttcattctcttgcgntanggagtnttttggcttacttgcagatgacgcctccgcacgatcatcagtagttgcaggaccatcattctcttcatcattgtcaacttggacatcctctattcctaggactgaacttgagtcctttgcatacattcctgtagccatggtgctaccaaatattgtaagcatctcaccatagtgtgcaagaggtttgttaaaataatccgcatcggccttgtgatccttcatgaaacaaaagttattgtataagcaaatggaataaaagttataaaaataaaacaaagatcccacaagggaagacatatacctcaatataaccattatagtgctcatcatcaagagtaatatataaatttttctcatcccaactagcagaactcactttccctgagcctattttct

SEQ ID NO: 1811 - DNA, 440 bp, Oryza sativa
  unsure (1)..(440): unsure at all n locations
tcgagttcttctcgtatggcttggtttcgatctggtgcatatcttcgcagatattgctctactggcttggcgtcgggttgcaccatgagtttgtgctcaatcacctccctggggacccccggcatgtcggacagctgccaagcgaacatgtcagcattgtcgcggatgaaggtgatgagtgcgagttcctatttctcgcctagtgatgccccgatcttgacggtcttgtcngggttggcactggagagtggaacgatcttgattgcgccgtctggtttcggcgtcttgtttgttttgctcactatcttgggtggctcaactgtggcgggtgggctgggcgtgtgctccaccatgtcgaggctccgcttgtcgcattgcactgccagcttaacgtttccttgatagtgattgtcccttagtcgggcatcttagcactgata

SEQ ID NO: 1812 - DNA, 337 bp, Oryza sativa
gaagaatatctctcataagggttcgactctttatacgagccgatttctcagaatataacggctctgtcctttcaatggtatgcaacgtatccgtcgacagcgaaacgcatgtggtgatttcgtcaatcttcagatttgccggcccagtctttaaagatactcatagggatagggtgtacatgtctatgttcaaaaaaaaaaaagaaaaggaaatctctccgtttgtttgaaatattttggcatcccattcccaagactcccccaatcctatgtgagcacgcgtctatgtgctgcgctgcctttatccattacttctgcctaccactcctcctcctac

SEQ ID NO: 1813 - DNA, 330 bp, Oryza sativa
  unsure (1)..(330): unsure at all n locations
ttgtatgtctcgccccggcatcatatatttattttattctttttcctcttctattaatatgatgaaccataaattaattactttttaaagattatccttttaattaaaaatcaagatcggtagtcgagctcgagcttgatcgagctcaaacctagacagacgagcgagctcgttgacagccctatgaggaggagagcatctcgtcactgaagctccatgaggcgatcttcggaccttgggaggagattgcagcggtgcttggcatgggagcaagatggtccattggcggngctcggtatggggaggtcgggaggaggacgacctatcggt

SEQ ID NO: 1814 - DNA, 221 bp, Oryza sativa
cgaatgctcatactctatacgaataggtcatgtacttgaaattttgcacattgggtatcgaatctgcactcaaagtgggtttcttgatttggttatgtacactgtgtaagctaagttctcatcttgtacaatcgattaaataatatggttgtctatttgcgtagcttacgctattctgtctggaaatcacagagcatattatttattgaattatcttagcc

SEQ ID NO: 1815 - DNA, 374 bp, Oryza sativa
  unsure (1)..(374): unsure at all n locations
atgcatctaagcctgacctgtcttcttggacattttttatnctcttcaagagccaggcaacgtagnactgcagtataactatttacaagcatgtgggagaaagggatcaatcctgatgtggcaatttgtaattgtatcatcgatcaattgtgcttcaagaataggattccataagcacttgagattcttggtgagatgaatgatcgtggttgtcacgccgatgttgctacctacaacactttgataaaacacttctgttatataaatctgatggagatagtctatgagcttttggatgacatggaggttaagggcgtctctctcaacaatangacatacttctacattctgaagacgacagagaaacccaaaga

SEQ ID NO: 1816 - DNA, 473 bp, Oryza sativa
  unsure (1)..(473): unsure at all n locations
agcttagcttcccatttgcgctctcctccctctgtttcctctctttcacgcggcagtgcattcctctctgcgacgaatgttcaattctcttcctttgaccgcaggctttctacgaaaattaaacaattcagcaacaaccatatcctttttatatcgttctcatggtttggcttatatttatgcttcctagaaaaaatacacgtgcgttacaatgagtaaatgatattttaatcttatacggtttagctaaggtgaaattcaccatgggaattcgcttggattctttttagttacaattaggagacgaaagttagcatgntcagtttttttaaaaaaagagatatcttatacgattccttttatattttcaaaaaaaaaacgaacttatgaaccgactcatacgggaatctgtatntctaaaagcgaatgaacntanacactcactcatacacggatgatcgtatcatatactg

SEQ ID NO: 1817 - DNA, 413 bp, Oryza sativa
  unsure (1)..(413): unsure at all n locations
taatatngcagtccanaaaggtacttacctgtgtaccacctttatatgaanatccttgcgctgcaaacataatacagaggaacattgttaaaatctacaataacgcatccattgttaagatatacaaacacaggatgcatcggtgttaaaaatgagtactctacaaacggactcatataattgcttaccagataacatatctgtgtttgaatcatgtacaaatgacatcgccagatctcaactaattaaagtaaggattctagccctaacacttggtgaaagcatgcacataacagattgtaatcactcccaagtctcaactttaaggaagccaatgtttatgtaaatacataatgtattaaagacatttttcctgcatacatttaacattctgtgcaaagggactaaaatat

SEQ ID NO: 1818 - DNA, 152 bp, Oryza sativa
aatccttttcttaagaccagagttcccagtcctgcaacggtcggaaaagctggcaggtcaatcaagaacagtgaattcaagatccttatgagaactgctgaatgaacttaaggaaaatcaagaaagattggctcctctcaccctaatgagat

SEQ ID NO: 1819 - DNA, 418 bp, Oryza sativa
  unsure (1)..(418): unsure at all n locations
tnatctttgccatccaatgacaagattaagttgatcttacttattatgcctcttagactctatatctctgatcgattagcggaatgaagaaccaagccaactatggcccactttgtcctagtattacaactctgaaaacgaccgtagtctattgggagaacaatcatatgaaatggagaagtggcgcatatgacaagtgcgatgaccatttcactaaatttgcacaccatgtgaactatttcttgcgctacctcttaaataatggcggcaaatgtgcatatgcactaaaatagtactcagcattatattctgacaaactctctaagttcaatctcaccgtttgctatatacatgtatcgcaatgtcatgctcacaacttctccactaacactaattgggacgatactctcatatttat

SEQ ID NO: 1820 - DNA, 188 bp, Oryza sativa
gagagcaatgggatgggcttgtgctggtccaaatacttctggagcacgcagttcaaccacaaaggcttcatgaatcccatctgaatttcatgatcatctgttaaaaaggaagaaattgctttgggcatccaagaacaggcatctgatcttgctaacatctgcacatctgttttggagtttgaaggatc

SEQ ID NO: 1821 - DNA, 458 bp, Oryza sativa
  unsure (1)..(458): unsure at all n locations
tggaatcnaaaccatntccatgagcatttcatcatcatcaattcacaagcggagtcacaaagctgccacgctttgcacgagaatcacttctcatttcaacgtcatggacctgattactaacagacaggctatggttctctctccctctgttgctttaattttgttgctgtcgctgccacgaggaatatatataaaacagccatcatgattcatcgactgatcttccactgcttttttttttcacggtcaccggcgaagaaggctggatcgccaatctcaaaagatagtgacgcgaatagcatctgatcgggcgctgctgctgctgatgctgcttatgattgtatttgtgctaactaaaaagttttgtgcgcgttcagtctcacataatatccatctgatcttttgtctgctgggctaacatatatactccctacgcgatgagtccctctttggctgct

SEQ ID NO: 1822 - DNA, 462 bp, Oryza sativa
gcttcagtatgtgcgcgtgtgttatttttacgcacctttgccctttatgggaatatgatcgttttgtggatcttataacaatgaagccctgattattgatgagttgaagtctagctagatggcaacgtactctcttacataatgacaacaagccaagtattcatagagatcaattaaagccgtgaaattaattaactcatcttctagcacattcagtgatacaagttatgagcgcctagataataatctgtcattgatcatcggcgctacagcggtagagacagatggattcatgtagcatgcatgcgcaagagcacttgagcaatcatgaaggggttaattaatgaaattaagaaacgagaggatcctatcgttatcatatattcggagagaagataataatatgtaagcgctgatgcacgcatatatgcgacagctggctgtattacttgaagtcagatc

SEQ ID NO: 1823 - DNA, 220 bp, Oryza sativa
tgtctaaatcccgaatccgaatagaattgcattcatggctaggttggtcatctgtcataagggcattgcatggcatctcctgaatcttagttgcaggtgattcataaagaaccgaattcaagcgatctgccagtgctacaatcctcttgctatgtttaacaaactcactccccaaagaggaagcatccttgcttacccacatactagcggaatgagtaat

SEQ ID NO: 1824 - DNA, 394 bp, Oryza sativa
ataaatactaagctgggtcaagccgaacggctggctgcgaagttcggaattttgttttattacctaacgaacttctctgttgcgggccggtcttcatcgactagccatgtacatactttgtataattttttccttctctattaatatatgtggcagagcttatgtcctcctttaaaaaaaataatatgcaaatttctaagtgacgaaaaagggcaccattggctttatggatggtgacgaatctagggcgcatctaacgtaggcaaaagcgatcaatatatacatcgatatatcgtacacttaattaggataaaaaaaagtacatgcacgacactccatcaatcatggcaaatgcatatgttaggttttcgtcaccggggtgcttgaccatatt

SEQ ID NO: 1825 - DNA, 208 bp, Oryza sativa
ccaggaagcccaggggaccaacccgacaccacacgggcgaaggcacgcataaaggagcacaaggcaccgggcaaagaaagaacgcagccagaggggccccaaccacccacgtggacgacgagaaaagagcagaagagggacagcgaacagcccaagagcagagcggaaaacgacgccggggcaggacccgggacggagaaggaaagca

SEQ ID NO: 1826 - DNA, 394 bp, Oryza sativa
tctcaaggaggcattattatatatgaaattttgttgtgcgtatagaacaatgaatatagtctattaatgtagtactgtaacctatgtatgtaaaggattctatattccttaagaatcgccccccattcaaatagtgtgcaaccacagactggcgtcctgctggcagttgaaacaaggtaccctgcttgctttcttcctaaaacctcacaaacccatcattgaattgaagaaagcctggagcatcatcaggctaattaccttcttcactgtgaccatggtgatgttatcgattgtgaattgtgatagctaggtagcaatgggtttcttggtttcttttacaccacccaagcatgcaacacattgccactatctatatcgcatattatgaattcta

SEQ ID NO: 1827 - DNA, 458 bp, Oryza sativa
tactaagcttatgcacacagctgcatcctgtagttgatataaagagtttattcttctatagaactcgcattcattatttcaggataaattggtgaattggttttcaattgccggtaactgaaatgaatactccccccataccaaaatatagtaatttctagcattcgtaatccatcccaaaatatagcaaatttaccacctacattctctcaaccaatcaaaaccttctttgtataatttctccccctacctccttttctcaacaaatcataacattgacccattttattccacctacttccttaatactcgtggttaaccccaaaacttcttatattctggaacggaggtaggacttgttagtatatgacaaatgatatgactgaacccactaaaatcattggtgatacttctgaggagtaatttctatcatgccaccaattaaacatctgaaaact

SEQ ID NO: 1828 - DNA, 336 bp, Oryza sativa
gcttatcatgaattccgattgactacacagttctatatcttgaataaatttatctagtggcaaggagagaatgcacaatttccaatttaaaaacgtctaaatctgtattgattcgactacattttagtcaaatcttctgagaaaaatgtcttctttgtctgacagagtaccctattatggatcaaatttatggaaaaaataaataactttttactttatgtcacattttgattactgttgtttcattctaaaccatcatgtaaccaatggtttcactttgtaccgctcgaatcttagctttgttgactctgatgaccattccactcttgcttaaca

SEQ ID NO: 1829 - DNA, 410 bp, Oryza sativa
gcacaacaacaacaactcgttatgttcattaatattttatgtttaaaactacttatacgtcaggagtaggaatcacccttatgacacaactccagaaccgggagtacggcacattcgaatgatttaattcacctctgcggagactgtccagctttacccacacgatgagaacaatttgcaaggctgataacaccatagccgtacgagagtcccacttactactagttactgcacagtggtgtcttggttcatcaaagcggccgaaatcttgccatgcctaggcaagggatctatatcgtcacactcttatgaattccactggtgtgaaacactgacccctaactcttatgcatgttaccccaaaccactcatagacgcctccacagctttcataagtggacaatgactag

SEQ ID NO: 1830 - DNA, 385 bp, Oryza sativa
  unsure (1)..(385): unsure at all n locations
cccctcttctcgcttgtgccctcaatatccgctgtcngcaccttcgttgccgtcacgcataggcaccgncgcgcaccaccaccaggcactgccactgtctacaagacactgacatatggngtccatgtgctaactcagctagttaacggggtcaaagatgccacattggacgaaaaccacctcccaaaccgtcgaggagtcgatttgcaacggtcttatgagttggaggatggngtgtatcggttttgcggtagagcaaggtttacgattccgacaggcccttccgttccgggcatcggcggtaattcggaattcgcgaaatcccggtggaaatcggtatattccgaacaaattcntataaaccaaaattgaatataaattccct

SEQ ID NO: 1831 - DNA, 382 bp, Oryza sativa
tcatggcgcttccaatgacacctacgacaccttcatgtgcctgcaggaaacaaccacctgcggggatgtcagtatcagatacccgctctacatttctgataagacgggatatatcaacgggtccagcaactcatactgtggataccccggcctggcgaacgattgtgacgacggcaagcccatcctgcaactcaacggcgccgagaagtacaaggttaactacatcaacgttgggagcatcaccaacgtgtccctggtcgattaaggaggtcgtcgacgacagcagcggctgcccaagagtcgatcacaacgtgaccttcgcacagggctcatggctgatcttacatgctggcatgtcgtaggattacctcgtcttctttct

SEQ ID NO: 1832 - DNA, 408 bp, Oryza sativa
  unsure (1)..(408): unsure at all n locations
agctcgatcaaccattaacttgttatcctaatgtgttaaggtntggncagggggatgcacaaatagtgcttcaagatccattacgcgttcaaagccttntgttcttcttcgcatccgttattttggcacaagtttttctggttctcaaaaagaaacagtttgaaaaggttcaattgtacgaaatgaatttctaggtcccgggatttcttaccatcaagttggtaaaaagccgcgatttattggcgattgctataattctctatgatccattttggaaatcttttttttgtttagactatctttttgttgcgagatgtcttgtctgcaattccttatttctatcatctcatgcaaaacgaggagaatgcacggcaagggcgagaacaatataaggaacaaatcctttta

SEQ ID NO: 1833 - DNA, 372 bp, Oryza sativa
cttgaccaactccaggcccaatataatcaagacctacggtcaatccagcagcaataacggaagcagcagcaattattggattcatgatgagttcctcgtgtcacaaaaaagaaatggttaacgatacaatcaaccaagaaattcatatttctaagctctattggacagaagtaactaaaaagtacaaattgaaacgataatctgaattctccgaactgcttcgagatctcctttatagtttctaatcattagaggtttgcgtactcattattctatatctctttctttccaaccaactgaactatcattccatccttctatctttcctcttcgatatactcgagtttctatttatttccctatcatctaatt

SEQ ID NO: 1834 - DNA, 455 bp, Oryza sativa
  unsure (1)..(455): unsure at all n locations
agcttcaccccatgacctgtgagctgggacatcattgtcctagctgcacattccgcggattcacgcactgccagaacttgatctgagaaagacacgagcagcaacggtagcatttgaatgacatacctgcaagacaaggatcacaatgaaacgttttggatcaaacaaagcctacaataaatggtatctcacttacggctcanatagtttgccaagcttctcacacaagcactcaaatcctagtaaagctccttcgcgagaatttgcagaagctctggaatggacagatttagttatagtttcttgtcaaaaaggacagagaatccacaaaagaagaaagtacgatgcaaagtattatcctgtcatttgaagatgcacgagcgaggtcatatgtcttcaaaatgctgaatntanngccattttggaacatanntaactcacannagtgaattcta

SEQ ID NO: 1835 - DNA, 456 bp, Oryza sativa
  unsure (1)..(456): unsure at all n locations
taattataggaatcgtcatttgtttacatatgttcagcaaaaataaaacattaaaatactggttgtaacaggaaacaatcaacaataatatagcattcttctaacttaccgcttcttcagatcttcaagaatagttgttgcacctctatacatctgaaaaatacagacaaatattttatcttagaatagctatatcatgagaggttaaattggcaacccattcttagcctcaccgtggttccacagtcaccatcacccactttactatcccattcanttaagntattcttgatattgattaattctttagcccctgcttcaatagcagctccagaaacacccttgcttgttaactcctgaggtcagtgagaatctgcagataaatcatcgtaattacgacgttctatgtggttaccgatggactgatgacatgcatatgccagcatggtttgaaaa

SEQ ID NO: 1836 - DNA, 273 bp, Oryza sativa
cggaacaggacgaatttagtgaaacaaaccagaacgacctcaaaagtgcaacccaccaaccaaaaggcaagtgttaagtacgaaaacacacacaagcgacaaatggttgcagcaaacaaattgccaccgccaagatacagaacagcgaggaaaacaaccaggacaaaaatgtgaaaaccaaaaaccccacaaaacaaactgatagaacgacgatcagacacatgatgtggagaaaatgactcaggccggcttaaggaaacacgacaaaaacaa

SEQ ID NO: 1837 - DNA, 137 bp, Oryza sativa
agctccatatcatcatgggggacatcaacacctgtacaaacaactttccaaatacttggatgcagagagattagattcaacttcatcttgtgctttcagcggcgtaatgtgtcccatcaaaatgaggagcatgcccg

SEQ ID NO: 1838 - DNA, 431 bp, Oryza sativa
tggatcgcatgggggcgacatacgcgaataatatgttatttatcctatacgtgatcaagaaaaacattgatatcttcgtctgtggccctgatgagatgggaggtgtttcgacagatctcatcatgcatcacccgacagtcaagccggataccaagccaaggaacagaagctacgcaagatgtcaggtgatcaccaagaagcagcaaaagccgaagccaaaagttgctcaaggctagggtcattctagagatcgaccaccctgaatggctggcgaatccggtaatggtgcggaaatcaaacggcaaatggcgcatgtgtgttgatttcacagacctaaacaacgcatgtccgaacgatgaattccccttgccacagatcgaccaactcgtggactccacagctggctgcgaactcatgagctctttggatgc

SEQ ID NO: 1839 - DNA, 201 bp, Oryza sativa
  unsure (1)..(201): unsure at all n locations
ccgagcagtgttggactgtataaattctcatattctatacatacccctatatgcttttgtatatgaaatgcacaaatcatatccctgaatccttacattaatttctgaattgtcaggataacatatatcataagtagtttggatttacaaaattcaccccagatagtaagagagcatatntttttcttattgcctcctatg

SEQ ID NO: 1840 - DNA, 472 bp, Oryza sativa
gctcctactttttttaaataagcatgctactgttgggtttataaatcaatcgattggatataatatcgttacctctttaccacgtaagtgtgcatttttgtggaccaatattatggcttaagctgattatatattttggtcattttccaaacggttggtaaatcctttatgagtttatttactcagaatttacactacatatgccttatatttccaggtgtggtgaaaccatgtgtcttttatggacttgagtatatttgttaaagcagtgtgcacgtggtgtgtgcccgacactttggaaatttctttattcacagcataaaagcttctttatagctattttgctatgtgaattttcaaagatgtagtcaacttttggttgcacgcatcatatattacaagcagtccggtatatcactcgagtcttgtttacatcggagttcatatcgcatatgctattattatgctactt

SEQ ID NO: 1841 - DNA, 354 bp, Oryza sativa
  unsure (1)..(354): unsure at all n locations
gaatatggatgagttgtaaaaatggttcttcactccaaagagcgcactcgctntctttgttttggagttcatgttttctgggcgtcgtcctcccgtctcattgggcccggcccttcttgtatagctcatggagataccacatgcgccgcctctacctacccttcataggagggggatcccacttcacttttactgggcttcaacccgtgcgcttctccggaagctaatgcacaaccggttctcgagtggaacccggcaccgcctccgcatacacggaggacagtcctgtatttcatctaaatgagcgatacttggacaacccttctcgtggacgctcgatgtgacggtatacca

SEQ ID NO: 1842 - DNA, 462 bp, Oryza sativa
taaagccatgaatccctcttatgcatatctggatctggattctgcttaacaaacatatacgatgagtagcatctgatataaatataatactcgagaaaaaatcaagctatttaaaatatctatcaatatgtatttctcctcttgtcaattttgatttccccgagcagatgactcattacgtttaaacactctgcccgactaatcatagccaccaagcactgggagtcggcctaagcacttcccaatcatgcatatgagtgtcatgagttcgtcattaatggaacatagtttcacggatctggagttactactcgggtacttttgcaattattaagaacagaaaataaattatcctatctctatgctcttgattattccgaaaatacttgcaccttgcgtattcggccatcaacgagccccggtgctggaattgtcaaggcaccatcattggaaccgacggaa

SEQ ID NO: 1843 - DNA, 347 bp, Oryza sativa
gaatataatgtgctcgcccacctaaaacacgtgcctgcgttattaatctgttatgatgctcatacgtcggtgccacatctaatggaagctctcgtaaatgattactagcctcggagctctatgatgcggccatggctaatcatcgactcgtctctaatccactgtatgtaaatgagatcacctttgactatcataacaaagcctgggaagaggaagatcatcatcgcccactctatttcgaaggaaatattgtgagcgcacatctgtcacaaatcctgattgatccgggtttctgcgagatatactacccatgctaagtttgcctgtgcttgatttcactatatgat

SEQ ID NO: 1844 - DNA, 420 bp, Oryza sativa
  unsure (1)..(420): unsure at all n locations
agaagangttttttggatttttctaagacaggnngagagcangagcagttttactatctgaggccaccacaccgncaatcttgacatacacatcggaaaccagaggaacaagtccgctgaaccgcttcgacacggcagcgcagcggccaagcgaacgcacgtcctccagcttgttcagaatcaggaggacaactggatccggcaggcagtcgaattggtcgaactccggagccgggtctgcgtggattcgagccctgagatgcattgtccaactcaaaggtgagcacctctttattcccacgacaaatcaaggattccctcttctgctacggcttggtgtaaacactcctgctcttgaaatgaatcgtccagccaactgaacagcccgttcgaaattgaagcgatttcctgaaacaaacg

SEQ ID NO: 1845 - DNA, 368 bp, Oryza sativa
  unsure (1)..(368): unsure at all n locations
caaaaaatagctatgggnaacccactgagagacggggttatttctcatgccacgcgctaatcggggagcaagccgaagacgcgctcaacgagacgagaaaatcacagctgaaatcgatgccgatgtctgagacacgaggatgttgactaggccgggggcgactcatatccgttctcagaaccggtaaaagaattgattccagagcatgcagtggtagtccacagtagaagccagactccacgtcatccatggtccatggaccaagagtacacagtcctgagcccgcgaataacttgctcatccacaatctctcacttcattggcttggagcagactaacaatcaacgtgtccaccacaatcgacagat

SEQ ID NO: 1846 - DNA, 327 bp, Oryza sativa
  unsure (1)..(327): unsure at all n locations
ctctttttctattagccctctgttggcaagctgctgtcagtcttcgatgaaatctctactactctgtctgccaaattgaatcatgtattcattctaaaaaaattcgaaaaatggataagagccgagaagtcttatattatgaaccttcgattctaaaattcaaattcttctacattgaatgtatagctgcagcaataaatntggatcagcctttctactccctgcatctacgttgagcaggtatctttatgtaaccgcacaatacctaacctaatttattgataagagtgcttattataaatcaattcttgcaatctttttcaaaaa

SEQ ID NO: 1847 - DNA, 417 bp, Oryza sativa
  unsure (1)..(417): unsure at all n locations
gatccatcattttgtgctttaaacatgttcgagctcagatgatgcaatgtcttagggtggcgatgttgtgccgtccggatcgcgctgaacatcggnctaccatgtctgaagttgttactatgccttctagcatcaagacaccgaaagacagaaaggtacaagcactgtttctgtccaagttatgcttggattgcacatgaacatactgaatggcgattgctctctttctggttgtaattaggacgctctatttctttgcagacctacttatctactggttgggaacggacttggatgcatggttgtttaggctgttaacacagttgtctactgtcatgtgtccatgtgtgtaccgctaatcccagagatgacagacatatgtagctactgttaagctgatgttaactctgatgctat

SEQ ID NO: 1848 - DNA, 501 bp, Oryza sativa
gacctatagatacataagcttcgcgtaatgctctatacactcactgtaagcaatttatctgttgtatacttactacagctggctctcgctgtgggaagaagaatagagtaatcaccatctctatatgtcctaagagtagctaacttagaaccctatgagatagtcttgcggcggccacccaaatcctaccaaaatacacaaatcgctaatctgtttcttcattactggttcacggtactgaccaaggtatcagaacacgagcgaattcttggctcttggatctctctggtgaatgttggtggaacgcggcggcgagatccaccgtaaaatacctgagctaggagggattcaatccggatgcgagtgggcatcacatcggacagcaagggttggatgccactatcgtagagtgcacctgtaaaaactacgcgcttccgatcgatgttggcgctgagactcgcatgaggcgtataccggacgaacctgaatctgacccaaccc

SEQ ID NO: 1849 - DNA, 501 bp, Oryza sativa
  unsure (1)..(501): unsure at all n locations
cacctgcngcatcaagcttatgcaaaatatattctattaaaaatattttttaagtgttcaacttggaaggcacaactatggttgtcangatacttctactgagaagataacaaanaatatatgtgatatgttttccccagttgttcatatgagccaatcaacagcagaataattttacctgtcaaaccaatcaagctggggaatatacatttatgcctgctcacataaggcactcttgatgccttctctgaaaatatctcatctacctctgccaccaatcagcttctattctactcctacttgtaattaaacaacatggacaaatgcagtgatcaatgctctggccaaagcatgggtcttaatgtctgaaacaaacaacagatcctgctataattgtaggcccaactgtagcatcaattcagcatggtaagatcgaagacaagaaatgtgtctatgtcatgtttataattcattggtactcattcatctagaaaaaacaat

SEQ ID NO: 1850 - DNA, 452 bp, Oryza sativa
  unsure (1)..(452): unsure at all n locations
tcattaactaatntactcctaagctatggaccagctgctttttcttatatgaaaaatatgagacgccgcagcatgcttatctttgggtagttaaagaaacaccacctgtgcaaacaaaccatactttattttgcagcatctaactttcaaataaaatgggatagttaataaacaacaactaacagtactcacaaattgngaaaatatgcttgcactaaacaagcagccactaggtgtttcaatttacctatgcccccatggccaacaccaaatgaagaaaggccatagacataagacaccaaaggtactggagagagattacaacgggatacactacatgatgagaagcatgcaatataatactgtaacatatgtatacactccatgttacattgtttcatgccactatatcttatcggacaatatggatagggggaaacagcattgatatg

SEQ ID NO: 1851 - DNA, 433 bp, Oryza sativa
  unsure (1)..(433): unsure at all n locations
accatgggggagagttcttgttgtataaaaagacattatggagagttcttggttacaagctatgagcatctaagctagtggagtagtagtaaactaaaataatgtggagagaatcttactttggacgatctttaataaccaaagttntacaatgggttaagacctaacctatctttcacatgacaccacatatatagttatcattcttattgcatttggaccagggattacaactatacacatgttagcacaagaacaactaatgtagcaagttatagtagatcctattaaataaatggggttcattactacatatgaacgctcacaaatcatatattactacttaacagtngatggcacttaacttgatgaagtactcaaactacaaataatgaaatactcaatgttaattccataataatgaaactggata

SEQ ID NO: 1852 - DNA, 467 bp, Oryza sativa
tttcaccatcgcttgcagaagatgggccactgttattgtgtttttcttactttaactctgagagatatgatcaccatggagtatgcgcacacttgaaggggagcttgttcatgttaaagaatgaataacatcgtttgatgggaacttaatgcatccttggttatctctgactaactattatattttggctcggttaggtgcattacatacgaaacttcttattgaagacacagcctatatggttgttgtgctgtgacctttcttcctatataggatcatattcatactttattgaaaagtccatagtgtaccacactttccagagttcccaatggtccttagtcatatcacatatttctgagtaatagacgaacagcattgtgatattatagtggattaattcgtgatttgtggaacatgagagcacctttctggttccctcatgaaatttctccattaacctgcta

SEQ ID NO: 1853 - DNA, 327 bp, Oryza sativa
  unsure (1)..(327): unsure at all n locations
acataaatccactcacaacagctcgctaatncttttcaccttctcccgtattttctgaatcccaacaaaatcaactttcccagtnccttcctttagggcccttggggggtagagcagggagagacatcttggttggaatgggtccaggagaagattcaacactgaaactgtgtgttgaggatggatagcttgaatcnggtggactgaaataacttgttggctgacccagttttctttggcccatatcaatgcagaagctagcatggcaaattgaaaaacatgatggacaggcagctggtatgggactacatcagatgacatgggctg

SEQ ID NO: 1854 - DNA, 436 bp, Oryza sativa
  unsure (1)..(436): unsure at all n locations
gtcacctgcggcatgcaagctntaacaatntatggactagttgtggcactgtttctttttattgcgaacccttntgtttaatgcctaaaaagaaaacgagtcctttagattagatactttcttctttttttagtaaattggtatttgcttctgcaattccaattatatcaatactntactcctaatttattactcctagagttttctatttatggngacagacaataccccaccccaggaatagctgatttgaggatgatcaatttagaggatatgttcgccgtcttgcttcccgccctttgtttanggcagtggaaagtatttttccttttattttanngaatttgggaacatttcaacanaggaggtctttcacaggtcanacgagatctaagacttaatctannagaaattactaaatgaatctatttctatt

SEQ ID NO: 1855 - DNA, 494 bp, Oryza sativa
tcttccaagcatacggctttctagatgtatatgacgatcttattactatggatcttatatgaatcgcatgacgaagtaccacatgagtggatatatatgaaaggaatccaaatctgccgaatcgctcatgttatgatcttctacatcctatgtctccgcgttccgtcatctggcttatgttcttcatgtagcattcagatcgaatgactctatgaaattacgtcgatacttctacatattatgggtaacgtaagagacatccctatattcccccggtggtcttaattaccactgcttatctttcaattcgcctctgaccatcaaattaaatgtgaataacccgtcctcctctctatgaaacaaggtgcgctttcggttctgtgcgtgcttcatacaattttgtcttctccatattaccatatctctagagcaattattttctatgaggaactacgtgactcaatcacttgctgccgttactcaacagttatctg

SEQ ID NO: 1856 - DNA, 383 bp, Oryza sativa
  unsure (1)..(383): unsure at all n locations
cacagtttgctcataatccaacaggatttccaagtgatcaaaaatccaacccgggtcattgcacagattacccccatttagaatatattancgcctccacatggcccccataggttctggcgtcagacatctgcacaacacatgcttggtgtctttcttttctaaaccacacactaaacatatatcagattgctccagcttccgcttggctttattctccattgtggctagacaattggtggctgtctncatgcaaaattctgaccttttgggggcatggtctgcctatagaatcacattttttgatcttgggaagaagactaaactgtctcatataacaggtacatgnagccatatgcctctactgaaattgcctgttatcg

SEQ ID NO: 1857 - DNA, 242 bp, Oryza sativa
  unsure (1)..(242): unsure at all n locations
aatagattggctcaataatcagcatcttattttcttcctatcttggaaccttctgaaacaatctggcaaccatagtagcacggaggatntggagcaaataacatggcttaacttttcaggtggagcttaattcaagtgaagaagttcgtaatgtccgaccaaacatttctgaattattccaatctgctggaagaggggttgctgttacacggccagctcctgttggatctagctatgatttt

SEQ ID NO: 1858 - DNA, 364 bp, Oryza sativa
gtgagctattgtgttctgagtatggatcgacaagagactcatgtctcgattctacttaagagatgctgttcatcaacttaaatgtgaacgaaccgacctcccgggacagatcattacatcttggctcccagaggcatacaacttgattaagccgcgtcccacagccctaatcaatttctcgggaccacatagtctagctgccagcagtacacattacgcttccactgggaagcctagttatgaagcccgtcgacatcccgaatccacagattcattcctgaccactaggtcattcatctgcacataagctgatctgggtacaataccatacacaacaccatttccaaagcacacgcaacatatc

SEQ ID NO: 1859 - DNA, 381 bp, Oryza sativa
  unsure (1)..(381): unsure at all n locations
aagacacctgangcatgcaagcttaatgatctgcacgtagagggtctggtctgtgtctgcactcttcttttttgtgcccatattgcatagtgaccgtgtgtgtgccactccaactgataactcaccatataataactctacagttattgatagatatatacattacgtccctctttttaaataatatcatccaaatattagttaaaaagggggcgtagtgtatatagccaacagctgtcaaaaaattgaaaattacaacgaatatacgtacaattgcaaagtgcaaatcactcttgtactatcttaaaaagaaatgcagagtttggatcgatttgtctctaattctaggcaactggcattctgatttttacaagtgggtaa

SEQ ID NO: 1860 - DNA, 452 bp, Oryza sativa
  unsure (1)..(452): unsure at all n locations
agcttgatacatatgttagactccatatccagatttgtctaaatttctccaggtagagaactgtgtaatgcttgatcgacatagtgatacaaacatgaataggattgttattctccaagaggtctaagcctgtaaacattntctgtgttgacttagctccggagcaggtccaagcataccaaggatcccaaaacccctcctcgaccgggatcgtttgtttcccatgtttgtcaaattagtttgtttttccgacaaataataatatatattttccataaaatgtcttacctactaatttactgcagagattattcatattaaatagaatttatatgtggcaatctatttctatttcattgatnttttaataataagtgtaatgggtaatttgcacaactccaataggaataggtggtgtangatattttctgttacaaccattactcttcaat

SEQ ID NO: 1861 - DNA, 331 bp, Oryza sativa
tgaacctatatatcagaatatggcatccattcttttgtttctctgccattatatcttctgagaaagtgctgtgcatttcttcctactaatttaaaaaggcgacaaggggtaaacctctcattccggatttgaaatttccggtaatatcaccacccaccggaaaggtcagaatctccctgaaaatttcgggttttgccaaacatttgtaaatttggtcaaaatttgtcaaaatcactcacaatatgttataaattcaaaataaattggacaaaaaattctaattactgaaatttcgggatttcggtgtttcggtcctaacggcaaaacacaa

SEQ ID NO: 1862 - DNA, 166 bp, Oryza sativa
  unsure (1)..(166): unsure at all n locations
aaggcagaaaaaaaggcacgcagaaagacgangcanagnaaacancnaaaacagaaaaaagaagaagaaaaaaaaaagcaaaaaagaaggaggggcaaacangggacacnaaaacccacaacnanacnnaaaaggggacggagggacnaganancacnnaaaccaa

SEQ ID NO: 1863 - DNA, 96 bp, Oryza sativa
ctgcacaaaaaaacccacaagaaaaaagggctatttgtagttaaacgcgcaaaagaaacgcccccataaaggcaacacgtcaaacaataaccgaca

SEQ ID NO: 1864 - DNA, 460 bp, Oryza sativa
  unsure (1)..(460): unsure at all n locations
agctttgatcacacacgtttctcttgtattcgattctcttggaatactctggaagggaagtgttgcatctgtatatccatgctcttgccgattttatcaataaccgtatcatataccaacattgaatgccctatgcccatgccgtgcatttatagtataatgaagacatacaagataaggaaatcaatccaatccttttaaatagatggcaggcacccagatcataaagttgtgtcttaccattcagccatcagcgatcctggctctatataaagggcgccgatggaaaccctaaggngttactctatcattcatacaagccatcggccactccattgctgacctgcgcatacctacaaagatccaatctactcacaactggattatggtattaccttacattgaaggcctgaaccagtataaaccccaaatcaaaatacatttaaaagaaacaatcatg

SEQ ID NO: 1865 - DNA, 470 bp, Oryza sativa
  unsure (1)..(470): unsure at all n locations
cacataaatactagctgccncataatcgctcgcgacttccaagaccattattatatttgagttcatctcacagcgtatcgcttccttccaatagtcagcgtcaggagatgaatatgcctcttcaatggttcttgaagtatcatccacaagatatacaatgtagtcatctccaaaagactttgcagtcctttgtctcttactctttcgagttgctacaatgatattcctccttaggattatcctcaagcgtttgatcaatgtgttttatcggcacaaagtgctcacgggataaaatacgttcttgactagaagtgctaggtgcattttacatacgaaaatcattctcaaaaaatgtggcatctctagactcagtaattgtaccaacacgcatggtcggtactccacaatgtactattaagaacctatctcccacaatgtggatagcataacacaagaatacacaatctacc

SEQ ID NO: 1866 - DNA, 365 bp, Oryza sativa
  unsure (1)..(365): unsure at all n locations
agcttgccagcggcaaactgtggtctcgttgggtgtgtaccattatacaaaatgaagatcatgctattgcgagtccattcctcttcttttcttggtcagnggacatcggagtaacgccggcggcgagtccgagcggcggctgtgcttaagctgctactgcatgttgagttggtgctcaattctaagtgaatgaaatgcatgaatgcaatcctatgggctcaagggtgctcaccgaaccttgaacgaggcgccggatagtctggacagcggcagcggagaagaagatggtccggcgacggtgtagagctccgggaagacggcaacggctcgatccactcatcgaatngacatgcatgtgttttcat

SEQ ID NO: 1867 - DNA, 369 bp, Oryza sativa
ctgttgaaacatagaaagcaaagctcttgagtgttgactattattgtaatatcctcgcgtcaaaaaaagtactgtaatatccaactatatctcgaagacctttatgtatgcttcgaacacatttacatccttcatttagcgcaagatatatacttacttgttattttctactacctgcattgaaccatgtagagttatataccatattgtttaccacatttcatatcgaatcatattgcattgcattcggatgttatattatggctaggtctaccctgtgttcaaaacctgtgtccgtcactgatcctgtgctcatatgtgcatataattctgtatacgatagatacatattacttgaattggatttct

SEQ ID NO: 1868 - DNA, 390 bp, Oryza sativa
  unsure (1)..(390): unsure at all n locations
ataattgagaagaactgttgattgtgttaagaatcatatatataacctcaggggtgaaaccatacatccatgatactgtgtgaacaagtgtatatcccgatgaacttttttaataaatattaaagtgattaaattgtgcatggcatgctaggcggcaacaaagaagtggccattaaaaggcttagcaagcattctggacaatgagtataacagttcagaaatgaagtggtccttactgtcacattgcacgacaaaatctattcaggcttcttggttgctgcattcacagagaggaaaagcttctatatatgaatacttgcccaacaaaagcctggataccttcttntggtatgcctaacatatattcctttttacctttctttttcacgt

SEQ ID NO: 1869 - DNA, 189 bp, Oryza sativa
ccccagatcgcgcatttccagcacaactttaccgacaactctgcacatttctcggtacagttcatcctcttttggccgatttcccattctttatacctatttatcatgccaactatcagcatatatcaatctaaccaattaaacaaaaatcaaacaaaatcagacaacaaacgcgagaaattattttaa

SEQ ID NO: 1870 - DNA, 448 bp, Oryza sativa
ctatgtctcgtaatactgtattttttgtcgatgtcaaaacctggaccggcggtccgctgaattataaagaaggattcttcacccagttagccaccgatgagctggcaaaggggataaacgaagaggtggtgcgcgcaatttcggcgaatcgtaatgagccggagtggatgctggagtttcgtctaaacgcctatcgcgcatggctggagatggaagaaccgcactggttgaaagcgcactactacaagctgaattatcaggattacagttactactcagcaccatcgtgcggtaattgtgacgacacttgcgcgtctgaacctggcgcggtgcagcaaactggcgcgaacgcctttttaagtaaagaggtggaggcggcgtttgagcagttgtgctgtcccgtgcgggaaggcaaagaggtggcggtggatgccattttcactcattt

SEQ ID NO: 1871 - DNA, 177 bp, Oryza sativa
acaagagcatcatttgtgtgagatgcttatcagcttattgggcgtagaacatgtatgcatccacctgtgagagcctgactagatcgtgggctgagacctatgataggagacggacggcagaggagtattatgaacttgcttctagaggagagaagtgtacagtgtcattattgtaat

SEQ ID NO: 1872 - DNA, 382 bp, Oryza sativa
ttgacaaacaattctctgatagggaataaatttggtcagacactgtcatctgcttgaattaggcctatcatggctttttcaagactctgactctcccatgaacaacaatcataccatcccatgcaatgttcccattccatgacattccacgctcatacaccgatgtaaataagtgtatcaaactggtaagaaccaaacagtccaactcactggagttcttagtacttgagtcgtcccgaagttgaacttcccttacgaactcaagcccatgcttatagaaataatgtgatagtgtataaatttttatcgaacgaggaaccttcttctacatgaacacttctgttccatgaatcactggccaccgaaaggctaccaacatata

SEQ ID NO: 1873 - DNA, 329 bp, Oryza sativa
  unsure (1)..(329): unsure at all n locations
attctagaatatggtggatccttagtgcttctcggatgtcnttgatccattggcgacctggtagtgcctcagccaccgttcgacgccggcgcacgcatggtggaatcttatcatagatgttcggaacaaaggaccgaatgcaaccctcttgcaaccagctatcttcccagaagaggatagtttgtccgtctcttaattgatagaccgtagaggctgcaacgaagttcctttccttttgcgaccccggaatggctagcccctgccaaggtttgcttgaggagggccattgcaaccatgtccacctggaacgaagagctatacccataagc

SEQ ID NO: 1874 - DNA, 331 bp, Oryza sativa
gtgcaatctatctgcttcacaatactgcttggtgtgttgttatacgagcatgttgctcaagtggctcaactttgagacctgaacataatagatatcaaccattagttttgcaacaatacaatctattttctctgtacacaatgctatggacgatgtcactaaatatattgccaatgccacaaatacatcatatgagaaataatgctacagagaaagtgaccttttaatgcactacactcagtacctaagctacttaaatcatatcatagaagcggacattgaccccaaatggacgaacctttattagcgaaggattgtaaatactagtgtc

SEQ ID NO: 1875 - DNA, 470 bp, Oryza sativa
  unsure (1)..(470): unsure at all n locations
ttaatcacctgagctgcagcttcaaaatacaggaggatacataaatactttatacaccattaattgaagtaagtgactaaatattactactaataaaatctaggaaaattaagaagaacaattttataaactagaaaactaattatcttactaaattccaggttttagttattctttccttagctaanaaagcaacgaataaatctttgatttcctttcaatagttgcaggcaataatctatcttcagggcttattgtcacaatagtaacagtaacagctgctgctcagtgttgatcccatacacttgtgaaccttgaccttggctttccagatttttgcaccaatccaacacgttcccttgcacagaaagcctacgcagatcggactactcgaagtatgttcccagcattcagctgcaagatatttacacgcacatatcaacccgggtaataccaactaattatcagta

SEQ ID NO: 1876 - DNA, 499 bp, Oryza sativa
  unsure (1)..(499): unsure at all n locations
atacgttggtactccaatatctttatgtctttataatgacaatggntcatcataatgacaaagctgggcatcctttaagatcttacaagacaccatgtgttgtacgtaaaacttctagtttgcacttaattatgtctgctagttcattatagacgcaagccaacagaaataccggcatactcccatataacctatctgtattttgtttaaagcaatgtacatggtatggttactttctatcaatttatttcatcccaacaaaaatataaaagcagggtcacttgtcataaacagganagcttcatctcagacttgatcgccagatgatataatgttttttttttcaacagttaacatgatgacaagactgggtgtcattcagtttcttaaatattatgtntactgacaaattgtagtttgcactcagtgatgattgctggctcggagaataataatacggaacagaagtaagaaatttcattcgcatcaacctaatact

SEQ ID NO: 1877 - DNA, 333 bp, Oryza sativa
  unsure (1)..(333): unsure at all n locations
cgaactgcggcatgcaagcttgacttctgttgatgaagataggcgtgacatcaatacttcattgctaaaggaaatgcttatagagaagaagtgccttcctattggacggacgctattcaatgatgcctgtgtggactatgtnctctacagtattgttttcaaaacgcaagcagaatacttcgtcttgttggaacataataatggatttttaatggtattgacccaacagcagcttatggaattaaattcacaaacgggtctaaagtgatcacaagaagatgctaagcggtggcacatactttatattagacttgaagtgctctcgcatttcaa

SEQ ID NO: 1878 - DNA, 415 bp, Oryza sativa
  unsure (1)..(415): unsure at all n locations
tactaagctttacaggtgccatcacacttgtaaatgcaactagtgcattctttttatatccggcaaccgattcgtcaaagcctcagacataaatgctgacacctcagtatttaagaaaagagattacagcaacagtgattacatcaatcaattccaaccgtccaatgccatatggagcagtacagagaaatcacaaccgcaggttctgttcccttaatctaaactagcctttgccttctttgaacttctccagacttcagaatttctacagaagttcaggttctctcacttagcgacagatttctcaacaggcttcctcatctgtagaggctntgcaaatgtaacatcctccaaggggactggaattggaccagcagcttgcttgtaatagtagatggcctctntcgaacttgac

SEQ ID NO: 1879 - DNA, 442 bp, Oryza sativa
  unsure (1)..(442): unsure at all n locations
gcttgtctaaagaaattagcacattgaacagataactgagcatgagtagatgtcttttcctttcaaagttgcgagaatatgtatatgaatcgcaaaagaggaactgaaaaactacacatacctgcctaagccctttagcattgaatggggactgacgaacaattctgtgtgtccctttctccccagagagatacccataggcatatcttccttctaattcaatggtagctgattttattccagcttcttcaccaggggatttctcaaccactcttgtcttgtaccgctgcttctctccccacctaacatacatcctcagtaacatgtcagcccaatcctacaaatataagccattaaaaaaattataatcacaacttgctcttctacaatatgttttttctccagaanaacacgaaacatcatctattcgcattcttatatg

SEQ ID NO: 1880 - DNA, 414 bp, Oryza sativa
  unsure (1)..(414): unsure at all n locations
ccacgcacattcttatatttttaacgcttggttaatccacaaaagccgggacactntgggatcgaaatagtaaaagccagccagccagctagctgctgggagagcatggcagcggcagctaggggtaaccaacattagctagggattaattaagtagtagtacttgattaattagcttaagcatttcacaaatgtgcattatgagcatgtactggtagtactaaccactcactaggcaccaaggggtgtaatggatcattgtttacggctggctcacagctccaagcattggccttttcttcttttgattagtctacctaattgcctaagtacatatactaatggcgtctaacgcatacgagaggcgtctactaagagaatgacaggcnggacccaccggagattagcaacact

SEQ ID NO: 1881 - DNA, 373 bp, Oryza sativa
  unsure (1)..(373): unsure at all n locations
agcttatntgttgaagtatttcactgtcttcataatctagatgcacaattggatagttataagcttatttgttgataaattttgcacacggtgaatacaacagcctgtaataaactctggcttgaagcttggtagcatgggttgacattggccattgggtatgctcttatgatctgtggtcattaaaggcggtcgctgctttggtatgagttgaaagttattgaaataatttggtcgctttctaaaatgcatttagctttngctgaatttgttttcctatgttaaattcttaactgcttggggctctgctatgggttttgaaaatgctacaagtattgagctaatttctgaatcgacaatgagtgacacttct

SEQ ID NO: 1882 - DNA, 413 bp, Oryza sativa
  unsure (1)..(413): unsure at all n locations
tcctaaatttgacgttggtacccactaatgtcagaagtacacacgcacttgtgcttttagtgagcatgcgtgggcctgcgctctatgtggcgtgtgaagcgtgtgcagaggaaatgcacacgtctggtggtgttagtgtggcgtgtgtgggtgtgtgcatccaattgtactttctcaaaaaaaaatgatagatacttggttaaatggttagtgtcagtaaagttcttatcttggcgaatcatgacaacaagatgcanaacaaataatagccacagagcacatatctgataacaaagtgaggtggcaaaatcatcacctcactattctcatagttgcaagaatggttgcactggttcagcttttttgcatgttccttcttatgcatattcctanatgcatattgctagtaacat

SEQ ID NO: 1883 - DNA, 380 bp, Oryza sativa
tgttgaagctctctgcaacattgcccgctcttcagatgactggcaatacatggctgttgattgattactttggttggtgcacgattcacatacttgtcataaggtaggacattcttaaatacatcacatgcatcacttaaagggactctacagcacgaccaactttttgttttgtcgttgatgaataacctgaggtctactcagttaatcttttccagattataactatcttctaattagggttgcttaagatctacgccagtaaaaaatgcaaaaactatatggaacatatactctgatgttaaattttagattctgtcaatggactaatggaggcacacacactgtgttttaactggaatagatatgttgaatgatta

SEQ ID NO: 1884 - DNA, 503 bp, Oryza sativa
  unsure (1)..(503): unsure at all n locations
gtnttaagactatntncgaaatcaagcaccaactaatgttttctcaagagagttgagtgtggaccacacacaaaacacaaacttcatggcgcaaaaacaaaacgtggtggaatataatagttgggcccaaagtaaatcgatcgcctccctccagggcccaaaggcacatgtctgcaacttattgctcctgacttagatctctattaagctagctagccggtacttgcatgcagtatacattggactcacggtggtcaatgactcaatgatgttatcagcgagcttacctacctatatttcacctgcatatgcccccacacatgatcatcanatatcacggtgttacaatgcccactacatcaagacaggtaacttataggaatatatgcacttatcatagctagcanagaanagatngcagcagtacagtagtacacatatgttgctagcacactgtacagctagcttaattntgatcatgcatatatatgcatccatgcata

SEQ ID NO: 1885 - DNA, 423 bp, Oryza sativa
  unsure (1)..(423): unsure at all n locations
ncagctngccacgcctcacctcacctgtttctgctgcgagcagagaaagaaggggaaaacaatgatagaggcttacatgtgggccccatgtgcttgagaaagggatagagattgagagattacagatctaacatgtgggcccaagagcttttcagaactttcacatgaccttnttttctcctctttaactgaaaattataattttaatgggtacacgtgttcaccagaaaacatctaacttttgatagtgtctcccaccaaaagtcacttccacaatatcctataactaanaacacgaagtcaccgatatcctgtagcaaaatttgactttagatcacttcaaccgtaatagtccacaatgataattattaagctaattgaactcttttggcttacatatggttggagcttttcatttacata

SEQ ID NO: 1886 - DNA, 489 bp, Oryza sativa
  unsure (1)..(489): unsure at all n locations
tgatcagctatctgagggcccgatcaagtctaatattgatcatcttgaagctcgtaagaatgagctcttggcacaactccaagaatgcaatgctgatatgaccaagtccctaaaagtcatctctggaaccgatgctcaagatacccaagctattgaagaagtagaacacattaggcaaagagctatatcggcgatctagcgctacttgtctcagtgatattctataataggatgtagtaaatttttgtaatcggctaagatactctggcacttgtagttaacttgtcttgatttatgccgattaatataactccatgtttttgctcaagaatttgctcanaaattttgcaacttttgcatatatatgtgccccnctaattntacaatgtcgaaggcattgatgaaattatatcttgaactaagggcaatataacaatatcggccatttgtacatcggcanaccacaaccgattacaataggaaaataac

SEQ ID NO: 1887 - DNA, 372 bp, Oryza sativa
  unsure (1)..(372): unsure at all n locations
catccaatgtctgtataccaccacaaatacgtactttatctttctacgatcccatctgtagtaagatctcgatgcacagaatccttgaaatccactgatctcgcagcttgctaatgctatttgctagctactgaattgtgtggcccgtggtttcaacaaggactgctaattgctcgatcgccggcttgccttgcctgcagatcacggcatcggttgggggcacgttggattcaaaggagcatgccgccatgtctgtcaactattgatgccaagggagctctntggatccaactgctagctaggtcgagcgaagcatcttgttctcgcgcttgttttatcaaatcaaatcattgcgtcggtgagctcggtctc

SEQ ID NO: 1888 - DNA, 370 bp, Oryza sativa
  unsure (1)..(370): unsure at all n locations
gcagaacaaatcggggacatgctaaagtcataaatctccctaaaccaaaacgctcagataggacaaatggttgttcatcttcaattatcatctcagcaaaacaccttctaagcttatctggatcaacatttcaagtggtcacagtaccaagagtactattgtcatcacatggtgtcagttgcaaagntccttgattatcaactactggtttgttaggattctctttgcaaatcttcagatgagctttcaacgatgacgtaccattcgttcttgagccgcaatgaaatagcttggtacaccacttgcacttggccctctcgtactcattagcaacgttgaccttgctgaaactttcccatacatcagatct

SEQ ID NO: 1889 - DNA, 351 bp, Oryza sativa
gatcagataagtgtaatgcacagagaatattattctccatacgtagaaatgaatacaagttacataccttatcaaacaatccaaccataattacaggtaaggccgagaaaatgacattataaagggactggaaccagtcatcataaaatcgctgaccggataaaccaatttggaaagtgaaccaaaactgagttaacgtaaatgtcagattcttgtaaacaaaatatgtgataacctgcaacagaaagcatcagtcatcagtttcttgaactatacacaaatctacactgcaaagaactaaactataccttgcacaatctcaaatatgaccatcttccatgtacaaggagc

SEQ ID NO: 1890 - DNA, 322 bp, Oryza sativa
ataagtagtagcaacgttgttaattaatatgatccccgatcgtatattggaagatatcctagctagcaagccgaaacaattaatctcgtgttatcctatttgcattcatatgctgatgctaccaatctcgcgggatcatatggtggtagcatcccattaggatcccaatcatatgagtctatatgtaagtactatatattaataaaaagtggatcgaaaataatgtgaatagtaaaaaggtcaatcaacattaacaaattaatgctataggcttcaattttcgcaatgtattacagatcttttataaaaaatatgcactttt

SEQ ID NO: 1891 - DNA, 162 bp, Oryza sativa
  unsure (1)..(162): unsure at all n locations
ttctgagattcgcccnatcggattaccactgcctaccatcgntggttgggaatcaagcttttgccatagatattgatgcatcgtctcacgggtttgctacaagacgagcagaagggcggcagcacccgtccatctgccgcacaccgcgccgaatcgatcgtc

SEQ ID NO: 1892 - DNA, 441 bp, Oryza sativa
  unsure (1)..(441): unsure at all n locations
actcagctgtccaggagggctcgaccaaacagttcattcggtcagtcttatatgcanggagaggcatgtgctcaaccgattgcatttcatgtggaagtctcccagcataatgaagacaatattggcattgacatgcagagccttcatattgaacaagctgaacaaacggtggttgcgatgccgagcacggtgcaacaagatggttcgagtgaagccgatgaaggggaagagataaatggtatagtggacgagattgagagggttgataggaatgctcgtgaggatgaagctaacttggctcangaggaggatgaggaggcagatgatgaagagtacgaagtccaacctgttatagcatcatggaaccgtgaagatcttggatatatcggaaagaacgagttgcatgactcggtatggttctatggtgatggcccaataaac

SEQ ID NO: 1893 - DNA, 386 bp, Oryza sativa
agcttttatatgtacacatgtgctcaccaacttacaattatcaccaaaaaaaaatctagataaattcatacatgtactttcaatagtattatacctagtggtaaaatattcacgtcaaaatcattatattttagccataacaaaaaataaatctgacaggtctaaggttgtaagttctgtcacaataatgacttttttaataggctccataatgaatttgaagatgcgactttacacgtaaatgtaatactattggaagatatgtatgaattcttctacaatctttctgtcataatatttagttggtgtacacaatgtgtacacccgaaggcctgtgtgcataagatacgctctctacatatacacgagtatgtctattctagctg

SEQ ID NO: 1894 - DNA, 445 bp, Oryza sativa
  unsure (1)..(445): unsure at all n locations
tcgacaccacggccatgaccaactntgatttcttgttaatttatcatatcatatatatatccgctacaattaattaggtatatgttcttaacgttctcaacattataatctatctagatcagggttttcaatttcgactttgcacattttggttcaaccaaaattctcgaaatttcggtattttcgacactttttggaccgaaatgttttgaaattttaacataatttaactgaattcgactaaagttttaccaaattcacaaaaatttgagaaaaacctaaaaattttggccgagataatcacttgcaggggggggggggtccgaaatttcngaaatttccaagtgaaattgcaatcactgatctagatatcanaaggcttaattaatttaagggtaattgccacagtgaagaatgtgatatactcccttccggctgataatac

SEQ ID NO: 1895 - DNA, 370 bp, Oryza sativa
  unsure (1)..(370): unsure at all n locations
agcttatgaggagtagtttctttaccacggnggggagcttgggcttggcggcggcggcgctcctggtcccgctggcgctggatggacatgaggcgcatcaaatccagcatccccatggtggtgaggggatctctctccgccggcctttcgtcgtcgccggtcggcacttctcaacgtcacacacaaaattggggaacgagagttataatttgtaggcaagatagatatagatatcagagttataattntaggaaggagcccaagcagtaggcagtagcagagttctgtttcaattaggatgaggtctccctacgacaacggggaaggaacggaacgtgtggaaaactataaatatatttatccacggact

SEQ ID NO: 1896 - DNA, 427 bp, Oryza sativa
  unsure (1)..(427): unsure at all n locations
tctagaaaataattcanatggctatgacaatnttttttattaaatagatatggtgataactaatcaagattccccaaaaattcatctgaaaatgcaacatatagtatgaggaaagagactaattctagcaaagaagaaaaaacagtggcctttattttatgacctccttccggtataatctctcttttctcgcctcatcaacttttggtacatgaaaattgagtggaaaaaatttaaagtaaatttcactttagatcatattttttttagatcataattttttttactgatgtttcacttttgatcaccgtttaactcatgttttcactttagaccggntaaactttctttgttagtttgtttcactctagaattttttttgaaactgtaaattcgtatttctccattttggggaaattttttcata

SEQ ID NO: 1897 - DNA, 423 bp, Oryza sativa
  unsure (1)..(423): unsure at all n locations
gcttcgtcacgacgtccagatcacaggctcacagtaacgcactatacgagcccttcaacaaaaatcactaacctgactcaacaacgtacttggagaaagaaacgcaggtggaacaaattatcagtgccaactgccaacaatcaaacgcgcccgtgacgcctgtactgctgtacaggccgccttggcagtagactgctgcaaaggacaacggataaaaggcaaagtgtaccagtctctgtctcttggatctcatgttctttggttgctttacttcccaaaagccaaaggagaaaaaaaaaagcaaatgtattatactgtcgagtcgcatatctatacatatttgcagagaagttatatcttgtaacttctcgtacaacaaagaacaggttgaactgggaaagctatagagcanaccaaaaaaaa

SEQ ID NO: 1898 - DNA, 500 bp, Oryza sativa
  unsure (1)..(500): unsure at all n locations
tactaagcttggtttttttttgagacanaggcggcatgccattcattgttaatcttcatcatcacaaagtatgtcccggatataatccggtattacagaacggtacacagtacaggtagacagctcggcattccgagctagagaatgagccgccaaattggacaaccggttaacatgcataaaagagcataaaacaaaggtggacgccaacttcttgatatcttcaatcacgcatcccacccctgagcgatcccttcctgaagtttggatgcgtctgattacagtgagacaatcagatgccatgacaatgtgttccaggccctcttcctttgctagacccagtgcccgcctaattgccagcgcttctgcaagctcaggtagcaccacatcgctgatcatctncgagcaagcaaccaggcattttcctgtattatcacgaatcanagccccgacccccatggtcctggacgagctgannatcgcagcatcagaattgatca

SEQ ID NO: 1899 - DNA, 400 bp, Oryza sativa
gctgatgtgccgattatacaggagacatacctttttgttcccgcagctcctgaaacttgaatcgagaaagcggcttcgtcacgatatctggcaagtgcccttctgcgccgatgtaactcggtgtgatttccccattctccacggcttcacgaatgaaatgaaatgttggttgaatgtgcttacttcgatcgcgaaaaatagggttcttcatcacggccagagcggattggttgtccaccctgagatcgacgacttcaattgctgcattcctgaggtcaccgaggagccgggcaagccaaatgccctggcatgcagctgttgcagctgcaatatactcagattcacaggaggagagtgctacaactctctgtttttgagactggcagctaacaggattttt

SEQ ID NO: 1900 - DNA, 427 bp, Oryza sativa
  unsure (1)..(427): unsure at all n locations
aagcttctatgatattngcctcgtttggtagccaccatggccctttttgtttttatacttactatgacctacatacatttacatcggttgatgatcgaacaaagagtgtgctgcaaagagcctttttctcattgggtgcttgcatcaatgcttttgtgcattgtcgacctgttctatgcatagatggaacttttatgacaggtaaataccgaggtcagatattgacagcaattgggtgtgatgggaacaaccaggttctacctatggctnttgcatttatagagagtgagaacactgaaagctggtactggttcctagagagagtgcacattgcagtggtgcgtatgaggcccaacgttngccttatacatgatcgtcatgcgggtattgttgcgggctattgactacttgcagaacggtgggatga

SEQ ID NO: 1901 - DNA, 455 bp, Oryza sativa
  unsure (1)..(455): unsure at all n locations
gcttattttctccgtatctttactttactgtcattttagcacaggcatcctccttttcatccctggctcatacagcacgcagcgcacgtttaaaaaaaaatgctcgctcacgctaaaaaaaaaagaaaaagaaaaaggtggttgttgtgccatcccaacaaaacagaaaattcgataaaaatagaaaagtaaaaaaataaaaggtgggtagatgatagaaaattcgctaaagaagaataataaaaaaatgtagatggataaaaaatccccactttatactagatatatatatctatacatagtataaataatttgctatacacggtgatataactaatttcatttaagttgagtatatggtgaggtaaaatccataaatatgggactttaattntaactcccgggatgcactagaaacagtgcttaactacccctgcatatatgcatacttaaat

SEQ ID NO: 1902 - DNA, 475 bp, Oryza sativa
  unsure (1)..(475): unsure at all n locations
ntctatgtgaaggtagttcanagtccgaccgcttaatcgtatctgctaactactactaanaactgtccacatggtaagcactngaatatgcatctcccatctgttgaatatatcagaacctgcaataatcatgttcttaggctcccattggatggcctaattagctaaagaaaaagccaaattaaaaattttcaaacttaattntgagatattttcactatagtttctttttcaatattggcttttaaatcaccaagaacatatatatatataaaagttttacctacaaatttatttgtatttcctaataaactgttttggcttattagggaaaaagccaaacgatggggcccttaagattatcagtttacatcgtataactgctaacaacaacataagagtagaataagatattagtttccgtttgggtgaaccctatantttatctaannacaaaaaaaacaatatagctcat

SEQ ID NO: 1903 - DNA, 100 bp, Oryza sativa
  unsure (1)..(100): unsure at all n locations
gcttcgntntcanatagtcaagctcgggcctgtatgatcatatatggccgatcatcgcacgcggnttctttgagctagccgcatgcaaagatccattatc

SEQ ID NO: 1904 - DNA, 473 bp, Oryza sativa
cggatcttaagtcacctgggctgcaagctctttagaattaattccttacttatcccctcataatccgactctgggactgatatgcccatcggccaatttcaagactctgaagccgatactaactcttggccgatgatgactttggggcttaccaaatttggccgttaacacccacctgtcagattcatcttctttctccatccccctcttcttttttttctacacaagaacatgttctccttggtcctgatccacccgcacagggcgcatcactcgttgtcggtgcaacactgctgtgtcacaccgccgaacgacctcgtcgccttcaaggatccgtggttcggtgccttgcacccgcttagcttgtggcacgctcgcgagagccttaaccaggtttccgatgatgccggtgtcagtattaccgtggagacgtaatggcaaggcacctcgtcccgcgccagcacgtgtgatga

SEQ ID NO: 1905 - DNA, 459 bp, Oryza sativa
  unsure (1)..(459): unsure at all n locations
ntattggttgacaccttntaagatgcattgtaccaacttttttattagttgagtaactgcggtataaaaggattntaaggtattgngcacttgatcacgcgcactttggcctaagcaaaaagtgcctaagtccctaaaagaacgtgataggccacacctganaatataggctgcagacatattaggcctaggccaaaaaatatgccttcgacacactttaaaggatgacgcatgtaacatgctcccaagtaataaatctttcgggtgatatagaccaagtatagctcatatgaatagcttctgatctgagtgattatcccttatgggatactccaaaatagatataacaattgaatcccgattggcgcaagtattcagttgataacccttacggggaataataaatagtctagtcattgagcatagaanatagacccatggtcatgaagttgatgtgat

SEQ ID NO: 1906 - DNA, 440 bp, Oryza sativa
  unsure (1)..(440): unsure at all n locations
gcttcagaaagaatggctntcgactctgggatcactgtgattttggtgtcaatgatgtaaagctaacggcattgatgttctgagggttaattgattcttgcccagaatcgatgcttggttgaaatgatcaaacttttggaagagttaagtggatccttatgaacttttttccttttgtcttactaaatgttatgtgacatgatgggagcctaatatcctatatatatgttcaggtaatggactaattatgtctaancattgaatgcatgaatcatgcataatgcattttgggaaatattgcattgaccgattaatccctatgatgtgacatcagagatgagttgatctcattgaaatcaacttaaagatgatatcattggattggtgctagtacattattagtactagctatatgccctatatatatgatatatctactc

SEQ ID NO: 1907 - DNA, 445 bp, Oryza sativa
  unsure (1)..(445): unsure at all n locations
atcaagagcgcaagctctcattatatcttccaagatttgattgactcgctctgtctgaccatcagtttgcgggtgataggccgtgctgaaatttaaacgggtccccaattcttcttgtagtttctgccagaactttgaagtgaactgactccctcgatcagatacaatctttttgggtaccccatgtagacacatgattctcgagaggtagagctccgccaaccttttgcccgtatacgtggtatgtactggtatgaagtgagcaaccttagtgagtcgatccacgactacccaaattgaatcgtgacccgatgatgtccggngcagtcctgttataaagtccattccaatctcctcccatttccattccgggatttgaagaggttggagtaaacctgctggtctttggtgctctgctttcactcgttggcanacatcgcagagt

SEQ ID NO: 1908 - DNA, 381 bp, Oryza sativa
  unsure (1)..(381): unsure at all n locations
ccgaagcttctcgccacaaaaacagaattttgtcagaggaatgtggcgattttaaatttgccaaacccggccaagcggggaaaaatcggatgtaactttttttgtagatgtcccgggatatattataagcctaatttccagtccgtatgaanaaaatgactggtttaaggaaggtcactcgaatcagggttctattttctttctagtggcggcaggatacaagacaactcacataagctatctgcaacagatcaaacacaaatagaaagtgatttggtgggtgactatgacggcggtgacngtggtgatgacagcaaaattgatgaacgttgcgatgtgcggtggtggcangaaactcgaactctaatcgcctaacactta

SEQ ID NO: 1909 - DNA, 371 bp, Oryza sativa
  unsure (1)..(371): unsure at all n locations
tactatgttgtatatctcaaagatacaaatgcaaggtatgagtactctctttcaatataagtaagttggcatggtggcttacccttacgcctaattcccggaagacacatatctttcctttgcttgggtagttgagagacggaacagttaatagaacaccaatcactcattctttgttcaacttttattccggaagtttttcaaatgattatgcaaatgaaatccaagttcctcaaatgattgtctcaatcactcaaagtggttgaatttgtattcctcaccaagattgtcttttntattcctattctaaggttaaatatgtggagtttggtagggatcaaatgcngcatacttgcattcacatttattac

SEQ ID NO: 1910 - DNA, 449 bp, Oryza sativa
  unsure (1)..(449): unsure at all n locations
agcttggagggacaccaagcggtacatgcatattntctaggggtaaaagggtcaatcaataatttaaaaaatcattatctctttctttctctaattctttaccgcactaagtccaatcccactcacttccatcaaaaacaggggtaaacgcctcattcattgaaaaaaatagggcaaaaaacaacaaccctaaaatgtaggcaaaaaacaacaaccctaaaatgtagggtaaaatcggtattggacatcaaagtaggggtacaattgtacaaacaaaattgtccctttctctgttctccctcggtccaatgcaacctatatatgtcttgtgagggctactttgaaacgaagattgagggatgaataggaaaaactagaattctcacacaaaatcaagcgcgaaaccaagaattattaaacacatcaaaatatatgaaataatcgtttga

SEQ ID NO: 1911 - DNA, 469 bp, Oryza sativa
  unsure (1)..(469): unsure at all n locations
taggttatgtgatttaacatcggttaagcaaaaatattatgatcctgtcattgattatattaagagatttagggatgttagaaaccgatgttatagctngaatataactgatagagatttggctggtcttgcttttaatgatttaattgctccacttagagaaagactagatggccagcaatttcttgatgttagtcaacttatgcaaagggctctggctaaagaaagccgggttaaggataataaaaaaattgttagaccatatgagaaaaagcctaatgttaatgtggttaattaccctgaggctagtgatagtgaagatgagggtgatcatgatatgtatgttgctgaatggtcatggactaacaaaaacaagcctttngtttgttctaatctaatgccgtctnctcataaagatcggcanagtgaggttaaatatatgtttgatgtggccaagtgtgataaaatc

SEQ ID NO: 1912 - DNA, 424 bp, Oryza sativa
  unsure (1)..(424): unsure at all n locations
tgcatgcatgcaagcttgtccttcanagtgtcaaacgactctttctgtgtctntccctaatggaagaccacccctttcttcgtcaactcgttcaatggtgcagcaaaggtactgaaatctttgacgaaacggcgatagaatcctgcaagtccaagaaagctcctcacctgtgtgatggtttggggaaccgaccaactctttatggcttcaatttttgactcatccacctcaattccctgtggagtaacaatatatccaagaaaagagactcgttccgtgcaaaagatgcacttttcaaggttagcaaacaaacgtgcatcgcgtatagcattaaaaacagcacgtanatgatccatgtgttcatccaaagacttactgtacatcaatatgtcatcaaagtacactaccaccaatcgttcgataa

SEQ ID NO: 1913 - DNA, 507 bp, Oryza sativa
  unsure (1)..(507): unsure at all n locations
actaagcttcagggctccatattgaaggctggatataatttttttgataatgtacctatagtataaaaaatgaaagaagtgcatttctggtgatcttttcaaccgatcgattttttgtactattatactgaagtctaacgagtagtatagttactttcggataaacgaatttctacctttttgaaacgagtaatatattagtttaggacaagcgaatttgcacccttctgaaatgagtaattattttgaaaaagttttttttgacggatttcatcaataccatatgtcagaaaaaaaaaatcgtaactcgtgcggcaacagaaattactaactaatgtcgtactagtatggatgcgatatcttgatattactctgaagcttttgaaataatcaaatcaaatggctaaacaaaaatctactatacatactgggaaaatacaaaaaatagatcgggctggaaaatagaggattggaagtcanaaagtggtatatatatgctcacgtgaa

SEQ ID NO: 1914 - DNA, 455 bp, Oryza sativa
agctttaaagtccaaaggaaagttctaagtattaaagattgtaattgaagaaatcaaactacaaaataccaaggtgaaactaagggattaaaaaacaaccagtaagtgaggagcagatcaaagctttaaagtccaaatagcatatcaaaaccattaatacagaagaacgtttgaagataaataaaatccaactcataacatagagtttaaacgacgacggaaaatgaagcgtcgatggtaaaaaaaaaagcagcaaggttgaaatgcaagcaaatatttcttttcacaaactagtactacctccgtcccaaaatgtagctatttctcaacctaccctctcctcttaaccaatcacaaccattctctgtacctactctcttctctacgaattacaaccctctttcaattatctctacctacattctccatctatgtgcctacctaagaaataccta

SEQ ID NO: 1915 - DNA, 498 bp, Oryza sativa
  unsure (1)..(498): unsure at all n locations
tgtcgatgttgacccgaccaaaggaggataaatatgtatatttntcatacacgcacgtacgccgngcgaaagaccggtgtattacacatganaaaacaattatgtgaaacttcaggagcaattcacatcctctntttttttaaggatcttgcttgcgagatgctactactagtaattaatctagtactatacatctatatactacaaagactatccaacgtttcgcacgatttaatcagcatttgaaacagtaccccaagtcggccggtcgtccggtgttgcttaaactaaaaacaaggataagatacatataatgcattgtttagaccgttcattccaatcctcttcgcagcactgcacaagacatcgttttcttataaaattggatgatcaaatggctaattatatgattaggaattaatccaatggctgacaatntctgcttacctaaatctcagttattggttataggatatatatatcgatctattactattt

SEQ ID NO: 1916 - DNA, 220 bp, Oryza sativa
ccttaactagctaactgtgctcgtatgggtgaattcacaatcccagaaagtcattgggcaatccccattaaatacaaatggacctaaaccggaacaactttatttcacaatggctttaaaggattttttaaaatggagttatagtttacagctcatttgagtctatacgtcaaagagcgcctacagcattatatgagattatcgcaatagaacattgggc

SEQ ID NO: 1917 - DNA, 447 bp, Oryza sativa
  unsure (1)..(447): unsure at all n locations
attggcctgatggcactatgaagaaatttttctagcacacgcatttgagaatgtcaaaaatatgatgaatcaactagctaacgtgatattagacatgtataatgatgatcaaaattctttggaggtttgttcttgctctcgctttatgtctatcattctcgctttggtggtgtctaattgatgtcacacttgccgatcttattctatttctcattgtaggatctttcctatgagcttaaagaggtcgttagcttctaaccaatatttgagagtcataggtggnttgatcatatataattcactgcagacactaaaggatctaaagggctagatcgtgaccatctattctttgctgaagcaatgtctctataacgacanaaagagtatgtggtcacttgctgctctttgataagttctaatgacaatggtaagctgtacccgtcttaa

SEQ ID NO: 1918 - DNA, 154 bp, Oryza sativa
actcagctaataaccatctagagcactacttgagtagaactccagataataagagtaagtccatcaccggccctaaacttgaccgtatctcatcctagtccctaaactcgaaatcgaccgtcagttcctcaaacttgttcgactgtgtatcccg

SEQ ID NO: 1919 - DNA, 454 bp, Oryza sativa
  unsure (1)..(454): unsure at all n locations
ctgctgcatgcaagcttgcagcgatgtttcacctattgtgccatattttcaagaggctataagttcactgagcaagagcttatatttgcttggatggcacaaggccttgttccaacacctggagaggatcagacattggaagaattacgaaaagagtaccttaacgagttactcatttgctcattctttcatataatcgagagtggccactacatgatacctgngttgttacatgatcttgctcaacttatgcagaaggggaattccaggcaactaaaggtaaattccctatctcagttgacgcttgtcacttgtatatctctcattctgatcatgctcgcgatatgggcttatgtcatccactccattgtttggtattacaataaacgccgcattcaaagaactcatgggctggcttgcgcatctaaaaaaattgcggactataatggtctct

SEQ ID NO: 1920 - DNA, 454 bp, Oryza sativa
  unsure (1)..(454): unsure at all n locations
ctcaagcttgacaagatcatcgtccacacctttccncacttcaccttcattctttcagtatttcagatatggccattntacctgtcactctcagcagttggccataaggctgtacctagagctagctaatatatatcaagaagagaaaaagagatctttggattgagacatgctgctccttggtctgaggtgaatgaaatggacatttccttgctcttctggatcaggttgattntcatttccagcagtacagctcggatatttgctagcttttgtcacagaaaaaaaaatctttaagatcttgatatgatcatatgatcctgtacttgtggttgatggtggagtactgaaattttgtgcattntcctatattgttttgtatggtgaacttacttcagttgacaatggtggtcctgaaagggaaatgcaagcgacagtacatacatacaagtag

SEQ ID NO: 1921 - DNA, 416 bp, Oryza sativa
  unsure (1)..(416): unsure at all n locations
ctaaccacatcattgttctgctgcttataacaacaaaggtgagtggnttatgattattcactttaatacaccaggtgaattccttctgccatgcangcagggttggacagaanacacgcgaaggaattaaaatgcctggaacgggaaaaatgaaacatgtcagtttgactctgcaggttgagaacgacctgaaacatcagcttagtattggcgcattaaaacctggcgcacgcctgattactaaaaatctggcggagcaattaggtatgagtattacacctgtgcgtgaagcattattacgtctggtttcggtgaatgcgctntctgtcgcacctgcacaagcatntacagttccggaagtggggaaacgtcaattagacgaaatcaatcggatccgctacgaactggaattaatg

SEQ ID NO: 1922 - DNA, 435 bp, Oryza sativa
  unsure (1)..(435): unsure at all n locations
agcttcttgtccttgccttaccaagaacccggtttgttcgaccccgccccggcgttcccaactattggcatgcgaggtttccctgaaccgactagttacttatccagggtgtcccattccaccttgtgattgcactttgattatgctcgatgagtttcccataggaatcggtccttatatgcgaatacgggacagcgccacgtaggcacggctcccgcatcgcgagttttcacaattcattttattgtcaaacacaccgacaccacatgtcgggttttgaaggcttcacaaacccattttctaaggtttcgacaatcaacggtgtatgtgggatatttggtacacgcgctcagagagcacggataccgaagtaccacatgggtggagcgactatggatcanggtagtacaacctacaggagttagtgcgactact

SEQ ID NO: 1923 - DNA, 499 bp, Oryza sativa
  unsure (1)..(499): unsure at all n locations
gggactaattcgcgagacgaatcttttgagtctaattacgttatgattttgacaatgtgatgctacagtaaacttttgataattatggattaattaggcttaaaaaaatcatctcgcggattagctcttatttatgaaattagttnttttattagtctatgtttaatactctaaattagcgtccaaacatccgatgtgacatttggtcgagtagatgcctgtgaaaagtacaagtaaagatcaataatagtataataccatttgggctaaatcataatttcgatctgattcgtaatatgaactagataaatactctgtcacgttgttgcgggaaattaagttgcacaatatgtacaaataagatgaaatatgaatattaaaaataaaacaaaatggtacttatgaatnttgaggcctataaataattgagattacttggtgttatgagagaagaaagaagagacactggtcgtgacactatcgtgaagtcgtgacactg

SEQ ID NO: 1924 - DNA, 432 bp, Oryza sativa
  unsure (1)..(432): unsure at all n locations
agcttgagactctanatctctatgacaattatatctcanggcacgtaccaatggagctgcaaaatctgtacagccttagggtcatggctcttgatcaaaattacttgactggtccaataccaaagcatctattcgatgccaaacattcgttaacccacatatacctcggagacaatagtttgtcgggacccataccaaacagcgttgcctccttgtccatgctccgagttctttcgttaccaagcaatcagctctctggtccagtgcctcctgccattttcaacatgtctaggcttgaaaccataagcatcangaagaacaatctaacaggggctatacctactaacgagagctttaatctcccgatgttgcgaaagatagacctatacatgaacaaatntacaggcccaatcccatctgggcttgcttcat

SEQ ID NO: 1925 - DNA, 447 bp, Oryza sativa
  unsure (1)..(447): unsure at all n locations
ctcagcttcgctgttcaatattnntattggccggtcggccgttatctaattattattngtaattcgatctctttcatcttacatgtatttgctatgtatatctatgcttgagataaaagtgtgaatctagtgcacatcctgngaactagattcacatgagtatgagttaagaatatttgagatgtgatatatctttagccatttttgtcaagtcggaatgtgtaacatatctggtcgccgctttcgtgtggtttgacgggtacatctcangctgaagttgactagcaggctaaaggaccacccatgtcgccaatatccttctctctagacgtcggatgtttcattatgtgtgttagatgacttgaagtgattcacttcatcttgcatatataatgatgggtccggagtgtctncgacaattntggatatncattatatataaattat

SEQ ID NO: 1926 - DNA, 471 bp, Oryza sativa
  unsure (1)..(471): unsure at all n locations
tgcgtggaggtacgttgttgatgacaccgcttaagggcttttactttcangtgtatgcgctggcgcanggcaatattctggttggcggcgcaggagcctccgctggcggtagcagtgttcaggttaaccaactgaacggtggacggatcaccaatggtgcggttattgaacgtgaattgcccagccagtttggcgtcgggaatacccttaatttgcaacttaacgacgaagatttcagcatggcgcagcaaatcgctgacaccatcaaccgcgtgcgtggatatggcagcgccaccgcgttagatgcgcggactattcaggtgcgcgtaccgagtggcaacagttcccaggtccgcttccttgccgatattcagaatatgcaggttaatgtcaccccgcaggacgctaaagtagtgattaactcgcgcaccggttcggtggtgatgaatcgcgaagtgaccctcgacagct

SEQ ID NO: 1927 - DNA, 454 bp, Oryza sativa
  unsure (1)..(454): unsure at all n locations
agcntctgtagtgttatagatgcccatggtgttacccaaccttgcanaaccatttcacttttgatggcactgaaccttggcagtcaagctcgatcatttaccaatgtacctgtgtgaaagtttctttacctgtttgctgccaggaacttggatgttttaagatgcctgctgctattctttttcaaaactttccgtgatgcatgtgcattttatggccaggcaaaatggtagatcttggaatgaatctgatactgacaaattggccatctattgtggaatacaatcacttaaatacataaatggataaagtatcacagatgaacattgcaaagagactcgccgttcttgttctggcaggaaagtatcaccgatgctagcttctttgcggccatggagaaccatgctgcacaatggctagctgatgactcatcgncgtcaccacgtcgtcatcact

SEQ ID NO: 1928 - DNA, 415 bp, Oryza sativa
  unsure (1)..(415): unsure at all n locations
tgccgtacattatcatctaaanaatgcagtccagatacttttttttggaaaggggaaaatcctgataattatcacgattgcattctgatgctcgagtttagattcaggaccatttggatattggttttggatagccatcacaacaacacagtagcaatagtgtgttatatatgacttgtgatagggtgcttatttcctgaatggtaatacacaataacaccagatgcaccaaatgctgtcagttntatagtactcgcttattgttacttgatatcttccttatgattgacacaggtactcaataagatcgttgaggacctgtttcaaggccatccaattagtgaaagaanactgaaagagttgttatggcatactccatcacaggttttttgccggcgctttgtatgcatcatgg

SEQ ID NO: 1929 - DNA, 422 bp, Oryza sativa
  unsure (1)..(422): unsure at all n locations
agcttgcgatcccagttatttctctaccagtcaccatgctgttgatgtcgtatgtgccttcgtatgagtatataggctccaggtcacagaatgcctacggagataataaaaatcattaattaagtattgaatgatggcatatgaatatctcaatatcctacatgaggtctatctacctttgcaactagaaaatcagccaaaattccatttccacccaacaattctcgaccgagagaaaccacctcacgagccattctggaagtccaaccctaaatgggagcgaggaatcaaaagttaaaatcactgatatatcataggaacacaaagttctagttacagaggaagaaaggcagcctttgccagctagtatttcacaaaccttccctaaactagcatgcnctggtgtcattttcctgactcat

SEQ ID NO: 1930 - DNA, 400 bp, Oryza sativa
  unsure (1)..(400): unsure at all n locations
tccatggtccatttattcctcagtatatggtgatacctgatatgcattcagaattgaactgaacttaacacaaggctgatcacaatcttttgaatttacatagaattggttgtatgcgctgatcctatccgtctcggactgttcgcggccgcgtgcctatatataaactgcgtcggcttcttaccggccgcacgaagaatcgatggcgatggagattatgcaacagctcgccgccgccgccacggcaacgggcctgtgccctgaaccatctctgatggcgatgacgacggccggcgcagatggaggccgccatcgcgacgctgcatggcaagaagcaacgcctccgcgaggcctgcgacagcctcgtnctccactcgcccatacttgctcccttccgctg

SEQ ID NO: 1931 - DNA, 438 bp, Oryza sativa
  unsure (1)..(438): unsure at all n locations
agcttctgataaactgagagtttcggctttttctcactaactcttcgatatatttcttgctgaaagtatccctgatcccactgataacgagtaggcccaaacaattcaattggggtagttgctgacccataccacatagttccggcaactacgaaagctgcaaaaaaaacagcagcgatactactggaaagtacagtttcaatattgcccatacgtaatcctttgtatagacgttgaggtggacggacactaagatggaataggcccgctaatatgcccaatgtacccgcagcaatatgatgagaagctattccccccggaacaaaaggatcaaaaccttctgcaccccacgccggatttacagctggtacttttccagntagtccataaggatcagacacccatatcccaggaccatacaaacccgttacatgaaat

SEQ ID NO: 1932 - DNA, 275 bp, Oryza sativa
aaacagggcgcatgctccaactcattatcagactctatctatggctctctaccagtttagttaaaaacgctggcataatttctatcggtatggaatactgttgggacattggcgcctatgttcatagggttctctggagaggagactctacaaattgcctctacaaaatcagttctcagtgctgcaataacgactccttcctatgcatatgccagagcgggataagtcaacccatctgcttaataaaagttctcttctccgtctttctgctaagt

SEQ ID NO: 1933 - DNA, 407 bp, Oryza sativa
tattgtcacccttgcgagctcattaggactgaatttttttatatcaaagcgccaaattaacctgacaagcaatcgtagtgaacaccaacgatattgcttggagaagttgaacgaaaataattcctaaagaatatgtccatgttatatgaaaaggtgttcgaaaaagagataccattgagcaatagacatccatggtctgatatgaccataagcaaatatcattgctttcctcagtaaggaatttgttctgaactcctttgaaaaaacgggttgccatgcagtatcttctatcaacctggaggttatgcatgacgtgaagatttgaatgaccaaagttcaacctgcttggaactgttcttaagtcttttcatattatcaaatggctgttaatacatatgaacacagac

SEQ ID NO: 1934 - DNA, 452 bp, Oryza sativa
agcttcgagttagagcagtttgcttatcagtcaagtgcatatgttctctactgggtccttactgtacatgtacagccatacacacgatctgaacaaagtaaaatgtactatcccgtaaagctgatcagtataatgcatgcgtactcctctcccgcagaatggaagaaccggctaaggctctgtttagttctcaaaataaaacttttcaccttctcacattaaacgtttaaacacatacataaaatattaaatatagataaaaaaatcaattatacagattacgtgtaaattgcgagacaaatcttttaagtctaattacaccatgatttgacaatatggtgctacagtaaacatttgctaacaacgaattaaataggcttaataaattcgtctcgcacgttccaagatgaaatctgtaatttggtttggtattagacaacatttaacatttt

SEQ ID NO: 1935 - DNA, 476 bp, Oryza sativa
  unsure (1)..(476): unsure at all n locations
ngaatatgtaacttaatctagttaataatgcacatttgtgattgtaactttgtcgctctgcctttntatgcagccagagcaactgagcaaaatatttgatgtttgtggcacacctgatgaatcaaactggccgggtgtcacaaaaatgccttggtacaacaatttcaagcctccccgccaactgaagagacgtgtaaaggagtactttaagcagtaagtattatactcgtattgtttgaaacttgcttggctactcttccaggttacttaacctttatttgttttcagttttgacaggcttgctctggatctgcttgaaaagatgttaacactatatccagcacaggtatattttcttcttttagttcgcttacttctgtgacataggaaatgcccgtacctgcgtatntcctcagctgtcattgcatttcattactgagctgtaagtgacatgattttgcgctgttcataggata

SEQ ID NO: 1936 - DNA, 450 bp, Oryza sativa
  unsure (1)..(450): unsure at all n locations
gcttggacaaaggtttacatcggccgatccattgtaagaagtagacataggtgatggaattaaaccaaggccgactnttgtaaacaaaaacatgagagccgattataaggttaagataatcgagctacttaaagagtatgttgattgctttgcatgggagtaccatgagatgccgggtcttagccgtgagctcgttgagcatcggcttccaattaaaccgggttttaggccttataaacaaccacctcgtcgttttaatcctttactatatgaccgagtcaaagaagagattgatcggctgttgaaggcggcgtttattacgccatgttgttatgtggagtgggtttctagcatagtcccggtggagaagaaagagagtggtaagattagagtttgcatagattttagagattaaataaagctactccaaagatgagtatcctatgccta

SEQ ID NO: 1937 - DNA, 506 bp, Oryza sativa
  unsure (1)..(506): unsure at all n locations
ttgcgagaatctgcttgcccagtcggattgggagccttggattgngtagttgacctaattnttggtcccccactcccatggacggtctgacgacggngagatcggcgttgagcaattggggggtcagacttcatcaaagcaaattcctaaataagatgctntccacggtcagttcattcaatacgtagacacaatcatattatgaggaaagttgaagaactttaacacataccggtggaggggggttgaatgcgttatatggcacaactggcagcagacgtgaatagctgatgacgatagcgtttgagaagatcttgtacatcctctccttcatgatcttaaagtccaatgaatctggatcttcatggtttggatcatgctttccatcgaatatcaaagccgtgcgagatctttccttaattggagctagtcagctcttgatgaagtgccgagtgatntgttctccttgcagaccttgctcctttagcttcagcatgcgttccatc

SEQ ID NO: 1938 - DNA, 375 bp, Oryza sativa
gacaccttttaagatgcattgtttcttctcctaaaaagttgagtaactggggtataaaaggagtttaaagtattgcgcactagatcacgcgcactttggcctaaacaaaaaatgcctaagtccctaatagaacgtgacaggccacacctgaaaatatgggctgcagacatattatgcctatgccaaaaaatatgccttcgacaccctttaaaggatgacgcatgtaacatgctcccgagtaataaatcttctatgtaatgtagaccaaatgtagctcatatgaatagcttctgatctgaatgattatcccttatgggataatccaaaatagatataatatttaaatcccgactggcgcaagtattcatgtgatag

SEQ ID NO: 1939 - DNA, 444 bp, Oryza sativa
  unsure (1)..(444): unsure at all n locations
ntcttgccggcttcatcttacttgtgctctanacaattcgttctttttctccacanagtgagccttccataaatccacccttaccatttaattaggcacatattcttccatcaatcaagatcgaattgatctgccatggcatcaaacaagcaaattgatctcgagtcccagaagccggcgacgtcatctccggcggccagcgtttcatcggcagcagctgccaccgcgccgccagcttctagctcggctgtacccgtttcagttggcataaccaaccgccacaacgtgcagccagagacggagcctctgctgctgctggcgggcggcgacggcgatggcggctctgacgacgagacaacgcggctggagcggaccatcacgcgggcgttccggagcacggcggagctcgccaagcacctgcccacgggcgcggtgctcgtcttc

SEQ ID NO: 1940 - DNA, 439 bp, Oryza sativa
  unsure (1)..(439): unsure at all n locations
ctggatctgnngaagttctctttcacggtattgngatcgttttatcgatttccttgatcgctacttatgggcgtgcgctcaaaggatacaaacagggattcgcanacaaaaaggggaattcgtagtcactttttcctgtcgcgtaaaaaaaaggctttacgcgagagcaatagaggttgggatacatctatctcttctgagcaacctcttttggattcttaagaccacccttgcagtaggataccgtctgctttgggttctttattatattatctccttcgagggatttttaggatcgttcacgctatatttagtctaatttggcttttactgtctccttttctcanggaagtggttaaggacctcagaagatagaggagagcgccaggcgcagatttccggaatacttctacggngaatgctcattgaatgcgcattc

SEQ ID NO: 1941 - DNA, 431 bp, Oryza sativa
  unsure (1)..(431): unsure at all n locations
gaagctatttggcttagaggtttgtttactgagctttgtggagttacgtcttgcattaatatattttgtgatagtcaaagtgcaatatgccttacaaaggatcagatgttccatgagagaacaaagtacattgatgtgagatatcactttattcgaggtgtgattgctgaaggtgatgtcaaggtatgcaagataagtactcatgaanacccagctgatatgatgacaaagccagttcctgctactaagtttgagctttgctcaagcttggttggtgttacagtatagtcctagagactatttggcgcgcggngattttacctacatgagggtatttntggtgattgatggttttatgctacaagaggaaattcgtctcaacgtggagattggtaaatatgtaatccgaattttacgcccacaatatattc

SEQ ID NO: 1942 - DNA, 431 bp, Oryza sativa
  unsure (1)..(431): unsure at all n locations
tggatctgnngaagttctctttcacggtattgngatctttttatctatttccttgatcgctacttatggacgtgcgctcaaaggatacaaacagggattcgcaaacaaaaaggggaattcgtagtcactttttcctgtcgcgtaaaaaaaaggctttacgcgagagcaatagaggttgggatacatctatctcttatgagcaacctcttttggattcttaacaccacccttgcagtangatactgtctgctttgggttctttattatattatctccttcgagggaattttaggatcgttcaggctatatttagtctattntggcttttactgtctccttttctcanggaagtggttaaggacctcagaagatagaggagagcgccaggcgcagatttccggaatacttctacggngaatgctcattgaatg

SEQ ID NO: 1943 - DNA, 367 bp, Oryza sativa
  unsure (1)..(367): unsure at all n locations
agcttgactcggtcctgttgtcanatgtcaacttattaagagcatggtggtattgattgaatccaagtatccaacctagcaatgccagtagtcaacttattgtgttatttcagctcacagatttcgaattaatgttctacttttcctgtgtataaaactaagctggagtaaattgcacccggntcctttgttatttaagtattaatcaataacgtgtgcttcactttgccataccgatcaggcttagatccacaatacaaacacagtatgccatgttatgtaaataaactcactcgacataccatgtcaccaaaaaagtcaagtgccatgtcacatggtaacatatcatcctggaaggtttacactg

SEQ ID NO: 1944 - DNA, 437 bp, Oryza sativa
  unsure (1)..(437): unsure at all n locations
tgtggtggatcacgcgtgccattnattagttggtaatcactattaattagctatggtagggatcgatcaagatcaaacgcagggtatatgtttgttcaagcgtgctttgcaccatatatttttgtaatattacaactcgatctcatgtcatctttttttagaggatttttcttttttacattntntatgatgtcaacggtgtgacataatgaggattgtatacgcacatgccaccggatttaatttcttcaagccgttgttgcaacttgcctatgtgctatgaaatttgtgataataataatcgtaccacaccaacctttttctccataataatacatgataattaattagctacgtccttgtcaaatggctaggggagtggattttcttggtgatttcatatgatccatgaatacaaaagaacagttatttagaca

SEQ ID NO: 1945 - DNA, 373 bp, Oryza sativa
  unsure (1)..(373): unsure at all n locations
agcttcgcagaaccctcattgatggcggtgttctctcaatatcctcttcgccaagactntggatgatatgcagatccctcgctccgagttaaaaccaagcaatgcgccttttcatggagtaattccaggattatccgcaacttcactcggccagattactcttccggtcacttttggcactcgggaaaacttccgcacagagaatatcagctttgaagttgccgatttcgagacagcataccacgccatactcggacgcccggcgttagccaagttcatggctgtcccgcactacacttacatgatgatgaagatgcctggtccccgaggagtcctatccctacggagcgacatcaagcaagccgtcacatgc

SEQ ID NO: 1946 - DNA, 503 bp, Oryza sativa
  unsure (1)..(503): unsure at all n locations
tncaaatntcttcanaanagaggcgaggtcatgccatattttttattgaatntattttggtgattatatacaaatcggaggtgcctaanaggttagcaactttatcctccaatgtttttttttcatattacatttggagctatgttttgcacacttttttgtctccaaaattttgttgctagttgatgagagagaaaatctgtgtggagaagaaagaatatatagaaatttagtttatttgctaaagaaggttttataaaatagctgagaaggaaaatatagtgaaagttaatcttgaataatagaaaacaaagtaaaatgaaaaattaaaataagtacaacacattaatattagtttaaaactttataaatagtaaatatataattattcagtgtaatatttcataattcttggatgaataatgatatgtcattatcgtgtgactgttgaaagagttcgtaattatcntataattattgtatgactgtcattattgtacgaa

SEQ ID NO: 1947 - DNA, 414 bp, Oryza sativa
  unsure (1)..(414): unsure at all n locations
agcttattctcttgctcttttgatccaaacgttagttttatagcttgggtcttgacactaagaattgttttggacaggttgattangttgctctcgctgttgggtgggtgcattagtgaacatattgttgacaggttgagttttctggtcttttgtttccatgggagtataactaaggatgacgaacttacacatgttcacaccacacaaacacaaacacaagcgaactagtgtgcaccaagtacacagttcaaataataaaaggaacttcccaaacccaagcatgaatgtactcccaataaatatatccttagtattaaatggcttaaaaattcccttttcacagtacagtagctagcgagagtgtgaaccacgttacgtaaaaaatggaacattcacacctcgcacttttta

SEQ ID NO: 1948 - DNA, 463 bp, Oryza sativa
  unsure (1)..(463): unsure at all n locations
acataagacattttagttatatatatggacacatagagtgtctagattcatggtaaaaattgttatattttatgacggaggtagtagattaatatgatattttagagcaattttcatataaaaaattttcgtacggaatttaaataacgcacctaaaaatctttatcttcatctaatttttattggagaaaaaaatgggaccttcgtgtgccgtgggacggtgggagtagtatcatggcctaattagttgaccgagcgctcgacatccgtcaacgactcanatcatgcgcgcgcgacgccccagttattacgcgttggcatgtcattagcggagtactactaatttacacttagctctaattcatggcacgtacttacgtgatgtgaattgtgagatgcgagcgtgacgcggcgcgccatgtgcaatgtgatgcgtctcgctcgcttccctcgtgacgatgct

SEQ ID NO: 1949 - DNA, 429 bp, Oryza sativa
  unsure (1)..(429): unsure at all n locations
agcttaacccctatttattaccccttgtctttcttgcattaatcatgcatctgccggtgtggcttgctgagtactgtggttgtactctatctttctccccccttcagtaagaaaagctttggagaagaagtcttaggtggagtcctggcttataccccagctgagcgcctgtgaagatggagccgtaggcccgctagtccgctgctgnttatttttgattgccaggcctgaagcgcctttgtaataatgtaaatattatcgatataataaagatgtgtcttttatatcatgtttgtgtggggtaccccgccttttcctgggacggggattaatacactagcgttcgggaaaagggcaatttcccggtcgcgacagcaccatggtgccccggcaccacggtatgaaatacaccaatttgctctatttttc

SEQ ID NO: 1950 - DNA, 404 bp, Oryza sativa
acagacatgtgaacgtcatcttactttgttctttctgatggatgggaatttgatgatacccggaatacccatagagaacacagtacaaggaatgatttgctacgcgttccaatatttcgtcaatgaatggtagcggaaaatgatcctttttcgtagcatagttagtctatgcacatcctccatccggttacgatacgttgtgggataagttcattttgagcatttgcaacgaccgtcattcttctcttctttggcacaacctggattgagctaacccactcactgtatggtacatgataaataatctcggcatataagagtttcaggaccatctttcattacaactgtacgcatcgcattattgagccgtcttggacggggcactctcggtgtcaatacggata

SEQ ID NO: 1951 - DNA, 413 bp, Oryza sativa
  unsure (1)..(413): unsure at all n locations
agcttcctcctcagcctcgccgcgcgctagttctcgtcttcggattccccagctcgagcgcgcgctgggttcgagattccgagcacgcgcgcggtgctccggtgagttctcgcacccgcatttcctccccccctctctctgtgatgctatgctgctcgtcgccgacgcggggggtttgatttgatcgcgcgcttttgggtggaggtttattggttcgcgaatccgcggcggggcgcgggtggttgctggtcgtcctcgccggaatggctcgattattggtggagatctctctcggtttctccgattatttctgcttctagtccctagaatcttctcgcgttggtcttcccttgcttaattaatggnccaaatgctgctcggcccttgctctcctatggtggagttctctcgga

SEQ ID NO: 1952 - DNA, 453 bp, Oryza sativa
  unsure (1)..(453): unsure at all n locations
gtggagttggacattctcatatcttatttatttggattagagtccgattcatttagtcatttagtttcttttttccagatggaaatttggatatggtcttctcctatgtatccttgtgctgattttntattgggtggattagagtttgattcctttcagtttcgtgtttaactcgggaaatttagaatttggaaactacctaaatacgggctacatgcgcgaggctgagatgacgcaccgtgatggatggagttgggaagcgcgttttgtgcaaccggttgcaaacccaactcatatctacaccgttcaatgttcattgagattcgtgcggagaatcttaatcttaactaattagaagattattagtaagtttaccagatagttaaatgcccgtgcttctgtacggtgtattaaaactaattatatttatggtcaaaaaagactacaatattt

SEQ ID NO: 1953 - DNA, 418 bp, Oryza sativa
  unsure (1)..(418): unsure at all n locations
catgcaagctatnggcacaaactacataaaaattttttttccttatatgaacaagcatatggcacacagctaaaataaaagacaagacctcacaacctcactgattatcatggaaagcttaacaaacacctcaatgcgctgttttatgacttcaagagcacttggcaacgtcttcttttgcacaagtaaatccactgccttattcttatttgccattctgatgctgagccgaactcttttcttaagaatatcagcagcctcaggcaaacgcacaagccttaccctcgtgctatttgcacaagaacaaacccacatttgagtgccgcagaaccacaggggctgccactccaatcccatgccatacacaaacatctcaccattgctaccaaacctctcaatcccatcaaattaactgaca

SEQ ID NO: 1954 - DNA, 483 bp, Oryza sativa
  unsure (1)..(483): unsure at all n locations
tgagcgatgtcttatgttgngctccgtcatggtagtgtatgttatgttatctattgatgnggcggtgtagntgtagttttcgctcactctttcctaattaactagacactgtaaggtttggtcctgttttctccttataatggaacaccttnttcttaatataaaacgtctgcaacggcctgaccgttcgaaaaggaataaatcaaatactttcgaaaataaatttaaccaatagcttaaaaatgaataaatgtattttttgaagtaggagtaaacaattatatgaataagttgaataagctctttagtaatggattaacctgagagttgcgaattcatgataaatagaaggaaggaaacaaatatactatgtggataaaatgaaatagaagaatatgactactatctcacacactctgagactatctataaattcttggcatatatcagaagtaccataatgccattatctcactacttctc

SEQ ID NO: 1955 - DNA, 331 bp, Oryza sativa
atcagaactatagtaatattgttgatttaaatggaagatatcaagaaaatcactcatgagaggctggaaacaccatatgggtaaaattctcagggcgaaaactgtagctctgcctccatcctttaaccggcaaaactcgccgcaaaactcgagcgtagtatcatctcttgttatatacatgacaacaaccaactcaccatcaatttcatctcaagcactcaaggctcgatctcactgtatacaaacacctacactagtctctcctctcagactcctccctgaagatctggtattatttttcattcgcgcgccgcaattaacctaacccacc

SEQ ID NO: 1956 - DNA, 487 bp, Oryza sativa
  unsure (1)..(487): unsure at all n locations
actaagctctgagtaagaaattactctgagaacttgtgtcgttcctaagcttacaatcttatcagatcggcttgtgactataattntacttccaactgcaacactaattntggaagctgagtacaatcttccccatacaccctcatcaatgtctcccattaattcgataatgattagcatcctgtctccaccaatagaatggtttttatgcttaattacaccacaatctctaagagccaccatgtttgcatgtcctacatcatcgtcgttaaaacacacaatttgagagaagcggttacgcactctttcatcttcgcaggcatgctcaatcagggtgctcttcccaacttttcctgngccaatgatcggcaggacacctagattntcagcactgngaatgtcctctttgagcangaagttcatgatgtgctccgtttccatttgacgaccgaacaagcacctgtctaatagcaagtgcatgctatat

SEQ ID NO: 1957 - DNA, 410 bp, Oryza sativa
  unsure (1)..(410): unsure at all n locations
agctntgccaagtcatcgtcactatttgatttttgacgagggatacttcaactactttggatctgggaagtctaatctggccagagtatgcgccccgacaaggtcggaaccatcgtcatcaacaattcgatctcttgagatcgaccaagcctcaagataagcggcgtatcgaaagatgtcagaccgtatgatgtcgaacgagtacgcaacaaggtaattggtagattggttttttaaattaatctactaatttcgtaaatacatccggcatgtatctacaaaggtacgcaatattttatatgcaatttatcgtacctattcagatcatacaacattgtcagatctataatttattatgtttacctaaagcatggtttttatacaatatctattgtgcgagtgctttcgat

SEQ ID NO: 1958 - DNA, 442 bp, Oryza sativa
  unsure (1)..(442): unsure at all n locations
agagaagacaaagatggtgagaataccttcatcaacaagcccaacaacaacaagtcaaagggttcataccaagggaggaagatggagaatcttatgaaggcttttcaacaagtttgcgccgtcttcgagccactaagtgatgcagatggtgaatgtctccgatgtttgcttcatggcgcgtggtgaatctgacatagagtatgaagataatgaggtgagtgcttttgaggaagctattaatattttgagtgcaaaaaataaaaagtgtgagaagaagtatagaaaacaggaatttatcattgaatctcttaaatctgaaattgataggttaaaatctcttattcctaatgatgatgattgtgaaaattgtgaggttntaatgaatgagatctcaaaaattagagatgttaatgctgcacatgattngaaaaatagatcttct

SEQ ID NO: 1959 - DNA, 405 bp, Oryza sativa
agcttatagcactgcagattacaagagattaattctttgtgagtgctatacatgattaaagtattcaataattatacattacatggtgataaggtgtcactaagaggcggcaatgagagtgatattaaccacataatactaagtactaacctcatcactgtttacttgaatatatcgtgcaactgctccaaacgcgaagttatcaactgatacaaaattgggcccagcaaaatccaaaattacaccatcttctctgcagatgccaatgtgaccgataaaggggatcaaccatgagattaacggtaatggtgtccatactatacaacaaggaaagcgagctcttcttgggtcaatggagcacgctggcttctgtcggtttccatcaggacagtataagcacaagct

SEQ ID NO: 1960 - DNA, 300 bp, Oryza sativa
  unsure (1)..(300): unsure at all n locations
tcttactggcgatcgttccgtaggngaaaaacgggcagccgatcgtcctcctgccactcacacaagatctccacagaactcacgccccgagacagactntctgatgctctttttcctgaacgacagtcaaagtatcaacttgagagcagagatactgtgaatcattgcttgcttcatccgcttgagggatggatgatggcctcttggtgttccgcatgatactgtcgttctggccgaaacataatcctccttgaccggccagcgtgtgggtgatcgagttttcttttggctggtgcctcg

SEQ ID NO: 1961 - DNA, 425 bp, Oryza sativa
  unsure (1)..(425): unsure at all n locations
agcttctgtatcgctgatagcaaaccggcgtgtcttcatgcaaaacacacacatttagtctggtttcaacaacacacattntaatgtgccgcaaaaaccatagccagcttgatgtgttcttgctttcaacaaatgccaaagcaacaggaacgacatggctatccgtgtcgactccgatcgcggntagaattgttcctctgtacttgcctgtcatgaaagtgccatcaacacagagcaaaggaatgcaatttctaaaggcctctatcatgcacccaaatgaccagaaagcccgacgaagaatattctccccatattcattcacctcatcgagaatagccatgtgtgtgcccgggtttcttgcctgcatcacctncaatagtggnggaagaatgtgataagaatcctcatgagttccaaacctcatc

SEQ ID NO: 1962 - DNA, 461 bp, Oryza sativa
tcggatgtgcatcgactacaccgaccttacaaggcatgttcttttatccttaccccttgcctcgcatagatcagattgtcgactccacagcggggtgcgaccttttgtgttttctagatgcatactctggttaccatcagattcgcatggctagggaggatgaggaaaaaactgcgttcattactcccataggaacttattgttatacgacaatgcccttcgggttaaagaatgcaggtcctacttttcaacgtactactcgaatttctttgggtagccaattaggacgtaatgttgaggcttatgtcgatgacttggttgtaaagacgcgcaaccaggaaacgttgctttcagatttagcggaaacttttgagagcctccgctccgcccgcataaaactgaaccccgataagtgtgtgtttgggtacctgcggcaagcttctcgggtcttggttctgccg

SEQ ID NO: 1963 - DNA, 447 bp, Oryza sativa
  unsure (1)..(447): unsure at all n locations
agcttcacggtgtagttatgtctggaaaccaatattatgaaacacgccttgcctgcgtgtagtaattttattatagtctgcagaacttcctagccaacaactcatgaagttccattctaattggtgtgattgtcgctattttttcttatactttttcttcctaattaccagaggatgaggagaaagagaagcttgcaaaggagatagcgaaagattggaatgctggtgaatttctaatgatactctttatctatgcatcggaaaagtttgtgatccactattccctttaatgcttattttgaactttcttgcttcagtatttgaaaggagcatcaacacattgtttttgactgaaatggtccgcggtttgatgctgacactncagtacttcttcgagaagaatgttacagttaagtggtgaatttggcatactgtttcctttataat

SEQ ID NO: 1964 - DNA, 467 bp, Oryza sativa
  unsure (1)..(467): unsure at all n locations
atactcagctttgactgggggagtgactacacaatggcctatctcttctactcacgcatatatatgcttcccatttgatcaattcaaccacatttttctgcaccaaactcgatcttatgaaaatgcgtgaacttctcgggtgtacatgtgtgtatgagcaggaggtggagaagatgacgctggcgcagacgacggggctggaccagaagcagatcagcaactggttcatcaaccagaggaagcggcactggaagccgacgccggtggcaggcatgaccttcccgacagtggaagctgccggaggcggcttccgacactccggccacaactgcggccttgcngcggcggcggcggcggcggcgctgccgctgtacatgggcagctggccgttcgttgtggacggcatgtacccgcttcggtcttgaagcctctggggatcgcatgatgttcccatgaatcagctgtgg

SEQ ID NO: 1965 - DNA, 372 bp, Oryza sativa
tcggcacatcataacggaagtgtattatgatggacgtcctagtgccccggccgaagccaccaagaactatgtacgtcacagcggttgggttgtgcgggataacgtgcctgtcagtacggtgtactggcgaagaacaagggcacgcggagatcatgaaaagtttgtcccagattcagagaaagagatgctgtggaccacaatgctcgagacattcacccttcctgcgggtacagaggacaaagtgaaaaggtggactctgaagaaaatggcagaacagtttcagagcttcaagggagatctgtaccagaagtatatactgaaggggcagacaccgaactttgacacattcccaaagctaagggatcactggga

SEQ ID NO: 1966 - DNA, 461 bp, Oryza sativa
taagctaaacattagacacacactcatcgagatgcatagctaattatatatttatggatggaagagtagtatcatatcatctgtaacattgtatggattctttaaaacaaataattaattatataaattcagtaattaaataagcaggttactatccctccgtttctaaatatttgacgccgttgactattttaaacatgtttaactattcatcttattaaaaaaagtaattattaattcttttcctatcatttgatttattattaaatatactttcatgtatacatatagttttacatatttcacagtttttttaataagacgaacgctcaaacatgtgctaaaaagttaacggtgtcaaatatttagaaacgaagggagtatgtaataacttgttcacactgataaaagctatctaaatcaataattattctccaagtaactctcatcattaattcatt

SEQ ID NO: 1967 - DNA, 423 bp, Oryza sativa
  unsure (1)..(423): unsure at all n locations
agctntaacaatttatggactagttgtggcactgtcgcttttatttgcgaacccttttgtttaatcctaaaaaagaaaacgagtcctttagattagatactttcttcttttttagaaattggatttgcttctgcaattccaattatatcaatactttactcctaatttattactcctagagttttctatttatggggacagacaataccccaccccaagaatagctgatttgaggatgatcaatttagaggatatgttcgccgtcttgcttcccgccctttgtttagggcagtggaaagtatttttccttttattttaggaattttgggaacatttcaacaaaggaggtctttcacaggtcaaacgagatctaagacttaatctaaaagaaattactaaattgaatctatttctattaaaaaa

SEQ ID NO: 1968 - DNA, 465 bp, Oryza sativa
  unsure (1)..(465): unsure at all n locations
aagcttcggcattggcgaaaanaactgtcggataatacttatttttcaaatacggttaactaagtatattggcatacaagcgtttcttcttgtagagtagataattggattttgattgagttatttttctaagggaaaaaggaaaaggaggattcaaaatcctttnttcttcggactttcccaaacacaaaatacctccttgtattcgcactctcaaatgagagtggaagaaattcgactttcatataatatcttaatagaattccatgtaatgatcaatgcattttttggattctatattattcgcatgtctagaatcctaccaagagaataccccccatttttatgtaattgaagtaggattgacgaataagaaataaacataatactggttattagtgtcgcataaaacccgaaatggcgcgtggccaagtggtaaggcagcggtgtttggtcccgctactc

SEQ ID NO: 1969 - DNA, 379 bp, Oryza sativa
  unsure (1)..(379): unsure at all n locations
agcttccatatccacttcgggatcttttcttgtttttattctttgacaaatccaataggatgagctccttcaatgctgacagagcatcatggatgtcaccagtcagattcatccaagataaccacagatatgtcagctatgtaagcttgctaaactcattcggaattggacccggcatgaacgggttggatgccaacgtcagtatctcaagctccacaaggcctccaatggaagcacctggatagctcccattaaagctgntagtgtcaaggaccagtgacttgagcttcaagaacctggcaatagccgagggaacatcaccaataaaataattgcttgacaagttgaggtgctgcatcctcaaggacaacttgtcgat

SEQ ID NO: 1970 - DNA, 406 bp, Oryza sativa
  unsure (1)..(406): unsure at all n locations
gttgccttctatattgatagagcacgagaaaagtaaacttattttatacaaagntatntacagngccagattgaagactactagcccgcaaaaggagggtccctaagtgatatctcccaaaatacctagctcttgcagggttgtgtccctagtgttaacccatgcccttcccttctctttgattttttgctagaattgagtgatccttgtgttgcgctcgcactagatttcccangaaattancatcactagggtccggattggctttcgaggtgtattgcgagaccccacaaccatagaccgccagtgttcgaccgaatggcagtccatcctcttatccatctatagatcggaactatgagtgcacttcagccagctccacttgattttaagtggagctgaaact

SEQ ID NO: 1971 - DNA, 377 bp, Oryza sativa
gaccacaagcgactgcagcagcaactttgaagaatatttatcaaggagcttctatttttcttctaactcatccacgaaatccaatgaccctgttctcatatgcaaatattcctgatggccagtcaataatatagcacctcatagacctcaacgtactaaaattaaactgaatgcttgtaatcacagtgcactgctggaaatatgttattatccaaacccaagacactggttgatgatagccaactatatttatgatggggctcgttgcaacccctatgtgatcaggtaagcactgttggagatacaggcgcacgtgcaaatgtcagaggcaaggtgcaacctcttctacacgatatcaagccgggatgcatcattca

SEQ ID NO: 1972 - DNA, 259 bp, Oryza sativa
  unsure (1)..(259): unsure at all n locations
agaactcctacaaaaatcgcggagaaatcgggatgttcagcacacaaccacatcacatagggggaaccacatgccaggggaaccacatccatggacaccatgactcgaactctagcggagacatacacacagagagagagaagtgcgcaccatctcacacattaatgggtcgccaaagaaaacatgcataccgagaaagagacgacgacaccttcggcgcgtctgactgcttacgtgcaattatnttcttctctccact

SEQ ID NO: 1973 - DNA, 328 bp, Oryza sativa
agcttacatgttatcacaagatttaagatattgtataaactaagaaagaagccaaccaaatataaaattattaaagaaaggtggaaaaaaattaaaaaaatgtatacagaccttatttttattggattttaccactgctaccaggaccttgctaggtttggttacttgtctatttctgagaacatcatcatcaaaatcatccaacatttgcaggtatctcataattattaacaaaaaggcatttaaaagctaaaaccatccaaatatattaaatgtgtcgtttaaaagagaaagagatggcacaactaatgactcacctatgaggagt

SEQ ID NO: 1974 - DNA, 460 bp, Oryza sativa
  unsure (1)..(460): unsure at all n locations
taaacactacttccaggcccacanagtcacagtgccatcactgtatctcttgggcgtggtactccggggcaaggaagttactggccggctcagcaaataggtggcggagctatctcccttcgacttgcattttgtcgctcgcactgctatcaagtcacaagttctagctgacttcgtggccgaatggacaccggcgttcgaccctgagcctgagcccgtcgaacaaccctgngtgatgtactccgacggcttgtggtcgcacaagggggcgggcgctacggcagtactcacttcgccagggggcgtgccgattcggtatgccgcaaggctgcatttcgacacaaccaacaacgcggcagaatacgaagccattcttctgggcctgaaaaatgcgaaagcattgngggttcggcacttgctcatccgaaccgactccaagttggtggcaagtcatgttgat

SEQ ID NO: 1975 - DNA, 467 bp, Oryza sativa
  unsure (1)..(467): unsure at all n locations
tgcaggcgacttaatgatgcaacatttatactgtctttatttttcttagaatgtngntaattaattacgtgatccttgctaatttgattaattacaattattgattaaaaatattggccctagacatagaaattgtatagccaaatttcttataatacaaatgctcttataaaatcaaatgtttgtagctttttcgtatttataaaaagaataaagttgtcaaagttgtaccttgtttggctttgaaaagtccaaaacaacattatattttattgggggaaataacttttacacacccccccactaactattctatactattatcgtggtgcaaaagaaatgtgatgatgtttacgtactccctctcaatttttaaatagatgacgtgttgacttttagacacataagtgatcgacttatttaaaaaaagaattgcacatgcataagatataaatcatgcttgaaat

SEQ ID NO: 1976 - DNA, 419 bp, Oryza sativa
  unsure (1)..(419): unsure at all n locations
gacctctgagacacctgcngcatgctagcttgtacaaacggagaaagacatgcatatttattccatcgnaangaagggttcaaaattagacatcacacaagatcagtctcattataagactcttctgcaagtgcagaactatccaatggtattgactccactaatcagccaaaattagtggaacaaataacagtgagaatccaatcttaaaaaattggttcatgttatatatctcggaacaatggtttttaaatagacaatctatgtttaatataacaaggtaccaatgatgtacatccttcatcacaatcattcatcaatacaggcacagcatgcgcgccatgtttatgtatagtcacctattccaatacaggtgatggtgaaatcatttttgagggtgatattgatgttgatagtat

SEQ ID NO: 1977 - DNA, 478 bp, Oryza sativa
  unsure (1)..(478): unsure at all n locations
tagacatcataattgaaacagtggtgtcattgtttgtatctttatcaaaggttatngncatgaccttatcctctattttcaattcaaccaagcaatcaaaaatagcctgagctatgacaatagcggtgtgaggaggctccacctcaacaaagtttaggacacggcatagcaaaacccaatgaacatctatgtaatgagccaccaaacacatatactgaagggtttgatttaatgtccacatatatctgtagttaaacttatggtctcagcctccctaagacttttcctgagatgttccttttcagattcatacaatttcatgcattcatttttatggccttgcgactagtgaattcatagcgaggattcatccacttcatcaaggcattaaaccctttatgctcaacaattctaaatgggtaatcatgttgaattatcataanggcaatcaaaaggttagtgtgatcatgatcatact

SEQ ID NO: 1978 - DNA, 451 bp, Oryza sativa
  unsure (1)..(451): unsure at all n locations
gcttgagtgcttgcctncttattagtcaatgatgtttctgtacgagcctatagaacagatcctgttcaagtaaggtcgtgcttagcggtcaaaggttttgcattttaagctagattcatttcttgaagacttccgaggtggtactatgtttggcaaatgacgccctcccatgttttgttttgtattgtctcaaactctaagtctgtgcacatggttgtcatgtactgggctgctgggccttccttcctaaaatgaacccaggccttcggctacaccatggagccgtagaaagtggaaacatggttagtggtaaaaacagttacagaaattcttaaccaaccaaaattaaactagtaattgcccatgctaacgctacggcgatatctagcaaattttctacttannaaatattntactatttcgaggtccacattattaaatattattatca

SEQ ID NO: 1979 - DNA, 515 bp, Oryza sativa
  unsure (1)..(515): unsure at all n locations
ctaagctttattgatggcctgaaacataaagaanacaaacagataagttttgtgattatcaaataagaatattgtaaatntgtgatgaacacactcacctgagtttccttcaaacgatcacccgtggagccacttttagcaaggcgttcactgccagctaaatcaatcaagttaaggacaccttggacttgttgcccagtgttctgcattaagatcaaaagaaaattagtgacatacatttgctcaagtttcagtggttctgtttagttagcatgaaaatgaaaaaaaaaatattgtgaccagtttgtaaagtttcagcactgtgattaatattctaaaatatgggtgaagcgagtacctcattngatccagatatcttcagtgtgaaaacaaaatggctccgggaagaatgttcattcatttgggtcctacccacagacctggttcaatgtggtgaaaaaaaattagactcactcgtgatatgtagactangtggctaacagacacatgtgaat

SEQ ID NO: 1980 - DNA, 445 bp, Oryza sativa
  unsure (1)..(445): unsure at all n locations
tgcagcttccaagaatataatactatnattattatattttataactataaattaattaatatcaaatgaatagataatagttaacctaaatagtgtgccaataaataaaaatggatattgtacagtagcataattatctttaatatgtcttgtcactgtagcaaccaaataaattagttataatcaatccttcaaattaatgggtgtaaaggaaaatattagtgccattcactagcctatgtccaaatataactaaatccatgacttataaattacttacataaagtttagcctcatattttgtaactaaaatataaacacacatagatgaatctttaacctgtttaggagagtaatcacacaactagctgtatttcgactacttaaaaattagttgatacaatgtcatgtgaagacaatatatatatataggccgctgatatct

SEQ ID NO: 1981 - DNA, 436 bp, Oryza sativa
  unsure (1)..(436): unsure at all n locations
gctttagagccatatgtgtcgcacttgtcttctctcatgtctcaccgcaccagcgaccgccaatgtcgaaggttgtggcaatgctgactggagatgtcgatgtggcttaggtggtcaccaagccgaactacatcactgagtggcagcttacgggtggtgggaacagcagcaacaccactagcagctaagcaaaagttcgtctccaggttaagtgaatttaaagtaaaaaatgcatgggtcatcaagattggtttgcgacaatattgtatgtctttttctaacaaataattatgtgttgactaaattacagcaaataatggaattacttatccttaactcngtcctgtgaataaaagtttgctcctaataatttgtaaatggtgataaccgcggtgtattcaaactcaatagatgtaatagataacctcatctgaat

SEQ ID NO: 1982 - DNA, 448 bp, Oryza sativa
  unsure (1)..(448): unsure at all n locations
ctaagcttgtcctgggaatgatagcaatacgcagacctaccacatcatcactgatttcttctcggatgcagncactagaacaatgcgagctatatctctccagaatcaaaatgagcagccacgtttgtgattntcagttcgctacttatcattgtgtaatcgggagtttgcagcaatcatgtaataaataaatacactcatgattataaacaatgagtttgttatgtttatggaaaaatcatgtggaggatgcaatgtaccgatgttaatcaccttccctttttgtttaaagccaggccttgcattcatgtaataagggagacatgtgtcataaaaacaagtgctatgaggattatttcngaagatgctgatatgggattatgtgtataatcgtttactgaccagggagacctacggtctcatatccgtgagctcataatctatgata

SEQ ID NO: 1983 - DNA, 448 bp, Oryza sativa
  unsure (1)..(448): unsure at all n locations
agctnttagacatcaagttgtgaaggatctatgcatgcataattgtgaaggaaaagctccatgtttttttatttactttcttttgatatgttgatgttagatgtatttacttttttttattntgctatcacatccacctcctagatctagatctagacatatatgtgagagagagaagaaaattttaaatgtctatctatttggtttaattaaaaaatagttgtattatttgtaatatgctaataactttgtttttcattaatgtataaatcaccttcaattagttttgaatagcgataccgttttttaatgaaccctacaacattggtattaatagtgcaaatattttttggtcatttttttgagatatggaaaggcggcaatggatgtaacattcgccgagggctttgggtccatatagggataaagcgtctaaattcgtggtatt

SEQ ID NO: 1984 - DNA, 437 bp, Oryza sativa
  unsure (1)..(437): unsure at all n locations
tatggagtctactttcagatggttntggtcccacgtcanaatcttttttatctgccgggaatctgcaaaacaagccatgtatctcatccagtccgaatttgacttgngttttgggccttgtaattgtgttgtgggcttagcccaagggggtgtgcgccctatggcaaccctatgacgtccctaatcacatttattcagtagccgtcatcgtttagagtcgggttttgcttagattattctgtcaagaacagtttcaccgctagatcggtttgtggaaccccaaatttgagtgcttaattattcatatgcaatttggttgcaatctattttgttcttacttgtgttcttcgattcgcatgcagggattaaccttctcggcgaggtcaaccgggtttcggcatgtgtgataaccacaggagacgtggtgctgtgattgc

SEQ ID NO: 1985 - DNA, 427 bp, Oryza sativa
  unsure (1)..(427): unsure at all n locations
atcttaagtcacctgcggcatgcaagcttatgttgatgatgtagtcgtcaagacctatcttaaggatgacctgattggggatttagaagaaacttttacaagcattcgtgctttcaagatgaaactaaacccggaaaagtgcatcttcggagtaccgtcagggaaattgcttggatttatggtatctcaaagaggcatacaggccaacccggagaaaatcaacgccatcctcaacatgaaaccgccaagctcccaaaaagacgtccaaaagctgactggttgcatggtggcgctcagccggttcgtctcacgactcggcgagcggnggatgcccttcttcaagctgttgaagaagactgacaatttccagtggggacccgaagcacagaaagcctttgaagacttcaagaaacttctcaccactcca

SEQ ID NO: 1986 - DNA, 508 bp, Oryza sativa
  unsure (1)..(508): unsure at all n locations
ntgacccggagatatcgatttcttaactgtagtgcacatttttttttatatatagagaatcaaatattgaaggaattcctgaaaggagattggatgtatgacattggctcanagagtcgatgtcagaatgatagatcgagacaattaatattaaattcaagcaaggaaacttttacccaaatagtatcaattaagtggtcagccaaaggagaaatgtactagctagcaaaaataaaagaacaaaatctaattaattagttaaatccgaagtgcacgtcagattcagacaagaaatctcttggcgcttttggcatatctttcttggcgtctgatattaagttntgtgcatctggtttgcaccgtgaacacgtnggngctcagttgaaatttgcaacatgcatgcatatncaactgttngctagctagaacaggagatgccacataagagcacgatgtgatgccacgtaggtaataactggtcaccatcttgactggacttgaaacaatt

SEQ ID NO: 1987 - DNA, 132 bp, Oryza sativa
aaaggggcaaaaagaccacgacccgctaaccatagaaaaaaaacctacaaaagacaaaaacaacacaaaaataaccaaaacaacaaaaggacgacaaaagcaaaggaaaagccaaacgacaataccaaaaga

SEQ ID NO: 1988 - DNA, 445 bp, Oryza sativa
  unsure (1)..(445): unsure at all n locations
tggggtctcgacttcctgctcactcatgcacaccgctttttgatcttgtaatgagaccaagctcgatagcgagattaagtcatggcttgcttttgctgcccaaaaagaggttgaggtgaatgcccttgctaaggcattggctggacagaaggatgaggtatggtactcttttttgccctttatctattctcacctcttaattagagcctgagcatagtactcattactcaatagcatctgaagaaacttctgctcatttatacatttgtgaacaatattgtacaggcttactttgcagcaaacactgctgctcaggcctccaggaggtcatcacctcgtgtgacaaacgaggaagtccaaaaggctgtaagtaccttctgttttatgctgcatgcttgattctattcaacataacttggcctgttnttcttaatatcatgttata

SEQ ID NO: 1989 - DNA, 419 bp, Oryza sativa
  unsure (1)..(419): unsure at all n locations
agcttggacgaaacactctgcatgcacactgtttatgatatatcagcttggctcagtaaactaatttaatgagcatatatgcatagcagttttgtaacaaatggttatgccatgatattcagtagaaacaattgaacatcaaagatgaaagctccgaagtctaaggacattttctagacaactctatgtgaaattatcagtttaggcatccactttctctactttctattcctcaaaagacacttcgctntcagaattcagaacaactcagagaaaatacgaccatgggatgtattccaaaaatacatgcataaacaacacgtcatgagaccaaaaataggagaatgggttccttctttaaaaaaaaaacagagagaatggtaccttgacatcatcaacatccacatagaggaacagta

SEQ ID NO: 1990 - DNA, 348 bp, Oryza sativa
gcgagacacaatctgcatgcggcctattgccacgtgatttacatcagatcagccgaactagacggctagcttttcatcgagcaccgcgagataacgtaatcaattcagtgacctgatcaattatattgacagtaggttaacaacagtgacaggttgggctaaagcaaataacgacagtgagcgcagccacgcatgcaggaacccacggctaacagggtccaggcagcatattgtgttcgatcgatcgacagctcttggaatcaaagttagcgaaagatgaatgtaagacggtacacgagtcaagcaaaagctgaacaccgaactgtccggaacctaattaattaatct

SEQ ID NO: 1991 - DNA, 367 bp, Oryza sativa
tatataccttctgttgtctctttgatttctccgctgcatgacataatctactatttacaatcatgagtactctttttgccctttgagccccgcatcggtatatccgatgaggcaactatatgtgggaccgtacgccgggctcacttgccaaggcttgatattcctgctgaactagtgtgaaaatattaccttttaaaaaagactggagcaaccggacatctcgaagtattcgaacaaatgcgattgtcacgcttggcagtgcaccgcgtcggacaggacatagggccatgggacatgtcttctcctcagcctataaaatgcccaatacccttccggctatcaggagtttccagccgacactaaatgg

SEQ ID NO: 1992 - DNA, 487 bp, Oryza sativa
  unsure (1)..(487): unsure at all n locations
actcatgacaacctcctttccactactcattattttctcacattgatattggcatatcttgggatttgcttaatgatagtgctacttgccatattgctcatgttgcatcatctagcatttctacctcttgtgatgatcttgtggatatgcctagctctagctctagctcttgtgtttctatttgtgatgtctcacttgttgttgagaacaatgagcttaaggagcaagtggccaagctcaacaagagtttggagaggtgtttcaagggtaagaacactcttgacaagattttgagtgagcaacggtgcatccttaacaaggagggacttggattcattccaaagaagggtaagaaaccttctcaccgtgcactcattttgtcaagagcaatggtaagtattgcttcaagtgtcgtgagggtgggcatttggtgaatgattngccccgtggtaagccctctaagacatgcatgnttgattctcattat

SEQ ID NO: 1993 - DNA, 407 bp, Oryza sativa
  unsure (1)..(407): unsure at all n locations
agcttagatgggtttcaatttattgtataatttggttaattcatttctcatagntatgcaatggcttagtttttgttatacaaggattccatatattagagacatacggtgtgactcggcaaatttagcgattaatcaaattaacatggttgtatgatactgcataaaagattatgcaatctaattattttttctacgacttggtcatgtctatattcaaattcgtagaaaaaaattactatattttgatgacacattagtagatattcatagatgacagcagacaagatatttatgcagtgatgcgcgcccataacgcatggaagtttctagacagttggtgtatgagccgtgctatagctaggatggtgcaaaccaagatgtgcatggtcataatacgttggagt

SEQ ID NO: 1994 - DNA, 402 bp, Oryza sativa
aactcagctagcagtggagttggtgtcgaagcaatttttgtcatgtgatatctgctaaaggagttgctgtggaccccgaaacagtgaccgccgtcaccgattggaagcaacccaagacagtcactcagattcgcagtttcttgcgtttggcaggatactaccggaggttcatcgagaacttctccaaaatcgctcgacccatgacacagttgttgaagaaagaagagaagtttgtgtggagcccgcaatgcgaaaaggcgttccaaactctcaaggaaaagttggtttcctcgccagtgttaatcttgccggatactcgcaaggacttcatggtgtactgtgatgcttcgcgccaaggattgtggtgcgtgctcatgcatgacgcgcatgtggtagcctatg

SEQ ID NO: 1995 - DNA, 457 bp, Oryza sativa
  unsure (1)..(457): unsure at all n locations
ggatccttaagacacctgcggcatgcaagcttgctagntggtgtctgctctgatctttgtctaacaatatgcctcactggggtcactagagtatgtagcgctaacaaagattcctttgccctggcctgtatctttgattcaacgccttttttgctttctgctgatgctccctctacagagctgcttgagcttgctgggataatagccaacgtttgctctgaaggtggtggtgagttagacagcatcagctgtattggaccagccgatgaaacaacgctgtttacttgcaaggattcttggttcttcatgaaagcattctgtgtgaagctgatattccacacaaagctcttggtgatgagggctgtgatttcgtctggaataaattccttggttggtggattttggtcaataagagtctcaacagggttacgtatgacacgctgtgctgttcttaaaa

SEQ ID NO: 1996 - DNA, 499 bp, Oryza sativa
  unsure (1)..(499): unsure at all n locations
ngagaatgaganantgaagaaanagaattacgcaatctagtttcatgagttcaatagtatatgcagtacttgtcatatgagggctgaaaatgcttgccttggaactgaggtttgttaaatgatctctccaaactcatgctagaattttttgtggtatgttttttctacatagaatccgtattttagattgtgaacgtttccaccaacttgataaatttgagcatcggatattgggaacatatttctttcggtattccccatatttctttcggtatttcctactgtccatcttggcttctgagctgattttttcatgccggcaggcaaagggtgctcttcggtaatccctatcccaaaagttacctaatgatttctaaaataggaagtacattatcttgttcataaagctcacatcaactcgtataaactggttcctcgttcacagcaatccctactagtacagtagacttcattttttttctaattcaataaatcacat

SEQ ID NO: 1997 - DNA, 364 bp, Oryza sativa
  unsure (1)..(364): unsure at all n locations
agcttgcctctgtccctcttcttcntgatttcttctcttctcccgagcgccgtgcatcgagataagtacgacgagaatcttggcacaaccaatcttcttcctcaacttcctctagtcgggactgcccacgcaaagccacggttgggaagccctaacgcgtgatagcggcctagcctcaaacgaagcggcgacaacttggccttgaggtggaccgatggcacggcagaagccggagcgacaacgtggcctcgaggcggagtggtggttgggtgctcctgacgcgtggtggtggcctggcctcgagtggagcagcggtggctcagcttttgaggcgaagcaacgttgcggcttggagatggagtga

SEQ ID NO: 1998 - DNA, 487 bp, Oryza sativa
  unsure (1)..(487): unsure at all n locations
aactagagacacactggcgcattgtcttattcttntaatatataggaattttatgagcatctatgggcgccaatattcaagattatcacacccacaatcagactcttggcttctataaacatacatccaaattataaagcaccaaattgtgcaatttgcatcataaaattgatgcctattcattgttgggcacgacagcacccacacctccatccatgttatatgaagcgtcaatatcagagttctgaagttctgatttctccaagcccttatctggtccaagattctctagctgaaccccatgccttttcaatgcatctttgatcttataaatctgaaatagcaacaaaatatagcttgaaagagcttataggtaatctgttcacaaatgggcttagaataacggaactcacagntganantgtacagctgaagctacagatacgggcttctgcacctctgtaaaagcgaaacatggaatacatga

SEQ ID NO: 1999 - DNA, 417 bp, Oryza sativa
tgcagctgaatgtacgggttcttttattaatgcttgttagaaacattatgcaatgtgctcattgcaatcttgacactacccattcacaagtgacatgagccctatttgtagcaataaactatcatggagatagaattagccgtgtggatttcgctagccatgcaatggcatctttttattaaaaaaatctcacaaccatgtgttttcttgtaaaactttagtattgacaatggtgagcattttgtagagcagatgcaagatgaaccgggctcatccgaatgggaaaccgtatgaacttctgaactgttgccataattcgttcaacacatttgatgctacttgcatgcctctaaaagaaaaaaaaacaaggttctctacgtttaactgatcatcacatgcgatctcttgttcaactga

SEQ ID NO: 2000 - DNA, 444 bp, Oryza sativa
tggctggtcggacaagagtctacagaacttctttgtctgttaaaggaccatgtgccagaggggaactaattaccgcagacgacatatgaagcgaagccagtattatgtccgttgggcctggaggtcagaagaattcatgcatgtccgaacgactgcatattgtattacaaggaatatgctgacttggatgtctgccctgtctgtggggcatcaagatacaaacgagcaaagagtgaaggtgaaggaagtaagtcaaagaggggaggcccatcaaaggtggtgtggtatctcccaattgcggagcgcatgaagagaatgtttacgaataaggaataagctaagctagtgcgctggcatgccgaagaacggaaagtcgatagtatgctgaggcacccagcagattcagtacagtggatgacaatcgatatgaattaccaggaattc

SEQ ID NO: 2001 - DNA, 406 bp, Oryza sativa
  unsure (1)..(406): unsure at all n locations
agcccttccttggtgtagaaccttctgactctctctgttgtgttnatacgcaggtatacatagtccccgacttcgaaggtgagatacctgcggcagttgtcggcatagctcttttgcctggactgggccactttctagttgttttgaatggtcttgaccttcgcttccgcttccctgatgaatgtcagtcccgaaaacctgtcgctcacctgtctgatcctagaggagcggcgttctgcacttctgcccgtagagagcctcgtatggtgccatctacaagctgtattgatagctgttgttgtacgagaactctgcgtatgggagactcttgttctangtctttccaaaatcgatgaagcacgcagaaagcatatcttctaagatctggttaatgctctatgtctgg

SEQ ID NO: 2002 - DNA, 438 bp, Oryza sativa
aagattcgctctcgggttcagagcgtgccagttggtttgatcctgccactaataagaaacagagaatccaaagttaaatccataaacgataaccgatcggctagattgctgatgatgtatcgtctaaatcaagccgatgcaatctgatctagatcatcaatggagtatataacgaataaaggactaaatttaatttatcggctatagatatcaataatatataatctatacttcaaaatatatttaaaccaagtgattgggatagatcggattgctcccgagacagtataaattacttatgtctaacagtacccccacagtaaagattatataaactcatgtcatagcaagtagttaaatctagcgtgtatcggctattgctctgatacttctttatactaaataagatatcattgtggattaaatatattaaacaat

SEQ ID NO: 2003 - DNA, 369 bp, Oryza sativa
agcttggacagagcccgtgcagccgccgagccttgtgtgactctgccgtttcctccgcccgattcgctcaattctctcgactgtttttaaaattagttgaggggaattgtttgccttatccttctctaactcttcccccaaaaatcctatcttatccctttgaattcggcgcgaatttggattcgtttttgagtttatctctccaccaaaccctaggttttcccggcgcgattccctgcgttccacgcccgatctctctcccgtggctataaatagagtcccctccctcttctcttttgtttgccaccctcgcccgagctcgccgtcggccgtagcgccctaaccgcgtttgtcctagcgccgtcgtag

SEQ ID NO: 2004 - DNA, 509 bp, Oryza sativa
  unsure (1)..(509): unsure at all n locations
tctctatcttgaagtattcttgtcccgaggccttggggatggtctcactgtangctgtagtggatttccatgtctaaaggagtttattntcgacaacagtcgcctgcattggttgttgtttgaacctggagctatgcccaaaactccagaggctttgttttagtttgtatgcacgggaagcagcatcaaaccttgggctcgagcaaagctatgtgcacctttccagcctccagcatctcaccttctatctttgctgtaccaatgccactataacggacgtgaaagcagtggaagctaccatcaggaacgtgatcagcatccacacccgccgtcccactctcgtattgcggagatacttgcaagatcgaatggtnaaggaagatgaagaggagcagcttatagacagtacagatggatgtggagttgaagagcaccatattcagtagccactgatcacacgtggaaatcagaagcgctggaacccangtattggttcatcctctcgtata

SEQ ID NO: 2005 - DNA, 365 bp, Oryza sativa
  unsure (1)..(365): unsure at all n locations
tgttgcttgagggttaatccgcggtcgatatcatgtgtgagtggtatgacagcctttattaggagctgtgggcctctttttcagcgttttaatcaagattaagataatggcacttaatcttataagaaagattagtntccgagcccgcngntntcttcctttctcttatttctacctatcctcctccagatggtgaagacaaggaatgatccccgtgactccaacgacgccagtggcagcgaagagcagaccgatggagctcatgtcagtggtgcatcttgcagcagatcatctccaccgtccgataacccaacagtcactcaaatgatgaccatgatgatgcaacagatgcagcaccattacca

SEQ ID NO: 2006 - DNA, 379 bp, Oryza sativa
  unsure (1)..(379): unsure at all n locations
taagcttctggcgcaagctcaataacgtatgccgactctttttctanagatgatcaggaccagcgtcatctgcaatgattaactctcagagtcagagtcagtcnctaatcatctctattcgacctctatgtcgtggctactgggctaacccatgagcttggctaccccacatctgatttgaatttttttggagacctatacatctttcangattctatggcgatacacagatttaatcttggataaaatcgatgaataataaaagcaaagcattaaaacactatggacctaaatacctatctcaaaaaaccgatcatcaaattaaattcatcgagatcaaatacggcactacaaatacaggaagttataaacctgacta

SEQ ID NO: 2007 - DNA, 285 bp, Oryza sativa
ggcgaaaagggccggccgcaaaaggcgcgcggacatctaggggacggcggcggtacacgagacaaaataaacaatagcttggcgcggcaaagcacgacacgtggaagcaaacggaaatggacgggccggaacgacaccgatggcagcagagtatatattttttatttgacacgagcagcgtttggaaccagcaaccactgcaacgcgtaaacgaggccgcacccgcacgcccatctgggttttggcgggcgaatttatgacgcacaaaccctaccaaccaggggg

SEQ ID NO: 2008 - DNA, 465 bp, Oryza sativa
  unsure (1)..(465): unsure at all n locations
acctataganactcaagcttaaagctccataagggcatctttctctgcgccaagtattatgtttataatgaggcatatggaaagagttcaagagaaatatatggatcattcgacttccgcaaacgatcaacgaagttgtgcatgcatgaaggcagatagattgacaaaacatctatttaatatgtgaagccaatgaagaaaaagagactaatcataatatcaaagacaaaaagaggagaagcagaaaccaccttcaccataaaacctacaatcaatattacattacaatatagtataaattaggaatattacgcagaattatagcacaactgcaacacatattataataagttaggaagaaagtttgagttaactagaggtatcgcattacctgaatcagtaattctaagggtcgcctgcctctcatcagattctttcatgccatttgagacgagctaagaacaa

SEQ ID NO: 2009 - DNA, 434 bp, Oryza sativa
  unsure (1)..(434): unsure at all n locations
agcttgcaggtatgtttcctggntntgtggatatgacaccangaccttgtcgcctcggaagttgtccttgtcggctcgtgattctcgtcggaaggacaagatttagcagcactaggatccttctcgggctcggatgtccgcgatgttctgttctccacttttgcgggaggatccttcgacatggagccgtccagggttgtaaccacagcgttctcgctttcggtcattgatggaccagtcaagattggcaccgtggtgtaaaccaggaagacgatttgagtccacatcagtattgtcgaagtagaaacaccttggttgatgccagggttgacgctgttgtcaacgaagcttgatgacatattagtagaaccttgagcaccaagttcccctaactgacacgccactgtcgatgggggatacccgtagaccggata

SEQ ID NO: 2010 - DNA, 396 bp, Oryza sativa
  unsure (1)..(396): unsure at all n locations
tcatccttcgcgaaataactaaccncaaaggaatggttatgcttatactaaaatgatgaacaatgttgaacttctatgtttatgcaatgatgaacacttattatgcaactgtggtgatgtaactgtgatgcttatatttatatatatttcatatgtttatgttaagacttgctaaataaatatttgatccaattaactcggttttgcaggtgaaatatgataaatatttgaatggatgtgaaatatgtgaatggatgtgaaatatgagatggctgtgaatgtgtggttgtgtgaaatatgttgatgtctgtatatgtgaatgcatatgtatgaatgggtgatgctggggagctggggatattggatatctatgtttgtttctgtcaattttgcagc

SEQ ID NO: 2011 - DNA, 452 bp, Oryza sativa
  unsure (1)..(452): unsure at all n locations
agctntgtaatgatcccttgcatcaagaacttcactatatatgagtagcatattagcataccgttngtgtgtgtcgcgtgtctaacgtgcaagggatatattttgctagtagctcagctacctggattatttgtttgcagagtggaccctcgacgatttgtttgttatgaagcatcgagttaagaatatgttaggcatgctgcttgtttattttttttcaagttgagaattgaccatggaccttgtaataatgatatattgcattaacgtactgaaaatagttaggaataatggaaagcaccaacgatgctgaggtgaaatcttgggtacagaacttcacccactaggatatatccaaaatatagagtgaatcttacnttgagtcatcttttattactggtgtttcatattagatcaccttttaaccaataatcgtaactttgtgacacttt

SEQ ID NO: 2012 - DNA, 497 bp, Oryza sativa
  unsure (1)..(497): unsure at all n locations
tgcttaacagctnctgtccggagacgactatcttggccatatacataatggcgaanacctgaagcatgacaatgttacaaatgttgtttccgtgtaagctaaatgccacattatcacatatgcaagctgctaaggcattaagcctgtgtaagtttaatggatccatccaatgttaatccatggacagtggcatgtagtggcgcacgctgcaggaattgcatgctatcaaacaatgcaacacgatgcaggagtggcaagctagccaataacgcaacatgtgtttttggtgtatgcagggaatattattttctgcagatgacctgccacattcggcagccacgaacacgcacgtacgcatccacttacttgtgagagttgaagacggcaaatgagtggtgctgatgcgtgccagcacgcgcggccgggtggttgcatggatgaatggatgattgatcggagattggagacttaacacggcgacgtggatggtacatact

SEQ ID NO: 2013 - DNA, 91 bp, Oryza sativa
tttagcggaacacgttgaaaagacttaagctaaaggtgtcaatcggaaccatatttgggtgaagagcaaaaaatgagaaaacaaaatgccg

SEQ ID NO: 2014 - DNA, 346 bp, Oryza sativa
  unsure (1)..(346): unsure at all n locations
tcagttacctgtcagtaacagcacgaatgagccttcacgatgttcgangaaagataccgtcttggcaaccttctccaagcactccttactctgcacgaacaaccaatcgcaatttcttctaacattttagtccaatcgaatataaatcaagaagaagaagagggagaatctctctctgcataccangtanggagggtcggcgacgacgatccggtaggcgtgcttcatcgccgccggaagctcctccggctggttgtagtcgtagaaggtgaagtcgccgccgtactgcccgaaccgcacgtcgtactccagcagctgcgcggtcacatcanggctgctcgtcttg

SEQ ID NO: 2015 - DNA, 290 bp, Oryza sativa
gtaacgggtaaacgggcacacacccgcgggcacaatgcgcccgtgggcaatgggcatgggcaaccatccttacccgtcatgtagtaatgggtatacccacgggcacaaataatctcatgggcacgggtatgggtaggcactacctgtgcccgtcgtgcccgattgtcatacctacccgcggcccaacagtgtcagcttcgcgctccccgcgcccggcggcgacggtcatgacgacgagatctgcgacgcaaccgacaacgaggccccacggccggaggcggtggaaccgc

SEQ ID NO: 2016 - DNA, 493 bp, Oryza sativa
  unsure (1)..(493): unsure at all n locations
actaagcttattgaaagaatacaatcaagcgggtatgatttgtttattggactacgacatgaatgtatgtgtcgcacagaataagaaactggtatggaactgaagtgtggatatatgatatagttatacaggattagatgattaataggatgtagaataccaaccatattgcatttcataccaacatggcactaacaacatacgaagctcatgctaaaatgccctatatcaaactcttaggataggatatgatatgccatcagtaatgaagtactgtagctagggtcacatgctgcaccaaataatcacattaatgctctcgagcaagagcataccatcttcatcagtacaactatgtgatttatatcttttcagtcaaccataacttcagtcatactccctctggttacattngcttgtcaccattaaccggcgctgttacaactctgaccacaactntgttaataatatatatatatatcatgttttgatg

SEQ ID NO: 2017 - DNA, 434 bp, Oryza sativa
  unsure (1)..(434): unsure at all n locations
agcttcaccggtgggtggaactcgnttgttttctatgatctcggnggncgcttaaaatcgagggaaacctatgtggttgcttggaggctaaatacttcttcctagttgtttgtcaagtgaggcaaggagttaattgagacctagctctctggagctgctcaatgagagtagatccctgtaatctngaattcggaaaaaaaaatcattgtctccccatgtttttgggccatcttgtatgtgtgttgatttaaatgagctaaccgtggcctgcttctattcggtaactatcacaccatgaagnttccctttcctagccttaatgcatttaataaatcaccaaacgaaattgtntaagttaacctagaatgaatccctaattaaaaactctatctaataagtggaaatggcttggtgtgattnttctttgagttccc

SEQ ID NO: 2018 - DNA, 433 bp, Oryza sativa
tctgtaagaatctgagagaggaagaggcagatattcccatttctccaattgtacctgatagatgagtagttgcactatattgtccagttcttgaagcagaagaactcgcatccaaaatcttcggttcagagggatcgacgacactgttggtcttcaaaacatttggagatagtctttcactatatgcaaagcatgaatactgggatctacatgaggcaaatcttctacttgtaccactcacacaatcaaatggcaaggataaggaacaaggaggtgaaatggttgcagccctgcaaacatttttgagtcattttgccatagctctcgaagtctgaatacactaaacaccagtaaatgctaaaattaatttcaagaagtaacagaagaacaactgacctctgtatagacatctgaaccatggaactgaagtctg

SEQ ID NO: 2019 - DNA, 447 bp, Oryza sativa
  unsure (1)..(447): unsure at all n locations
ggaactatatacaaacactttctaagaaaaagatatgcagtacaaatcagaaatactgtagcattcctgattaaaaaaaaaggtagactatcatttgtaagggaataatggtgtatgaaaaagcaaagctagcgagggaactggaggcaggaaatggaagatacatgccaagcatacataagtgagtgtagaaaggaacgggttgtggcttaactcaccaaaagtgaccatgagaagcaaactacaaatggaccctgngcaaggcgacaacacatggttccaatatcaccagatctggaatcgttaaacagtggtggtgccgcacggccgacagagcatcaagctaaccagcacccacagtattgacaaacttgagcaccttctatggcagcaaccaatcctttttatacagataagaacaaatcanatatcatatttgatattcat

SEQ ID NO: 2020 - DNA, 346 bp, Oryza sativa
  unsure (1)..(346): unsure at all n locations
atctcaattcactntntgtttttttggttacccacatgctaaaccttctctcctgtaataattaattaatggcagctttccggctaagggtaacaccaatgtatataacaaaagtaatccatatagatgggacccacatatatagactataactaatgttatcttcacaatgtatatggatagcaactagtattaggaggagagagaaaatagagacaaataatatattttattctatatgggcagcccatatgcttatgggtggcttttgctattttcttgctatggactagttacacaatgtggttaagtggctgaatggaataatttattgcttatngactag

SEQ ID NO: 2021 - DNA, 434 bp, Oryza sativa
  unsure (1)..(434): unsure at all n locations
cagcttgcgttgcgtttggatggtcaatgttgctcctctagtggatgtgaaaggaattggagcacattcgcattcgtacatacgaaggtccgtaatagacttacccacaagaagctcaacaagctagtgtacgtgaactacaaccttcgccttcgaattcagcaagcaaatgcccaaattagggtggaggacgatgatcctcttcaaagattagcggacctctcattctatgaaactaacaatcatatcagtgcctggatggacaatgctcgctctaatgcttgccccgaactagatgaagattcagctgagagtgacgctcccctgcctagtcaacttgtgtctgacctagtcaacttggatgacctgcgaaggaccacgggagcttctagtattgctgagtgggctgatacgaatgtangtgacactcatat

SEQ ID NO: 2022 - DNA, 428 bp, Oryza sativa
  unsure (1)..(428): unsure at all n locations
agctttagttaaaataggaagttccccttcaactatctgaactgctgtggacaaagagctcgcttggagtgcaatctgggctgcacatggtatatttgaatgatgttccaacacgcgatttattccacccattactacaactccaacagaagcgtgcaaacaacctgataaagcaacaagttcacgatccttaacagcaagtttacttccaggaaatgcatcccccttgataaactcaatgtgttttattgccaaatttggatctgttgtccagcaatcgtctgcatagaattccttgcttttgacaagagcttgctcctggaaatcccatacttttgctgcgatatgaagagatcttaagatcaatctggatgcacttgcccagccattgatatgagttgcccccacatangcccaatggtggagct

SEQ ID NO: 2023 - DNA, 301 bp, Oryza sativa
acttttttaaacacaagaggcgcggacgaacgagaacaggcgccgccgccgaaatggcaagatcacccttgaagacaagatgggaccggcacaattaaacgcaccggccacaacttaaagggccccggccagcgacccacactgagagatcaaacacagcccgtcccaacgcaatgccaagcggagcaacaaacatgcaggaaacctacatcgccagacggggccgctgtcaacagtgtaacctgcaagggggccttaccaacaatacacccgacaccaccggggacagccggggaactca

SEQ ID NO: 2024 - DNA, 362 bp, Oryza sativa
  unsure (1)..(362): unsure at all n locations
ccgacgagagggggcctagaccaacaacaggttatgtcccacaccttactgtgccaggaagcccaggggtcctccccgacaccaccccggcgaatccacatgtctctcggcatcaaggctcccctgataagctagttactcagctaggggtgtcccattccacccatgtggtcgtacttgtcttatgcttggatgaaattccaaggaaacggtccttaggtgcaagagcgggaaaccgtatacccggtacgttccccggtccgcggttttggaaattcatntagttcgcaagcaccgacccaggtgtcgggttttccaagtctttggaaaaccaagtttacccagaagttttcagaatttag

SEQ ID NO: 2025 - DNA, 205 bp, Oryza sativa
  unsure (1)..(205): unsure at all n locations
gagggaggcacgatggatggngacaaaggatgtcatcggcgagggaggaagcctgggctgaccaacagggaggcaacagtggagagacggngatggggacagagatgacggaaatcatggagtggcacaattctaatntagaagattgcagtggcatctacccagtttcactaatgaggacatatccagtgaaaacgagttaagt

SEQ ID NO: 2026 - DNA, 366 bp, Oryza sativa
agcttggtaagacctatcttgtaagaatacaaaacaccttgtgcatcctcgcctcacatatgtccaccctgctaaggtacccaccacctctattgctgccataaaaaacaaaaataaaactataaaaatataaaaataatataaaaataaaaacaaaataaaagtgaaataaaataaaagtacatttagacactctatgcgtatagagatacttgaataaaatttggctcatcggtaatttataccggtagaagcccaatttgctttccatctttttttaaataaagacaaggtacaaaacaagtgtgggtgagtctttccagaactcctgatgcgcaacagcatcaactcaacatgacaatgtga

SEQ ID NO: 2027 - DNA, 467 bp, Oryza sativa
  unsure (1)..(467): unsure at all n locations
acacttgaaactcaagctgttatgtgctcgtttggtgaatttgcttcttttttttatattccgtcgnttccggagagtccgttttcgcaagagaagagtttgaagagttccaaggccagcaaggcaagtcacacagatcccaaacaaccctttgagcatgttgatcctatttaaagctattgtttctattcaaatattgcatttgttttcgaatgtcattgggtggaattaacctattgtttgttatagcccttttgttcttgattaccttattccttgataccttgggttattataatttgactagttgagctttatttatattggttcaactagatattagatataattgcttagccctgcttagaaacattagctcacttctgggataaattatgactcactatcgcttaatgatggcttaatgatagttcacgatggtcaatcgtgattggttaataattaat

SEQ ID NO: 2028 - DNA, 441 bp, Oryza sativa
  unsure (1)..(441): unsure at all n locations
agctntgcagtaacaaagcgtattgcatttcttgtatagtattactacataaactaggaattgaatcaaaaatatatgggttaaagcctcacatgctaaccgtatacttgttactacacaaaagtagaagcgtcactacataataggtgcatgttaccacttccaagtagatatgttactgcatgataaatgcagtggtactatgtcatttttacgagatgaagttcgaataggtgggccataggtaaagtttgtaggtggctctgagcaaggtctgaattatgtaggagtgttttgaataatcttatacaattggtaaaaccatgttactgcatgtatatacccctgttactgtatattacacattctgttactgcatgtggagggcttaagttcacatgtcaatctttgaaagcaatatctcacaaatatgtattattt

SEQ ID NO: 2029 - DNA, 447 bp, Oryza sativa
  unsure (1)..(447): unsure at all n locations
agcttgtagagatctatttagcacggactcctttctcttctggaactagagcccaaccaaacagttttacctctacaaaataaaattggaactggatgaaacactctcacaaaacaaactagaagggtggagttaggtttatactactccacaactccacgactgaagctaatattaggagttgaagcattctatctttaacaaaaagagaataaaaaaggcatataagctnttattgccggaatgcctatctgtatataaaaagagagcttttgctcaagattactatttgtggattccagccgttcagtatgcagtgatctgttcacagcagctattcgccaccaccagatctgcacccacgtttctgatctcgcacagaagaatttgcaacccagttgtgtgtatagcatagtaattgttaccagatccaacatacaagctcac

SEQ ID NO: 2030 - DNA, 351 bp, Oryza sativa
cacggggagcctcaattgatagcttaaacctgtgaggtgtaagccccgtcggtccactcggacgaggagtcatcttcacaactatgactctcttgggccattgtattaacgtcttgcacgcattgctcaaagtcatgagttcatcatttgggggcacgggcagcggatatcctgaccaggtgacccttactgtatcgatggacaccttggcatacctatctagcaagtctgcaccgtggaccttgtctataaccgagggcttgaaagccatgctctcagcgacttcatgagcgaaagttgggtggactctcgctagtcggacacactgcgctcgccgctgcattatgcgaa

SEQ ID NO: 2031 - DNA, 415 bp, Oryza sativa
ctaggacgtacctccccaagagccaatcttttgatagcttcgctcggatcctcctcttcacctaacacatgagaatcaacttgctctacttgagagccattagtttcttcaaatgtcacatcacgcgcgatctcaacaataccggaggtcttgttgaaaacgcggtaagcgcattcatttgacccatacccaagcaagaatccctcattcactctaggagcgaacttagaggatctagccttcttattaagaatgtacacttactaccgaacacacgaaagtaagagacatttggtttggtaccggtaagaagctcataaggagtcttcttaagaaggcggtgaagataatgcagctgatgcatggatgcggtgtgacagcttcgcccaaaaccgccgatgcttgactcatccac

SEQ ID NO: 2032 - DNA, 396 bp, Oryza sativa
agctttccaagatctccatgtagctcattatctttcatcccacgggcctccaacttaaatacaacatctttcaatggcttgtgtgtgttcataaatgcaataactgtctgagctttcagagcatggatacatctcctcaaagtgtcaactttgtgttgagccttggatatacaataataatgttccaaagatggtggtaagctgttaactgcagcttgattcactgaatttgatggagagtttggggtggcatctgtctgggacagcacaggtcttggaacagtaattgaatcaagtggaacaacactcatagctctaacaaggactggatcgtgaccccaactcctggctgctcgtataactgaaaacggtattggtgcagaaaccaagatagtc

SEQ ID NO: 2033 - DNA, 412 bp, Oryza sativa
  unsure (1)..(412): unsure at all n locations
gtgatatcactcattctatattctctcttcatgtattcagggtggggatcactgtgacaagagatgtttgacattagttntggacaaccatgcacatgaaggaagattttgcagtaacggtagcattacaaattcacagagcaagcaaccagatgaaatttacacagtgcatacatggaaactcaagtggttctctgaagaaacagttgtgaagttcatttctttacttaaagctctttactctgtatcatcatcttcatctttacctgtaaagtgtacatcttgatatgttggttcttgtagttacatagtgatattcgttcattctttggggttggatttagttcttaatctgtataggttggtactagttgcccgtgtagatatattgcttcttatgccctttgtagta

SEQ ID NO: 2034 - DNA, 375 bp, Oryza sativa
tttttataaaggtccaatgaatgttatttttggaaaataagcataccttttaatagtgtgcaacagttatgttgcacgttttcttgtgcattcacaccttctatttttcaatttactgcagggagaactcagagaaaagggattcgatataaagaaacaaacaaatggaaaatcttatactggtgttttgaggcagtatgttgttagagttacagaaatattcatggagattcaccttttctgggctggaaaaggaacttgttgcattcctagacagggatcctacgggccattaatctcagcattaagtgtatcttcttatggtactgttcattacctaacttgatcaagagccattggttctatgtgatcatc

SEQ ID NO: 2035 - DNA, 401 bp, Oryza sativa
  unsure (1)..(401): unsure at all n locations
tcgcatcccctataatatntaaagcaatcatcaattcattctcttccaataaaaccccgctcttctaagcaaccagttcatcttgtgggccgattgatgagttccacaaattccttcatgtacctctcccatagccaccttagattgatcttcatctaagcacttcaacaagacaccatctatatttcggagatacaaatctccatcaagcaatgtatatttaaatgcttgccgccgaatttttcgatcaaccttaagcgtgggatcctttagatattgaatcaaaggaattctccaatcatcttctgtatcctggacacaaatgtccgaattcccaaataattcggcccccaaatcgattgaagcgtgccccccagcgctcttgccaacaccagtcagac

SEQ ID NO: 2036 - DNA, 393 bp, Oryza sativa
agcttatggagaattcactgttctagaggagttatggtcctctctctctgcagaacggtaaaggtgatgaatggtctttcatccggaactgtgataaatacacagctaagaggttttataagctcacatactcaaatgtgcatgtgccaaggccttttgtctggatctagaaaacaaaatgtgtaatgaagataaaagtttttgcttggcttttattcagagacagacttaacataagagatatgcttgatagatgacattgtgcaaaggaaaacaaagacctcacttgtgaattatgcctgaataatatcagagagacaagagagcatctctttttcttctgccctttcagtcaacattgctggcagcatttgggaattgcatggaatcctg

SEQ ID NO: 2037 - DNA, 480 bp, Oryza sativa
  unsure (1)..(480): unsure at all n locations
tcgacacgtcaccacggcagagggccatggtgtcagcggtatctaagactgatccaacaccaatccctcgacgcgtgggacatcgactggcgtaaggcattggctgcccgagtagccaaactcggctggcgtgaggcattgatctgttcattggcttgtagtctaatcggagttgaggagttcctgtgattgcactagaattcaattcctagttggcaatcgagctgctcattctggtgacgtaagccaaaagcaaatagatcaactaaacagccaaaaagccgcagtacaaattctaaggtaattagtaagattaatttcctaattaatctactaatttcgtagatatatccggcatatatctacaaaggtacgcaatattttatatataatttaccgtacctattttcagattatacggcattgtcagatctataatntattatgtttacctagagcatgttccttatacagtatata

SEQ ID NO: 2038 - DNA, 364 bp, Oryza sativa
  unsure (1)..(364): unsure at all n locations
agcttggtcctacaaacaaaggaaccaattgtttattgtatagaacttaaaagatgacattactcaaaatcaatccatcaagacgagtagtccttgagtttacctagaataaggccaatgatgagaatatagtgagaacatgtgaaaagattgcagaaaagatcgtctgttcctcgatgctcggccattaactgtaaggccattcacactgcgccgcggaatcagcaggggctttctacctccacgtaagcaaaccacgctcanagctactcggctcacaatgcatggcagcatgggtatctaaagtgggcccaccaagtaatgctttttccctacttttctggcttcngagctcctctctctc

SEQ ID NO: 2039 - DNA, 408 bp, Oryza sativa
  unsure (1)..(408): unsure at all n locations
gcaagtagccaagccggaacacagtttataacgcgtgctagccttctaggcctnctttatcgatgccatgctattgagttgtattaattttgtcggtcatnttcacaaaaaatgtgacaatagcgccttattttggtatctaaaaacaaagtagtttgtaacatgttttgacgtattggcccacccatatatgagcttgacctatcacggtgagcttattatttggtaagttatagtnntcgtaaaaatatcgattatttttacatgatatatatatgggtaaagatgcatgaataaaatcatttttaataaaccatacacaacttcacaaaaaaagtgtcttcatttgttatagtttcacaggatttttagaaatagagaaaaatgataaccaaaatacaccacccc

SEQ ID NO: 2040 - DNA, 412 bp, Oryza sativa
  unsure (1)..(412): unsure at all n locations
ggatcttaagtactgagctgcactgttatgactgaaactgttgcctttttagtaaaatccgctatagaaggatagagttgcaagacggtttgacagccgatgagtattataaccttatggccgatgaaagggaggacttggttcaatcgcgtttacgagcccttgctaaggttaccaaagataatgaacgagttgctaggcattataacaagaaagtagtgcctaaagaattttcggaacgtgaacttgtatggaagtttgatttgccgattggaactcgggataacaagttcngcaagtggtcaccaaattgtgaaggaccgtttcaaatctattaagttgtgtctaaaggggcatatatgttgccagggcttgatgatgaagttatggatgaagcgctcatgcaaatact

SEQ ID NO: 2041 - DNA, 361 bp, Oryza sativa
  unsure (1)..(361): unsure at all n locations
aagtctttaatgatattcactacgcatttgggctgacacctgcagttgataccaaaggtagtgttgtctttcttttgtctatataatactctgctttgccgatacctggataccacccgtgcagccgtcttatttacgctgtcccttgtgccaaaaaccttcaaagcctgcagataatcatttgtcattacataaatagacaatactacatggacgcagcttattaaaaattcaacatatacttctggttaaaaaaaacagcatacactcatatattcatatatgtatggaagaatgaagtacataatactgagtagccaaatctgcctatgtgtatcccctaaataaaanaataatcatg

SEQ ID NO: 2042 - DNA, 451 bp, Oryza sativa
  unsure (1)..(451): unsure at all n locations
agctntaagatcaaaagccactactcatattgttgcttaaacacactattccaatatagtattatacgaattcctgagctctcgaataagtacgctcacagtcgttttcagatattaagttgggaaaaagttgcgacgctttaacgtcaagtcgcattcatgcaaattctgcctaataatttctagtcattgatcattgaccggtcaacaacaatctgctgaactggaacatgcaaatgtgcagcctgttctcatgaacatggcctgaanaaacatctcaactaaccaatgggcaccgttgatctaacaaacattgattggagacacaagataggaagcacatatgcatcgccaatgcaatctttgatagtttgtactgcagatcagaggattgctcgacttttactcctgcaatatgtgctgccacatactctctgtcccatcatagatt

SEQ ID NO: 2043 - DNA, 392 bp, Oryza sativa
agattgaaaatgaatagatgatgagttggcctttccgggaggaagacggccactgtcatgctgcttgttaatggggatcgagaccaccatctatgtttgtcattcacactataattctaggcttcttgccaattgctcaaatctctgagcaacagtgtgctgattttcacttgtatatatgtcgagcaaggacttcacagcagaagacaacatatctttttgtgccacgtttgggctgaaaccatcctcgtcatttatggcctcatttgccaaaggctggtcctcaacattattgaacaatgagaacaatgacttcagccagtcttctagaaaggatgctttctgctcaaaataacacacaaattagctagaaaagcaattaaacatagaga

SEQ ID NO: 2044 - DNA, 162 bp, Oryza sativa
gcttgcggaaggcgacggagttgacatctatgtcttatacttacctcgtggacccggagactatgtcgcagtgtacagcgatcccgcaaagatcaacagcgagctgaactggactgctcaacataccgatctcctggagagcctcacggctgcctggacatg

SEQ ID NO: 2045 - DNA, 390 bp, Oryza sativa
ccaacctctggtctatgagaaaactatcagaatacggagtatagatatgaacgcggcctgaggattctgatagtaatacacacatagaacagttagtatcatcttctaaatgcttggtgtggtgcccgcaagtattgccgataggagatacatatgtcacacatttactacatatatcactatgtaaccactatatataggagggcaagtagcaaaatagctcatcaagcctattgtgacaggaaatgtaaatacaaatagcttctcgtaactttcttaataactctgcatcagataaacagaccaagtataggttaagctttacctctcggttataatgatcatgtgattctagcttcaaccttctgacacattggtcatcctgagaca

SEQ ID NO: 2046 - DNA, 442 bp, Oryza sativa
  unsure (1)..(442): unsure at all n locations
agcttaccctcaatccattgacggaatttctttatatactattgtcaaggctntcatcctattgaggtttccgtccttcattttgagttctctgccctgtctttctagttcttcgcgctgtctttccaattctctgctctgcctttcgagttcttcaccatgtctttggacagacaatgtgtggatntgtctctcttcttcaagtgcttctcctttacttcaagctcagttctcgttttctcatgctcttctttntctttgagctgcaataaatagaagaccttatcatgagttcctactagtttgaatctgcaattcttcttcttgacaaagtaacatgtaaatatcttggaaaattatcacgcgtccacagacgacgggtaccattgcattagtttacccacactaacttgtcaaaacactatttgagctcaaacccata

SEQ ID NO: 2047 - DNA, 318 bp, Oryza sativa
cacatgatgtgtagtagtttgggaacttaacaatggatcaatatgattttctctcgaaactttcctttaaaaacttctttactaaaaacatactgtttagtagttcaggaaacgtgcttaccgaaatcaaggagtacacactagtacagaaccggccatcccaatcgggctatccgtcacggagacaagaggcccgtcataaagaaagtcatctttgtcaggccacaaaaagcctcgtcaaagatggtccgagagaggtagaatcttagtccccttgggtagggcccatcacggatgaccatcaaccgtgacgggatg

SEQ ID NO: 2048 - DNA, 415 bp, Oryza sativa
  unsure (1)..(415): unsure at all n locations
tagctaacatcctgtggagaagtgaagtggtctacacttaatctaggatttgccaagaatgggcaccagtataaggagacactaatgggcaaggttcatcaagtaaaggtgaaagcaatcagaagccccacccaacactttggcccagctgccatccaaaaaggccaaatcatgcacatctgaacaaacagaaggaaacaggacagtactgaagagtggagccactcaaagctgcacaatgaatctcctaagcatgtggatctaaccagcccaataatattactgcaatccagtatctttntttcttatcagtaacttctacttctatcacaggaatgaatgattcacgacatagaactctactcacagagaggacatctacaatgttactggagacattntcaagcacctttga

SEQ ID NO: 2049 - DNA, 385 bp, Oryza sativa
  unsure (1)..(385): unsure at all n locations
agagatactccgaagcgaagatttttttactcccaggagatacagcgtctactttgaaagcatggtggcaggctcactctaaatggccatacccaactgtatgtcagctcacagataccattatcaggccttcctgcatttccttttctaccactgatgctcatgtntcttaacctttataggaggaggacaaggctcgcttggtgcaggaaacagggttgcaactaanacagatcaataattggtttatcaaccaacgtaaacggaactggcacagcaatcctgcttcatcctcatcagacaaaagcaagagaaaaaggtatcgtgtcgtggacttctaacagaaattccttttacatatttttggttccattttcctgtctct

SEQ ID NO: 2050 - DNA, 451 bp, Oryza sativa
  unsure (1)..(451): unsure at all n locations
agcttncatcgacgtcaagccgcgctcgatattactcttttccgttccatactctcctcaccatgccgaagatttctccttttgatttcatcctctctcatgcagngaatcaacgggaacgccgctgtgtcatcgccggccttggggcgtgctctgcgcgacgccgtcgtgacctcgtcgccgatgcctctctcgggttagcaagggcgtggaaccaacttataaggtcttgtccctccaacgatgcctctctcgcgttaacccttntacatgaagcgaggacaaaagtgtagatgggttgatatatgtaagtggacccatctgatgggctggctactcggttctggagggagagtngttacagctatggtctgcttcaactaactacatggtgtaacatgggttggtaaagctatatatggtctgctttgattaactacattgcgtaaca

SEQ ID NO: 2051 - DNA, 444 bp, Oryza sativa
gaaacatctcttcatgctctctcttctatgggagataccacaccacctttgctgggccgtccctctttgacttacttccttcaccttcactctttgctcgtttgtatcttgatcccccacagatagggcagacatccaagtcagcgtattccttgtaatacaaaatgcagtcgttcggacatgcatgaattcttctgacctccaggcccaacggacataatacttgcttcgcttcatatgtcgtctgaggtaaattgttcccctctggcaacagatactttaacagctcaaggagttctgtaaaactcttgtccgaccagccattaatagccttaagcttcatcagttccaacacgcatgacaacttgctgtgcttcgacttgcatccatcatacaacggcatcttgcacatcttcaccaacttactaaacttctcataatctc

SEQ ID NO: 2052 - DNA, 456 bp, Oryza sativa
agcttcacaaagcgaggatgagtccgttctgtatatgcgccaacatgacatcctcgcaaaggtgctcggaaccaaagaacatcctggccggactacgggaattggcagcgatgtgcgttggaagcatatactcccgcagtacagctcccaatacaggaaacagaaagtctccaacgaagagagggacgctcgtctgaaggccgaacttaaggttgaggtcattgaagaactagaagctagcatgaacgctatggtggaagaaagggttaacaacgtcctcgccgacatgaatataccccgaggcacaacacctgctgtgcatccaactcctcgtgcacaacacgacgcgagtccgtcacagcatatgagtaactgtgcattcacagatgtgccggcccctggtctcccggtcgcaccactagctgcagtggaccacatagaggtaactgatgttat

SEQ ID NO: 2053 - DNA, 118 bp, Oryza sativa
tataccctcagcgagcgcctgtgaatatgggaccgttagccctctactccactgccgttcattattcattgtcaggcctcaagcgcccttgcaacagtgtaaatattatcgatataat

SEQ ID NO: 2054 - DNA, 403 bp, Oryza sativa
  unsure (1)..(403): unsure at all n locations
ggaatgaacttcagagcacactntgagagggaatgtttatgtcttgaaatggggtggaattccctctctcggccggctggcttttatagggtacccacaacggtcagaaatgacatgtgcgacccactagccgttaccctgccaaaagtggaagggaaccgttgcctggccggttcggccgaacccacggtgggcccaaccggccccactttcggccgttgggttccaacggtcaatgtggtcatggcacaacaaattttcgttgaaaattttattttggtttgctctgaaaaattcgtttgaagaatttcctcaaaattcaaaaatcctaaatgcaactttgaaattcaaacatgtgatgatgcaaaaattcaaattgttgaaagcanatatgcggatacat

SEQ ID NO: 2055 - DNA, 348 bp, Oryza sativa
  unsure (1)..(348): unsure at all n locations
gagcttcaatggaggtgagaccttttatttctgtattngcgctggcagacacctgatcgagatggatatattgtcagactatgtgttgaatatagtttaaccaacactatttccttgcggatggctcaaaacttgattttgtacattcaaatttgcagaataaaaacgtttgccatttgtttcacgaatcttacaaggattcattatactaacctctggccttgagctatatatatgcatcttgtattaattcacaacctcgcacttaatttttagagatagagagagattgagacattttatttcgccatacctatgtcgtcagtcatgaccatactgcggagatat

SEQ ID NO: 2056 - DNA, 379 bp, Oryza sativa
  unsure (1)..(379): unsure at all n locations
ctcaaaatatatactcctttttgtatatatacgacgaagntcttttatgttatntggtccttgatgagagttactcacagcattccacanttcatgagcagtttgaagatgtgcaacacgatcataatccgaacgagaaataccgctcaaaagaatgttgcgagctctgcaattntgttcaaaagcagttttttcagcagctgtattaatagcttcaggaataacataaggatgagaaactcttctccaaatatcataatcttcagccataatataagattgcatcctactacaccaatgangaaaatccgttccatcgaaaacatgaggcttagttgaaaacctaacacgagtagccatggcgnaaactctatatcga

SEQ ID NO: 2057 - DNA, 309 bp, Oryza sativa
agctataacctctcagcatatatatttttattttgttgaacattctgtcctataaacattatatttttatagtataaactttctaccataacatcctaaagaagttataaataatcctaacatttctactcccaatcatgaaaggtcatttgaatagttgaaagtttctactacaaaaatcaataactttcaaccaaactaaaaaaaatctactcaaaatcatgaaactctcatatgaatatttgaaagttttcacttaaaaaaatcacaaaccttccacctacaatagaagggtgctaagcttatatg

SEQ ID NO: 2058 - DNA, 321 bp, Oryza sativa
atatcctactccatccgctttatactgcaagacattctattactgcccatattcatatagatgttaatagatctagacacatatgtatgcctatattcctaacatctatatgaatgcgtgcactgctatcaagtttgcatcgcgaacggatgaagacttatgtgtcactgctatacccttttaaatgcatatacatatttgatttattttgaagaaaattgttttaaaatttgggtacagctctgatctgccattgaagatataataaacccggccttcgttttttcttgaaatgaagatagtcaactgttggccaacatg

SEQ ID NO: 2059 - DNA, 469 bp, Oryza sativa
  unsure (1)..(469): unsure at all n locations
gctggaggtctcccgacgtggctgatcctttcgttctgtgtgattcgggntagtaatgtcgcgtgggtaaagtgtaccccctctgcagaggttaacaaactgttcgaacagccgtgcccacggtcatgggcggatgtgaggtgattcctagcgtagttttgtttgactactgccttgtgaaactgctgttgtggaaaggggttcgatgtttgaaaaatatgcagctgatgggatcagctaggcccgggtggccgnttgaaagttgttggcccgggtggccgtttgaaagttgttggccgagtgccaaccttgaatcaattcaaaaagactgatacattgcacatactccgaccggacgagacgcactgtctcatccgtatcgtttgagaagcactcacttagttgtttcagaanagagtcaaataaaataattgcaaaacacagcctttcttgaacctgcttaacacta

SEQ ID NO: 2060 - DNA, 369 bp, Oryza sativa
  unsure (1)..(369): unsure at all n locations
ctaagctggcatccactgctccagcacagagctcagctgtgttcttcttactctaagctcaactgcaactttttgtttcaataacccaatcaccgagcttgcgcccagtacattgctctgctttgctcanaatgggaaaggggaagaaagaagaggaatgtaaggatgacagggctgggttctgtgatgctttgtgcctcanaagtcaaaacatgaggtttagtgaagcaaacatcataatctgnggggtttgaatcttaaaaatatggcatgatattgcacctgttacaatgaaatctagaaaaactccctatggtaacatataaatctttctacaaatganactccaaccaagtagcatggattaac

SEQ ID NO: 2061 - DNA, 390 bp, Oryza sativa
  unsure (1)..(390): unsure at all n locations
agctntgaagtgcgatgcgatgaaagcagcttgttttataatcacgaagtttcacccaagatttacatatctcggattctcggattataagcagagcaagcctggatgtggacgtaaaacctgttggatctgctgagctgttcaatgcatcagcacattatgacactcttgatgcatctggttcttttcgacgatattcaagttcaggtcctcttatggtaggtagaaccgggcaccatatggagaggctgttatcaactggtaactcaagcgagcactgcggtacacaaagatttaggatagatncacaggagtcagcttgcacgccttctttgacgatgcgcggctgtcgtcattggcttctttctccacagcacatttcatattcat

SEQ ID NO: 2062 - DNA, 362 bp, Oryza sativa
acattactcgggctgaataccttgacagagacacccggcgtattccgtcgaaaaatctgttttgatgctcacagggtgtattcactacgtagtactccagaactcaatttcagcgacgcttacgtatgatgtcaaactatccaacatgtctggcatcggtccaataaaatctgaccattttaattcagcacaataatgctaaatatgttcatattaaatcgtgcccccgttactcacggcgataaatttatgaaacgtttttaccccccatcgtccactaacggtctttttctaagaaccatgtgtcggtgacagaacaaaagtacacatctgagaatgctaatccatttaattagttggta

SEQ ID NO: 2063 - DNA, 370 bp, Oryza sativa
  unsure (1)..(370): unsure at all n locations
ttgcctgaaactcataacaatgtcagatatacacaacttcactttctttcccaaaagaaagctccacagcatgaactacagctggaaaaaactcccatacctttagctccttaatacgcttaaaatcttcatcagataagattttaccagcttcatcgcacgaagcttcagccttcttggctcctgccaacttcttcagagctcgaaggcttgcatctgcagcattaagttgccctatataatcactcaactttctcttattggccttgcgactgctgttttttgacttatcatcctggtcactgtcatcatcctgatcagagccttcatcagaatcatccaatntctcactgagttcctcatcatcatc

SEQ ID NO: 2064 - DNA, 418 bp, Oryza sativa
  unsure (1)..(418): unsure at all n locations
agcttgtatcggcagccttaccctaagtggtttgttagagttcctcttcccaatcggttcanagttccggacttctccaaattttcgggacaagatggtgtgtcgacttatgagcacattagccgattcctggctcagtgtggtgaagcatcagcgtagacgctctgaaagttaggttattctagttatctctgtctggatcggcttttacttggttttcctccttgccatatggttcgatcaatagttgggctgatttggagaagcaattccacagctatttctatagtggggttcatgagatgaagttatctgacttgacggcgattaagcagcggcatgatgaacctgtgcatgagtatattcagagattcagggagatgaggaacaaatgcttcagcttgagtttaactgatgc

SEQ ID NO: 2065 - DNA, 338 bp, Oryza sativa
  unsure (1)..(338): unsure at all n locations
gctgcggacgacccctcccgaaccccgcgcaaggaaaaggccaccgtcgataagccgagcaccaccactacccccagcgaaagccgttcgtcagataagtggtgctcgatgcacaacacctatcggtacagtctcgctgattgccgcacggtcaagaacttggccgatcggtacagaaagaccgatggggaaaggcggcagggtcgcctggagggcaaggcccccgcgacccccgtcggcaaccagcgagaggaggccaaggaaaaggcccccgtcgatgacgatgacgacagcgaggatatggagttctaggtacctcangggacagtcgccacact

SEQ ID NO: 2066 - DNA, 472 bp, Oryza sativa
agctttgaacctgaaatttctgagctttctttatacagtaaagaggtgatctttagacagatcactctagaggctgataacctcctctggttagctgagatcttagctgacagaaatgcagctgatgagctgacatcaatttgggcaagccagggagagctggccaagctgcattgcaggataccagtgatgcaccggcatctcatcagctgtgtcactgcaaggctcttcgtcgcggtagggaaaggcgaggcgttaccgtctaaggagacgaggcagctcctccttgatgtgtggctccagcctctgatggatgattacaactggttgcagcatggctgcaggtggtttgatcggaaggtcatcgaggaagggatagggcagaccatcctgacgctgccattggaggatcagcagagcattctgctcacctggcttggaagatttctcaggttgagatagctgccaaatc

SEQ ID NO: 2067 - DNA, 440 bp, Oryza sativa
  unsure (1)..(440): unsure at all n locations
ctctcgccttctctgaccgngcattgtctatcgcacgaagtacctgactgaccaagtcaatccgggcctgcaaatggaataaaagaaacatatttgagtcacttgtcacggcgcatatagtaggaacagttagccgcacaccacggcgaaaccaacgtacgggttagttagccagatacgactataaaacttggccaatatgaaatgacatttatgtagcagctctagcgctggtccagtccaatacgttaggctcaccaagctgcactacatagaacactacaaaattattgtttctctctcaaatcaattaagaagtatcacattttctctatcgaattgtagcaatctatcaaagtaactagtatatgcacgctagctaaataaatagtacttcgtactaggctactagctagtgaagaacattcattcgtcattca

SEQ ID NO: 2068 - DNA, 463 bp, Oryza sativa
  unsure (1)..(463): unsure at all n locations
attgctggggatgctatactctcttcttatttcacatangatccaaanatctaaaatattatatttgggaaaaagctaaaacatggataatggattcctttactgtggaattcctttgatccactcatttcctatccacccaatttactctccctccaagtagtatttatgactaatggtgctagaaggaacataacagtaaaaaaaaaaaagggtgctatagtgttgcttgaatagagaatcaagtgaggagtatggctcgaaattgaagtaacaggtataattaacccgataagtcaacaaacaagactatggaggctctggatctaaagctatgaactagtagatgacaganaactagagacaacatatatactgttagntcaactaaacaatgcacaatcaatctattatatatgtgtttagtttgggaacgacgtgggatgggttagccttatctctg

SEQ ID NO: 2069 - DNA, 474 bp, Oryza sativa
  unsure (1)..(474): unsure at all n locations
cagcttgatgatcgtggcacgaggattgttttcatctgctacgagcaaggatcaaaagcttaccggatgtatgatccggtggcgcgacgtgtgtgtgtgtgtgtgtgtcgcgtgatgtcgtgttcgacgaaacgacattctgggactggtgtggccatgcagatgaggaagaagctacctcagatgcatttgtggagttttcagttgagaattacacagtgcccggttatgggggtgtttcgcctaactaagtgacggagcaagcaactggcagtacctcaccaagcacgccggtagcagtatcggcaggagaagaggcgtttggacctgcgtcgagcctaccaccggngatggaatgttgttctcctccaagtgatgctagtgaggggactgatgaagcaccaagacgctacagaacagtggcatacacacttgcaacgacnactcctatccttgatttcactatgatgatca

SEQ ID NO: 2070 - DNA, 490 bp, Oryza sativa
  unsure (1)..(490): unsure at all n locations
taggtncctaacctctttattatcttaaacaatacttgtttttatttcaaaaactcaagtctccagctgcaaatttgcactaaattagtattatctccttataacagtaataataaaaagatcaagtagtcattgggggcagtttggcagaaagctgcagtagaaaagagttaattcgccttggctgcgattttatatgtataggggtaaactggcgacaagtagagcaactaacattggagggaagacaaatgcagctaactgcctctactaaatacaactgaatttcccaatttcatcggcctctaaatgtcatgtccatttgtgtgtgatccaaacatttcagattgatccatgtgttacacgggcaattttcgttaactatgtccagagatcagtgtgaaacccatggcttagcatagttataacaaccaatcagagatttaggaacaacacatctaataataaatgtcaccacatgactacacat

SEQ ID NO: 2071 - DNA, 380 bp, Oryza sativa
tccacccggatccttaatcacctgcagctgcagctgttcttgctggtctaattttgatttttaatctgcactacaagcatatgtaaatgtatgaatatgtgttatgggctcatttgatgacattttactgctgctgttctttacctttgagattctttgtcttattattcttgaatgtgccctacttgcgagaaaggctcaagggagcattgcttcgtacatcgtgaagaagtccaaaagattctgaaagaaacgtcttttagtatgcttcttttgcgttaccaccattttgaaaatacttgttgggaaccttgctaattcagtatatactcatgcagtcccattcttgttgtgaaattacctggaaatgactcatttga

SEQ ID NO: 2072 - DNA, 435 bp, Oryza sativa
  unsure (1)..(435): unsure at all n locations
tgatcccatggatgagaagtaatgtcaaaatggtttggtttgaaaacttgatgaaacacaaagcgggactggacttatgttggcacgcacaggcctatttctagtcattngatctgattatagatgctngataggtggcatagacattttgaagctggctttattctgcactgcctgtgctgntatgtgtatacagggaggatacggtggtctagcctattttgcactggtgtatgctcagtagagtattaaaggtactggaccattgttaagtgtacttgggcgtcgtcgtcatataatggatggatggatcggctgatcgatcagctgggttgggcgtacgtctgcgcactggcttctccagttcaagtacagatgatcgatctcattcttctctgctctgcatgtatgatggtagaatcctgagcaagatgc

SEQ ID NO: 2073 - DNA, 347 bp, Oryza sativa
  unsure (1)..(347): unsure at all n locations
ctccacccgcgatctctnagtcacctgcngcatgcaagctttgaatcagccggacgacctccttgttggccctgctgagatcatgaaatgagaatttttggatgccacatcatatgtttgaccggatgtcaaacaggctgttggatacgagtaagaaaaactaatctcataactcggctggaaaccgcgagacaaatctttcgaacctaattaagccgccattatcacatgtggattactgtggcacttatggctaatcatagactaattaggctaagaagattcgttttacgatctccatgcacactatgcactattttggtttttatctatatttaatgctccat

SEQ ID NO: 2074 - DNA, 435 bp, Oryza sativa
  unsure (1)..(435): unsure at all n locations
ctcatcgcatggagcttatatgatagaatcatgcggttcttctatgtcggctgtttattaattacttggcagggatcattgttctgaanagaactctacgaactcctcttgggatgttcanggactccattacttcagctgcataacgcaattttcttagtactacatgacccaacacatgataacagacatgctaacttaagctgtttatagaagtatagaaccaaagtgctcaattgggctgagttagagataactgaataatgatgtgaaccatgcatcatgtcacttatctctactgccccggaataaaaatatagatctatgttgacatggatggaagataatttattccaacatttaatggatgaagtgctcaacgaatttcagaaactacaacattgtgtaccatttacgtttgagtgtctcgggaca

SEQ ID NO: 2075 - DNA, 220 bp, Oryza sativa
ttggggcgtatcgggctggacagcgttgatctcccgttcagtcagcttttgctttcttttggactcgctggactcgtaagccaagggccggcgaagatgtgggtgagcttcttacggtggtctttgaaaccttgtcggggcatcatcatcattatccttctttttcgacgtgctttgctctccgtcagagatctttcctgtgttcttggcatattgctct

SEQ ID NO: 2076 - DNA, 247 bp, Oryza sativa
  unsure (1)..(247): unsure at all n locations
catgcaactcagagtctcttgtgttctttttatttctcctcgcgacnccgactagcgagtgaaaccttaattatatctatccgaagttatgccatactgatatagcactgtgctaactatcaatacccctgatctcttggcagctgtgtaacgaacgaaactcgatgctttcttcggcgcccgtggctctatagtctatcctctcggatggctggctatagtcttttgctggcggtgctgttttggg

SEQ ID NO: 2077 - DNA, 320 bp, Oryza sativa
  unsure (1)..(320): unsure at all n locations
tgaaatgacaaacctaactacatctggtttcaggcttcttcctctgaactggaccaatggaatgccaggaatcttagtggcgacagngatcaaagccaacttgaccctatctggaatgaggatctcaagctctctattccttaacagcacggccctcgcatgttgggaatcaactcacaagatccaaaatcattgaaaaattgtaatgtgtgtctgatgaattcgtccaaaactcactttgtttcatacacaagtggcaatgggtggcgatttttacctacaacacaacattgagactgccatgcaatgtggtgcccatt

SEQ ID NO: 2078 - DNA, 413 bp, Oryza sativa
  unsure (1)..(413): unsure at all n locations
ctcaagcttctcgggttttggtctncgnccgatgcatcgagccaaccttttgtatatactatctatanagcggatgcgccccgcagcaagcttatggatgtgcaatgcgtcaccggctgcatggacgccctaagtcggttcatatcgaggctangagagaaggcgctacccttatttaagctcctcaaacgctccgggccgtttacttggacggaggaagctgaacgtgccctcactcacttgaaggcgtatctcagctctcccccagttctggtcgccccggagccaaatgaacccttgctactttacttagcggcgaccccgcaagtggttagtgcggcgttggttgtggagcgcgatgaagacaatcctcattccgcgcacccccaccctgtgctggcttggccccggag

SEQ ID NO: 2079 - DNA, 146 bp, Oryza sativa
  unsure (1)..(146): unsure at all n locations
gtcacctgcngcatgcaagcttncggatgtgctgctgttgacgaacttttctttttaatcggatatgccgcacaggtcactgatactgtgaccttcctgtctagaaaagctgaaccatctgcctttgaagggactgatggtgtttc

SEQ ID NO: 2080 - DNA, 313 bp, Oryza sativa
  unsure (1)..(313): unsure at all n locations
agcttctncggttcttggcctctgcccgaggcatttatgccaaccccgagaagattcgagctatcgagcggatgcgcccccccagcaaacttagggatgtgcaatgcgtcaccggttgcatggccgccctaagtcgtntcatatcaaggctgggagagaaggcgctacctttgtttaagctcctcaagcgctcggggccgttcacttggacggaggaagctgacaatgccctcgcccagttgaaggcgtatctcagctctcctccggttctagtcgccccggagccaaatgaacccctgctactttacttaac

SEQ ID NO: 2081 - DNA, 477 bp, Oryza sativa
  unsure (1)..(477): unsure at all n locations
ctcagcttgcgaagaggtccgatcgttacaagatacccatttattgttcttcccaccgtacctgcacgtgtgctcatctttntactaacttattaagtcatgcatttacgcgaccataatatcccttagtgaagcatattaatattatttataggaaccaacttaaataaagtgttggagaacatactttgcaagaaacggagttataacaataacatgtatattctgatttgtaatgtggccggttcacgtgtccgattataaactatgtactttatctgtccacaaatataattgatcctatgtacttcatctatccactttaacattgaggtggaattaattggtgttccaaaatcacacctatcggttggaaattccatattcttgtagactgactgcgtagatgagaagtaccatttccaaatgacatccatgaatagagatgtgtacgtaaaattagtggtgtccattact

SEQ ID NO: 2082 - DNA, 459 bp, Oryza sativa
  unsure (1)..(459): unsure at all n locations
agcttgtcagattcaatgatgaaccccgtggttattttttgtggagtccggtgatgttcacaccaaaatctactgcttcgcaccaaacctctcatatgtgtcgtttccgtggaggcagccgaaggggtttaccagttcgtcaagcggagtacatatcaatagaggcccttggatgcaattgtcgcggccctgccacagtaccctatcgatttgctccttcattgctgcttaagttcattaataaagttgcttctttttttcagttgacctctctcttgttaaatatggtccaactcttatgtttatcctgcgcgatgtattgnggaattcaattcccctaaacgctgtggtttaacaaagtgtgttgtgtttaaaaaanaatcaagactgcgcatgtcgaactcaacgaattgccaacaacctaacaagtaagtngcanaaatatttttctagataaac

SEQ ID NO: 2083 - DNA, 340 bp, Oryza sativa
  unsure (1)..(340): unsure at all n locations
agatgtaattaacatgcctgggtgctggtgtgtgaatgtgtcccacatgcttggtcctctgcccccctctctggcgccaccctcatactgcatgtgtgaagcaacggccaattcttcagatttcagaccaaaacaaagacacaatnggcacccaatgcctattagatcaggccatacattcctgacaattttggcattattcaatagaaaatattgtgtctgtcattttagtgttggacatctatcatatctgtagattgagagagagagagagccttttgcaactcgtaacaaatgttcttgagagaagtagagaactgagttctgtaccaatcgaact

SEQ ID NO: 2084 - DNA, 382 bp, Oryza sativa
  unsure (1)..(382): unsure at all n locations
agcttattaacttatggattatacgcattattctgtgantttcaaattacgacttctccaaaacccttttacatcagcatcactttatactgaacttgctatgttntagtgtataagataataatattcaattcaattgttcataatttatccaaccggctcttttttattaagatgtacgttttatctcgattttcgttagcatactttttaaatggttaaacgatccgtttcatataataattttctatataaaagttgctttaaaaacatcaaatactccattccgagtttataataattaaaactcaattaatcatgtgctaatggttttctcattatacgtgcgctggtcgatttcatcctcactttaatctatctt

SEQ ID NO: 2085 - DNA, 451 bp, Oryza sativa
  unsure (1)..(451): unsure at all n locations
ctcaagctggggacatgatcgaagttngcagctggacgacatattcatttatatcaattctaaggcccactntgcgatccgcccatttgcttcacgattatgaagtatatcaccgagtggaaacgatgtgaccaccgtaactaagtgaccttggaagtagtgggatagtttcctgacggtaattaaaatgccatataatagcttttgaacctgaggatatcttgtcttggagtcagccaaaacctcgctaccgaagtagattggtcgttggactttntgaacatggccttcttcttcacgctcaacaaccaggattgtgcttacgacctangaagttgtcgatacatataacaacagcggctcttgctgatgcggtgaagctaagactggtggagtagtaaggagtgttttgaaagcttgaaaggcttcttgtgcttctggtcgctactgg

SEQ ID NO: 2086 - DNA, 480 bp, Oryza sativa
  unsure (1)..(480): unsure at all n locations
agcttatattcaaacctanatcatcattgtcattataggcatctgccaccaacttaacggngaaatgacggtgaaatgaaggaaaatgtgacagcaatggcatggaagggatcaagttaaaatttcaggggtataaaagggatcgtgtgagttttcaagggtatataggaaatttactcgcaattaaatggctgcatgcaaagatctatctccgtaggcgggcctcttaatgcggccgcatgcaaaaatgtatctttgcgtgcgggcgcgttaagaggccagcctgcgaagatggatctttgcatgcggttgggctgcctgcacgcaataattgtgatcttcacagacacctagggcagatgggccagccaattgcatgcgaagaattgttntggtcgcttggaaaaaccctttctgtagtagtgtctagcccggagaacgtgatcgcaccctgcttggtgaaaagtgttggactaccca

SEQ ID NO: 2087 - DNA, 426 bp, Oryza sativa
  unsure (1)..(426): unsure at all n locations
actcagcttctcgtatcganacacaatcttgaacggaatttgtatgtttttatctcgccgaacccaacaaagccgggtcggcaaagccggggagaatcggatgtaactttttctgtagatatctgttgatatattatttgcctgattccaagtccgtatgcgaaagttacgcctgttttaagaaaatgacactcgaatgacatctattttcaatagagatttagaaaattctacaagtcatatatttcgttcatttgagtttattntttccatgttggttcttatatgctcataagtgtgaaataaaataaaataaaaatattccacatctctctcccctctacactatactatagaggagaagagacttaatggcgccagtccacccagggggtgccgacatgctggtcccacatggaagtgact

SEQ ID NO: 2088 - DNA, 407 bp, Oryza sativa
  unsure (1)..(407): unsure at all n locations
agcttcagttaaaaccgaggtggccgtctgttcttcattgntaagcagtgtgacgtctatgccttggtgaagcaataaagcagaaattatcctcgaattaagcttctctgctgcgagatgcagagcagttcgtccgtatttatcttggatgttaacgagatgccgtagttgttctgaccccagaacaaaccgaacaaactctatgcgatcagagtatgcagctgcgtgaagacacgtccagcctgtttcgctgcagtatggagtatctggacaatgcttaagaagctctcgagcaacagcaacatggccgttacgtccggcggtacaaagaagactactgccttctctgttcattagataccctacagaaaatagtttagttgatcccattcactcttnttcactat

SEQ ID NO: 2089 - DNA, 407 bp, Oryza sativa
  unsure (1)..(407): unsure at all n locations
accagctcagcgggcgacaatgcccgacagggtgtttttatgacgctctttgcagatccgccctctggttatcgagtaatggaattntcgctcttgtgtactgctctggcttcacgttgtggttactagtcagcttttataacagaagagaagtacatatatatgaatagtaatactccctccgtttcgttatgtttgatgtctccgataaagccgcgaanattaaagaagctgtgaaattacgtatttgcccctgtgccttctcctcgtcaacgcagaaatccccaacaccgaaagaaattgcaacgccgacgacgtcgatcgggcctccgacgtgcacgcccgcaacgcctccgcggtgggcggcctccactccgacctccgcctccgcggtgggcgggctcctc

SEQ ID NO: 2090 - DNA, 368 bp, Oryza sativa
  unsure (1)..(368): unsure at all n locations
caagctggcagtgaatgcatatacatggttattttatcctncatattcacaaagatagtgactagtacgctgaataatggacactggctaattcactcaatcagtcgctggaacagatgcagcttatacttcacataatcatttcccaccataataaccactgatctaactggtactagaacaacgccactaatatgacaatacacaaggacaagacccttcttgtgtctgttgatctacagaaacaggaattcgttgaccacaatagaaacaacaatgtctaaggacgccagctattagatacacgacaaggtaccaacctgcaatgatatgacaggaggcgcgctgctaacatcaacaacgatcac

SEQ ID NO: 2091 - DNA, 400 bp, Oryza sativa
  unsure (1)..(400): unsure at all n locations
tcacacgcatatattgggtgacggtcatggaaatgtctattttgtctgcatgcgttctcacatcaaatgtgttctctgcatatatggacaaaaaaagcagaacataaagcaaatttgcagaaagaaacatgataggaaaaacgaactattgcctgcacactatggttcatatgataacaataaccaaagcgttggcaccactgaaaaggagcaaacagaacataacagctggtggtgcaacctagtccattcaatatangcagctcgtgatagatgttcactgaaatcaagtaaccaagaagaccatacaattctagcatatcaatgtaaagtgaattataaaaagctgagctctatttccaacaggtcaaactgcctaaggcctaataacatacagcag

SEQ ID NO: 2092 - DNA, 467 bp, Oryza sativa
  unsure (1)..(467): unsure at all n locations
agcttatgtcgacgacatcgtatatttattctctaggctctcgaccatgcgatcaacctgtaggtgcgcacagcaagcataatgctgaatccggagaagtgcgtttctagcgtccgcgcacgcaagttgttgggtctccttgtttccgaaagaggcattgaggcgaatcccgagaaaatcgatgccatccatcaaatgaagcctccgtcaagcgtacatgaagtacaaaagcttgcaggcccaattgcggcactcagtcgattcctctcagaggcagccgaaagaggtttgcccttcttcaagaccctccggngcgcacgacagtttaattggacaccagagtgccaagcagcatttcacgagctaaaagcatacttgcatagcctgccagctctgataagcctcaccccaggaagcgaactgctattatacttagcagcttcgctgtggcatcagtgctgcctcgt

SEQ ID NO: 2093 - DNA, 376 bp, Oryza sativa
  unsure (1)..(376): unsure at all n locations
tacatatgagttttgagctttgactaaatatgctcttttgaaaacaaagaatgcaacttttgagatatttcaagttntgagagcaagagatacatgaatgtggtttgcaccatttcaccctaaagtatctgtcacttgaaatcaaagaatcaaacactttgggttaaatcacaagatttagcacaaggatacataaaagctcactattcaaaaacctttatccaaaagtcaagaaatagcacatgagaagattctggattgtgatacatatgtatgagcttgacatacctccatgaaccaatatatatcaagatatatggttctagtggcaaaactcacttgatgctacaatatgaccaaatagcattttaaagac

SEQ ID NO: 2094 - DNA, 425 bp, Oryza sativa
  unsure (1)..(425): unsure at all n locations
agctttaatgtacagtcgcttcttgttctttgttcttttcaacgggctatacccgtgaacggtattaatttgtagagtatggggattgttgggaccatggtgtacgcgagatcgcatccagagaacaagtaacaaggatttatattggttcgggccctcaagatgattaataaacgtactcaagtttatatgtatactttctccatctcaaaaagaatcaatctacgataataaatgtataatccctctgtctcaaaaagaatcaacctaagataataaatctggataaagataggatgtgacatatcctgtgataataaatctggacaaagacttatccagaattattatctaatgataggtcacattctatcctangttgattcttntttgaacgcgagtagtacatggatgggaatctacta

SEQ ID NO: 2095 - DNA, 332 bp, Oryza sativa
  unsure (1)..(332): unsure at all n locations
atagctcatcgccgaaactcttaaccgaataaattgttatacggtcttgatttcttgatatgttactttacttagccaattctgtcaaacaaactagctctgttgattgctacaggatatttggtactgtagcaaatataaataaatcaaccgatcttaaattagatcggctgctatgttttttttcttcctttttttgggtatgtgggcagtaacagatcggctctgatagcgtgatctctggtttttttcctttntactaagagaccgtgtgcgttgatgctgctgcttctggcttctggcgtgcacgcgtatgcagttgtagatcgata

SEQ ID NO: 2096 - DNA, 440 bp, Oryza sativa
  unsure (1)..(440): unsure at all n locations
atctattttgcattgattttttttttctgaatactataatgaaccctctggttccatttttttatgtgacaaaactgtaaaaaatccatatttcaaaccctggttaggtaataatccaaaattttgttttaaactgatcgagattaacagggcatcaaggctttctgccacttgtatgctgaatcatatgaatcactgaggtttacatattgaagtcaacttgtttgactatctatggatgcatgttctgcaattctgttctatctattttatccatgatgttgaaaacaaaaaatcgattgcaataagttaacatattttgtaaagaaagttatgggggaaaataattgcaacaagtaatattacttcatcagaaggcanatttctttattcttcttgacaangttaagctgaaaagaagtgtctttttaccaaaatga

SEQ ID NO: 2097 - DNA, 248 bp, Oryza sativa
catgacgctccatgggtagaaaactttatttcctgacactggtaagggctctgaaaaaaacatacgatatttaatccaacaactttgatttcaataaggattaaggagacatacaacggagacctttgctaaataaagatatgctgaatacgcttggcaaacattatctatacacaaaaatgcttgtcgcacttcttttcctatgtaaactaaatgcaaggcattgcagctaaatatcattcaccttc

SEQ ID NO: 2098 - DNA, 472 bp, Oryza sativa
agcttgtactgaaagaagtgtcacggtaatgtttcttctaaatataaatcaatcaatgggcttgtgcaacggaactaggcttttgatagttcaactcggtgagcatcttctacaatgtgtcatattaactggctctaacattggcgataaaatatacattcctagaattgcactatgcactacgaatgtgaaatggccatttacattgcagaaaagacaattccctgttcgagtttgctactccatgactatcaataaaagccaaggccaaacacttgacagggtcggcgtatacctcaaaaaacctgtttttactcatggtcaactatatgtcgctttctcaagggcaacttctcgatcaggtttacgagtattgattgaaaacgatgatggttcctgtggtacacaaacaaaaaatgttgtgtaccatgtaaatcttgctgctacacaagcagcggtacaccatctgact

SEQ ID NO: 2099 - DNA, 344 bp, Oryza sativa
ggttaccacaaaacacatctatttgatgttgtcaatcaatatcgagcaatattcaacaatgataagtccggaagtgatgagaactacgatggtggattgcttttcagctgggcaatgcaccaaataagtaatcatcttaccactcttcaagttatgttgccaaatataacggaaggtggctctctctccaacattcgtgaacagtgcatggtaagcttctgctagtgagtaacaggagtttgattgggatcatttgattcactcataaattgcatcacttggttcatcttgcagtattgtgcaatgggccttggcttggttggactggatttccgtggcttact

SEQ ID NO: 2100 - DNA, 398 bp, Oryza sativa
  unsure (1)..(398): unsure at all n locations
gctggaggtctcccgatgtggctgatccttctttctgggtgatccgggttaataatgtcgtgtgggtaaagtgtaccccctctgcagaggttaacaaactattcgaacagccgtgcacacggttatgggcggatgtgaggtgattcctagcgtagttntgtttgactactgccttgtgaaattgccgttgtgaaaaaggggatcgatgtttgagaaatctgcagctgatgggatcagctaggcccgggtgggccgtttgaaagtgttggcccgggtggccgtttgaaaagtgttggccgggtgccaatcttgatcaattcaaaagactgatacattgcacatactccgaccggacgagacgcactgtctcatccgtgtcgtttgagaagcactcactt

SEQ ID NO: 2101 - DNA, 463 bp, Oryza sativa
  unsure (1)..(463): unsure at all n locations
attacttcatacctctctgctagatgtttgtaatttggtatatccaagncaagaatttcttctgtgacaaaaggaatgtttcaatctactcaaatcaacactagttaaccaccttacaaacagttatatgagaaattgacataacttaacaagaaaataaataatacaatgacaaacgccaaacacaatgagctctagcaggatatgaatgtatatcaacatatagaaatggtacagatctttggaatatcaacaataaatccttcttctgttgttagataccaaggttaatagtgtaatttcacattgaacacgtgaagatagcatcccaagtgcaaaaggaatgcacggtatagaaaacaaacgcatatataaagtaatgtgcttactttgataattggatgagactggtgaacatgaatagccggagatgtcagatcacaccttcacatgaacttcacac

SEQ ID NO: 2102 - DNA, 341 bp, Oryza sativa
  unsure (1)..(341): unsure at all n locations
gcacgagaacnctcggagaaaaaataaattttgtcatgacagattgagagtttgagatcagacagcacatcgcattcataacaaacaccattatactactactattacattatagcgaatgatatgcatttcagacatatactgtagcacgtttaccacgagcctttcggtcgctcgataagcatcgatctggatacagtgagaaaatgaacatggacactttttcgacgaaacaatggatttctttggtgaccttagcccaaggaacttcttcaacgtgattnttttttccttttggagggtatgatacatatatatagattaatgagatgtgactggga

SEQ ID NO: 2103 - DNA, 467 bp, Oryza sativa
  unsure (1)..(467): unsure at all n locations
tttattataatnatggaccggttaagagttagggatcgggatcatgcccataattcattgccaatccattgccacaaaatgaacataggctgtgtttagatcaaaagnttgaattcaaacctcagttcttttccatcacattaacctgtcatacacacaaaacttttcagtcacatcatctctaatttcaatcaaaatctaaactttgcgctgaactaaacacaaccatagaattgcacgaacattctgtcatganatgccagctagttgtcgtaccgaaaaatataatctcaccttccacagaattgccaatttgacgtgaaatgtttagatgatctcttgccagtagacactagcanaacaaaatatacggaaatataccctatcccagtaaggtgcacaaccactcgtgtacgtacgttaaggtgcagcacacctaaatacaggtctgacacacaccctcacaa

SEQ ID NO: 2104 - DNA, 463 bp, Oryza sativa
  unsure (1)..(463): unsure at all n locations
agctttctattaacctggaggagatgtatgttctactaagtggggctgtgcaactaagtgtgcaagcggctacccgcgaaagctcacttataggctaaactaacccgcgagctcgcttattttgacctataagtctgttcgcgggtgacccacttacacccctattgcagacatgatagaagcacggtcttcgtgaggatagtgggggtgattcattgccgatttccgcctgatgatagaggggagatgttgagaagacggcggcgaatgaatctacaatatttgaaagcaaggaagggatcggagcangcggcacggatgcagcaacacaatgggatcaacagttggcaggtctcccagccagagttntggagacacaccttaacatgtgatggttccacatatcggcaagaggggaaacaatgaccaagcttttgcagcttctcttgaaatgtgcaaaaca

SEQ ID NO: 2105 - DNA, 498 bp, Oryza sativa
  unsure (1)..(498): unsure at all n locations
acacaaaaaactcagcttacgctatatatgtgccatcctctagagctcaattattattcttacttgngatagaatacataacttgtgattgactcctcaatcacctttggcatggccatgcacttccataatctataacatcaaggggcccggagatatctctccataagaggggcaaatcccatcttgattattcatatcccactacatgtttcatagcatacccgacaactacttttataactacccaattacggagtagcgtttagcagtccctaagtaagctactacatatgttgggaaccatgataatctcacgtctaaggattcaacaccaacactaaatgagatcactgacgacacaacacatatggctcttgcagtatctcatgttgtgtctattcaacaacatgttcaccaacacgtgtccacactattaattatgtatctctatccatgatccaaaaacatgatcgtcaataatacatgtgctgatca

SEQ ID NO: 2106 - DNA, 413 bp, Oryza sativa
  unsure (1)..(413): unsure at all n locations
agcttgaacaactcagagcggctaatcttttttctctcatangcattctccatgatatcccgttgaacgtagcctgatgcgatcatgacaccaatccaacccaactcaaaaatcactctagcaaacggatccgaatctcgatctccagctcgaggcataattaattaattaattaatatcctccgacatcttaatcttaatcttaatttcctcgctctagatcttctcttgtgaagaggccgatcaatcgattcgagaacacctcacctggctgcatatatatacacatagatcgaattgcctatgttacgtgcatatatattacgataaagaataacactgaatgcaatattaaaactgcatgcatgtatgtatgcgttctaatgcgaaaatcttgtctaattaatctgcca

SEQ ID NO: 2107 - DNA, 417 bp, Oryza sativa
  unsure (1)..(417): unsure at all n locations
tgcanacaaagtggcaggttggaagccaagttgttgttctctgatggccggctctgcttgattaaatccgttctcatggccctcccagttcacttcatgtctgtattgcaacttccaaagtgggcaatcaaggacatcgagcggaaatgtcggngatttctttggaagggacagcangaggtgagtggtggacattgccttgtagcctggaaagatgtctgtacaccagtggaaaatggcggcttgggcattcgaaacctggagctcttcggcaaagcgctgcgcctgaaatggccagccaatcgcttacatcagaaggataggccctggaccctttgtgacttcagactgagcgcagatgacgagaaaatcttccaatctgcatctgaattctgtgtgggcaatggtagagacact

SEQ ID NO: 2108 - DNA, 409 bp, Oryza sativa
  unsure (1)..(409): unsure at all n locations
caagctttagcctctgtgcaaccttgttgtgtctttgctgcattgctgcatgcgacaatgcaacatctacaatctctttgtctcgcattgtctttctcactttctgaattgatatacctacactgcttatgatctctntcttttcactttctcttttcgttttcaaagaagagctagctagctagatggctagagagctgaagggaaaaactttgcattgtggcaacaatggcatggcttgcatatgcttgagggacccacagtggcagtgagtgcgatgatggagctctgattgcttntgggtgaggcatggngagagtgcactcgattggatagcttgccaatgccaanggtttgattcttgctgttcttcttttgtgtaactttggcacatggcagctaaatgctg

SEQ ID NO: 2109 - DNA, 489 bp, Oryza sativa
  unsure (1)..(489): unsure at all n locations
cttgatctagctattgctagttatttcattctttacttctatttgtattgtaacagaacaaatcatatatgtgcatttacatgtgggtgtaattaaatatctaagttcttacactacccacaaaaataaataatttcatatcatttctttngcatgatatctgaacccgaacatggatgcacctgcttgcgtttcatggatgtacttangagtttangacatctgtattgaatattgcaaaggatcatactgtaaattccattcatcggtaatgatattgagccgagacgagatccatcctcaatcgactatctgaatctgctgcgtttctactatccnctcctagaactcatctcagccatccaaatcttgtgcggcggcaatattcatacaagcatttctactacacatattatacacctttcataagctagatgatcctncttttgtcgaaatcaatcggcacactattntgatcatattatacac

SEQ ID NO: 2110 - DNA, 249 bp, Oryza sativa
  unsure (1)..(249): unsure at all n locations
ttaagcaccgcggcatgcagcttaactgctagagcaggaatcattttttcttatttgnatggaaacggagacgtatccacgagtccattggtgatgacaaagcacgtcacaagataccaaactcttgctgggatgattgatgatctgtgcttaagaacggtgagcactaccttctgatactggatctaggctattacccggatttgcgcatactacctgcgtaacttatcccagtgtataactgaagat

SEQ ID NO: 2111 - DNA, 343 bp, Oryza sativa
  unsure (1)..(343): unsure at all n locations
tgacgaaattatttcctcacatgtgctcatacatcaagctgcgtttttctctttacacaacagaaggagcatcagaactcgattcacaccgtgaataaatcatctgcaaccgtgcttatgttctatggcggcaccgtaatctgtagcccacacaagaggatacttaggtgtcttgactatgccctgcaatgatcagcttgttgctactacgtatgtttcatgggctgtttaatgtatgccatcaatgccactgatcacggactagatgttagcgatcccaanttctccgctcaataatgatattccctaactattccatccaacttcttgttaatttggaaag

SEQ ID NO: 2112 - DNA, 450 bp, Oryza sativa
agcttggcggtggcaagcgttgtggaaaatgtcgcatgcatcgaggacgttgcgaccgcaacgtggagtagatggagttgacctcgaagacgatgcggcggagccgcgtgttcgcctctgcggaggagaggcgaagctcggggacacctgaacacatcggcttttgagccgctcgatgggggcgagtatgagcttgggggataggagcttggccatcgtgacgaggtggaagcccgggataggagcttggccagcgtgatgaggcggaagccccagccctcacgcgtgccgatgaagacgacattgcagttgtagttgggacccgcgccacaccccgcacgtgcgcaagtccatgacgtgagcgctcccggtcattgggaaccatgtcagctggcggcctccgccgtcgagctttttcccaccgaccgacacccttcttcccacccattg

SEQ ID NO: 2113 - DNA, 331 bp, Oryza sativa
acatgctcaccagtcaccatatgagaggaccgggacaacacgaggaaacaggagaacggactgattatgaggcaacgacgtgtaatgaaaactgtgttattggatttaaatgagaataatgttgccagtgaaggtgataatgattcagagaaaaaaagatcaattaacctttgctaaatagtgattcgactatgtaaagtatagtgactgatatagcagctgtcgttatatatacacactcctgaatagcagcgagaggcaagaatggtcattccacatcatgcacgccagataacaatgagttagtttcaaagttatttcctcaaatttc

SEQ ID NO: 2114 - DNA, 473 bp, Oryza sativa
  unsure (1)..(473): unsure at all n locations
agcttgtagcccgtcgtgacaaatgtgatattatatggatngaaaaacaaaatcagaagctacagctntatggcagagcttcacgaagagttacatttgattttcaggctgattatggggtggatagtttggtacacatgaagcacatcagtgatttgactacagatgatccctttgatagatcattctgtagatgccgtgatgaggaaatatattagttcatttgaagctgtttatcagtcatatactttggtaagtatcaagtgcatgtttagtttacatgcctgaaatatcttaatttggcatattctgttgcaagaatggaatatgtantttgccaaagaagatgcattgcattgatctattctagcatctntactctttctgtttggatgacgatgtgttcttcctcacttatttgtacacaaactagactatgtctggcttgatactgggttattcattccactctg

SEQ ID NO: 2115 - DNA, 375 bp, Oryza sativa
  unsure (1)..(375): unsure at all n locations
tgacaactataatatgagtgttacattgctttcaatatagaatatattaagttagtagactagtatgaataaaaatgatctttagccctgagataattattggcaacaaacataaaacagagcattggtttaaacattacaactgtgttaagagatgtagcgtaatccagtagaactactccctatcatattatgaacaaagagtttcgggcttacacttgttgcagttgcatcttcaagatctgaagctgcaatccactggatataaggtttcaatgaacatgcaacactcgcatgtagaagagcctgaaacatatttgtatacacatgnaattgaaacaacatttgcatgtataatactattatatttcaata

SEQ ID NO: 2116 - DNA, 430 bp, Oryza sativa
  unsure (1)..(430): unsure at all n locations
cggcataaacatggttcaaccgaatggtcacaagcgttgatgttggctcacgcattgacccccaggtggatggcacaaggcaaatgtataactcaactaagaatgctttcttaatcttttcctantcccggcgtttggtgtagaacggatctgttagatatgcgtcgtactatcaagaggggtctacgacgcgagcatgtggatgatcttgtgccatattaatacatatgcatgtgggcgcattaggtgggcttgtctacccaagtgtgatgagttatctcatagtccaaacaaaaagagaaatgggcatgtccaatacgagtgacattctgtacgtatgtccggtggatgtctttcggagtgtgagcgctttatccttgacaacatttgtgcttcttggatgtattatccatgggtnggataaccctat

SEQ ID NO: 2117 - DNA, 62 bp, Oryza sativa
agctgctgccgcagcactctaagacccggtccgactcatttctccataggagcgattacatt

SEQ ID NO: 2118 - DNA, 132 bp, Oryza sativa
gggtaatcgagacccagctcgttagaggtccccaatggagagtaggattcatatgatcccatgtctcccctcttatgcaaatcaatgtatttcgtgtgaattcctgctttgtggtgctaatatgtgtcctct

SEQ ID NO: 2119 - DNA, 442 bp, Oryza sativa
  unsure (1)..(442): unsure at all n locations
atgatctatatgaagntcgtcttatctcaaaaactacttacgaaacacacaggactcgcagtttccttttctgctaatataccaaaaaaatgtttttttcccttgttccactaatttgtgtatatgatgttagtattctcagagttctgccattatatgcatcatggctgcttttctgtctactggttatagtctgtgtgacggagaaatagcatttttcatgtgcttttgtgcacatgcacaaatgaaaatgtggctgtaatatgcatgtaaattgactggattcacagagttctccatacgtagtaaaatagtagctgacattantttggaaatcttggagcagtagaattatccttggttcttacattcataaatngtcacaatttctgaanatatcgttaccagggttaattgaagatagtttatggctgaacttatg

SEQ ID NO: 2120 - DNA, 173 bp, Oryza sativa
ggaagcggggcaagagacacaaaatggtggcacgccctcaacgaacgcggcacgaaagacgcagcaacctgggcgcgcggacaccagggaactaacaaccgcacacccaacacagaggacacagccaggaaaacgccaaaaaacccccgcacagaacggacaaacacgcaaga

SEQ ID NO: 2121 - DNA, 487 bp, Oryza sativa
agcttcaggttcttgcactacgggtcgaagttctcttcagaacagccatcactggcgcagggttctcaaggctggagagcttctgtgttgattgccgtgtgccacgactgagcttccagagtgaagccatgccggtgttgaaacatcttcagttcaagttctatgctttccgggcaaccaaacaagagcctatgggcatcgtgcacctctcgagtctccgaagtgtcgatttcaggtgtgcctccgggtacacaacggatgctccgggcatccgtgagattatcaatcaggtgaggaaagaagccaaggagcaccgcaaccgtatcaccctttgcatcaacacgaaagagatcgtccatgacattgtggctggtagcactggtacagctggtagcagtgcggtaagtgtgactgataagaaacctgagcctaccggtaatgatgacattattgacaatggaaacaatatttcggtcagaagtagtgg

SEQ ID NO: 2122 - DNA, 448 bp, Oryza sativa
  unsure (1)..(448): unsure at all n locations
acgtgtctcatgtgttgagacnagctcatgtgtttttcttcacagagtatgggtaaagcgtacatccactgcagtgtgagtaaaccaaatctattcgaatagccgtgctcgcggttattgagcaccgggacatgtattacacttggctagactctaaattcttaacttgtgtgggatgggttattgcatgatgaatttttatgctgttggagccacttcctgagaaggggaaaggtgggcgtcctcacaaaaccataacgactcaatggcgggaagctatccttgggatcacaatggatggtggacagaaccgtcgttgtttaaatacaaacactggtactaaaattngatcagtcaatgctaggtcttatgcttgtgaaaagaattacaaaatcttgcttgcgcacaagaaccatagccatcctttgaaatacccctatcctatgca

SEQ ID NO: 2123 - DNA, 474 bp, Oryza sativa
  unsure (1)..(474): unsure at all n locations
agcttattaaagtttataaatntattctagtttataattaattatcgaaattataaaacttgtctgcatcttttcctaatgtcaaatatttttattgaacagaggggattatttatggtggttggaccttatctaacaacgtcacatactcacatttgccttatttacaggctctgatggtgaacggtgagtatctcaccttctgtctgctactgatccactaggaggatgcagttgacaggtgatgtttgttgtctacttaagaagcttttatacatgcacctgngtgacttaaattagtccctggacctttgtatgataaataactcgataaggtccttgtgtatccattatttgtaatatatattaattaattgaggggtgtgaatgcaatcttccaaatttttttgagctgtactattgtatccttgcaatcaatntgatgatcgatcttgtattatcttgaactacttg

SEQ ID NO: 2124 - DNA, 336 bp, Oryza sativa
  unsure (1)..(336): unsure at all n locations
agctntacaaaaattccaagctggaggaattttctttgtcgagcgcacaccactgctagttgcacacaccgcgcggtgcgagctgtcgtccacagtccacacccaccaccgtcaccgcggtagcaaaccccccgagccactgctcacgtgggcccgtggcgtccccagactcaccggccagtgggcacgcggtagcgagacggctccagcacgacgcggtaagcgagcgagcacgagcagtatggcggagtaggtcgccgctgccgttgctggtggcctctcccacttaatgccgcggncgtaatcccgaagcctcacatcacaacccctcccccc

SEQ ID NO: 2125 - DNA, 486 bp, Oryza sativa
  unsure (1)..(486): unsure at all n locations
ataaatactcagctgcctgattacatagttgtgggactggctgttatattatcatagagttctagctcagcagcagaatgagagcctggagtgcgcactcnaaggttgagaactgtaatggttatgacaccaacagtaatgagaacagcagcaccaattgcgacaagggctgagatgcttagtatagttttcttgtgacgtangccatttggtgtaggctcgggttgtgatagtggatccgaagaagagtctgggttcagcacaattggctttggtaacacaccaggacaagaagaatttagctttgcaccacataggccaggattgtcagacactgatgagagggggatagtgtcaaaaaagctcccaggagggagatccccagagagctgattatgtgaaatattgaagcgtacaaggtgaggcaggtcanagagctgctttggtagaccaccaatgagctttgtccgagaaagatcaacagtc

SEQ ID NO: 2126 - DNA, 468 bp, Oryza sativa
  unsure (1)..(468): unsure at all n locations
agcttggagagcattatgagatcagcaatggtattttgttggtcagctntatttttttagccacttgtggaaacttccattttggtcaccatttatcttctttttgatctcttataagtagtttgtggctatgcactgatggtttacaactatatgcagctaaagtgtggggttgatcttgctgaagtttggaaaatggaagataatggtatcaactcaactccaagtgcaggtaactctaatttgaatgcaactgatcatagagaactatattaggcaaatatattgctctagatatccagaggacaatccattgctcaaacagcgcccagcctagctgcaatggcccagatatttggtgccctcttatgttattagacagaacgganactctatagattatgctgatattnggatcatactagtcaacaccatctgcgatttgttccatacagaccatttattttg

SEQ ID NO: 2127 - DNA, 455 bp, Oryza sativa
  unsure (1)..(455): unsure at all n locations
tctatataaaattaaccatcaaatatactaacctattatctcttctaacttcaacaattctcaaagcgtgattaaggatatgagatgagccctccaaaaatgggttgattgtctcaagtagaagaccaacacatcctgtataacaaaaagggcaagaataacataaggcaaactcgccagctaaagtaaaggaaacagaggtgacaaaacaattgctgtccatacctacagaagttaaattctcctggttgaagggaccagcatttgctagcttctcaatgaatctcagcagctcgagttgaactttaggtgtaaatactagcaaagagcggatcanaacaactacagcactagcattatatatacgctccttgtcaagccttgatagtccaaatgaagttgcagacaagatacctgattcatcctctgggtgttcagatgaaatgctctctacc

SEQ ID NO: 2128 - DNA, 408 bp, Oryza sativa
agcttctacaatgaactggcaactttttctgtttataaacttcatcatttgctacatctttgttgacttagcatactgctgaaaagatgaacacgcattataacaaacatatccaaggcatggatcatagacgctgtatagaaaagaataggttggttcaaattccaccccagagcagctagtgagcgacatcaaggaagagatcctcatttggaagccgcaggatttttcacacttgaatggcgaaatgataatctgaatccctgagcatacaactatagctacatggtgggattgttccccaacatttcgaatcatattatcgttgaagctttattgaatgacctttctccaatctaataaattggcggccaactttcgcgaccgcgatcaatttatccacttacg

SEQ ID NO: 2129 - DNA, 472 bp, Oryza sativa
  unsure (1)..(472): unsure at all n locations
agcttgttcgagtagcatggtcaaccctgtctttgtgagtggacatttctcgagtggagctggtagtaatatgaagaaacctactttgcatgaggttgttggtgccaatgaagtggaaataagaagaagctccatgggcctttccgagatttgtgatgatgctgcaattttggcccacaagcttctagggaaaattctggacaacacgttgcttgcagaaaacaaggtcaatggacttgccggatactctcttgatggttctacttcgcatggtcctcaaggtacattttggaccaccattgaaccttcattgtttttgttttggtcttgctttgttttaccttgcaatgcccttcaggttcatatgatatatttgccatagatcctgcagaanagaaccaaaaagctgacattgtgattatagctattgagaatgtcttaccgaatctgccaaaaaggtcctttttttccc

SEQ ID NO: 2130 - DNA, 318 bp, Oryza sativa
cgcacgtgcgaaggttgccaatttttcgccagacaaattcatctaccagctcaagagttgcatacaatcccgctgtcttggccgtttgcggtttgcgggctcgacatggttggcccgtttaaaaaggcagtcggcggttacacgcatctctttgtggccattgataaattttccaagtggattgaagctaaaccggttgtcacaatcacagcagataacgctcgagacttcttcatcaacattgtgcatagatttggagtacccaatcggatcatcactgataatggcacacaattcactggcggagtttttaaagac

SEQ ID NO: 2131 - DNA, 407 bp, Oryza sativa
agctggagggagacatctctcccccacttttgtttctttatcccatcgcatacttccctttccaattgcatacttgctttccaactgcatcttataaaactcaaaaaaaacataaaaatcttgcaaaatagacaatacccaaaagataggataggtttgagtcatgccaggtaagactagctacgtctctttgttgaaatgatgaattgctgctctgtttatacctcttatatatgggctcttggtaagtgctctctcaaagattgaatataagtagccaataattattcgggaacctaaggtaaatgggctgcacttgctgatctaagcccaagctattgtgagatatgagatagctaataagagtagctatgatcctgatactacctcgacttaaattccgatga

SEQ ID NO: 2132 - DNA, 88 bp, Oryza sativa
  unsure (1)..(88): unsure at all n locations
ccgcccaanaccgcggaaaaacgccaccttttttaaaccgggggaacggccaggaacgcaccaaagggagaaaagaacgaaaaacccc

SEQ ID NO: 2133 - DNA, 445 bp, Oryza sativa
ttaagtgactgagctgcagcttatagatcaagaaatcaatgaaattgttatcatgtgaatagaattatacctaacaatcaggctaataaaaataacttcctccaggttgtacagtgcgcacttgaacaggtaacaacatcaaaacatgaatagcattatgcaagcaatatcgtcaaaaaaaattatgtgcagttcacaatatcttacaccattttcgcatagcgaaaatctaactttgcagatatacgacacaggttctgaacaaaatgcagaaacacttatgatctctatcaggccaaaatcataactaaggaataagcatgatgtcgcactgtctctgaaccatttgtcattgagatacaacagttcgccagaagacagtgcatcaatgttcctaaagtaacgtgggaactgttcgtctgaaaaacagaacagaaccttttac

SEQ ID NO: 2134 - DNA, 472 bp, Oryza sativa
  unsure (1)..(472): unsure at all n locations
ccgatttcgtcttttcttgtactcctcttagttagagcttatttctatcttggaagctnnggatgaacagggaaatgaatagcaagtgaaaaacaaacaaagcagcaaatcctctttctctgtgggggcaatgcaaagcttcttcatacaatccaaacctctcctttggaccttccctgccttcttgcttgctgtcacaagcatccatgattctatggttgatccttctgtcccccatttgcttctatctgcgtctttatctaagcctggccgctaatactttattgagtggatcatctacttaaatatgagagcgtattaaatattttaataaataaagctaataaaggatggtataaaacaagtggtataaaaaacacagtggaagagaatttttcgagaaaatgtttgtttctaagtgtggagtatttttntaaaaaataacggattaaaactcggcctctacactaat

SEQ ID NO: 2135 - DNA, 482 bp, Oryza sativa
  unsure (1)..(482): unsure at all n locations
agcttgtcgtctaacctatgaataggatgactatatctgatagtaatattattaatggctctacaatcaacacacattcgccaagaaccatctttcttaggaaccaaaattacaggaactgcacagggactaaggttntgacgtacatacccgcggtccaaaaggtcttgaacttgccgctgaatttccttagtctcctctgggttggttcaatacgcagcacggtttggcaatgatgctcctggaatcaaatcaatttgatgctctatccctctcatgggtggcaatcctgggggtatctcagctggaaagacatcctcatactcctgcaaaaggttattaacaacaggaggtatcgaactagcaatatcatctaaagaaaccaaggcttgtttgcatatcaagaaatagcacatatcatcatctcgaaattcagcaatgtcacatttcgttgcaagcataacaccaccctttaacttaat

SEQ ID NO: 2136 - DNA, 347 bp, Oryza sativa
aactaagcttgatcaagggaaaaaagcgaacaagtgcaccctctctattttccttctacccaaaatccaccaaggatcaacgagataccccaccgaaacatttatggacataacaaggagattcactcgtctcgattgcaaattttgtagcattacttagttgtgtcttctcttgaacctctaagggtggaagaagctcttaatgatccggatcgggtgattgcgatgccagaggagttgaacaatttcaccccgaatgaagtgtggactttggtggagcgacctctacaaaatgtgattgacacaaagtggatctttcgcaacaagcaagacaaggccggggttgt

SEQ ID NO: 2137 - DNA, 466 bp, Oryza sativa
ctgcagcttttgcttccttaatatgaaaccttactattgttgttcgatgaatccaatcaagcttttttgcacttgtttccttttttgtctaatttaacttcaccaattaaaacccaatatttttgttggcggcattgagcttagttctttctttcaagaactaaatatcaatgaggactggtatctcttcaagtcaaatctttagatggttcatgtttttttccaaatccagctgataattggttgtgctatgtgctgaataacacaagggttgatacaaatttgcaggataaaaactctagctagcaggtaattgaccaatcaccttgatgttattttcaaacctataatgtggtgaaaaattagtttctcataaaaaatcattcatccatatctgcctttatatgatgaaatataacctacattgattcagcaaactttgtattggacttcctttggtcttctt

SEQ ID NO: 2138 - DNA, 427 bp, Oryza sativa
  unsure (1)..(427): unsure at all n locations
ggagcagctaggtaagatggtctttgctatccatcattagtatccgcttttagcacacgtgcgggactgggagtggntaaagcagttaatcgtaaccgcattctctagactccacttggaaacaatccccatactttacgtattgtttgataatacacgatgtatcaaaattgccttgttaaaacatcaggaagatgtatcgcggcattctttggtcttaagactcttgaccttaagtctcaaacaaacttgtctaatactacctccattntttaatatatgacgccattgactntttaacaaacgtttgaccatttatcttattcaattgttttgtgcaaatataagaaaatgtcatgcttatagaacatttgatgagtaatcaagacacaactaaataaatgataattacatatattttttgaat

SEQ ID NO: 2139 - DNA, 299 bp, Oryza sativa
  unsure (1)..(299): unsure at all n locations
agcttaccataccgntgacacacggcgtcacttgttttatttttcccaatctttacacaaaccagctaatggatggacggtcgctgcgaacatgccctctggcgaaaacgaagtgctaatgcgtacacacccacgatatgacgatagccgaagctactaaggagtcacttgctgtggacacttattcaaaaacaggcgccaatctttggtatgcctcgagaacaaagccaaatgcgactataccgatcatgaaccaaagagcactgatggttgctcaacgacctgcatgacacacccta

SEQ ID NO: 2140 - DNA, 398 bp, Oryza sativa
  unsure (1)..(398): unsure at all n locations
cttgtatgcatgcccncatcattttaatgatcagcaagcagatgctggtgcattcactgatggctatccacaccatttaagcactgtacaagtcctctcatattgtatcaaaaattcagattagtgataaggcgcaagcttatgtttgtgatgctagtttggtgatattgagcagagtgttgtgactaaagtcaaagttacataatgagatcagatcataagattgcagagggcaaacctcataattatcgagtgggccatcaagagagaagctagtggatcagccggaccatcaaggacagtttacctgacaagataaagggaaatgtacggcagagacatccacttcacctttaaaaagaatgtccatacacatgctgcttccgtaaaaaaaacaa

SEQ ID NO: 2141 - DNA, 501 bp, Oryza sativa
  unsure (1)..(501): unsure at all n locations
acacaagatactcagctgctaatgtttgttaaaattaatgccaaatttcttctctcttgcctaattgcgccttggtgatggaaatgctttatgctatcattatcttagacttctttcttggataagaaatttggggggacccctatctcgacacttccacaatacgtacaaagaagttagctacagaaaaacactggcgtcttggtgatccacttacaaacattgttcactcattgcttattaccataaaaaaagaatactaatcttattctgcttcacaatgtgtttgatcacattaatttgtatgtctgtaataatggataggtcgattctatgcatttgaaaaggctcacaggttagatccaacttcaagtggccggggtgtccggcaattcaagacggctcttttgcaacggcttgaaagggtatgcatntcaagtacttctagctctagtcagttgtttgcatgcatctttgtttatcctacaactgtcctgtgat

SEQ ID NO: 2142 - DNA, 469 bp, Oryza sativa
  unsure (1)..(469): unsure at all n locations
agcttgcagcttgtcctagggatgttattgtcttaattctctcccattgtaacctttacaggtcatagcatggtcataagacaagatagcactcgcttcaatatccattgccccaaacttgtcatcttcaataagccatttacacaaactgtgtttttgttaacattgttgtcttggggttctacttatcaaagaaatagcagaaaatatttaatatcacttctcggtcccaatgaactatcacacattggatatgattntaattgaagttttactatggttctttcaccttgctcatgaatccatcatgtagtgatttatcntgcatttgctgacgagcagtgctatgtttacttacaaaattcttactaacaaagttctcaaccatttgattcaagtagcaggaagttatagaaaagctagaatcagtcatggtatgccacatcaccgttagtaagtttgtaacaat

SEQ ID NO: 2143 - DNA, 459 bp, Oryza sativa
  unsure (1)..(459): unsure at all n locations
atgagcaaatgtcccttataaatatgttctttatctgtattatgcgtctaatggtacacatgttcatcatatcttagatattcgatatgatgcacaaataccttgttagcaattgtagctcgatgaacttttggtatatatattttaaattttaaagatagaacgtttaaagagtgttgaaagaatattttgtatttattttgtagaacatatattntaattgtgtatgtttgcgcaaaaatatagagtgatattttaaatagtataatataaaatcctatttttaataccatcgttttctttcaatggcaccatgtacgtatntttttctattttaccgcttttatcgtaattaagttcgtacacgagtttcttttttccatgtgatacttcattggttattaagtgtataccacagctatacaaaagtatatgtatctatgtaccgttcttcttttt

SEQ ID NO: 2144 - DNA, 457 bp, Oryza sativa
gacacataaaatactcaagcttcgcgttgctgtgaagattaagtatattctctagtttttctttgtatatggcgtttatcgggctcattttgtaagacgtggatctgtgtcaaattgtcatctatgtactctggctgatgcctagacagaggttaaatccacagatagccggcgattcgggttgtcgaatccctgtgcgcgacaatgctagggtgtaattggtatgggggtttaatcaatgcatgcatatggggagaatgtgtgcatgttgtcttgattgatgtgatatacattgtcttcgcgtttggtgcttaaacttatataagacaagtacaatagcaggctataagccagctatcaatacatatcacgaagataaatgatgatagaaaagagcagcggtctacagatttgtagcaagctacagcacagaccataagacataatgtatgtatga

SEQ ID NO: 2145 - DNA, 484 bp, Oryza sativa
cggatcttaagcgactgagctgcaagctaatccttagatcatatcttttctttatactcctcttctgatgaatgaatgttgcaagaatgagcatatgacatactcaacaagccacacagcaaatatgcaagtgcacaggataacaaaggatggcataatatagctcatttgaataaacaacatttgataaatactaaagagaatagtaaaacagttgtataattaatcaatattaaataaacaccatacaacacacccgtgttgcataggcccaacctcatttgaacaaccaaccctggttgaacaaactcaacctccaaaccaggaatataccattccaaaccaggagtcacattaattaacacaattaccatttaatgtatagtatgagactaatcacgaaaaacattgctcaactcacccataaccgccggtacggctattcgaatagataaactctgatcagaggtgtacactgtaccca

SEQ ID NO: 2146 - DNA, 427 bp, Oryza sativa
  unsure (1)..(427): unsure at all n locations
aaaactcagcttaggctantatggctggcggacagattttttttattttcttagctgncaaaggatctggtgccagaggggaacaatttacctcacaccacatatgaatcgaagcaagtattatgtccgttgcgcctggaggtcataagaattcatgcatgtccgaacgactgcattttgtattacaaggaatacgctgacttggatgtctgccctatctgtggggcatctatatacaaacgagcaaatactgaatgtgaaggaagttagtcaaagaggggaggcccagcaaaggtggtgtggtatctcccaattgcggagcgcatgaagagaatgtttgcgacaaggaacaagctaaacttgtgcgctggcatgccgaagaacggaaagtcgatactatgctgatgcacccagccgattcagtaca

SEQ ID NO: 2147 - DNA, 335 bp, Oryza sativa
  unsure (1)..(335): unsure at all n locations
tctgaatctcngaaaggtatattttgagaattgaccacaagaaattatgctagcctgttatttcatttctagtcgaagagctctgaactttgatttttgcttcctcgtaagtacctttctatatgtctatgtttgcaggatcgtatcttttacatcaactacaacataacatcgggtaatcgatatccagtgccagacaaatctgctcctgtgtacataacagttggtgatggaggcaaccaggaagggcttgcttcaaggtaaaggcatatgaatttatagcggaccacatactatttgtaatattggtgtatacgcactcctacggttcactc

SEQ ID NO: 2148 - DNA, 356 bp, Oryza sativa
  unsure (1)..(356): unsure at all n locations
accaacccacttatcgcggttatgttttatgcggcggagcggagactctcaaaagttccgctagatccgagagtaaggtctcttgtgtgcgcgtctttacaaccaagtcatcgacataagcctcaacattacgtcctatttggctacccaaagaaattcgagtagtacgttgaaaagtaggacctgcattctttaacccgaagggcattgtcgtataacaataagttcctatgggggtaatgaatgcagttntttcctcatcctccctagccatgcgaatctgatggtaaccagagtatgcatctagaaaacacaaaagatcgcaccctgctgtggagtcgacaatctgatctatg

SEQ ID NO: 2149 - DNA, 479 bp, Oryza sativa
  unsure (1)..(479): unsure at all n locations
agctttctgctaacaatacaattggctactatatactttgtatgtttgcagccagctatatcacactatggctcgctctagttagttttcatatatcagctaagatacggtctttctagtttctgtagcccaactatgcataacgaaatatgtgaatgtgttcctgctggaaataagaagctttggcggtgcaagtgtagcccaactatgcataacgaaatatgtgaatgtgttcctgctggaaataagaagctttggcggtttcagtatttgtttgctcagcgccaacttccaagaagtctgttaactaatcaattgcagtattctccagattgaagaacgtagtgaagcaagacagaagttntcaaatgcaaagtcaatttcatcttctcagttttttggagaccaggccagttttgaaaacgaggctcaagtttcccttcaaaagttttcggtaagtatttttactgtgctatact

SEQ ID NO: 2150 - DNA, 370 bp, Oryza sativa
  unsure (1)..(370): unsure at all n locations
gatacagaaattatacgattaggaaggcgtatccaagttttcaagatcagggtagatattgcctacttttctttcaaaaggaaaattttcacctcaccttgacccatagaacataatttcaaaattgatccgtgctattataaactcgacgaggatatgcactgaaatactatgtatcactaatttatgtttgagcatatgtttgcagacgagtaatgactgtgtccttgtcttataagtagaagaaaagaactaagaccagcatgttgattttatcaagccaaaatanggaagctcatgctcactaactcaaaagggcactagtttcctgctacacatgtgaaggagatcacatgtccaaatatgtaaa

SEQ ID NO: 2151 - DNA, 379 bp, Oryza sativa
  unsure (1)..(379): unsure at all n locations
taacttgcacaatcacaaataatctaaatatatgggagtatagtgtatatgcctaataaagagcgatcgatcgaatcatgcaaagatgcatgcatctcttcgcccaaaagaaacaggaaataaaatacatcataaatggacggagctaactacagaggtgagaacagaacaaaactatatatagctctaggtcaacgccctggaatttagcacgggaatgtactaagttaacactttgatgagttgagattacgacataagctagacaagttgctcgcagccactggntgattgattgctttcaagcattctgtgtttctttaaaaacatactccaagctagcaagagcacagacgtgtgcaaatcatcacgtgtacgt

SEQ ID NO: 2152 - DNA, 434 bp, Oryza sativa
  unsure (1)..(434): unsure at all n locations
gcttataaacaaccttaagcttattcaggactatttttgntcttntgaatcacaggtganttttcctttattactgaaaatcatgaattcttttcaaaaaaaaaaaatctacctactactgcatgcagttgccaaccatgtactcgtgcaatcattttaatggagtaaatatgttctagttcaaaaaatgggttgatgtatanttttttcatgtacccttcatgtgctgttgttttctcccagtaagatgctgcattcatttatctcgcattggattaccatttgggttcagtattttcttaccttntgttaaatgtattcagggaattgaccgttgtgacatttcagcgaactcattccctaaacactanattgcttcacagtatctcttaggacctgagaaaggcatatctacctgcttccacatacttttt

SEQ ID NO: 2153 - DNA, 474 bp, Oryza sativa
  unsure (1)..(474): unsure at all n locations
tactcagcttgctgggggggcgcatccgctctatagccgtatcttctctgtgttagtctcgatgcctcgggcagagaccaagaacccgagaagcttgcccgcangcacaccgaacacgcacttgtcggggttcagttttatgcgggcggagcggagactttcgaaagtttccgctaaatccgagagtaaggtctctttggtgcgcgtctttacaaccaagtcatcaacataggcctcaacattgcgtcctatctggctacccaaagaaattcgagtagtgcgttgaaaagtaggacctgcattctttaacccgaaaggcattgtcgtataacaataagttcctatggnggtaatgaatgcnagtttttcctcatcctccctagccatgcgaatctgatgataaccagagtatgcatctagaanacacataaggtcgcacctcgcggtggagtcgacaatctgatctatgcgtgc

SEQ ID NO: 2154 - DNA, 456 bp, Oryza sativa
  unsure (1)..(456): unsure at all n locations
agcttcatttcctcaagatccaatatgtgacttctccatgttgcctcatgagagtgtgaatgacatgtatgggaggctcaatgtcattgtgaatgatctcaaggggcttggggtaaactacaccgatcttgagattgcccaaaagatgcttagggctctaccggagaagtatgagacacttgtcaccatgctcatcaactccgacatgtcaaggatgaaacccgcaagcctcttgnggaagatcaacaccaatgacatgtacaagttgaagaagaaggagatggatgaagcctcaccttccaagaagtgcattgctctccaagccgaagttgaagataagggcaagggcaaagtgaatgaagtcaatgaggacttggaggaagagatngctcttcttgctagaaggttcaatgatctcttgngaaggagaaaggagagatgaatgggctctaactc

SEQ ID NO: 2155 - DNA, 474 bp, Oryza sativa
  unsure (1)..(474): unsure at all n locations
acacataaatactcagcttctcctgaataactcttcttttgtcactaatttttcttctttctcgctctggactctcaatcgaacgacctaattttnttttcacatgtggccaacgtttctctctgcgtacgccagcacggatcgcatgaacacaacgccgctcgcgaaaggggggagcatgagcctgcagggtccattcgatcgcatatacggctcgaaagggttggcgaaaaaaagataacgcaaagatgtttgtatattttgttcatggacataatgatgaggtcgagtangatgaacgggctgctttaattgagaaaatatgtagtgtaaatcacatactccctccgtactcgtaaagaaagttgtttatgacagtgacacggtctccataacacaactttgacttcttatntctataanaatatttattgaanagtgatatatatagggacatttacggtacaatatact

SEQ ID NO: 2156 - DNA, 397 bp, Oryza sativa
  unsure (1)..(397): unsure at all n locations
caagcttgagaatatatatggccagagtggtatgtttgcaaggtgttcctaacaagatagtgtcagatagaggtagccagtttacttcgatgttttggcagaaattacaatcagaattgggtacccgtttgaatttcagtactgcctatcatcctcaaacagatggtcagacggaaagagtaaaccaaattttagaagatatgttgagagcctgtgttctagattttggtggaagttgggataagaatttaccgtatgcggaattctcatataacaatagttatcaagctagtttgcaaatgtctccgaatgaagcattatatggtcgcangtgctgtacgccgcttctttgggatcaaaccggtgaaacgtcaagttttgggacagacatattacg

SEQ ID NO: 2157 - DNA, 437 bp, Oryza sativa
  unsure (1)..(437): unsure at all n locations
ctcaagcttaagaaacaccaaatctccaccgaaattcctcttattttatgcttatcagcctggtgcttcattctctgctgtgccctaactaactgttggtgaagcacttcattcatttgagccatttcttgtagccaaacttgaatatcangtactgtgcgttggccgatttcagtgacaccaaagtcgctgggcttcctagtaaaaaggacttcataaggagacttacccacagtgctgtggttggaggtattgtaccaatactgtgcctgagacagccattgcgaccatttatgtgggcatgcatgaacagtgcatcttagataagcctccaggcattgatttaatcgctcagtctacccatctgtttgatgatgataaaatgaactcatattgangtttacatcagctagcctgataagttcctgccacaatgc

SEQ ID NO: 2158 - DNA, 435 bp, Oryza sativa
  unsure (1)..(435): unsure at all n locations
gcttgccccatgctctgagcaagttctcttatcttcaagtactagatattggntcatatggaagtccccttatacctgatgacataaataatcttgtcagcctgcggcatcttgcccaaaagggagtgtgttcttccattgctagcataggagaaatggcctcacttcagaagctaacaaatttcaaggttgagaattctattggctttgagataacacaacttcaatgcatgagcgagcccgtagaaccgggtgtgtctcgacttgaaaacgttacaactcagcaagaggccagtggagcaagcctganaagcaaccattgcttggagggactacantttgtctggaagggtgtaccgaatggatatgacagtgacgggaatagatacgacagtggtgggagctctgaaaatgaatgcgatggtaacatgatat

SEQ ID NO: 2159 - DNA, 480 bp, Oryza sativa
  unsure (1)..(480): unsure at all n locations
ataaatactcaagcttgcctgaggggaanactgaatgatctaatctgctctctttcttctattcctttggcaacaatctcacatgtctttttcttgggtggagtagtctaagcagagaccccctcccattgttgtcccagatgacaaatcttgcattcctctggctccaacgggcattcgatggcccgcagttgagggttgttctgggatggatcccaagattgagaaggctgcatttgatagacatggaccatcttcattctttggagattgaagaacgttcactggtcagtttggaggtgctggagatgactggtcttaatgagttgaatgatattcccggaggtattttctttctgaacaatcttcaagaggtgacctcgattcaatgcacaacgacttcattaaccaccagagcgagggtgacgatgttgaaaattctcaagattatctacggcacagccccacttttggaagggg

SEQ ID NO: 2160 - DNA, 367 bp, Oryza sativa
  unsure (1)..(367): unsure at all n locations
ctttctaagcctgngtataaataaaataggattataatgataaatgtattccagatgtgttgatgtgcgttgggttaagttaaatctgttcatagtccttcctgaattaatggaggctgattctatactgttgattctctctgcgacgtatgtacgggcccgcctcgctttgaatgggacaggccacaggttggtgacagagatgggtaccgtggtggtcctcgtggtgctcctggtgactttggtggtgagaaaggtggagctcctgctgagntccagccatcctttagggtaatcaactactctccctacaagngttncattattagtctgttgtgccatgtagcttatttgacttgttacgctg

SEQ ID NO: 2161 - DNA, 445 bp, Oryza sativa
  unsure (1)..(445): unsure at all n locations
cagcttcatgctatagacatggattggttgttatggagcgtctatctagctctgatggcaaggaagccatcgccaaagtagcaaacttactgtattccacttgctggaactctgataacaaaagtgagattgcgtttacagaagctgacatgactcatgcactgaaagctgtatgtatgtttgagaagaatgcatttattctttccattcttgctttaattttcatattcttttagcatttccgaggcatttctaacatcagaatgccagatgaacgcttactgttccagccttttcattangtactggtgggccagaacctgatcctcttcttgtgtatggtcctggtagatttcatttgcgaattcctgcatggagattacggcacacagagattattgtagaccctcacccacattatatagtatgtagaagctttcatgat

SEQ ID NO: 2162 - DNA, 405 bp, Oryza sativa
  unsure (1)..(405): unsure at all n locations
tttttgtggctggctattgtattagccccactacattgtttcagttagctcttatgacactgataaataatattgatattactactccctccgagttgataatatttgtcgctttaaaaatatagtctaagaaacatatgtgaccactattttctattataatatatatagaaatatcacaaatatataattttattgaagtacatttttaaaactaatatatacatatagntttcatatttctaagataaatattttataaattatntatagtcaaagatttgaagggttgactttactctgcttcaaaatgataagtattaccagttcgaatggagtatatgacattgtttctccttataaaatctacatcatgttattcgccgtccattactaaaatcataa

SEQ ID NO: 2163 - DNA, 452 bp, Oryza sativa
agcttccaaaccgacaaagatgattttatatctcagtctggatttgtgttctgcctaaatggtggcgctgtgagttggaagagctccaagcaagatatagtcgctgactctacaacaaaacccgaatacattgccgcttctgaagcagcaaaggaggctgtttggataaacaaatttgtttctcaattgggtgtgatggctagtgcttccagccctatggacctctattgcgataatagtggtgccattgcgcaagctaaggagcctagatcgcatcaaaagtccaaacacattttacggcggtatcacctcattcacgagatagtgggtagaggagatgtgaagatatgcaaaatacatatggcattgaacgttgcagatccgttgacaaagccactcccttatgctaagcatgaggcgcacactacggcaatgtgtattcagatatgcag

SEQ ID NO: 2164 - DNA, 252 bp, Oryza sativa
tgatcatattcctggcgaatgaatcccgtgcagctggactacttctggggtctcccgctagagaccatccacaatgatcactttccctcctctcgggagagcttggtggcaattcttcagtatcttgatgcactcttggtcactaaacataaggagcatccactgcattagcatgtcttaattaatattgaattatctccatctttatagcatgagccttagggtttctactatccaaatcctagtgtcaca

SEQ ID NO: 2165 - DNA, 395 bp, Oryza sativa
  unsure (1)..(395): unsure at all n locations
agcttactaaagacctaggagtatgacttattttctccatccgaggggtagtctacagacggtctagtaccagataagactttgagtgaaacttgcttgcacaagacttgcaattcaaggcgtagtccattgttcaagttgtgagtaagtgtagcttggagttctaggtggatgttcaaccttaattggtctccatcgaaccgctggtatataaacagtacattggaaaaggcaaatctcagtgggaatttgagatttggtgggggattgttggaattaatgaatgggccttagcccactcgaagattaattctttggaaaatcacaaaagcccacctcatgggatggcatgcatgtggagttagtaccaccttgttatttangagaggggacct

SEQ ID NO: 2166 - DNA, 341 bp, Oryza sativa
  unsure (1)..(341): unsure at all n locations
ctcaancntatactatgattattcgcaaaacacgttaacgctttntactatcttaatgttaacctaattatgntctgcttgtgcctgccaaaataatgatctttatactccagagatcaatttcaccaccagaaaaaactcttaatttatggcttctgccagtatcaacttataagtttccccagaagctgacaatatataagcacaaaaggtacaaaacccggacagctacctcaatattagttacactctgaaacgaaatatcaacagtaacccacaattgcgacaataaaaagtaagctgtttggcttgccccaaaataatatcacaatcatggcaac

SEQ ID NO: 2167 - DNA, 321 bp, Oryza sativa
  unsure (1)..(321): unsure at all n locations
atgtaatcacgttctaacttctaggtaacttatatataagcggcgaatttctatcacatgactcacgtgcttgggtgttagcactagcagactagcttctgcctgaaccctatgtcccatgtctaaccgaattntatttctgaactacctttagcccttaatttcactttagaatccctattcttaccatattgtatcactttggaccataataaaaaaaccggactggactgacngntaaccaaaaaacctgactaccttctgtgggtagttaacaaaaaaatggtcttgattaaaccgaaaaaaccgggaaccgaggtt

SEQ ID NO: 2168 - DNA, 404 bp, Oryza sativa
ccagagaactggattacctggattaatgggttgctttcctcctccaagcctgcagggcttcttaatggagtccctgtaagatggatttgctgcactaacggccttctacaaagcgaccccctatcttcatatttgtttatcttacttgctgatgtgttacaaagatcgcttgatagaaatactgatatcagacatgccatctaccaagacatgccatgtaccaccatccactatgcggatgatacctcgattatctatcgtgcggaggaagctgatgttcttgctctaaaggagactctgctaccagtctcccacggcaactggactgcacaacaattatgctgaaagcactatgattactctaaatgtcgatcacagccaggaactatttttgccggattgct

SEQ ID NO: 2169 - DNA, 422 bp, Oryza sativa
ctgcagctttgtgattacgctctagagacagctgtgttcactctaaacagggttccatcaaaatcagtggataagacaccatatgagatatggactgggaagcgtcccagtttttctttcctaaagatttggggctgtgagttctatgtaaaacgtttgcaatcggacaaactcacacctaaatcagataaatgcttctttgtggggtatcctaaggaaatgaaaggatattatttttataaccgggatgagagcaaagtgtttgtcgcccgacacagtgttttcttggaaaaagagtttatttcaagaaaggatagtgggaccatggtgcaacttgaagaaattcaggaaacaacggaaaacgcttcaacgtccacacaaccacaagctaagcaagatgttgttcaacaggttgaacaagt

SEQ ID NO: 2170 - DNA, 373 bp, Oryza sativa
atgtgcccagtgagtctcacgtgccgaccatgaagaagataaaaacctgactacagtgacacggtccttattttaaaaaaattaagtgatatagttacgaatagattaattgtaatggtatttattccaaatataataatttacaatggcatggatcaaattagcactttatataacctccttatttcatctcaaatcaaacgagataatctgatccattatcgcccgcttcattccccattcccaccacggcaccacctgtccctgtcccgcagtccaaaacagcaccaagaatattgctcctacctttccttgaatctttctaccgtgcgtgagccgtccccagtaccagtactcaccacctacgcggtcg

SEQ ID NO: 2171 - DNA, 337 bp, Oryza sativa
gaatccccggaaatgctttcctcctagcctctcgtaccacgtggggtcacatactaagcaagccacaggccacaagagtaagaatcacaagagaaaagcaccgatgcgaactgaagcagaaatacgtaagacgactattaccagcaccgaatggccctcagcagggataactattcctagacgccaaagaggaaatactctccgaggtgcacgacaggtgacccaacacctcctaagaccatggggcagagtatctgatagtgaacgggcacatcaagtctcctcggatgatgaagacgagtctccccgacatctcggcgaagaaaacatggaatca

SEQ ID NO: 2172 - DNA, 319 bp, Oryza sativa
  unsure (1)..(319): unsure at all n locations
agctntaccgatcacgacaataaacttttattattcctacataacacacccgctcaacatgaccgcggcgcgtcccttctacccctatctaccaatttattctttttatccccaaacaaaaatctccatatacggtgtaaaaatttcttcgaattttcatggtcaccaatttgtttttcgaaaaccaaaagaggaggccctgcctcgatcgtaaagcacacctgatcttgcaccaaattccagcggaaaaccgatgctacagtgacccagcgagacgaaacgcacgcgacgcgagccgcgacccaccctgtgtcacgct

SEQ ID NO: 2173 - DNA, 302 bp, Oryza sativa
  unsure (1)..(302): unsure at all n locations
ggtgaactccgctgttacctgtatatgcaaataaagcactacacaggctagcgaaatggatcacactgcagggctcaaaatatagcataagcagtaaacaactttnttttttctgaaaggaagcaataaacatattgcaatcctaaaacagcatataacgatcatggcactgcaggccgccacaactgttggtccgactcataacctcgaaccattgtcggcttttgcctcttaccctgtgcgataacatggccatgagagtaagtgaaccaagggtgcagggatgagacaacacactcaac

SEQ ID NO: 2174 - DNA, 461 bp, Oryza sativa
  unsure (1)..(461): unsure at all n locations
agctntcttgacacttactccggctaccacttatcagcatggcaaaagaggacgaggagaagacagcattcatcacgccgttcggtgtattctgctatgttaagatgccgtttggactaataaccgtaggaaatactttccaacgcacggtccaaggggcacttaacgatcagcttgggaacaatgtcgaggcctacgtcgatgacattgttgtcaagaccaagacaagcgactcattgatcgatgatctccgggaaacattaacaacctccgacgatatcgcctcatgctcaatccagannagtgcacattcggagtaccatcgggcaagctactcggattcctcgtctctggaagagggatcgaagaanatcccaagaagatcaaggcaatcgagaacatgaagttgcccacaagactaaaggaagtccaaaagctaactcgatgcatggcggcattga

SEQ ID NO: 2175 - DNA, 294 bp, Oryza sativa
acatttacatgggtatgcagtgtcatttgcacatatgggcctttaatgggctgataggctgggcctggtctatggcaaatgggcctaaaaggccgggggcggcctgttgggcctccttgatgccgaactcgtcatggcgaagtctttgtagatcgcccaagatgccttcgcccgagatgcctttactttcggaataccgacgcggctttccagccttcgccatcttcgcttatggcttccgccataaggcttcgcctgaatggccttgacgtctttggcttgaatccttggtgg

SEQ ID NO: 2176 - DNA, 465 bp, Oryza sativa
  unsure (1)..(465): unsure at all n locations
tatagctattntgctatgttaattttcaatgatgtagccaactctatgttacactcatcatattttacaaagcagtcggtatatcacttggatcatattattcagggattcacaccgcatatgctacatattaatattaagtcgcttggttgactacaattatcgaaaccactcggtgcatctagtcgatgcacctgactttatttttcagccctccacagtcttcagatttggtaaaaatactcgggagaccatggcaaagatgattgaagtactcggttttggagtaatctagttcgagagaagattatcttttcgactgtgaaggtctcaagggctactgtggagattatgggtaccccatacccacacggcatggntatccgactagttataggggataacttatatatatganatatgtaacagaatatgactcgggtattacgtctccctgtatattat

SEQ ID NO: 2177 - DNA, 440 bp, Oryza sativa
  unsure (1)..(440): unsure at all n locations
acatagaaactcagcttccacacaaattagaggacctgataaaatcatctcctatggaaattaagtatttatatgcgtaattctaacacgaacgaataattaatattcaccacaatagtccctttttacaagaacaatacagttaggttgggtgattattttcttaaataaaaaggtttggataatcattggactactaacctacttcgtaggctaagccagagaaggccgaacaacggggcccacccaccagccacaataccaaagggtccgtgtcagggttcgtctctgattcaacgaagtagtagaagagctcagtgccagtcttctcctcgataccaatatatctacagtgtacacatgtacgtgcatatgtacccaattcttacatgatgaatntatgctcgtatagtatgtaacagttgaagaaaaatgggact

SEQ ID NO: 2178 - DNA, 404 bp, Oryza sativa
  unsure (1)..(404): unsure at all n locations
agcttctgtgctacatcaggagantcttttattttataatatntctttcaaactcctcgccctatctctctgcgaatttacaagttgcaggacaatcaaatttggttattgtagaatcttctgccatcaccataatatatgcatggatcacctcacaacatcaccaccaattcaccataacacatggaaaagtacaggatcaactttatcatatagagaagtatatgctactgtacacaatgtgcatactacatacactacattcactgctacaatttcttgaaactaaccaagcttaagttgtctgtacatttgagtttattntagacnatcattaccagtccaattcattggctcttatttgtccttaagctcatatttattcgttgaatgatcgaatattt

SEQ ID NO: 2179 - DNA, 438 bp, Oryza sativa
  unsure (1)..(438): unsure at all n locations
agcttagagctngttttaagcatttaatgccttatgtccatgtccacaatgtatatggctgaaaaaaagtcttaaggctcactcttatggttacattgtggatgcccttagagcaagtttaatagtatagccaactactagctccaattcatctataactaacctaatagctcatttacacaatagttacatactacactattaatatctggtctcacttatcatacacacagtgtgccttagagttcgtgctacagctggctacaaatctgtagcccgctgctcttctctctccctatttatcttcttaaaatatatttgtagcgggcttatagcatgctattgtacatgctcttagcctaacgtcgatgcaactaaccaagatcagtacgaatagtccagcacgagcgagccggccattgaaagcctgaaactaac

SEQ ID NO: 2180 - DNA, 453 bp, Oryza sativa
  unsure (1)..(453): unsure at all n locations
tnttgtcccagtcacgtnatgaatcctcctgacgcttgatccggtccttccctgccttcctcctaaacatatcaatgacatacaataatcaattgcttggcacagtagagagcacacagactaaggaaaacgggcaagaatgccatactcattttcaaaatatagcttctccttctccagcctacgctgacgagcttctacctcctctaaatccctgtcagcctgagatatcttacggtttgcctcagcaagcttcgcatctgcaacatgaagcttaccctcgatctctaaccttttttcctccaaactagcctcaagggattgagcatcagatatctttttctctacataaactgaacctcggctatctcttcacgaatttcacgcagtgccttntctagctgcaaagtcagaaattgaagtgatagaacaagaatgaacgttcaaagacat

SEQ ID NO: 2181 - DNA, 319 bp, Oryza sativa
agcttcatcaagatcgtggcaatggaaattgttatctattcaaaggtagaaattaatttaaacgtattaatgatttgtacttatagctgcataatctgtgcagtatctctcattgaccctgaggaactcgcatatataatatccacatagtatgcttccctttgattgtttgtgatactttcgaaatcaatataaattatgttagttaattaaatggatacacacatgcaattataaaaattaactagtattgtacgtcatccataattaattaccagccacttattgcggatgagtatttgctctcttatttgtagtc

SEQ ID NO: 2182 - DNA, 299 bp, Oryza sativa
  unsure (1)..(299): unsure at all n locations
cttgtataataatcatttttattgaactcaatccattaccttaaaatggtataactgcaagaacacttcgtccttccaaaatctcgcgctgactgatgatatcacccactttaatcactatgccaaaaggatgaatgcttttaaactttctgtatgcctaatcttactgaactttactctgaaatcttaacggccaccagtgcctgccagtacgtgtggcgatcatgatctacccattgatntgctttttgtctcattttcaatgagaatgatgtccaaacgacctacttgtggatatg

SEQ ID NO: 2183 - DNA, 461 bp, Oryza sativa
tgcggggccaaaataagtgaaactatatattacaacgaatttaatttatgaataaaatttttatatacgttttcttaactatctaaaaacaaatactgaaaaataaactttgataagaaaacgttaaaatcagctctaaatttaaggctgaaaattcaaattctagctgataagtataaacttaagcgaacagatgagactcttagaatatccttgtggcatgaacaagattgtgtgaagattggagggagcattatgaggttgttaaaacgttagatatgacaaggctttcatatcgatgtgtagtaagagaggagtgagtgttcgctgggaatcggcgcgcaccaccgcagaccctgcccactgcactaggcgcgattctcacgtgtatactttacatgttataaacaaatttttcctacacaacttatttgatctacaattcacttacaccatcatat

SEQ ID NO: 2184 - DNA, 343 bp, Oryza sativa
cttcatgcacgagttgccgaatggcccggatggtatcttttatttctatgcggtctcggcgttcggacagtctttgctgggcttctccaagttgaaatgatgccggtcaagataagcaacctggagtgaggacattggctatttcttcatgaatcaaagcttgaacttcgcgtaacccgagcctaactgatccacaatttaccaccaatgcatctagagaagatagccttagccaatgagagatattatctagagtcttcttcacatattcgattaaggagctaaagccttgcttgtggtggcctcttctgtctcatcaaaatacatcctcatgtcaaaagag

SEQ ID NO: 2185 - DNA, 389 bp, Oryza sativa
agctggcgcatgacaagaaaattgacttaaccaatcctgtgttcttgtgttctgcccggccgcacatgaaaaaaaagctctgctgcttctcttcctacccataccttataggcgagaacagtgggctgtctgctgggctcaaaacaaactaccatatcgcgatcagcttgtcacggtattgcgcttatctacaggtttttcgttctgaactgttaccagatagttttcttgtccctgaagtgctatttgtggaaaccttaaagcatgcccgcgaacaactcaaggattgtaacctgaaatggtgtagatataacaaacttatgggaattgcactgcaagcaacaccaagcagtgtagatgagagaatgaaaatgaacatactgcagcaa

SEQ ID NO: 2186 - DNA, 447 bp, Oryza sativa
  unsure (1)..(447): unsure at all n locations
tgcctctgctatactaaaggtagccgagccggacaataagtttccatatnngtttattgacatattgaaaacccttcctggttttgaggagggccatagatcattttactatgctcatttggttgctaaccctcacattgctagagctttcgatggacttccatttgaaaacaagatgcattggtttgctatgttcattagtgaaaagttccctggatcaacatacgcttcttggatgagttggatagttcttttggtgttatgtgttgttggttggcttatttacctattatgtaagactttaaacttgcaatatgtttgaggcagagaacttactagtacgagtaagaactancattgctatcatgtgcaagaaataaatgtgagaccttaagttgctatatatgtatgactaaaattcgctatattatgtgtggttgaatatat

SEQ ID NO: 2187 - DNA, 240 bp, Oryza sativa
tgcagttcttgtaggtaaattactacatgaactcaattatgaaatatgtgctcagctattgtctaaatgttctcggtcgccacacagtgcagctcttgtacgtgaaatcactatttgaacttcatcatgaaatatgtacatagttataaagcatctggagaattgctagctttatgcactcctgccacattgatctcgttacatttcattaaatgctgaatttcctctctatggatgttc

SEQ ID NO: 2188 - DNA, 401 bp, Oryza sativa
  unsure (1)..(401): unsure at all n locations
tctcaaagctggtttcatcagagaggtactccatccaaagtggctagttcacccagtcatggtgcggaaggccaacgggaaatggagaatgtgtggtcgattcaccgacctcaacaaggtgtgtcccaaggatcacttccctcttcttcgaatagaccaaccggtggactcaacagccggntgtgagttgttgagcttcctcgacgcttactccggctaccaccaaatcagcatggcgaaagaggacgaggagaagacaacattcatcacgcctttcggggtattatgctacgttaagatngccgtcggactaataaccgcaggaaacacttntcagcgcacggntcaaggcgcacttagcgaccaactctgaaacaatgtcgaggcctacgtcgatgaca

SEQ ID NO: 2189 - DNA, 277 bp, Oryza sativa
  unsure (1)..(277): unsure at all n locations
agctngaatgaacttgagagcaaactntgtatatggaatgaaaatctgttgaaatggggtggagttccctctcccggccggttggcttaagtagtgcacccacaacggtcaaaaccgacctgtggggcccactagccattgtctcaaagagggaggcagccgaccgttgcctggccggttcggncgaaccatgtgttctgtcgaacccctggtgggcccaatcggtcccactttctaccgttggattccaacggtcactgtcgcgcggcactgccaa

SEQ ID NO: 2190 - DNA, 364 bp, Oryza sativa
ttgacaaaactctgcccaagtaacttacggtgcatctggacttggtaccacataaatgtcccaccatgcagaagcacgcccttgcaactgatgtgtaaaaaaagcaaccttctcctggtcgatgcattgcaaaaaggtcaacttcttctcaataacacggagccggtcgttggcctccattgggttggtggtgcttgacaaagagcgtggcttgatgcggagaacgtctaacagtctggacaagtgggatggtgggggaccacactgttggatctgttgcgcctgctgcaacatctgatggcaatgttgtagcatctggtgcatcaatcaatgcatcatctgagtgaccacatgggtctcgggc

SEQ ID NO: 2191 - DNA, 448 bp, Oryza sativa
tgtgaggatcatagctctgaaggatgagatagcgcgtctgtataatgagaatgctcaactgaagggtctccccgctcccggaggagtccggatccgcaccacgcctcgcaagtcaacgactgcacccgtgcgcattcagcttgcgcccaggaacccaccttcttccgcagctccttcagcacctcccgcagtttccgcagcgcccgtagctccagctccagccccagctcctgttccagcgtcagctcccacgtccgctctctcctgcgctcccgcgttagccgccaggggtccagccagtggcaacggagtttgtgtgtataggtttgttcgcttgtgggtcagtcgaccgctgacatcatgtgcctatgatgtggctgtcttataacggattctttgctattctaagtggtatatatcagatcagaacaattgcagtctaaatcat

SEQ ID NO: 2192 - DNA, 388 bp, Oryza sativa
  unsure (1)..(388): unsure at all n locations
agctntacgccaatcacggatgctcagaagttatgatagtntttctgttcctacatggactggaagagctggtgctgcgggggcaccatcctctgtccgcaggaagtttgggtcaacactcaatacccagctggttaattcttctcagccatcagaaacttcatatggcaggggccaaagtcttcatgtgggtgctctaaatggcaaagcactgtcctccgctgagcttctggccaggatacgtggaacccgagagggagcagcttcagatgcactataacatcaactcaacctgtgatcagcttccaatcacacatcgagttcatcagggaatgggcgtgcatcaagctcttctactatgagcatgatcgtacagcctgaagtccta

SEQ ID NO: 2193 - DNA, 362 bp, Oryza sativa
  unsure (1)..(362): unsure at all n locations
ntatcaatggaacttacggcgagtatttctggtctttactctagagcnttttcagcctccgccttttaacatccttgtaaaactcatcttcagactctgatggtccaatgtcatcatcactgccattttcttcacttaattgattaagtctctcttcagtatgatcatcttcctctggccagtcatcatcttcaagtgtactagctcctactcttgcagaacacgtaattcgtgctttcgtcgtctttcaccaatatcatctcgctttggaagctcgtcatcaccagagacaaacttcaaaagagaacccaaaaaaaaagagttagcacctgttgcaactgtcataaacacaaattacatac

SEQ ID NO: 2194 - DNA, 356 bp, Oryza sativa
ctaatttagagtattaaatataaactacttacaaaactaataacataaataaaagctaattcgcgagataaattttttaaacctaattaatccataattagagaatatttactataggatcacataggctaatcatggattaattagactcagtagattcgtctcgtgaattagtctaagattatggatgagttttattaataatctacgtttaatatttataattagtgtctaaacatctgatgtggtagggactaaaaagtttttagtcgcatctaaatagagtcttaagaagcagctgtttagttttcagcttgtgacttctagtttatttctagattttataattatagctt

SEQ ID NO: 2195 - DNA, 380 bp, Oryza sativa
agctctgagtattaacataccctcttctctcttatcaccgcctcttgacttcatgaaacagggatccgcatgattgttgatccatacaaacattttatcagattgcatctttctttttaaaaaaaaagtacctatctgaagcagccgctaaataaagagggtagacgatctctattttgaactgcatagtttcaatgacatccaagatctctaactgtagatattgcaagtgaggttcaactgtaagaagctgctggtactacacgactacactcaagactaaaatagaaaaatgtgtgaagacttatgctgacatgattgtcacacacgcctaacatgaatatgggatacctaatgtgaacacatgcattatttatacc

SEQ ID NO: 2196 - DNA, 371 bp, Oryza sativa
  unsure (1)..(371): unsure at all n locations
aagtaccttctgagaaccttgatactccttctctttctttgttccatgcctacctggattacttggcgcctattatacgccggatatacgacctattcgcaactttcttgttggatcaagaacaaggccttggcgtacgacatccgatactctgcccaagactttttctgtgtcgccgtaagaggtttttcagcggaatacttttgatagccattcttaacaatatcccacaatccttgagatagcagcagcgtccgcattctgatgcgccatatatcatagttttctcctgcatatacaagaaccatagactgtgccatatgggcgtccgaacttgaagccatactngtagctttaattgacaataccga

SEQ ID NO: 2197 - DNA, 367 bp, Oryza sativa
tctcctcagctgggcaagccccttcttttatagagggcaagggtggcgttccctgtgcctcctgcttatcttttcgctactgtggaatcaccagaacacgctaaagttgaggcctttcctgccgaaagttctattcttcacagggatatgttattcaccgccgaaaggtgcctaaaattatattcttcacacggatatgtcattcaccgcaccctatatagtttctttatgctttatagggcgtgcttctggattccttcttctggattccttcttgagtaagcttctgaaatcttatagaacaaattattccaagattagaagatatccatattataggagaaattcctactcaatattggggaaa

SEQ ID NO: 2198 - DNA, 458 bp, Oryza sativa
  unsure (1)..(458): unsure at all n locations
tgcagcttagcaaagctcggatgactataattttttcaggaatgggcagaaaaatacattacttttcaactaaagaaaacttaatatggagtttacagcacctcatcagtgttgtacatagacaaagcaactccttccgcaccagtgaagttgaacacctncagaataatctgctcatcctttccctctgtaagaacagacagatataacgagatcaaattttactcatatcagttcagtgaagaacaaataataaagtgtagccaagcaaccataccaaaaaccagcttgagcttgccaggccccttcagaactgcatcagntgctcggtactgatcaccaaaagcatgccttccaatgcaaatgggcttagtccatcctggtttcatcaatggttcaatgttacagatgaacttagctcattcaatacagaatagaatcatatcctnttaatacct

SEQ ID NO: 2199 - DNA, 406 bp, Oryza sativa
  unsure (1)..(406): unsure at all n locations
agcttgctgctatcgccatagccgatattaatcttttgattgctcttcancgtgctgcccgtaaaaaaggcgtcgtccacgtgttgacggtcaaagcccgacatctggccggtatccagtcccagcgcccggcaggcgacgatcagataggccgcctgcatggaactgttgcgaaacgctgtttcttctgcaagttgtgggctggaggtaaaccaactgcgggcatcaccgtggggaaacagtagtggtaaccgttcataaaattcactgtcccaagcgacgatagcggtgactggcgcggtcagggttctttgcagattgccgctggaaagtgccgggcgcagacgttcttttccttctgccgtgcgggtaaacacgatccgtgccggagaacagttagctgatg

SEQ ID NO: 2200 - DNA, 290 bp, Oryza sativa
  unsure (1)..(290): unsure at all n locations
agcttccttactctggatgtagcgtgtatttttgttttctcacttcgcgactntgatcagtcatttgagatatacactctccctagcctccagccttgtcatcggagaattcttctccgaagataaggctcttggacctttgacctgcctcggntgaacaagcactgatcctagccccacccgttgaagtggaaagtgtatttccgattacacggcttggttaatacgcacggcgagaactcttacatgaccagatcttacatgggctttcgtctctacaggatctatca

SEQ ID NO: 2201 - DNA, 429 bp, Oryza sativa
  unsure (1)..(429): unsure at all n locations
agctttntacaataggacatgtgtattattgatatatacacgtcactttgctatggatccatgcatgacaaaaaatctaatactntctccacccacaaatataagcattaatactagcagttcaaatttctacatttctaaagcaccactttgccaatctagccaaaccccataatttcctattggtattggtggatatcatttgacgtgatttttcgccatagtcaaattccaacgggtatgaaaacaatttttaccccaaccttaacatctgctaaaccacctacctcaaccttaacaaaactcctaaaagaatactntatatttctaaatggataaagtagtatcttatcggtcacgaaaactctacatattgagatccactctctctgttctaaaagaaagcaatctggaaatgcccctcgatac

SEQ ID NO: 2202 - DNA, 441 bp, Oryza sativa
  unsure (1)..(441): unsure at all n locations
tactcagcttctacttataatgctcncagctagcctctntcctgtataataaaattataaaggcaatcatctaatgctgctaaagaaaaagatcaaacttatcaaaataatatagttatgagtacagctaggaccgctgagtagcataatagaagctattcttgaatggaagctactaaaatagtcaatggggtgaggaaataatctctactntgttcagcacaggtgttgacaactggtttgctcaagtcgacaagcacgatcgagacacctaaatgccttgcggtgatatggagtcgtcaaacaccttgatctagacaaagctaaaccaagatgggttntgcaagattatacaggctatcggagccaatctagatgaaacaatgatatacacccgtcttgtggcgaacagggtttacgggccgaacctacagagggatt

SEQ ID NO: 2203 - DNA, 433 bp, Oryza sativa
  unsure (1)..(433): unsure at all n locations
agcttcngatgataaatctacacgtacttactgtcgggccggccatggcgatatcaaacattaaggctggaattaatgtgacagttcactctggagtgtgaagtgatgtcacggatacaaatcacggcacgatttagtcatggatatcgagctatcgagagccgttcgtttactgtgctcggtgaaatcatgtccacatatatacgaaatctgcagcgagccagacatagcatcgatcagtcactccccacaacctgcaaattaactcgtccactgatcattctgcggttcatctcacaagttcttcttttctaagggagcctatgcatcgccagtcttatctaacagcttaacctcgagcacacaaaatattagtactaactccacttctaagtatatggatcttttgaatcttttacactacttatgaact

SEQ ID NO: 2204 - DNA, 392 bp, Oryza sativa
  unsure (1)..(392): unsure at all n locations
tttggataaaagtgacacactntntaaactgctaaacggttcttttcatgcganaactttntatatggaagttgttctaaaatatcggattaatttatttttcaagtttacaataattaaaattcaattaatcacatgttattaccacctcgtttacatgacacacttaatctttatcttcatcttcagaagattcaaacactaccttagttnttaaagactngatttctcacaaaagaagcattaagttgattgagtcacctagcgtgttcaagagaaaagctgttcagtaagaaaatgtatattcggagaagaaatggctaggaactaaccttcctcggataatgttgcaagaactggtacanaagtacagttcagactattgatatgtc

SEQ ID NO: 2205 - DNA, 327 bp, Oryza sativa
  unsure (1)..(327): unsure at all n locations
caagcnnacaccaagaaaaaccagcnggatgctatanagtgctccaaaaagagggcccggaacgcaagtgggcaacatcgaggagcacccctcacacggancatcttcaacaggttactgcaagctggactcccagaggccagagcagcaagaggcaaaacacaggtctccggctgcgaaccaggcagccacagatattaggcactcccaccacataggtcgccacccgcgaattaggcaaccacacataccagggacgcccattatctagaagggctatagccggagaaggctagccatcgccacgctcctcagagaccacaccac

SEQ ID NO: 2206 - DNA, 434 bp, Oryza sativa
  unsure (1)..(434): unsure at all n locations
tgaatctctacatttgaataactaacgagacagcatgaattgttattagaagggaaacacttccatttcactaaccaatttgtcagccacttcaccaacatgcaattgactcgacacagcagctagcttcttcaacatagcaaggtcactgacctcattgtagcgaatttccagttgatcatcatttacatatttcgttaaatcgggcatgtccactgaaacattgccagtagcagatccacttggaaattgcataatagcaaaaattgcaccctgcagcaaagaaaaagattaaagtagcaccgtcagcatcattgatgactgtgcacattctctgtcactaatcaaggaaagtacaatctgtttttacagtgtatatgtattacacatatggaaacaaaatagcatgaagnttatntattactatcagctac

SEQ ID NO: 2207 - DNA, 403 bp, Oryza sativa
  unsure (1)..(403): unsure at all n locations
agcttcacgtacctctagcaacggtctatttcttgagcanacacttctctgttctgccatccattgcatgtacgctgctaagtaacaatccctcatgcagtaccttgtcgttaacacctctcaaacagcctgtaggatctacccgctccgacttccgattgaacgccatcaacctattcgcgagccgaagccgacaagtngcatgccgtctttccagtcaccaaaccacccgagcgcttgcagtaccttgtcgttaacacctccaaaacaagctgtangatctacccgctccgacttacgattgaacgccatcaacctagtcgcgagccgaagccgacaagtcttatgccgtnttcccagcaccaaacgagccgagcgctgtcagtacttgtcgtaacacctc

SEQ ID NO: 2208 - DNA, 473 bp, Oryza sativa
ctatgaaactcagctagcagtagcacacaagttcctaagttattctacatattaatactctactatgatggagtaaatctagtaaataaaaacgctaacaggattatcgtgttatgaatctaatggtgccgagagcatcagattcataacactcagcatgaaacattcagatcatttgacgccttgttagcaagccaatgcagtgatgtgacaaaaattttcttttcagaccagcgtgacctacaaatatttgtcactgaaaagttagttcattgagcaagttacagaacgaacaaacgcttcattattacaaacaatacccagaaaataatcattggcatataaacggttcttttcttattaagatacatatcttatcttgggtttcgatcacacgtttctcaaagtactaaactgtgtgttccgtgcgacatacttatatataaaagttgctttacaatatcacaattatc

SEQ ID NO: 2209 - DNA, 363 bp, Oryza sativa
  unsure (1)..(363): unsure at all n locations
cctggcataagccggtatggctgattgcgttgtgtaactataactcctttcttctaatgtattgacgagcaatccttttgcgcgttcgcgaaaatgggatgaacagttgcttgatctgtaacaagagccaactctactttactaaagctcgaaacatctcaaattttgttctttgtgacgctttacatattatggattattgaagacatagaaggcatgcatttgcatatacaattgagtattntgaaaatcaacttatctttttttagtagcaacatacccaaaaattgagtattctgaagaactcttgctcaactactttcatcagatgatatgtttctcaagaacattcatggaataatc

SEQ ID NO: 2210 - DNA, 440 bp, Oryza sativa
  unsure (1)..(440): unsure at all n locations
tgacaccatctctatttaatggccatcctgcctatttaattatatagtactgnggngccaaaaattagcttggtgtccacttacaagtaaatggaatggtggtccaagcattgcccccaacatgtgttgattttttggtatcatgtttaatatttctcaacattctttggtatcataagcttgtctgcaaccaaccactaagaacactggacaagaaaacaaaggatgttcatcttcatcaatttacacgtccaaattatgagatgacccactaggcctatagatcataacacataaagcaagtgaataaatattgtcaacaactaaactcaaccacatcagcatggccacctcctccatttacatcttatgtactatntgtcactagtctttgttactaccatttgacttaagaatagttagatacatcacatttcgca

SEQ ID NO: 2211 - DNA, 352 bp, Oryza sativa
agcctatgacaatgcgaacgaacatgatcatttgttccacattcaaagcaaccaatctggaccacctctttttctgttcctggcattattcatagctcgagcaattctgttagcaaccaaagccaaatccttcttctcgattcgctcgagttgatcatccgatgtgggattaaaaatagcacgaaaagaagacttacatgaagaagcatctacatccaaagaggaaaccaaagcactcgacttacaatccaactttcgagaaagaacactcatctcatgtgtcttcaattctgccataagggaatccaaagtcaaagtacacatgttcacagactcctgaatagatgttact

SEQ ID NO: 2212 - DNA, 377 bp, Oryza sativa
  unsure (1)..(377): unsure at all n locations
agcttngtcgaatttgagccatgtatttgtgtttnttcctactctttcgttagntgggaaacaactgaacatagagtcgagaattatagcttcttatcgtcgagtagtcattgcttgattgaagataaatgttgaagatgtccaagtagaaatccatgatgacaaagttgcattgccgtgatgaagtgacagaagcaaactggtagtgaacacgcgcagttgtgaagataaaagcactagtcggcggcagcataaccagtcggcgaccgaagacgatgatgttcatcactagtggtagctgtctaaaccacacgtagaggtgagggcactagtcagcagcacacgtagacagcttgtgttgaagatgatgatgccta

SEQ ID NO: 2213 - DNA, 441 bp, Oryza sativa
  unsure (1)..(441): unsure at all n locations
tacagattttcttcagtcgatgagaatgccggctgttgatctatggcctncagcttgagcacttgcaaacaaaaaccacagctccatctatccagtttccccatatttaacaacactngaaacagtctttgcaattgctaatcttagaagccatgattgccacaaactatgttttctttgctctaattttagcagagttacagctgaccaggtgacgcttgttgtgcccggtcataatacaattcagagaacatgaccatgagatgtctctgcgacagaagctcggcctagcagtgtgaatgtgtgatggtaagaattgtactgtgttctactcctatgttaatcccggggatgtatcggtacaacgtgtatgttcaaatacaccgccttggcgattctgccggcttcaatgcaccttgattgtcttgcttattcgccaaa

SEQ ID NO: 2214 - DNA, 389 bp, Oryza sativa
agctctaacatttctcatatcctgttaaacttattacacaccacaatcactactacaaaacctataataggggatgtccgaacatattcaccggtttatcgaaccggcacatataaggctttttctgtccttctaagtcctgaccccttgtacgagtctaaaactaataacagcacctaagatcttatatgtgccagtctatttaaaaacggaattgctatcctactgtctacagattttaggggtgaaaactgtcaatatgctttgagatttgcgctgcggaggggtgaaaactgtcaaatttttaaccgtaccatatgcttcgaaatttgtgctgtggaggaaaaaatgaaaatacaactcgatgctcgcaacaaggaataaacatg

SEQ ID NO: 2215 - DNA, 51 bp, Oryza sativa
tgctcaggcagctggaggaggaagaagacatatatatacgggtgggacttt

SEQ ID NO: 2216 - DNA, 446 bp, Oryza sativa
  unsure (1)..(446): unsure at all n locations
agcttctccgatggtgtgtttattcttttttaataacggaatagaatatctcgggttttgcgtaacgagctataactattaattacagagtagtgcacaataaaaactttatcacaccaaaaagaaaagacacccgtgtgtttttttctacacgggtgaagaatataaattcttggtttggtttactatcctctgaacttataagtcaatactacactatatatattgctttattctgtgatcgagaaaatatcactgttgattattcttggtacagcgaaagaggggaaaattanggcgctcgcagccgggtgcttaacaaaaacgcattttttcgtgtggaggtaccgtctgtctgcacccaggggtctacgaanatccatattttcgcgtgcgggcagcctaaccacacgggataatccattatcctgtgcggncatgttata

SEQ ID NO: 2217 - DNA, 430 bp, Oryza sativa
  unsure (1)..(430): unsure at all n locations
ttanactcaagttccacttccttttatccttacatccatctcaacaaagagtattagagaacctctaattgtgttgtcattagcaccaaaataaataaggggtcctagatgcactttcagaggtaacagaagtgcttaaaaaatataacggaggagaatttgggtggtattaatgtgtaccgaaacatttcgatgatataaaactaaacccacaaatttctatggtatagaactcaattttcctaatattaaaggcacaacttcacttgagtatttaagatcggtaaaatgaacaatttgttggggttgaaccaagcaccttcaacatacaagagaaaaattttactacccaataaatatactttctccatctcttttatagggagtatttcattttgttagaacaaaaggttaacctataatttctcta

SEQ ID NO: 2218 - DNA, 418 bp, Oryza sativa
  unsure (1)..(418): unsure at all n locations
tgatctcccacncacctgcggcatgcaagcttgtgagtctggaatacacccaggngagtataaagctcatgtttttttttttaggaaaagtagaagctcatgttaccactacatattaccaacaaactcatcgacatgctcctaatgctatcttcttaaaatccttttaggatcatacggctaatggaatatctgacttggttgagttcacccagaaagccactattcgccaggcaagtttgaatggtctagtgattccttaatgccatgcttcttctatgctttatttaacaaaaccagttgcacctcaactataagcatattcttttcctatatgcttattctgaagagatgtttttattttcaggtcccagcagcatccgttcctccagctattggatcttcacagcgagttgtt

SEQ ID NO: 2219 - DNA, 463 bp, Oryza sativa
  unsure (1)..(463): unsure at all n locations
taattaatttccttgaattcgtattgagcaagacattaataatagtattctgtatgatactactccagncacctgcaacctggcagtccttgagcgccacccttggaaaccaagaaactatagtggccatcctcagcgactctttcactgcctgatgaaatattatgtactcacagctgaagttaagctttacagtaagaagtatgaataattaattaagaagctggctagtactactccaattagcaaggggatgcaggggagaaggagtacctaccttgtacgcatagtccatggcgtttaggtgttgcatagtaagagaataatcacccttaagctccagccgaaatgcttctgcctgcacagtacaattaattaattaattatgcccatgtatgtgacgtactcctatatgttatgtaagtgtattgattgaattgaaaatttgagaaagaaagaaaga

SEQ ID NO: 2220 - DNA, 330 bp, Oryza sativa
  unsure (1)..(330): unsure at all n locations
agcttgcggcgcccaaataagtgaaactatatatttacaaacgaaaaataatctatgaataaaatntttatatacgttttcttaactatctaaaaacaaatactgaaaaataaactctgataagaaaacgttaaaatcagctctaaatttaaggctgaaaattcaaattctagctgataagtataaacttaagcgaaaagatgagactcttataatatccttgtggcacgaacaacattgtgtgaagattggagggagcattatgaggttgttaaaacgttagatatgaaaaggctttcatatcgatgtgtataagagaggagtgagtgt

SEQ ID NO: 2221 - DNA, 445 bp, Oryza sativa
  unsure (1)..(445): unsure at all n locations
tgattaagtcggtgctnggaagaataatatatatagcacctgtttattcagataatgcatgttagtttcttcagaaaacttgtataataatcatttttattgaactcaatcaattacgttaaaatggtataactgcaagaacacttcgcccttccaaaatctcgcgctgactgatgatatcacccactntaatcactatgcaaaaaggatgaatgtttttaaactttctgtatgcataatcttcctgaactttactctgaagtcttagcggcaaccagtgcctgccagtacgtgtggcgatcatgatctacccattgatttgctttttgtctcattttcaatgagaatgatgtcaaaaggacctacttgtggatatgattggcaccatgtcgatcgtcccgaattggttcagtccatttccaaaaccggtgacacacaagtctca

SEQ ID NO: 2222 - DNA, 427 bp, Oryza sativa
  unsure (1)..(427): unsure at all n locations
agcttgacaacgagcacacaaacacacatcttattgtatgtccggcttcgaagcagcgagatagagcaaagatccaatcatgctcctatacttcttttgatccacaacttcaacatcttcattcggatccaacacagcagttgatcccattggtgtagaaattggtttacaatccaccatcttgaagcgccttanaagatacttggtgtacttcatttgatgcacaaatgtaccttgcttcatttgtttgatttgaagtcccaaaaagtaagtcaactctcccatcatactcatttcaaattccctgcgcatagtgctcagcaactccacaactaaagggtgagatgaacaaccaaagatgatatcatccacataaatctgaacanaatgttgatcatcaccatgcttgtgaataaaaagagtctta

SEQ ID NO: 2223 - DNA, 457 bp, Oryza sativa
  unsure (1)..(457): unsure at all n locations
tattacggacctataaaactcagcttgaatgttgctgacgtcgatcctcctgtcagccttatgtgaataatgaacgtgcggagaggttgtatgcctgatcgaacaacaaaacaatctagcatgctgtctaacagcccatatccttcttcacaaatgtaatgattgtttcaccttaatagggaaattgttatcccggtagagagtaccagttgcaacataaatatggctgccctatgttgaactcgtgcaggctaagtctttnttaaaaaatacagaacaaaatagaatcaggcaatgctgaccgtgagtccacgagcgccgccgatgcggatgcggtccaactgcagatcccaatcaacactgcacaggcacccgcggacgacctgccctcgcctccagacgcgaaccaacctcgtnccgcccgacctcccccgccttccgtctatgcatgccagct

SEQ ID NO: 2224 - DNA, 405 bp, Oryza sativa
agcttacaccatgctacatgagtctttagtaagtatttattgattattttgtacgcattatcattttctataaaattatacacatccctacactcttaaaaaatttacatgtacggaattctaacaggattattgcttatgacgcaattacgggtgcgctctattattctctggtgcatgcaccttttacggtggatatgaaaacacgggcggaacagtttgttgaataaacatgtggctcgtcgaatttgcacaagtaaacgtcaagtgccaatccctaacggcacccacaatgattatctatatgctctctgcaagagatccatatcagcatacttttctacttggaacgtattaaatgaagagagagagcacagctatctactaacttataaatagtctata

SEQ ID NO: 2225 - DNA, 385 bp, Oryza sativa
ctactaaagataacccatgtgcaccagcagaacgcttggatatgattgtatgggttgcaccacaatcaaacaatattactgtcggtgtctagttgactgtgaaagtgcccacaattacctctggtgctgactgcgccttctctgcagatgcatgattaacactggcctgaacgaacttgggtccggcacggttttgcttctggcactttccaaccgtgtgttctggtttgttaccattgaaactcagttcgggtttatttcccaacctcttgggctgttctggcagagctcgcttaactgatcgggctggaatctttaatgaactctgagtacggttgaggctgtgctgctcactattgttgtgactgtaactatggtggatctt

SEQ ID NO: 2226 - DNA, 379 bp, Oryza sativa
agcttttaaccaagctcttacaagtttttatttttgcaagcggaatggtgatgtacaccgacttaaccaagcaccccaatggagtttgcatgtatcgatgccttggcaaacacttgctgtacggctgcaatcagatctatggagctctgggtaggcttaaatatgtagcaaagggatagcaaatgcttaaatcatagaatgcaaagttgaataatggttctaagtcaactaccgggctggtcctatgctataacgtactacagacgcgagcctagacacaaacgataccacaagatagcactacgaacacgtatgcacaactctgatatatgaagttccagctacacataacaacattctctccttgtcttctttcttc

SEQ ID NO: 2227 - DNA, 378 bp, Oryza sativa
  unsure (1)..(378): unsure at all n locations
ttaccaagctcttacaagttcttaccaaagcaagcggaatggttatgttcaccgacttaaccaagcaccccaatggagtatggatgtatccatgccttggcgaacacttgcttgacggctgcaatcacatctatggagctctgggtacgctgaaatatgtagcccagggatagcaaatgcttaaatcacaaaatgcagagttgaataatgggtcatagtcaagtaccgngctgagcctaggctagaacgtactagagacgcgagcctagacactaacgataccacaagatagcactaggaacaactcatgcacaactctgatatatgaagttcagcttaaacataacacaaaganctcttttctgtctatctgcattc

SEQ ID NO: 2228 - DNA, 130 bp, Oryza sativa
  unsure (1)..(130): unsure at all n locations
aaaggagtctgcaaggagaaacaggaaacaccggagaatcccaagcgctccaacaagggaagaagaaggcgaggacactntgccaccaaactatgcaaggacgaccaaacagcctatacaacaaaaggag

SEQ ID NO: 2229 - DNA, 418 bp, Oryza sativa
  unsure (1)..(418): unsure at all n locations
agcttgactctcttgaggcgggggatgcattatggttcttcttctgcaccatattggcactagaacctccctcaacctttttgccccgggtgtgctttgccctcgccttctcctcaacacccaaagagccaatgagatcagaaacactaaactcttgtttgtgctttatagaagtggcaaagtctgaccaagaacgtggcaacttggcaataatgccacccgccacaaacttgtgtggcaactcacagntgttggtctcaagttccttagccagcatctcgaatctcatgagcttgttctactacagaacgggcactaaccatcttgtagtcatagaactgctccatgacatatagctcactgccggcgtcggaaactccgaactttgcctcaagtgcatcccacatgtccttcccgg

SEQ ID NO: 2230 - DNA, 379 bp, Oryza sativa
gcttgattgaaccacatgaatcaacatatcttttatgagccaatggaaaacgaaaccctacaaacctgtgttacctttgctcttccggaatcgtttaaccactaaatatggtaagggtgtggatgtgtacgtgtagtcaagccaagcttcttgacaaaatcataactcaccaagttgttgcagctaccttcatcaatgatcacacgtgcacgacggttgttgatgacgaaaaaaatctgaaacaaattattggcgtgcaacctgtcatgctgctgtacctgcgtgctgagcacccgctgcacaatgatggttctgtagtccgttgtgtcatcacgaccaaaaaattcgccatcctcatactcaacttcttcttcttctc

SEQ ID NO: 2231 - DNA, 440 bp, Oryza sativa
  unsure (1)..(440): unsure at all n locations
ntagatgaagaagacattggagacaacattgaccaggctgtattctaattgagtgacctanaaaaaacaccatcggctgcacccaaacagactcctccaacttccgctgctccagctcacttttcacgtgtaatcttgttatctggattgtttcttgaaagaatcaatcttgaatagccgattgcttattaatctccgttttgcagaacaagaagactgtcgtgaaaaagaaatcggccccaatggtatttaaaccaattccatcggtaaagctcttttatatctttaagtctgattataaccgatgtcaactaatcactttatccttttcagcctcctccttcttcgnctnctgggcagccagaaacaagcaatcgcacttcattggtcgcaagtagtcacaatgtcgaagaggaagaaccaccagctgctcctgctat

SEQ ID NO: 2232 - DNA, 344 bp, Oryza sativa
  unsure (1)..(344): unsure at all n locations
gcagctagcagctagctagcagcaagaacacacagcgggtaagtaccatatggcgtgcagatcttgggatccgctagtaattttctcaccagcagcatcattaacccatcgactcgaggttaattaatcgcgcgtgacaaattagcactcgaatttatacaggttaattaatcaaatcgtcacgcgcgatgctccctagcttattcccccgaggctggctggctgtagtagtgtcgtcgtcctcccccagatctctgggaaaccaagacaaaaacctgcaaaagcagagaagagcanaaggagtatactactactatggcaaagcccatgtatagtagctcatg

SEQ ID NO: 2233 - DNA, 453 bp, Oryza sativa
  unsure (1)..(453): unsure at all n locations
tacaaaggcgagttctttcaagaatgctctgcaggacagtatcttcgctaattaaagccaacagaactcattatagcacagccaacctgccttgcagcttacgagagtacatgcatcttcacttagagagggtatatattggcattatcctctagtttactaatggttcgttcttcccacgttctaattcacgggatcatcgatcacatagactgggttaccaccatagtataactcacatgggtctcaaacccatctccttcgatgcattgtctatcacattncgtgatagtccctttgtgaacggatctgccaggtttctaactgtatggatgtaatccaacgttataactccggagtatcacagatcataatgatagccggcaccggtttttcaacaataggcagatccattaatagatcacgcagccattctgcctcactatagcagta

SEQ ID NO: 2234 - DNA, 366 bp, Oryza sativa
agcttactaccaaaactaggggcctcctcatacttacagaagaggtttatatatctttcgaccacaatcactaagagattcagaacaacatcagactgacaatgctaacaatgcccagcagcagcccaatacttgccttcaacccagcagctccattcaagccccagacgcgcacatcatcgatcactggcccacagagcgagctgtggtcgtcgcttctcgtgttgtaatacacactgtagaacgctacccgcgtcctctcagctcgtgctgtgaatgtcacattcgcagcctggctcgtgggattacccatgggcgagtagtggaagttctgggcctggtcacctgcgaatgccatgacagcca

SEQ ID NO: 2235 - DNA, 406 bp, Oryza sativa
  unsure (1)..(406): unsure at all n locations
tttaacatccncttattcttactcttgtgctcgagaagaagtgagcatgtgctacaaggagggaaaaacacaaccattaactagccaacttgttgtcacgaacgttgcttctaattgcttgaactacagtggacgtgttgtctaatttgctgagctgcacctgcatcctaaatggcctacaaattaactgtaactgaccaagaaacatggcgacaaaaaaatgtagtgttaccatcatcctaaatgtattgttcatgaagattgtatgcatacgatatatctgtctgactaaatttgattaacggttataacatgatatctttttgatgatttatgagtacatgtctctagttatataatcggatcatacgtatagcagtacttattgtccagagcttctaaatta

SEQ ID NO: 2236 - DNA, 234 bp, Oryza sativa
  unsure (1)..(234): unsure at all n locations
aaangccacncgaacccagagcnagcnggnncnccccgaaaagcgnngaggcgcagcagnngaccggacancnagggngaaagcaccggggcggngcgggccgcgcgagcggnaccaaancgaggcaaacncngaanaccagaaangacccaaaanaaacaggggncaagggcggccagngagacgaagggggnaaagcnncancgncgagagggaaacagcccggagcaccag

SEQ ID NO: 2237 - DNA, 287 bp, Oryza sativa
  unsure (1)..(287): unsure at all n locations
agcttcgcttncttcgtctggacagcctgcatttgtcaagcctgcccctgcatggctgcaggacctgaacaaggctgcacaagatgcaaagggacttcttgacgacatggaatctgaggtgaaagctcctgactcttcaatctctgatgttatgaattggctctcctctgatgacagaaacatgattagaatggtatacgtcattagtaaacttgccagtgcatgttctcaaggcaaatctatagttgacacaccaccccttgatgagagtgccttatgagatgaaa

SEQ ID NO: 2238 - DNA, 299 bp, Oryza sativa
  unsure (1)..(299): unsure at all n locations
ttaactctgtggaaaaagctctatatgctctccgaaatatttggaaaacagaggaatgactttcttttgaagataagcaccttggcaccttttggacattcctggagttgccctttaaaggatgaactacttttacctctctttcttttaaggcatggataaagagaaattctatcatcatggattggcctgttgtatttcaggttgggacttatttatntcttggccctacttaatgtatcacatggctattcttagtcaacatttctattagaaaaaggcccttttgcccttacttt

SEQ ID NO: 2239 - DNA, 363 bp, Oryza sativa
tagccttacgggaaaaaacacaaaatgtcagaaaaaaaatgatgcgttctttaaaggttcacggcatttgatcgaaggtcctcttaatattctacttattgtgatgcattgtaccatagtccatagatctcagaatgcatttactacatgaaatcctttcttctccatttattttcttccagagaggacaaaaattggaccactagaaagccatctcatagtgattagtgagacgaacaaacattatagcgatggagatgctggacgatagtaccatatacatcttgcgaatatgcacctgcccctggcccagaggaagctatttagactaattgacgtgctgtacaagttgagaaagtacaa

SEQ ID NO: 2240 - DNA, 423 bp, Oryza sativa
  unsure (1)..(423): unsure at all n locations
gaccttgaaactcaagctttgggntctcctctacaccctggaccttgttgggtatccattatgcacatctccaaatgtacaaatgctactcaagtagacacctgtaattctcacttttttaacaaatcccttgttgaaagtaggaggagcataataagtgcaccgtacgtcatgtcgttatggtgtgatgataatcttcagtttatggtgacaatagtatgactcattntttacattatggtaaaaagaaaatgataactttgacctttacactaactaacaatagtacatataaccatatctaattatcactacgatttaagcctcgatggatggatcgagttatacactntatactccactgctacactaatagtagtactaatgttttttttttcttgaaacttgctttcatggcacact

SEQ ID NO: 2241 - DNA, 398 bp, Oryza sativa
agcttattattgaattatttttaataaatgtttcacgctgttgcactaagtatatggaattgttttactaagtagatcgaaaatgtttcatcggacgctgtttcaccttatatgaaaacaatgtttcagcgaatagcgaaatgatgtttcaattcactgcaacatttgattcatacatagtgaaacaataagtaaattacgtgaactttcttgtggaaaaaaatgaaatggattcccttaatagagggtttctataatatgtgggtaatttgttacaaaagaattgtttcaattcactgcaacatttgatccatacatagtgaaacattatgagtacattatagaggggttccataatatgtgggtgatttgttgcaacggcgtgtatggtggggaca

SEQ ID NO: 2242 - DNA, 440 bp, Oryza sativa
  unsure (1)..(440): unsure at all n locations
tgtcaatntcatagcaaacacacaaagcttccagcgcaagctctgcttaccatccctctcacttggccgttctcgtgctgnggctcaacatacttggtccattcccacgaggacaggccggctacaaattcctgttcgtggcgatcgacaaattcaccaaatggattgaggcaatacccacggtggaaatcaaggccgacaatgccatcaaattcattaaaaggatatcttgtagatatggattgcctcaccgcatcataacggataacggctcccagttcattagcgccgatttccaagattactgcatcggactggaagtcaagatctgcttcgcctcngtttctcaccctcagagcaacggacagttcgagaggacaaacggcatagtactactagggatcaagacccgtgtctactacatgctcatgtcacatgac

SEQ ID NO: 2243 - DNA, 325 bp, Oryza sativa
  unsure (1)..(325): unsure at all n locations
acctatanaatactcagcctcggctcatcaggcacgacgctacaggcagggatttggtttatgctangtggtggancatcggctacactctcgcggtgccaacttggcctactgcccctctactgcgtggcaagagtggagccgcaattgccggcgggagagggcagccgccatgggtccttcaaataagcagcattcaaccagtgtccacatcccacttcaaaccatgtaatgctcgacggcgcctccctgcacccggcccgtggtcgagagtgaattcccagccaggcggtgccattcctgggcattccgctcaggccccgcc

SEQ ID NO: 2244 - DNA, 377 bp, Oryza sativa
tagcttggtccttgttcgcaacattctcttcatgcgctctttaattgggagataccacaccacctttgctgggcctcccctctatgacttacttccttcaccttcactctatgctcgtttggatcttgatgccccacagatagggcagacatccaaatcagcgtattccttgtaatacaaaatgcagtcgctcggacatgcatgaatttttctgacctgctggcccaacggacataatactagcttcgcttcatatgtcgactgaggtaaattggtcctctctggcaacagatcctttaacagcataaggagttatgtaaaactcttgttcgaccagccattactagccataagctttatgagttcaacacgcatga

SEQ ID NO: 2245 - DNA, 324 bp, Oryza sativa
agattgggagcatttttatgccaagatgcaacataccatggagaatttagagcttataaactctttcgacaatttgtttcttgatgaagaaaccactgccactgggactggatgattgtattggacttggactttattatgaacatttgattaatgctgtgggctgcactctttttttctttctagggttttctcacgaggtgtgagtttttacctaaaaaggtttttaacgaggcagccattgcactacacagctactttattcattgaaatacttgtgtcaagtttttgggtgaaagtttatgattctgggtaatttttgac

SEQ ID NO: 2246 - DNA, 338 bp, Oryza sativa
  unsure (1)..(338): unsure at all n locations
tgatgtgtgctntgtgtaggtttgtgatgactgaattatttttacttgtgatgtgcatgcaggatgtccatttccggnggatggatctcaaggatacgcctgccccgctcgattatcactgatgataaattttcaaaagaagattatcactgatgaaatcttgcggcggcttgtgtcctgctcagctctgcagttgttaccaggaaacacgagttgctgttgatctggtgtatcctctctcggcctccccgccaggcggacgcgcgaccggtgcagcgtctcggcgacaaggttgcgccggaggatttgccacatgggcccgcatctgcagcgcgtga

SEQ ID NO: 2247 - DNA, 387 bp, Oryza sativa
  unsure (1)..(387): unsure at all n locations
agcttatgaatctaaaggttttctggttgatataacttcngctatgtcacagctccatgtggcagngctgctggttgtatcaactgatgccactatgctttgcctaatgggtagatgggcttggaactaatgaacgatattaaactaatgaaggttaaactggctatctagcattaaagaggcgcatcgttctgtggagtatgttagaatgtcaagttttgctgattggaaggaggagatgtactgggaatattgctgacatgtcttacttctgtgcagnctataaatctccgagcacctgatggcggttgcatagctcttgtattgaggactggatttgagactaaccacggaaagttgatgagaactatcttattttcaactgag

SEQ ID NO: 2248 - DNA, 391 bp, Oryza sativa
  unsure (1)..(391): unsure at all n locations
tctcatcggtgaatcgactggtgtaagtaacttgcggtactaataccgaaaggtcctttgacattgacaaatgcccaacttgacagaactgttttacatatataacatcaatgttcaaatccgctnttacaactgcataaacttacttgatgcagccatgcatggaaacaagaaaccggtgatagttgccgcggatcgaattaacctgttccatcccagtcttactgcagcgcttacatcagattcgcggtctcccaattaagcgcgaagcttccgtgctttactcacccaagatcgcgatcgagaggcgcggcttggctcgggtcgctatcggagatccatcgtcgtctacccctcgatgccgtggcgcgaggctcgcccanaagcgttt

SEQ ID NO: 2249 - DNA, 400 bp, Oryza sativa
  unsure (1)..(400): unsure at all n locations
accagctagagtacagcggttcatgggatttttcaaactgaacccttccaatgatagggacatagagttgagcttggttttgtcactccgccaccgtgttgattttcacaagagagtggatgactccaggaggatccttctctggctccgggtagcttctttcatgaatgttggnatgccgtagccgctctgtcggaccggacatgtacgttaattccacccaactagtgatcaaaccatagctcctgatgcctcctaggccaacaagctaggcaacaaacgtgcataccaatggcttaagtatggcctgactcatcaatctccatgcttgaagatacttgttccttcatcagacagcattccgcttgatgctattcacctcactgaataaagtttaatg

SEQ ID NO: 2250 - DNA, 394 bp, Oryza sativa
  unsure (1)..(394): unsure at all n locations
agcttccaaacagtcgtaaatactgggtcattattatatagttaaatggttgcttatgtatgttggtgatctttttgtgttgggagtaatggcagatcgttgcatatacctcgtatgtctgaacatcattcaggagacgaccacatgtgctcatcagtctgaacaactcgttgtactctgaatctctgacgacagattcagggatctttggtccgacaagatacaaagctgggagcacaattgggcccaatgcaaatgtcatggccgcattttccatgtactcctctggtgtaggcacgtagttgctgatcctccattctacctcggtcatcatggacctaagcanatctagccactgcagaagaaaattgaattgctctaacacccaaaactg

SEQ ID NO: 2251 - DNA, 424 bp, Oryza sativa
  unsure (1)..(424): unsure at all n locations
tgtgcctgtggtgtgctttcctgaataggacgctctggttgtattttttcaatatatatagattcaacacctgcctgcaatctagccttccttgaactataccttgcagtggttttatcaagtgtctcattgcatgattcccccctatgaattgaatggttaacaggctcctttcgtgccaatgtgtgttggactgctgctggggagtcatntctgaaagaactgaatgtctcctcttttggaactgaacgaatggagcattgtgctggtatctgctctgaacgaattggatggtgtctttctatttgcgactgctgcaccaaaactaattatatatatcataagattagattcatacatattacagctagaaaagaacattgatcgggagctcgtgatcatatatatttttgcaaaatacaat

SEQ ID NO: 2252 - DNA, 405 bp, Oryza sativa
agcttatcgtggcgacacgataataatgattatcatcgtgggtgaaattggggaaattcaaaatttccaaaatgagattaaaaatccaaaaattaatggatgtagttcttgaattttagcgtcagatgataaagatttttttaaaaaaagaatcatgcataaaccacgaaaccacaaaagttttgaattcaaatgttcgaacatgaatttcatgcggttagcgtgagggtgcgataacctctcgccaaacggttttgcaaacctgctcctctcctctgttctctgttttcaggctgaagtcgatttgttcagagaatcaaactgccgcgaaatgggaaacaatgcatgcctgatctgcgtgcttctgcacagtctgatactgccatcaaaatgtgtaattactct

SEQ ID NO: 2253 - DNA, 439 bp, Oryza sativa
gcttcttatattcacacgttcaatgaaactcttggttcttctgtggcggctgaagtaacgcacaagttaaaaacaaatgagaactatttcaccatcgggagctctcatgctattgattcttcgacgttgctgaagacaagatttatcaatggtggcaaagttggagttctctgtcagcatgagtggaggcccaagtctactgtaagtatttctgccgagtatgatcccaaagtggtgagttcgccttcaagattctgcgtggccatagccttgaagccttgattatcacctcctgtacaagtgttagatacttcttgcccgtgtgcatcctagccatacttacgaaagctccaccattttatgccccgtttgtaagtgtcttggccgaagaaacgtttgtgtcttggagttggtcttatttttgtggaaccctaccacc

SEQ ID NO: 2254 - DNA, 413 bp, Oryza sativa
  unsure (1)..(413): unsure at all n locations
tggaggtctcccgacgtggctgatccccacgggccgggtgatctctgtttagtaatgtcgngtgggtaaagtgtaccccctctgcagaggttaactaactgttcgaacagccgtgcccatggtcatgggcggatgtgaggtgattcctagcgtagttatgtttgactactgcttgtgaaattgctgttgtgaaaaggaatttgatgtttgaaaaatctgtanctgactggatcagctatgcccgggtggccgtttgaaagtggttggcccaagtggccgtttgaaaagttgttggcccgggtggccgatgaaaagcttgtgtgcgggtgccaacctttgttcaaaatctatagacttggtcatcgcacatactccgttcggacgagacgcactgtcttatccgtggcggttga

SEQ ID NO: 2255 - DNA, 444 bp, Oryza sativa
  unsure (1)..(444): unsure at all n locations
agcttaatcagcagtgagatgtaaaatgtgttctatattttggtgcttganntattaactacaaaagttgtacacgtagagcacacttccattagtacaataagaaggggtaccttgcctaatgtccatgcaagcaatttatcgagcatctgatggtcacgagggcagtctggatgggggagagaggagtgcgtgatgccgatgagaggtaagaagaggtgatcgcgtcagctttaagccttttaagccttttaaggccctgtttctttcttctagcttggaattattataatccagattattaagagtaagctgaaagaaacagacaacttattgaagtagcttattataatctggagcccagcttattataatctgataagctcatttaagtgagctttttctagattatgggggtgaaaactacccaccatgctaccccac

SEQ ID NO: 2256 - DNA, 313 bp, Oryza sativa
gagccgtcaaactcgattgttgtctctgaccaccaaagaatctggggcatatccggctggacagcattgattctccggtcagacagcttttgcttacatctggagattcataagccacgggtccgacaaagatgtgggagatgtccttgcgatggtcttgaaaaccagtcgagcattatccttcgacattcttcttctttgacgtgcattgatctccgtcagcgttcttgcgtgccttcttggcgtattggtctgccaactatttgaaacaaaccaatctatgccgcgtgaccggaattatgatgatgcggac

SEQ ID NO: 2257 - DNA, 436 bp, Oryza sativa
  unsure (1)..(436): unsure at all n locations
agcttatgacagtacttatcaaggcaaatctactcatatcttttttttacttttaaaagtttgaccaaatcttgtcctaaacatcaaacgtttatgcccggagggagtgccaattaaataataaactttaaacatagcattgcaaaatcacctgcagcagccatgcctgaagcaacacctagtgcttctagtaagccaatcaacatgaagcgtgattttggaagtgctagcatttctttagtgacaatgccagcatgatatcttataaaaagaatagagaaatatactataacatacctgcaaaaacagataagcatatgagcatctgcacaactattgtgaagagatcatctatctattacttcctccgtttcatattacaagtccgtntaactttttttctagtccaactcttgtaagtttcaccaaatttata

SEQ ID NO: 2258 - DNA, 358 bp, Oryza sativa
  unsure (1)..(358): unsure at all n locations
tgacaccatatgtactcgttagcatgagccaataagcgcaatgtgttctatcgacatctgntacgtcggattgatatgattccctactggaccaaaatatgatgtggtcgaacatttagcaagagaaactactaaaccagaacatatggtgcacgcatgagcgcatgcatggctctgangatgtccggccataatgttcaagtgtgcactgtccttatcgcagatgagcctacaactcgatctacagccatgctgatatcgttgatcggaacatcgaaactacactttacctacgcgtacaacaattgatggccaccaacttcttcagagctctaatcaacgtgacgatgttcggatg

SEQ ID NO: 2259 - DNA, 330 bp, Oryza sativa
agcttaggtcggcctactgctgcgcatcttttctattcggcatggagctcctgatgaacatcgctgacccatacatcaccgctggattcctcgcgccagccatcgcctcaagctggtgctgttgcgccgtgagccacgacggcgtgaaccgctgctgcttcctcttgaggcacaactgaactgccgccgtcctcgccaccaccactgtggcgctgggctcctcctctaaaacttatgtgtgcacgcacaaaagagagaggtgtgagaggggaaagagatatggaggagagagatctgataggtggcgcccatcgtgtttctaataaaatt

SEQ ID NO: 2260 - DNA, 412 bp, Oryza sativa
  unsure (1)..(412): unsure at all n locations
agctngacgttacggaccactgggtcttttctatgtggtaccgccccgggtggaccactcggtcgggatgatccgagcggtcaaacttgattgctgtttctaaacatcgaagatattggggcttgtcgggctgaacagcgttaatctccctctcagtcaacttttgctttcttttagattcataagccaaggggccgccaaagatatggttaagctctttgcggtggtcttgaaaacctgccggggggtcgccatcttccttcttcttcgacgtgctttgttcttcgtcggagttcttccatgtagtcttgggtattgttctgcgaactgcttgtagacgaaacaatctttggccgcgtgattggagttaagatgatgcgggcattgtgagtttatgatcttatcgaacgta

SEQ ID NO: 2261 - DNA, 466 bp, Oryza sativa
  unsure (1)..(466): unsure at all n locations
tgaatcaacaatcanaatttatgatttcatacgaattataatgcaacatcttaacaagcacataggttgaagaataaacactaaacacatatacctattgcatttatcactctttctcaaataaactttagcacaaaataaccaagagatttttttttaattttttcttttcttgagtctttttctcatatttttctcttattttattccgggtacgtccctgtcgtcaagactgtttccaaggattcggtattcattntttcatattttttattctctttttcacaatgagcaattaaagctatttgaggaataacaattcaataaagcatatatatagaacatttatagatcaaaccatatgctagcagcaacattgcatantttcttaattcaagtgtagaatttaaatgtcatgcatcactcttctttaaagcaaaatctaatatcatgaatagactagaat

SEQ ID NO: 2262 - DNA, 380 bp, Oryza sativa
agcttattatagcatgtcggagaatggtatcttttgcatgatgatgatcaccactgctctattgatgactggatgatacaatttgctcggctattcaagaaccatcttggtgttgattccgactcgtatttggatctccacgaccttggcatgagattgtactatgaagctatggaagacactgttgcaagtgaagaagcacaggaaatatttcaagttgcagagctaaaattccaggaaatggcagcattggctctgttcaactggggcaatgttcacatggcttctgcgagaaaaaggccttccttgtcagacgatgcttcaatggaatgtatacttgagcacttaacggtgcttatgaatgggcttgtgcggaatat

SEQ ID NO: 2263 - DNA, 388 bp, Oryza sativa
  unsure (1)..(388): unsure at all n locations
ntaactcacttctncaagaatatgagcacttgagtgccatatcgtgtcacgcncttcattgctatcaaacttgaacaactttaattcacaatcaccttccagtggcctcgtcatatcccacagtgttccattcacttgagctatcaagcagctatatgctaatccacttgatatctccttagcaatatccataggggttgagatccatttctttccgtccttgactgcaccatctggcaaagatatcctgaagaaagttgcacggaaaaaaatcacatgagaagaattaattgccattgccattgtgctgcacactgcaggtcacagtgtgccacatttgtattgtaactagcaaaggtacattgagaaaaggaaccttagcaccata

SEQ ID NO: 2264 - DNA, 435 bp, Oryza sativa
ttgagtcacctgcggcatgcaagcttcaggagacgataagattggagtgtgttatattctgccgccccacatattaatgggcccaaactaatgtgggctttgggcttctagctggagcttattgggccgccacattattaccaagatttttttttcatttttaattttttttaatatttacaaaaatattatacccgtaaaaatatttaaaaaatagaccctatcacccaagtgaagggcggcaaggtgatctggccgccctctgggagggctgcagagtctatttctgtaaatattttctctagtataatattactgtaaatattttttaaaaaattaaaaataaataaaatctattatcaaccattttgtattcttttgcagaatatataattcttcggatttgatccagtttgtgattacttgcgatttggc

SEQ ID NO: 2265 - DNA, 466 bp, Oryza sativa
  unsure (1)..(466): unsure at all n locations
attacggacctataaaactcagcctgcaacggatccgttctgtatcctagctagctccttttgtatctgtgcagctggccaggtgttcctttctgctacaccacatttgccaatatatgttaacatactccctccgtcccaaaaaaaaggcaaaccatagattttcgtgtccaactttaactgtccgtcttatatgagaattttttataattcgtattttcattgttgctagatgataaaacatgattaatattntatacgtgactngtctttttaatatttttcgtaattntttcaaataagacgaacggtcaaacattggacacgaaaaccagggtttctttttttgagacggagggagtacacaaggagccggatctacctttcaatatgtcagcgagtgaattntgacccacagaattaacgtcacgacagctatacagctcacaacgtctacaatatttac

SEQ ID NO: 2266 - DNA, 309 bp, Oryza sativa
agtactaagctactactagttaattttggtgaaaactatgctactttgttactatataacgaagtatgtgtatcaaactaaactgagatgttggtaattaattatcgtattttgtaatgcttcatcttctttagtttcttcatctaagatcaacaagctagctagtcttagtcaacccatactacaacatatatctgaagagaaaaagaaaatgatatataattaaccaccggagctaattaaattgtggtggttgtaagaaaatagtgctgtatacttgtttgcagtgcaagcttgaaactttgtact

SEQ ID NO: 2267 - DNA, 365 bp, Oryza sativa
tgccagacatgcacatgaagattgactctcattgcttatattatatgtcagcacaaaccacacatatttgccagtgattttcttcttctgttacaacatttcaaagaagtatagtaactgtcgctgatgtgtgcttcctttcttggcctgaattgagaaggtgcatggctgagtatcttcctaacttggaagaaaactttataatccaggtactatagctctaagacttgcatgtaactgttggtcttgactgcctgctcttattgttgatagtattactactttacatccgagcgcagttgtcatgttaatggaatgacttatcattctttgaaaaatagtgtgcggtaaatatatgaggattg

SEQ ID NO: 2268 - DNA, 403 bp, Oryza sativa
agcttgcacggctttatcctaatgatttctcttgcacagagatgaaccatcttccatcagcattgaagctcttcctcactgagatgcgtatagatgaaaggtttagaaaagtaaaaaatcttgctaatctttccattatgattgttgaaacaaaattgcacaatagacatgagattatttccaagcttctcaaattggttctggtacttccagtagcaacagctagtgttgaaagaatattttctgccatgaattatgtgaagaataaattgagaaacaggatgggggatcaatacttgaatgattgctcggtcacatttattgagcgtgagatgtttttgaaagtcaacgagtgtgatattataaaccgctttcaagccatgaaggaacgcagaattaaagc

SEQ ID NO: 2269 - DNA, 369 bp, Oryza sativa
tattggtaaatatattgttccaacaatatgacgcacgcacacaccaattaattgaggaggcgcatgttaatataactaacctctcttaaataaacccaagctttagctaacgacggttcaggtcaaaataaataaaaacccaggtggtacctgtactttggcacttttaaattactacgcctttaaccatgacgcgcaatggccaatgctttggtattatggaactggagatagctttcgtttttgtttgtgagggagagaggaactggagatagcttttgcgctgcatatgctttaccgagcaatgtgaccctactttgtgtcgactttggcatgtagctttatctttttcctctacacaacaacaca

SEQ ID NO: 2270 - DNA, 450 bp, Oryza sativa
  unsure (1)..(450): unsure at all n locations
ctaagcacctgggctgcagcttaacagataatttcaactgagcctttaactgagcctaagtgccagttgatcaatattccattgtaatataatgggcaggtcatttttttcctcgcaaaaagaaaaatgggcagttcattnttacaatcaattaagcttatatattcatcattgatttgcaatatattgaaaatcacacatggcgggaattttaaatgtgctgattaattactggtgtctcagttgtgggtagtaattaaaacatggaatctatacatagcagtagattattgtcactgctctggcaacaatcttaagtgtactattaatgactagtgcatatcaccagcaatacagaggtgaagaaaactgaagaattaatggcatgcaaggatagtatttcaattaatcatcaatntatttcactgccaaaaatacttggtcactact

SEQ ID NO: 2271 - DNA, 470 bp, Oryza sativa
  unsure (1)..(470): unsure at all n locations
cctataaaactcagcttctggtctaaataaggacttttctatattattgagaaattatccactccgatattcggcaatatcaaattctgatatgatactaaattttggtagcattggataagttggtttagagctaaggctctgttcgctatccggcacgtaaaacgatgttcgcattaacgtgtgattaattaaatattagctatcttctaaagaatagattaatatgactttttaaacaactnttgtatagaaactttttgaaaaaaacacaccgtttagtagtttgaaaagcgtacgcacganaatgagggtggggagttggaaaccctgtggaacgaacgtagccttaaatttctgtggagaatttggggcactcctaccgatcggttgctcgatcgaatttgagaaanatcgggcgctgacatcagcgcccgatttacgtgccanaactactttaaactgatttc

SEQ ID NO: 2272 - DNA, 437 bp, Oryza sativa
  unsure (1)..(437): unsure at all n locations
gatctctaagncacctgcggctgcagcttcatttggagccatcggtgaacttcaattgttctttatctatggctgattgaacctgtcgtcgaaacacattgcaatcattagtggaatgagaatgagaatcatgccatttacaataagctcgacgttttaattcttcttgagatggtatgatatggcctttaagtaatctaatttgttttttttataaaagataatcaaagatcatatcacacttggccacatcaaaactatatttaacctcactttgccgatctttgtgaggagtcggcattatgttagaacagacacaaggcttgtttttgttagttcatgaccattcagcaacatacatatcatgatcaccctcatcttcactatcactagcctcagggtaatcaatcacattaacattaggctttttctcataa

SEQ ID NO: 2273 - DNA, 376 bp, Oryza sativa
tgcgcatcttcagcatatttacaggcgagccattatagccttgcatatgtcaatcggatggatggggctatgccactcccgatgccacctaattctacacaagtcatccaaacatggaagcagagaacggctaaccaaatgtgcatcatatatatatttcaatgttaattagagaaactatctaggagtgatagaagcttgagcttcccaatttaattctggcgtttggtttgtcttttgttttaaaaaaactaagcttctgtctattatatcgattccctatgtacatggattggcaacaacgacatggtatggttgattttatacaccctactacagaaacggtttttacatgcgggtgatagagattttgcat

SEQ ID NO: 2274 - DNA, 359 bp, Oryza sativa
  unsure (1)..(359): unsure at all n locations
agcttcattgcaccgcaatcacaataattcctttcttctcctcangctacatgctataaacaaactactcactagcagcactagtgaaacagtgatatatatatgtggagcttacgagaacaaggacggcaaaaggctcgtctctcatcagtggttaattatcaacactgtacatggaggaggataaagttcctttggattgaaggaattctattaaaaatttcaaggattttattccgagcccctatgagtaaaacgagtagaaaaactaaggaacatgaaaaaggtaataatttttatatgaatacaactgtcaaaacagagaattgtataacatatgaaagctgtgttactagccc

SEQ ID NO: 2275 - DNA, 306 bp, Oryza sativa
  unsure (1)..(306): unsure at all n locations
agcttcttccanagcatacgggctgtctagatgttatattatctatctctacacagcatggatcttatatgatatcgtatgatgaagtaccacatgagtggatatataggaaaggaatccaaatctgccgaatcgctcatgttatgatcttctacatcctangtctccgcgttccgtcatctggcttatgttcttcatgtagcattcacatcgaatgactctatgaaattacgtcgatacttctacatattatgggtaacgtaggagacatccctattttccccgggggcttaataaccactgtta

SEQ ID NO: 2276 - DNA, 446 bp, Oryza sativa
ctcaagccttattctcgtgcttatcctagctggtggcttagggtacgcttggcttttatgagccttggaatgggcttaactgaatattcagacaaaacaaaaaaagagggaacagattctcttatgacaggtatgagtttgattgagtttcccctacttgaccaaacagttcagtccgtattcaagtcactaacgacgtttcaattggcaagactctcttatttaaggccccttctatatggaaccagtgtgttgtgtcattgaatttgcttcttaataggctcacgaatcgactttgatcgttatggattggtaccaagatcaagttctaggcaagtcgacttaattttaacagccggtacagaacaatgaaaacggctctctctatagtgagatatatgagcaaagcctgaccaaaaactcattgtatgggagcttgactatta

SEQ ID NO: 2277 - DNA, 392 bp, Oryza sativa
atccttaagtcacctgcggcatgcaagcttgagagaaaaaacatttctgcatttattacatcgttcgagcgcatggattcaacctctgcttttgtgcatatcctattcccatttaacactgatgtcagctgaacaattctatgttagaaagaagcatttccaaagaaagctatcaaatagagcagggtttgctcttatcaagttgagaacaatgactatagaatctacaaataaaatctgtaggctgcaatttcggccaactttcctgccaaacttaaaatgtaaacattatggttttccccctccataagattagaactaaggcacataaaataaatacagttttacaatcttaattaatactggtagcagagcacacaatggagaaatat

SEQ ID NO: 2278 - DNA, 429 bp, Oryza sativa
agcttctaactgtaatcctcaggaatactgttcatttgaccacaacttcaaagtggggatacggtatgaatgaacaccaacgataaaaactgtgatgtacccttttactctcatccatatcagccttgttgccaaccaaaattttgttgacattatcagaggcatgttgctcaatattccgaatccagctccgaatgtctgtattgtcaaataaaacagcagtgacaaaatagctcaaaatggaataattaaggaaggtatatatgtaaggagacagtactgttgaaagatgactcgtcggtgacatcataaacaagcacgatacccatggctccacggtagtacgctgaggtaaaatgagatttacttgatcaaaagggtctcatttaacttcacacgggtagtatgctgaatggaaccaataatata

SEQ ID NO: 2279 - DNA, 384 bp, Oryza sativa
  unsure (1)..(384): unsure at all n locations
ctcaagcttngacattagcaaaccaacttattccttctgcagctagagttgttttatatacccacatggcacttgcacaatgaaaaataattgcagatgaaccaccgtttttgtgtcagttctctatggagagtcttcctgtcttgatcaacgtccgttgatanccatcacacgaagtcataataatgattgttatctgaaatatggaaatgagtatgttgtttcgtgcaggcagacaactctgatgcaaattcatacatttgctatggatgtgcctcaattgtaaaatacatctgttatttcacttaacctgaaatgcttcacgagtcgctcaaggatgccaacataccaaggcacgattctatttcttacatgatagccata

SEQ ID NO: 2280 - DNA, 379 bp, Oryza sativa
  unsure (1)..(379): unsure at all n locations
caagcnngcagnaaggcgggcggcggcgtattgtttttagcgtcgannccccccgaagcgccgggagaagaccatacccacagcgcgcgcgcacttnccgtaataatagtaaggacagacgcagacgcacggtgtggttgttcactcactcccgagaaaaggatcccaagacgatagacacgggaacacaaaccccgcgcgaccaagagaaagtagaaaagtcacactcccgctgacagggggagtcaaaaaacagggagctcacagaaaccccacggcagcccaaacaaaccacggcaggtcgccgacccacagagtgctgcggactaagcaaacaccaacaccacacggtgtttcgaggaatgcaaccatcacacaa

SEQ ID NO: 2281 - DNA, 343 bp, Oryza sativa
catcgctcgattcacacagtacagccaccacggatctcgtgttctttggaggggagatgcaataggatatcgtcgcctgcgcggagaatattgcatacgtcaagcggcgttcacttatcaataggccgcgatggggagaggggataagcctcattttttcttcccaaagatactatgcataacaaggggataacgggcccttcttagcactcacatattgtcggatcagctccaccatgctcattaatcatcaataattgcatgaacaatcgaccaatctacctaataatggcgttactccagtaggatgttgttgacccaaccctttggcgcttcaccccgt

SEQ ID NO: 2282 - DNA, 342 bp, Oryza sativa
  unsure (1)..(342): unsure at all n locations
ctgaagctgagggtgagcagttccaaaaggaattatgtgcattancggaggaaaaagaggtatctgctaatacatttgatgatgacaaagaacaaatgaagatggaatcacagtatcttaaaaggaggttggaggaaatccatgacaacaaagaattcatgaagactgaaaataataagcttcagtccgaggctttgattgtagagaacaaacaaatcatgtttgaagcacacattaacacactgaagatggaattgggggcagtgacacacgcaaacgaggtggctgcaaacgcattcaatgctcacaatgaagaaatcacccagaaactagaggatctta

SEQ ID NO: 2283 - DNA, 305 bp, Oryza sativa
  unsure (1)..(305): unsure at all n locations
gcgagggtgagnccgcgctgaagaggcgcgaagattacattctcgcacaggtgcacggaaccaaagaacattctggccggacaaagggaattggcagccaagtgcgtccgaagcatatactcccgcagaacagcttccaatacacgaaacagaaagtcctccaggaagagagggacgctcgttcgaaggccgaacttaaggttgatgccattgaagaacaagaagctagcatgaacgctagggtggaagaaaggggtaacaaggtcctcgccgacaagaatataccccgaggcacaacacctgct

SEQ ID NO: 2284 - DNA, 381 bp, Oryza sativa
agctcgagctatgtctctgctcacataatatttatatatcctctgcttccttcagagctttgagctcaagctctaatggaaaaccaggcttgtctctagcagaaattgtatttcttttctcaatttctctttatgttggttcctctttcttttgtctgaaattgtacctcacggcacacctgtgatcaaagatgtatttcaaagatgatagttttctttacgcacaagatagaaaatctaccttatatccattggattaattaattgtgagtcacattgtagcatagccaaatggcgagaaaaacaaccgagaactatctataggacagaatctcttcatattcactaaaatttcatgtagaattaacacttggtgtacta

SEQ ID NO: 2285 - DNA, 379 bp, Oryza sativa
cactcaagactaaagcttagcagggtgagatccttatgtgcatatctggatctggattctgtattacatacatatacgaggagatatgtctgatatgaatattagacacgagaacacatcacgtattcaaaaatatctataaatatggatctctcctcttatcaatcatgatttccccgagcagatgactcattacgtgtaaacactctggccgactaaatatactcaccaaacactgggagtcggctaagcacttcctaaacatgcatatgagtgtcatgaagtctgcataatggaacaaagttcaccgatcggaggctaccactccggtactttgcgattattaagagccgaaaacaattatcttatctctatgctt

SEQ ID NO: 2286 - DNA, 101 bp, Oryza sativa
caattctcggttttcaatctccattgtagcttatcttgagtcctgtggctgcatcctggagttatgaagtagactcaacacatatgcctcctcgtctggac

SEQ ID NO: 2287 - DNA, 437 bp, Oryza sativa
agctctggcactaactaatggtgttttgtttcttatgacgaggacatgaaccttttacttatggctgacgttgttttattttgtaaagcgtgcttaggcaagctattgttgaccatgcacgactaaaccacgattagacgagctaattattttggcgacgacaatgcgtacgtacggcgtgcatgggttgtgagattactcgtgattcaatcttgtcttgcatgagaagcccatggtgatctttgtacgtcacgaggttggacagaaatgatgggtcacatccacgagagcctaaatgcacgtgctttattatagatataaaaaacatgtactcccttcgtcccatattataaaggattatatgtggatgtgacatatcctaacactattaatctgagcggagtctttccagattcatacgactagatgtgttcaat

SEQ ID NO: 2288 - DNA, 339 bp, Oryza sativa
ctatgcactttcctgaaagtctgaactgctcaaaaggaatctcatggatactttacagggcttcaaagatgtaaattaattaacaaaacatgtctagagaaatctaacaactaacaacaacacttctcggagacgacagctgggcatcgtgccacgtaggatgcatacatacatgttcatcgatcgatcgatcgatggaggagatggccttgggcgaaggtgaagaggaaactacatgttggagaaattcaagctgcaatggattaagacagaagtttctactagcaggagttataccagctggtaagagctaggagtagccgcaaaatgatgtcacta

SEQ ID NO: 2289 - DNA, 457 bp, Oryza sativa
  unsure (1)..(457): unsure at all n locations
tagcaagtgtgagttctgtgtgtccgaagtcaaattcttgtggcacgttatatttgctaaaggagttgctgtggaccccgaaacagtgaccgccgtcactgaatggaagcaacccaagacagtcacccaaatccgcagtttcttgggtttggcaggatattaccggagattcattgagaacttcttcaaaatcgctcgacccatgacacagttgttgaagaaagaagagaaatttgtgtggagcccgcagtgcgagaaggcgttccaaactctcaaggaaaagctggtttcctcgccagtgttaatcttgccggatactcgcaaggacttcatggtgtattgtgatgcttctcgccaatgattggggtgcgtgctcattcangactgtcatttggtagcctatgcctcacgcccgctacgtcctcatgaaggcaactactctacacatgacttggag

SEQ ID NO: 2290 - DNA, 272 bp, Oryza sativa
  unsure (1)..(272): unsure at all n locations
agcttggttagtcacgatggctcgcgaaatgttttttttgctgcgcttcaccttggatgaaccgcgatggctctaatttttcaaaggattgtcatgcatgcctgtctttcgtgctacagaggcccatgcgaagctaccatggcaacgaatatgattgtgactcaccggagagggagaaatcaaagatggagctcagcgaccggagttggacaaagatgatgccgatctctaatatccctgcgcgactggatagggtacttgngggtcaatat

SEQ ID NO: 2291 - DNA, 403 bp, Oryza sativa
  unsure (1)..(403): unsure at all n locations
ggcgtactgaaaattctgaattaattgtcttggatgtgtaattagcgctaccgaggtggaggctttgttcgagctgttcaagagcattaatggttctgtgatcgacgatgggcttatcaataaagtgatcatctaactgtagcttgttgtggaattacaaaattaaaccttgccacattcgaatgtatatctccacatagaaaattaaagcttgtggtggatgcctctntctgtgaatcgtcttgctatgcgggcaattctattcattcatatttgaagtgagcatggatctgcgtattatgtgcttgccctctaaattgattaactttctgtgtaccaatatatgaatctttttcctcaaagttaataggagatcttgttcccatataaacatctgctggac

SEQ ID NO: 2292 - DNA, 397 bp, Oryza sativa
tatcataccatctggctgtggatatggctctcttatgtgagatgatgatcgtgccaaggagctcaatggctgctggctacttgccatctgcatctgcgagttgaatataacatccgttatccgtatgtcacacaatcaacaaataccttgggtaccacaagctctgaagaaaatccgactataccatctggtgcgctaccattccaagcattatttgtgactgcattataagaatggagaaatatgacaccattaggcatttaatctcttattccaattctagatttagaactgaacgatgtgcaaattatgcacgccataatctgaaaataaccacgactaacaagtcttcttatggttaaaatgaacctattacaaaatcgctcataacaaccat

SEQ ID NO: 2293 - DNA, 453 bp, Oryza sativa
agcttctgtaaatcattgcctgcatcttttggcagattaactgcaggtatatttatgtccaaatctgtttcatttcggtcgcagaccatcttgtatagctctgcaagtggaagcaggagtgcaggacacatgttaaccacatttatgagtgctcacctatattgacaaacatgtggggactggtgcaatacatgtgtccaactttgaaaaaaatctgataacacagtcaaaagtaagtatctaacttatcaaacaatatgaagtgatgaaccactgcaactaaatttgggtgtgatgcatagacattgacctttcaatgataaaacaacctatgaagtatcttgagcacgcacgcacattaactatttgcacccatggcaagaatatatgttgatctgcctatgtagggtaaagagactaatggttgtaatctacaatagatagtacatgatc

SEQ ID NO: 2294 - DNA, 389 bp, Oryza sativa
  unsure (1)..(389): unsure at all n locations
tcccgctcaccgacttgccctgcttccgcctgatctgctgctccttgatcgagttccacagcttcgtgatggcgtccctctgctgcgtcgtgaaccggttcatgttgtcgtangcgtgcttcgcaaagatgtcaatggcggtctgtgtcctgataacataaaaaaggagaattagaacacaaaattgttgaatatgtngtgataacataaaacaaaggagaatctagaataggaaattgtagtgtatgtgccgctaacagcataaccacatgatgttctatctcaagagaactcaccacggaatcctatagcgccgagcagctatttctagacatttcaggagggcttctcgttgtgacttcagaaatctctttgattcatcctcatct

SEQ ID NO: 2295 - DNA, 402 bp, Oryza sativa
  unsure (1)..(402): unsure at all n locations
gaaaccntttttttttttnttttctaagaaccanggctaagaagactatttctaaaagttcacttgccccgaaccctcgctgntaatcattttcattttgattgttaaatctcgatattttgtcatttatgttaaacctatatacagtttgctgttttaggctgctctgattgcattttggaatagattggattgcagcgcaaaggtggagtgtgtggccaatctatttcatctgtgtagaattctgacaaatttatttcgaacagccccaacttgtgtattagctgcacattatatgaatgcaacgcgaaagctacttgcatagcagaataaggacacattcccaaattaaatcattttaaatttctcaatggtgctgatatggactagatttgttccttc

SEQ ID NO: 2296 - DNA, 428 bp, Oryza sativa
  unsure (1)..(428): unsure at all n locations
tatcattaagcatggcaatctgaagaagctcagtctatggggctgctttttttagatgtaagtgttttggaatttgcacgctttgatttattgaaataatcattcatatggtttactaatttcacatatggcaggctctatatctaaattgtccagagctgaatgatctaaacctcaactcctgtacaaatctaaatccaggtcttatggcctttccccttttcttcatgttgttgagtatcgtgatagtaaccatcgttattaaccatctaaatattttgcgcagaacgggtgcttcttcactgtccacaattaaagaatgtgcatgcatctgngtgtcatgatatgttgattggagcaatcagaaaccaggtaaagtttacgagaccccttctcatgcccatgtgaagtttccttttggatagaac

SEQ ID NO: 2297 - DNA, 297 bp, Oryza sativa
  unsure (1)..(297): unsure at all n locations
ggatcttaagcaccgagctgcacttcaatatactgccctgcttgttttgtctgntcctctctatcgactctctcactcctgcacatcacaggcaggcaggcaggcacaagctgtgtccccaacacaacacaagactactactcccaaatgcccaatttcattctccttgatcccacccagccactcaattccagatccgaatcccacctctccgtctcattctacggcgccggccaaaaatgctgccctcctccttctttacgcgttggggggagctagagctctaactagctagct

SEQ ID NO: 2298 - DNA, 381 bp, Oryza sativa
ctcagctgaacctcagggtttcgaagttatcatgtcacctataatacatagagaactgaattgaatatactgtcagcattcaataaccaccaattggactgatctgataaaaaagatctgatctaaccatatcacttgttgtgccaacagcccatgtcatgtctaatgagcataaagcaagtgatgatacatccgaatcttctccatccatatttacaccaaccacctgtggcaaatagtaacaacttgcatgagctgacatgttagttatttgtcaacagggaacaacacaagcaatagcacagcacaactgaccttttcatcccagacatacattggcgtcagactcgaaagggttgataccatattctcacagaacta

SEQ ID NO: 2299 - DNA, 293 bp, Oryza sativa
  unsure (1)..(293): unsure at all n locations
actcctcggtgtctggagatacgcttcttaaggcgatgnggagacatgcaccctactctagcttgctcatgtgtgctttcacatactaggaatatatgatagcgaggcgacctttttcaaatatgagaaacacgttcttactgatgcgcatacctatgtgccatgagtaacacctcgatcaacatcaacggttgatatgatgcgcacctagtgataccatgggatctggcctatccggctggacacaccttagatgtataatccataatgatagagctttgtttgatgattga

SEQ ID NO: 2300 - DNA, 420 bp, Oryza sativa
tgagtggatacgctgataatgtattctactcatacctaacgatcatttcgtgacctatggattgctggaaaacttatttatatgaggggacttacttgtccagaattgagaacaatatgatgagaccagctggtgtctgcaccactgttctgctacctatacgtgtcccagttagcactcgagtatttatactacttgcaagaagagactggatgttcaaatgatactacatgattctatagagaatggagctagactaatatgaacatgagatccattccccacgaggacccattctaagcttacctgtacagaagaccatttcagcccaatagcccatcacaaaatgcaatgcctacagaaacgaatatattgcttcagtgactcgattgcaatataagacaactggacatgtgaaac

SEQ ID NO: 2301 - DNA, 371 bp, Oryza sativa
  unsure (1)..(371): unsure at all n locations
agcttgaatcatagtgggaaggaccatattttattttgcgcaagtctatgacgggatcttttcgcctagcgacactcgaaggcgaggagttcgaccattcctggaacgccgcctccctcaagcgcttctatgtctaaattgggtggcacccaaatcgccaacttgtaaaaatgtacatactgtcatgtaagcctttcggcactatgtaagactttccgcaagaaaaaaaattgagaacaagaagaaagagagaataagaaaacaactggatgtagggctattatccaccatggaggcccgaaccagtataaaatctctgtgtcctncgccttcttcttactcttcgtgtgagtgataatttatggaaaaac

SEQ ID NO: 2302 - DNA, 288 bp, Oryza sativa
  unsure (1)..(288): unsure at all n locations
tgaagactaagagtgcatacgcttgtaacgcagtacgtgtggagtactcgcnactgcgcgcttggtaaggtggtgattcctatattattcatggtgggcctaagacgtaattatatgtaaacattctagattctcttactggtggagaaaccctttgtagccccggttcgtaacccctctctattcccggtgttctaactgggactaccaatccgggactaaagatcgctatctttagtctcgggtgaaataacccggactanagatcgttctttagtcccgggtatt

SEQ ID NO: 2303 - DNA, 349 bp, Oryza sativa
  unsure (1)..(349): unsure at all n locations
gtttgatctgcatatgcactcggcagctggtcagtggcagcagtcgtagtccgcgatctaacgatgttgcggtctccagcgagtcttaattatggggaaaaaatgatgagatcaccagatcgatcagacagctgctgcttaatcgttcattaaaataccaatcattgtcgaacaagaacaggctntagtattgcacaattagctggattctgaacttgatgttgagagggaaagaacacaatttgattaataagggctgagcttattccaaggaaggtatatatgagaatcgcacgttggaccggctgtacgttgaacgcttgaaacgcgttgagccgctcacctatat

SEQ ID NO: 2304 - DNA, 359 bp, Oryza sativa
actcagctctctgataaactaatcacgtgtcgactttcctattctcgtctgtggcggcgacgcggacgcgagacgagactatgccgccgcgaggggactctagatgggccgcgcgtcctccgcttcactggcccaatacagaaagagacgcgggcttcgatgttgtctcggaccatggacaggcctgacgacaggatgggcttccctgccgcgtgtgagttgcagcttgagagcatgtgagaagctctcgtccgctgcggcggctagaggatggcgacacaagggcgtgcgtgcgtgcgtgccgcccacataacgcctgcggtgtggcgttggactgatctgctggtgtggggtggggg

SEQ ID NO: 2305 - DNA, 375 bp, Oryza sativa
  unsure (1)..(375): unsure at all n locations
ttttttttggngcaaacncgcaggngggctttagtggcttggcatcgggccgcaccatgagtttatgctcaatcacctccctgggtacccccggcatgtcggacggctgccaagcgaacacgtcagcattgtcgcggaggaaggtgatgagcacgagttcctatttctcgcctagtgatgccccgatcttgacggtcttgtcggggttggcactggagagtggaacgatcttgattgcgccgtccggtttcggcgtcttgtttgtcttgctcactttcttgggtggctcaactgtggcaggagggctgggcgtgtgctcgaccatgtcgaggatccgcttgtcgcattgcactgccagcttagcatccctcgaat

SEQ ID NO: 2306 - DNA, 263 bp, Oryza sativa
  unsure (1)..(263): unsure at all n locations
tgacactttattagatgctgaactacgtttgttgttactgtactgtagtagccattatattttcctgttcatatgctaacaatntgtcgatgttagtatttctgatggaaactggcaattgtgttataacaggagctgggagtactgcagctctcgtcttatactaagctactagcactcctttgatctgatggccaacattaacattggcgatactgctcctttctgtgatacttacctgttgaattataggtaatatcttg

SEQ ID NO: 2307 - DNA, 360 bp, Oryza sativa
  unsure (1)..(360): unsure at all n locations
agctntgttcctgggcaacaataggtttgaatgggtacttcctgtttcaatctcaaacctttcagtttatcttgaatacctctatcttgattttaatgcaatatctggaagcttgcctgaagagattggtaacctcgttaggttagaagctcttctacttcataacaactctttcacgggaattcttccgtcatcgttgggcaggcttaaaaatctgcaagttttatatatagacaataataaaataagtggatcaatcccattagccatagggaatcttacagaactaaattatttccgccttgatgtgaatgccttcactggtaggataccaagtgcacttggaaacctgacaaacct

SEQ ID NO: 2308 - DNA, 445 bp, Oryza sativa
  unsure (1)..(445): unsure at all n locations
ntagttcgttcagtcgtcagagtcgttctttatgttaggatggtcccgcgacacgatgagttggctcgttgagtcactaactcgtaaggcttgcttaccaatgatctaattcctttgttcctatttatctatgggcattaatctatgataaatgactaatgttttcccgttaatagtaattacgtagctcatattgtaaaattcatatctaaataatccaagctttcgtttaatccattcaaattgcagtaaattcgttaaaatgtcaagaatccaataaaattggtttctttatttgtttcagtanggttatagcttatatttattatgtgctttgtttgtcgattagaaatacgcaccgttcaaagcccccgtttatttcgaagtggtcgccgacggttcatcagttgaagagaagccaagtccacatatatcattgatcata

SEQ ID NO: 2309 - DNA, 406 bp, Oryza sativa
ctgcagctttaaataaagagactttgctgatttttgggagcttaactagcctgcctttctcaagaaactaacaagattatctgtggtgagatttctgtgagccttgactcttgtggacaacaaaaccaatttcaagtagttcggatatatacaaactaaaattgagttctatggatatatacaaactaaaattgagctctataaataagatactgtatggatctgggcatgctgttgtgaggataacagcgaaagtctcattcagctaagaatagcatcattttatttttccttctgtagtactactaactagcaagagaacctaactggctatctattcattaatgaaaattgtcttataatgataaccacctatatatgattcataagataccacgcctgaaaa

SEQ ID NO: 2310 - DNA, 331 bp, Oryza sativa
actcagcttcacgtcttagcttcaccatctcatgacttgtagccgaatacaagcttgtattccgttgatatttgtccataatattcccaacgaaccgatgcttcataacacacgccattaagtgagaacaaaactacccctatgccttagaccttctttgtaagaagaaccattcaaataaatccttcaaggtataacttcaactaggcagatctcttcctcataagcaatatatacatgagggtccactataaaatcacatatgatttggcctttcatagatttcaatggttcataagccacatcatattctatcaaaacatacgcccac

SEQ ID NO: 2311 - DNA, 388 bp, Oryza sativa
tggagatacctgccggagaaaggaggagaggccgcaagtccatggtgagggcactggagcggccgccggaggtgacagccgcggtggtcggtccgtcgccagccaagtcggccctctcgcctcggcctctcattccaccgcgccacgtttccctattcacagttggcgctctcaggctggaatttatcaaccacactacccgagagtagtaccattgtcacattttctaataagaagataccaccattcacccttagaacattgataaaaatagaggtgcatgtatggaatacttacaaattcacgatatattggtcgtcgagatctggtctttacattatatccagatacacacaactattcacttattatctcaagcagtacaatg

SEQ ID NO: 2312 - DNA, 367 bp, Oryza sativa
agcttgatatggtgttcaattcatacaaaaatgtatattttaatgcaccgagcctgttctcaaaagaggcagaatattatattttaaaacaatgaaacgatcaaaatagaaattcgcgatggaaaggtgaacaactgcacaaagttgaatgaggaattggacgcccaaaccacaatggctattaataggagatgcgcatataaaatagtgaagcactcaacacttgagtaagacttaaccatgaaattcctaccacaatacaaacaaaattatattacatactgtgtgtgaggatggaaggctgaaactctctttgctgagaactgtcatgtcaaagacaaatccaaaaatttcagctagagaaaca

SEQ ID NO: 2313 - DNA, 396 bp, Oryza sativa
gcgttgtgccatgacatgtataaggcatgtgctgtatgaatattaccctgatacaacgcactgaataatggacaactgttggaaaacctactagcagtaacacacgactattctctacttgatatacttacttagtgtaacatacaactagcaagtaaaattgatatacaaatctttacatagagaactgccagacttaccattaacatactatggtcgcattgtaccagtctaagttgtgaaagaagcaagaacacacaattcagaacacatgtgtttttggtgcatactggcaacagcgtccccatgtggccaaatggcaatatgcccgtatcctcaagagacacaaatggactatccatatccaccttgtatccctggacactatcagctact

SEQ ID NO: 2314 - DNA, 416 bp, Oryza sativa
  unsure (1)..(416): unsure at all n locations
tgcggcatgcagcttggcctgttggagagatatcatatatttttatgttgccgntcgcggcacataaaatactcagccagggctgctcccgtataaggagcgaggtattgtaatgtagcaggggaatccgccatttcagctactacaatagtgtattccatggccccctcttcatggaaagtagttactacttgagctacggaggatgctctttgaccgatagctacataaacacatattacatcttgccctctttgattgagaattgtatctgtagctactgctgttttgcccgtttgtctgtccccaataattaactctcgctgaccgcgcccaataggaatcatcgaatcgatagcaataagtcccgtttgaaggggttcatatacagaacgccttgaaattatacccggagc

SEQ ID NO: 2315 - DNA, 65 bp, Oryza sativa
tccgccggacttaacactgagctcacctggggctaagggttttcttctttttgcgtggctactgg

SEQ ID NO: 2316 - DNA, 406 bp, Oryza sativa
gtgcaagctttcaaattgagttgaaagttttcaaattttgagttgaaagttttcaaatttgagttgaaagttttcaaaatttgagatgaaagttttcaaatttgatatgaaagttttaaaatttgaattgaaacttttcaaattttgagttgaaagtttttaaatttaggttgaaagtttttaaattttgagttgaaagttttcaaatttgtgttggaagttttaaaattttgatttgattttttcaaattttaatttgaaaagtttaaatttgagtgaaaagtttaaatttagagttgaaagttcttaaattagtgttgaaagttttaaattctgaattcaaagtcttaaattaaattatatttcaaaagagaaaccaactagaccctaatacattctaattaca

SEQ ID NO: 2317 - DNA, 372 bp, Oryza sativa
  unsure (1)..(372): unsure at all n locations
tcatactgctggaccatgtcgcaggcgtctntgagggcggttggccacaaaaatccttgtcgaaaagcttttccgaccaatgtccgaccggcggcgtgtgacccacagatcccttcatgtatgtcgaggaggagatgtctactgtcgtccgacgagacgcattttaggagtaccccgtttggtgccttcttgtatagatcgttgccgatcatacagttgatttttgctttatgggttattttattggcttctgcgtcgtcctcgggcaactcttcgctgcctatgaatttaatgagtggggtgcgccggtcgtctgtggtcttgatatcggcaatggcgcgctctacctctgtagcccccgagctgatgttg

SEQ ID NO: 2318 - DNA, 381 bp, Oryza sativa
  unsure (1)..(381): unsure at all n locations
agcttcgaccgccgccgctgccatggtcgtttcttgtctgagaagaaagggggagacatggaggcccangcccaacaagagtacggcccaatttaaggaggaagaaaaaactttttggcatttcaatttgctgtccacatcatgcacgaggatggaatggataattggatatgcatatcaaatcagaagcacattcaattgccttgtacacaactcagatgaacaagttgaaatatttattcaagacaaacttagttgatgttaagggaagcttgaacagaaatgctactaccaagaagtagcacaaaactatggtgatataataacaggagttacagattgttacagaaactggagttgcagcatctttgctgggaattc

SEQ ID NO: 2319 - DNA, 324 bp, Oryza sativa
  unsure (1)..(324): unsure at all n locations
gcgcagcgcaagctctcttctaattacgtatctcctgctcacagcanaacctagaaccaaacggcatcagtgattgaataaatacaaaaaactggcatagaaagaatgtgacattactcacgagcgtcttctcatgcagaatccccagttgtgacgccggagcctctgcaaataccaaaacaaccaagcattaagactaattaatcaacaccagcaagagaacaggctttggcctcccaacagttcacaagattagatccttttgttggctagtacacctttgaggctttgctctaagattccactatttgttcaacctcccag

SEQ ID NO: 2320 - DNA, 374 bp, Oryza sativa
gcttgagaggagtatatctatgctattttattcttctccactgccacgtcaggaacatgctagacagggtcgacgtccactacctgaacatcatgagtatgatgcggaggatgagagtctacgcttgtgttctgatgaaggtgatcatcatcgtcgtcctcgacattctcctcgccgaggtcctgcttttatggatagggttgttgatgatattcaccgtgacaatcggaatcgtcgtgctgctcgtgttccgctggatgaagggcttggtaaaataaaaatttccatgcctgcttttttatgttctggagatccggaggattatttgcagtgggagatgcgttgtgatcacatctttaatagtcacaactatt

SEQ ID NO: 2321 - DNA, 415 bp, Oryza sativa
  unsure (1)..(415): unsure at all n locations
tgtgggctggagcgacagcaagagacagctccttctcgtttatgaacttatggctcaaggaagccttgacaagcatctctacgaccctgagaaaattataacttggcaacaaaggtaccaaattaaatttgctaacctgtttaattcaactgacaagattgtacttgatctgggctctgctttgctctacctccaccatgactgcgagaaatgcattgcgcatggagacatcaagcctgcaaatgtaatgcttgatgtgtcacacaatgctaagcttggtgacattcggttagcaaggcttgttgagcatggtggagagccacaaacaacacaagttgtcgcatggacctctggatacattgacccanatattattaactaccgctgggctcgcaccgaattggatgtggacagc

SEQ ID NO: 2322 - DNA, 390 bp, Oryza sativa
agctcgctgagaaagcaattaatatacatactttgtattatataactcttgaattcaccaaaatttcatcctaataccgcaaaactgagctaaagcagcaatcatgcatagagtaaaggagtatactaacaaaatcatgaaggcggtgccggaagaggcagagagtgtgtcaactgagagatatactacaccagttaggatgtttgcctgtaagacgaagttaaatgttactccatacagacttaccaaaaataagttccaaatatactagaaactcaaattgaggatctattagttggaacatttctgttttgggaaaattattttctaaaattgtgaccaaactgtcttaccagaaggaatgaaccaagcatattttgattgaatgca

SEQ ID NO: 2323 - DNA, 347 bp, Oryza sativa
  unsure (1)..(347): unsure at all n locations
cctatanaaacttaagcttgcgatatacacctcattcccgcgacatgctgagtacnatatgcctcatctcttctctatatcaccacatatattgtttctccgtcgcgaagtgaacatgatgtgatgagcatatatggtttcgcctgtacccagacagcgcctgtggtgttggtgctactatctagtgtccatgatgttctggtgcagtggtatcctcttcctcacaactgtagcattccggccgactgagctactacctaagttacgggaataacgtatgaacttattttaaggagtgcaatgtgtcatatttggcatcgcgggttccacgcctatgtcctgggact

SEQ ID NO: 2324 - DNA, 271 bp, Oryza sativa
gtataacattcttttttcatcataatcctcagttatcatataactctttatttcatccacttactgcttaaaacaatattattaattgagcctgttgagcactgccatcgttgtcattgacatccaacgcctactgtcggacccacggatcaccacggcttaacctgataccgacaaataaaatgcatgtcctcaccttgtgagaaaacaccagcttatgcgatacgcgagcactactttacaagagagagcgttgtcctacagagaaagc

SEQ ID NO: 2325 - DNA, 349 bp, Oryza sativa
tgtgtaaaaagtgttgctccaacactttcagatattcatgtatgctttcctattccttgcgcaaaatattgcatgtgctactaactgcgtcattggcatgggtatgtggaatcccatacccaccttgtcagtctcaacaacagaaaatgtaacctgtgtcaagccctctgctacattaattatggcttttgaccaatcttagctcatcaagagctaattattctcacaccattgagagctgagtctagtcatcatgaaacttgtctgcctcaatgaacttaaaattttctgacctaatatattggccgagaaaatgttgcatatatgaaaatctgatgatagacatgtt

SEQ ID NO: 2326 - DNA, 183 bp, Oryza sativa
  unsure (1)..(183): unsure at all n locations
caagcggaccccacaagncaacaaaaaggaccgcgggagaccgagnacacagagacgcgccacgggacgacagaagcggagcccgngagccaaccgaggcgagnggccgacaaacagacgacacnagacacaacacgggcggcacacacggaaaccacgaggcnaccgagcgggcacaccaac

SEQ ID NO: 2327 - DNA, 369 bp, Oryza sativa
tctcttcctcaagatccaatatgagacattttctatgttgtctcatgagagtgtgaatgacatgtatgggaggctcaatgtcattgtgaatgatctctatgggcttgtggcaaactacaccgatcttgaggttgcccaatagatgcttacggctctaccagagaagtatgagacccttgtcaccatgctcatcaactccgacatgtcaaggatgacaccggacagcctcttgtggaagatcaacaccaatgacatgtataagttgaagaataaggaaatggaggaagcctcacctttcaagaagtgcattactctctatgccgacgtgaagacaagggcacgggctatgtgaatgaactcaatgagaac

SEQ ID NO: 2328 - DNA, 403 bp, Oryza sativa
  unsure (1)..(403): unsure at all n locations
gctgatatgttatctgacggcccgatcattatttatattgatcggctcgaagctcgcaagattgagctcttagcacaacttcaagaatgcaacgccaagctggatctggaacacaagaagctagccgatctcccacaagttgtcgaaagacagaaggcaagactaaaatcggttatcaagaatgtcgctgatctgaccaagtttctgaaagttatccctggaaccgacgctcaagatgctcaagccattgaagaagtagaacaaattatgcgaaaagctatattggctattcagagctatctatctcgataactntctatgtaatagatcttatgaatattgtgatcggcaaagatacttctaatgtgtatcttgacaaatctttgcaccgattaataaaact

SEQ ID NO: 2329 - DNA, 317 bp, Oryza sativa
catacactgaatattttatattttgacgggtgagagggtggttttgcatgcacttgattactatactaattttcaccctgataagatgactcatgtataacctgcccattttactgtatccaaatgaatgcttaaaatctgtgaaattaagtttaaaagtttaccctatagatgttaaaaagtatgctactagaaaaaagatagttaagagttattaatcataaggaaaaggataatatttcctctctatatttatattcttataaaattagctcattgatctggatcatctgcctacaatacattaagtaaaatct

SEQ ID NO: 2330 - DNA, 458 bp, Oryza sativa
  unsure (1)..(458): unsure at all n locations
atctctgagtcacctgcggcatgcaagcttgaatgaagccgcaccgcgcccgcactctagtgctataaagacggctgcatgttgagttcgtgggcaagcgtacgtgagggaggctgcgcggcggctacacgggagtgcaaggacgacgcgcggctgcatgttgaccttgtgggcagcgtctgcggtgacgccgtgtgagcttttggttggccatgccttgattgagctaaggattgaagagtgactantgagagagcgcgagaggcgggagaaggaaggattcgaaggacagttttgaaatttcgcatggtgcatgacttcctgaaaagaagattagaaaattggaagactatacaagttggatccaatgctactgacggaggctaactttgctattagactgaatcacaaacttccgttgctatctaattaatgaaaacaggaaattcgctactgac

SEQ ID NO: 2331 - DNA, 479 bp, Oryza sativa
  unsure (1)..(479): unsure at all n locations
ctcacagtcacctgcggcatgcaagcttctcttactgaacgagggagaaagatttatcaagattgtattcaaccacagnactcagcatgccacaccggatatgcacaattatatgcaaggagttcaaggagataataatataggggttaagttttgcagtaacaacctctaatagtcacttagttgcccaaagccattttataaagacgatcctagagctacacagtattattaaacaagggcgtgaaccctcacgaacctgccttaacccaatgcctacgatggatcataccgaactggcaaccctaccctgggtcccagctcgttccatgccactccatgccaaccatatcacattttagttgttgagcaaattttaagaattagaacactgacttgggttcattgctcggcttgtccatattcgaaggctcggctattcgaatagattactctgataaaagagacattttacccac

SEQ ID NO: 2332 - DNA, 475 bp, Oryza sativa
  unsure (1)..(475): unsure at all n locations
catgcagcttgcacttaacaccataccgcacccttattcatactttatccaatgactgaacaacagnggttaggcgaaggtaacaaaactggtgcacattaattttgcaattggaaattaccatgatgttgttgaatgtgatgttgtgcccatgcaagcatgttatattctgctaggtataccatggcaatttgataaggattctatgcatcatggtaggtccaaccagtactcttttctgtaccatgataagaaaattgtgttgcatcccatgtctcctgaagatattttgcgtgatgatgttgctaaggctgccatatccaaatgtgagagagataaaatagccccatctgatggcaagatacctgagacaatcaatttgaacccaaatgttacttactactaaatctgatttaatgagttgaatgatcaccatcagttgcctatgccttgtatgcaaagatgcttgattcac

SEQ ID NO: 2333 - DNA, 425 bp, Oryza sativa
gcaatttcgtgctagctgatgattataggatagtatcaatgtattttaatttcagaaagaaaaggagtgatgcatatggaggaaaaacctttgttcaaaacaaaattatatcattagatttctcaagaccttgcttgtttgtgttttgctattcattggcattttatcttaacgcctaaattttataacccaactatgaccgactctgcaatattgcattagttgtattgttgcaactatatgggatgtgggtaagtaatcgccattatgttacacttttgcttggattggttcttatgaccggtggcatagcatggtgaagatgctgcaattacgaaaccaacaagggcgagactggtggtgggcatgtatatattggactgcatttatatccacatattatagtgtcacagcaagtctttatg

SEQ ID NO: 2334 - DNA, 446 bp, Oryza sativa
  unsure (1)..(446): unsure at all n locations
tcgatggtctnntgcgccctcccgacgcatcgacnntagtctcagcttggcccttctccacgcttgaattgatgctcgctcgagatagaccagctggagttaggacatcggctagctcatctgggatcagagcttgaatctcatgtagccgagtcctaattgagccacaatcaaccactaagctgtctaacgatgatgcctctagccgatgagagatatcttcaagaaatttcttcacatcatcggataagggggctaaagctttgcttgtggtatcctcttctccttcatcaagatagtctctaatgtcaaaagagaanagatcggctcagacatgcaataatgatctatagagaagctagagggtcaatagacatagccgatctgggtttttgtgcatagaaagcttacccgatacatgagcagtcggtgacttctcttcacat

SEQ ID NO: 2335 - DNA, 305 bp, Oryza sativa
ctgcagcctattgtgcatagcatagagcccaatgaagagaattcattgattttcctggaattgctttcctcctagcctttcgttccacgtggggtcacgttctatgcaagccaaaggcaagaagagttagaatcagaagagaaaagcaccgatgcgaactgtagaagaagtacgtaagatgactattaccatcaccgaatggcctccagcatggataactattcctagacgtcaaagaggaaataccttccgatgtgcacgacagttgacccagcaccttctaagccatggtggcagagttttga

SEQ ID NO: 2336 - DNA, 457 bp, Oryza sativa
  unsure (1)..(457): unsure at all n locations
agctngtcctanattgctcanaccaagcttcttgctntatactgtataatcttatactgcataatcntgtacttgatactgtatgatagttttggcgtagcctgtaacacaggacacatattggttacctgtacctgtatatgttgaaacaaggtattgtgccgctgtttgtatctttacgaatgggaatgatgntttactttatctttcctgtcaatcacttacgaatgggaatgatgttttgctttatctttcctgtcaatcacttagaaactccgaagacagaaatttattggtgtccttgtctacgtcactgttagcagaaaaattgtcgataacaagaactccatcttatacttacctgcttgctctcaatgtagaagtggatactacaccagtacacctcataaaacatcgtaaaattatagctatcgatgttcatanactttccacctta

SEQ ID NO: 2337 - DNA, 366 bp, Oryza sativa
  unsure (1)..(366): unsure at all n locations
ctttggcccgaattccttaatcttggctattccgttgaattatgctgaaaacttatctcttgcttgtatggacaaaaggacgtttagaatttatctctcgtcttgtatggacaaaaagtgacgtgggaggttcattagactggagaatgtttggtttggtccccaatcaactttttgatcatcctacattccttatctccttttcttttcttctcccaacaagtatctctgaaacgaaaagatacaaaactcatggtgtttaacgtttgttaaatatataataagtaaatcaacatagaaatatgtacctntgacgatgaaacataagtattcatggcatacccgactagtgtgtctcgcattctc

SEQ ID NO: 2338 - DNA, 386 bp, Oryza sativa
gaaatactcttcgagtatatatatgccaactttacattatgttcatgttatactgaatatgtagctagcttatctgagagatgcttagatgcgggtataatgtttgctcatgccattactttattgtatgacgatgatattggagtagtatttggtagtctatactgtggtgtctagataacgatatatcattatctggagttatatgctgcggatgagaggtgggcctgcgatggtgacagctcactatgggtattcctccgcgcgtgtatataattctaagataatttcctgcggagggtattccttcgtatttagcccagttgatggtcatgacgggctgtcttagaagctcggactcacgagtgctttttaagtacatgaat

SEQ ID NO: 2339 - DNA, 352 bp, Oryza sativa
  unsure (1)..(352): unsure at all n locations
gctccaatatatttcaaaaaaacacatagtattatcgtgtagagaaaatagttgttcgggaatggtgtaacatacatatataactattactatatactggcgaataaggactgacctatatttctcttattcagtcaaaccanactaagtcactctctgatctccagcatgttaaccttccttcattcctctcccatcggaatatcacctgctatgaatatgaccaaacaagctaacttgtggtgcacctgtggtgtgtgattctggaggacatattgatgctttatgtgttgtggttcattaaatatttatattgaatatattgcaggcatagagaatatgtgcctcatga

SEQ ID NO: 2340 - DNA, 469 bp, Oryza sativa
  unsure (1)..(469): unsure at all n locations
ggatcttaagtcactgggctgcagcttggttcacaaggtatggcagaatcatagatactatgtcatattcgcgtctacggttgacgcaagcaatgcgaaaccagatttcgggtggatatcctggatgagcagccagcatgttgttcggagtccgatcgcgtatacatggaagatctgaggggtgaggacagtaagtaaattatattggagatgttgaattattccctggagcagatganagatagatagctcgatgatgtagtttgctgattgcttcacaaagagaatcggcgtgaagctctctctactgcaaacctggagttctttcttcgcagtgtcggttactcgccgaacttctttttccccccttgtagttgtcagtgcgggtgcccgtcaagaaacttatgtgctattaacatgtgagaattccttttcttttctttctcttagttcatggtctcagacatga

SEQ ID NO: 2341 - DNA, 395 bp, Oryza sativa
ctgccgtgtaccgcgtgtacaagatcagaatgtatgaggacacagagccggtgaacgccgccgtcgctgtgtctatcactgacgatccctccacgccggcggcactgccactgtctacgccaccgacacggccattgccggacatggccggatcgtcatcggcaacgtcgctactgccactgcaatttccaagcttggctgggtcgtcgtcgacgatgccgctggcactgccactgcagctgcctggcctgcccatgtcgtcgtctgtgatgtcgctgccgggcttggctggagagatgacgtccatgggccatggcgaaacatgcgaacatggcctcgacgtcacaggcatcaacaccgtcgtctgagctcccacatgactggtacgacgagta

SEQ ID NO: 2342 - DNA, 325 bp, Oryza sativa
gctctagcggacttaacacgcgctcactgaaaatgtgttgctttcaaatgcatctctggcaattgttgacaaccagatctggggaaccactgcacggcagaactttgttgctatctgctggacccactgaatctcatttgacaagggctctgtgctgatcacgtacgtcatcatttatttatctttataaaattctgagtgataaccaaaactgcgatatcccctacttttttttttatggaggactcactgtgtagcgtcaacgatggttaccaatttgtgccaagaactatcgagcgggcttacagactaaaaaaatggtctc

SEQ ID NO: 2343 - DNA, 464 bp, Oryza sativa
taataaaaacactcttacattgccggatcattaaataattcttccagcattactagacagacacgactaaggttctcgcattacagatcttctcttggaaatggaaaactctctccatgtaggatcgaacacaagttaccaagcctatcagagggggggtgaatggtagggaaaaccataaacccaaaaacttttagcggaaataaatgttaccctcaaatcgatggaaatctcgacgtattcctgtcgccgccggtcataccgttcgcgtgccgccggtcggaccgctcacacgccgtcggttgaacccgaagatacacatatcgaagaactctcaaagtagatgacaatttattgcttctctctgtgtttacaaagtgcaacaacagcactccttactaatatctcgacttaactcgatacctcaactaaactatcatctcaattgctctacatagcgatac

SEQ ID NO: 2344 - DNA, 393 bp, Oryza sativa
  unsure (1)..(393): unsure at all n locations
atcctcacagtcacctgcgggctgcacagctgctggaatctgacactattcaattttgatttaccatatcactatatatgtaataattcattatcgtgttgtacatacagctctggtatctgaaagaatagttttgtgttaaatcatgtgcatgatgttatatgcttgttatgactaaagaatcacgtgtccaatctgatgatggtagcattagatcttcaactgcttgcaacctgttctaagataatactttctattgaaatgtcattggatcttgatcattactgtgacatcanggtatgcatcaacacaggatggctggtggaaaagaataatacaatgcgttctcttctctcttgtattgactgacactcaagtgaatctcaccacatg

SEQ ID NO: 2345 - DNA, 422 bp, Oryza sativa
  unsure (1)..(422): unsure at all n locations
aaactaagcttacatgtgtcccatctattgctcctatacagtcgttgatttatggccaataatctgggttttctaagttagggtgcaactcataaaattcacggtcccttggtctaattatgttatgtgctaacctaaagagacaacgcaaaactttgttaaatgtccggctaattgtctccaaagatctaaccaaacggtcatcagcctgtctaattgactgtggtgcaccaacaatccacaaaaaaatggcttgagcttctacagatgacatttttgttgtggactgcaacccataagactcaaccaaaatattgtgcatcctanttaacagttgcctctcaaccctaaacatgttatagcatgaattttcttgggttatagtactctggacccattggatacctgattcaagaaccact

SEQ ID NO: 2346 - DNA, 334 bp, Oryza sativa
  unsure (1)..(334): unsure at all n locations
ttttatgcgggccgagcggaggttctcacaagttttcgctagatctgagaatgaggtctcttggttgcgcgcttttacaaccaagtcatcgacatacgcctcaacattacgtactatttggctacccaaagaaattcgagtaatacgctgaanagtatgacctgcattctttaacccgaagggcattgatgtataacaatatgttcctacgggggtaatgaacgcatgtttttcctcatgctccctagccatgcgaatctgatggtaaccagagtatgcatctataaaacacacaacgtcgcaccccgcagtggagtcgacgatctgatctatg

SEQ ID NO: 2347 - DNA, 373 bp, Oryza sativa
tagttggtgttggcctacctcttgatgtgcatatccactctagacatatgcacatgagtatcaacacgcttgttatatccggaagtacgatcttcgggatgtcactctgtttcttgttaactgcagaataccgtccaccacgagaacaccgattataaaatttgaggttgatatggagtagcacattggatatatgttctttttactttaacagaaggtatatattcctttcttgttttcttcacaatagtcctatcaagtaatgaacatttttttgttcgtggaaaatcctggcctgacaagacctctgcatattcagttcttcatgaattctataccatgccttgcaagtgtatatatggatgttgcttta

SEQ ID NO: 2348 - DNA, 428 bp, Oryza sativa
  unsure (1)..(428): unsure at all n locations
agcttatatgatagaattcaccggagaatatttacgacactttacaagtatgatatattcacaatcttctttggtagtatcgcttatataattttaacctattagttacctttataccatatcatattcaaacaattnctataagcaattatttataatcttcttcatcatctaaatagaaggtagacttattttatttagaaaacatgcctaccaaattaaatgtaaagtaagcaaggtgctgtcttgtcttttaattggattactgatgttagctacgtcgcccattgtctattgagtattgngtacaacatgaggctacactacattcatgggtgtgtaatatgattgcatagtttgagagataatccatctgtgaacatttcatttagagtgtgtgcgagaactcacatagcctattatgaata

SEQ ID NO: 2349 - DNA, 384 bp, Oryza sativa
ctcagcttattgcttgtacattttattgtaccctgatactgatgataacatgctccacctctaaacttgatgtccacaatttggcaaacgataatgtgcattcttttctaatatttttttggtgtcaatgtacatgttgtattgtagtatgctactatttgtactcctgcatttgtttgcgctcaagtgctaaggggtcaaaagctgtcagaaaaaaagaatggttggctatatcccctgttatattgaatttgatcattgggtgtgttttttaggaggatgcaggtcttcaatctaaactgctactttggaaacatggtaaagcacctgaaaggcaacttatctgaatatggctgacactgcgtctagatatgggttgctgat

SEQ ID NO: 2350 - DNA, 468 bp, Oryza sativa
  unsure (1)..(468): unsure at all n locations
agcttctttcaaagcatactgctntctagttgtatatgacgatctctagacagatggatcttatatgaatcgtatgatgaagtaccacatgagtggatatataggaaaggaatccaaatctgccgaatcgctcatgttatgatcttctacatcctatgtctccgcgttccgtcatctggcttatgttcttcatgtagcattcagatcgaatgactctatgaaattacgtcgatacttctacatattatgggtaacgtaggagacatccctattttcccccgggggtcttaattaccactgcttatctttcaattcgcctctgaccatcaaattaaatgtgaataaccccgcctcctctctctgaaacaaggggcgctctcagttctgtgcgtgctcanacaattttgtctttccatattaccatatttctagagcaataatttctatgaggactactgactcatcact

SEQ ID NO: 2351 - DNA, 396 bp, Oryza sativa
  unsure (1)..(396): unsure at all n locations
cgtacagttggggaaggggttctttgagagataagaatattctacttcaaccgatatgcccttatgcacggccatacataacatataaatcacacgtggaaggggtgggcaattagctagagcagcatgtgctgtatcgaaactgattgcaaaagaaggttaatcggccactctaatattaccatctggggaggtccgtttggtatcccataactgcttatcaacagtcggacaagtgggtaatgttggggtgaaccaaaaaagtttgggtagagccgggtctaagtgtttgctatgtaaacgccccgtagtcagatgggtagttatgaaccctgtggaccaccacatggggctgggaanggaaacccccatggtagtaaaaacacacaccccttg

SEQ ID NO: 2352 - DNA, 383 bp, Oryza sativa
cctgcagaacccacacccacacctatcgtctccaccttaaagccttggtacccgatcaatctctgctagcacataactccgatgcaccaacaccccaacgccggctagctcattcccgccttcgtcgggtctccacgtgccaaagtcgcctcccgcacccatcggtgtagctcaccaccgacaactgcttatcctgcaatccatgccacgaccaccagcctccattgactcacccgcaatggtcgcctacagctgccggtcgtgctggcctccttgctgtctccaatgtaatcctcttgtcgcgccggctgtgttagcctcccggccgttgcccgtaccctcactggccgctagtggctatcaccacgcgggccttcagatac

SEQ ID NO: 2353 - DNA, 427 bp, Oryza sativa
gcagcaggacctctgtctcttatccattgcgagtgctgtcatagggatgtaatgatggacggttcttcaacacagaagacagcctatcgacaagtgataaatacaagtctcttctggagtggaacaatgcaatgccatgatgtattaattagatagtgcattcaaaatgacaactgtgaaaattattggaatatattgacaacacttttcactactgcaatatatgtatttatgtcagtattaaatggttgttactatctaaatagtattatgtattaattaattaattatgtgcaacattattgattaaaaattatttgtaaaaaaattggcgggaaatttaaatgttggcgtgatattttaccatgcaggcccgacttctttatacatgcggcccttcctctttccagatgcgtgcgtgctcccg

SEQ ID NO: 2354 - DNA, 479 bp, Oryza sativa
  unsure (1)..(479): unsure at all n locations
agcttaagatgttacttctgcatganaaatgatactatcttacatctgtttatggattgtcattntgcgaaatttgtttggagggcggtacagtttgcttttggtttatacctccctaataccatatcccatatgtttgatggttggcttttggggttgacaagaagaagagcaaactaatacttgtaggagcatctactatatgttgggctcagtggttgagtagtaatgatttgattattgacaaattaccatctttctcatatatgcaggcaattntcagggcaacatattggctccggtcttgggcacaactacaaaagtgtgatgaagatggagagcttctaaaggttgcatgtcgtaagcttgagacgacgatcatgcaactttttgtcaattatggataaagattcacanatagacttgaataattgtgtgctctctatctttggtttgtcgctctatttttttcttgagtg

SEQ ID NO: 2355 - DNA, 313 bp, Oryza sativa
  unsure (1)..(313): unsure at all n locations
tcgataacctcgcattgtcagtacacgctccatgaacttttcatcctcatgcactctangcgtacacggtttctatcagtgataggagttctggcgcacccggtaatggtagactcacacatgcattaagttataattatgttttagattctcacatggcagtcctaccgatggcgacaccactgttgacacccgtctcgcggtcctaccaatggctgccccaccgtagagcccctgcctgacacatgatgaaaccactatgcatggatactgactacgatcaactatctactacgctaggtctatacccata

SEQ ID NO: 2356 - DNA, 317 bp, Oryza sativa
agctttctggccccactgtccactctcattctttaacctgttaaaaaatatgtctccttcgccggcgagatggcccaccgtcgtatcatactactcctcgccgccgccgacgtcgtcgagacctccgccgtcgtcgacgcgttctccgggttagacgactccaacccgatccgctccgtcacggaccacgccggctccgcgctcgagtcaaccgtcatcgccgaccttggacgacccgcgacgccctccgcttcgtccgcttcgtcgtcaggtcggcgccgccccccacgttcggttctccctaattccatcccacc

SEQ ID NO: 2357 - DNA, 408 bp, Oryza sativa
  unsure (1)..(408): unsure at all n locations
acaatactcaagcttcgccacctcagcaccagtttatgtggcgctgaccttgaaacaccttcttcgcgagagcctaagtccacgatcttatcgccaaatcacctatcgcttangccgatcatgtcagtgccagtactgtcattatctaaccttgccacgcgtgccgatggttggagacgactgtcaatgcctcggcggtcggcgctaatgtgttcaatcttatcgccatcgggtgtggcactgatcacatgtccattttataagatagtttttagtaagaaactaatttgaaataagttttgaataaggacaaaataaaatgtgaatatttcgccgatatcgatggcccctccagaaacatgtgtcaaatgtcaatatatgcactgtacaactttcgttatatacccg

SEQ ID NO: 2358 - DNA, 386 bp, Oryza sativa
agcttaatatatcttcccagtacgcaggcagctagtcttttctgaactttgacaaagtgtagactgatcatatgtttcaacatgtatacatggcgcattgcaaacatttcagatactgattgaaaagcaaactaattcagtaacaaaatcaatctttaattaatccagatctttattattgctgcgtgcaacaaactgagacactgacagaaggagtgcaaattcagatcaagcactccagctaaaaagggatatccatcgtcacagtacatgcaaacgaggatttttcccaagtttattataaaccaattgtcgcagcaaattaagacaccatgagctcaaacacgggaagttagagcggatgcacgtagacgccaactgcgtcg

SEQ ID NO: 2359 - DNA, 367 bp, Oryza sativa
tgtgtcatccttcacaatatgatagtggaagatgagaatgaagcaattatagatgtcttggatttgaattataatccaagtgcgacgatagtgctcccgcctgaagtgcatagaagcgacaatccagatccatgcttcacagaggtacttcgtagaaattccgctatcaaagctcggccaacacatatgaagctaaaaaaggatctaatcgagcacatatggcaacgctatggaaacaaagaaaattagactaaaggcattgtaatataattattatatttatggttcccaaaaaatattgtaatcatgtatcttattcatgcttgatagtattatatcaaatatatagccacacaatggtatacac

SEQ ID NO: 2360 - DNA, 406 bp, Oryza sativa
  unsure (1)..(406): unsure at all n locations
ctagtcccggatctctaatcacctgngctgcagcttgatcattaggttctgacatgttgttatataaagacggtatatttatatattcataatctacaatatgttaagtctgactaaatatgaaaatatggtacctatattgaaggctctcataaagtcgttagatgtcaattatcattgataatcattgcggtttattatttacatgctgaagactccactgactatttaatgacttgtcatatacatgaacatttattacaattgtcctggattgaattctgatcattggcctatttatataggtgggctgctctaatgtttacatctactgaatttattgtgaatgggataacgaaaaatatttgaacacacaggtaactgactgaatttttttaaggaatga

SEQ ID NO: 2361 - DNA, 402 bp, Oryza sativa
  unsure (1)..(402): unsure at all n locations
cgttcaagtctcntaatttggcttattaagccaagaacccattcttgtgctttgtttctgcttgttatatggagtttaatagagtaaaagccgcttcttttccgttggtcgtgtatacgctgcagcttcggaagatccgctcttcgtggatagtgaagccgacgtttgggaaagcgagcaaggcaagtcacatcatctttgaacatattgaatcccactttgtaaaattatgtcgatttaacttattgcattatcgctttatttaaattcccgccgtatcactgttgtatttaaccatgcctatttacctttgttatgaccttattattgttattgttattattaccttgttcaccctagaataaacaaaaccccaactagtggacactctactcatgggat

SEQ ID NO: 2362 - DNA, 360 bp, Oryza sativa
  unsure (1)..(360): unsure at all n locations
agctngacgctntcgtctccacatactcactttggacgctactcctgctttagatgttttaggtgtactactggtactggcagggagcatatgccagtaccatgagatttgccagattgaaaccttttgtgtttcgtcctatgtgttgggtggatttgtcatgacatgtcaggctgcaccctccagcagagacgcggccacgtttaatttcagaccattttgctaatgaaattttagaccatgtgacgttgaaattcagatttgatcaaatctaaaaataattaacttaaagaaaaatcaaaactatctataatataaaatgaaagtagtacaccatttaacaatcagcacggaggatga

SEQ ID NO: 2363 - DNA, 458 bp, Oryza sativa
tatgagatatatttcttcaatgagcatgcaaagattactatcttacctgcaagatgtgtcaaggggatgccagcaaaaacaatggctgcgcatgaagcattaattgcacacggaagaagctaggcttaatcaaggattgtgcttgattgaaatcttgaagaccaaactattaagaatctgtgaatattacagagaaaatactacatgtatctactataataggccatgcccatggtgtatacagtatgttgattggaagaatactcagaaaaagcatggaaccgcagacttccatcaatacttggcattgtctcatcacaagagttagttatattagccagccaaaacaaacattttgcgagggaaagatgcatgacttatacaacaaaccacttttcctaactgtataaaaccggctgaaattagcagttagcttatgagattcagagaaacagaaa

SEQ ID NO: 2364 - DNA, 466 bp, Oryza sativa
  unsure (1)..(466): unsure at all n locations
agcttctttccaattacttattttattttttgcaattatgcatgaatggaaatctatgtatgtatagggctactacacacactactaaaacttaaatatatactccatatatatatatatatatatatatatatatatatatatatatatatacttatacatttagagcactaacagatccataaatattgcacgtatatatagggtatttcagggtatttattatatatatgtaaagctattaattgtactccctccggttttaaattaattggaagtttggacaggatctcacatacttagatatggttagttagggcgcatattcatgttctatccatattaaatacattaggatggcacatctaacaagcacatcctcttaacctagtggctggctgctagtctcacagcaatcttttactgtcttgtgccggagttgatgcatgcatgcacncatacatgg

SEQ ID NO: 2365 - DNA, 445 bp, Oryza sativa
tatgatatcatcacgcagaaaccccacgcatttagaattctctaactcattatgttaccacaggttctgtttctttgtcagttctttataatcacacttttttatttaacacggaatctgaactgctaatggaaatatccgctgcacaaacttccttataagcagcctttgtaagcagtattcatatggtgcaatgctgcatttctttactgacttgtgtgaacgatgcgacattttgccaaaatatgctttaaacctctaaagcttagacaagaagcagagccttattacgctttgcttcgagagtttgaatgttgtaatcttgtactctggtttgactataactcctccatgtggtttgccgtgaccctccgtattatcaataacaattagaagttttatattggttcatatgctcatgttagggtgatctgaccattgctaa

SEQ ID NO: 2366 - DNA, 447 bp, Oryza sativa
  unsure (1)..(447): unsure at all n locations
atcctctcagtcacctgcngcatgcagcntgtgagaggcaagaaggaagatgatttgttagttaatgaggatgacgtgaacaagaagaataacatgaaggagaaggagaagaagaagcattgcatgcagtggttaattcaagaactcataaaagttttctatggatctaaagatgaagatgagggcaaatgtaagcaatttgctgatctagcttttattgctcgtaatgaaagttctcatgttgatgaatctgatgatgataatgaagaaaagcatagctatgatcaattagaacttgctgcttacaaatttgctaaaaaaactttatacatgttctattgtgcttgtgagaacgatcacactattgagatttacatgctgaaattgatagattaaaatcttcgattcctgatgatgataattgcagtcctgtgaactttactttct

SEQ ID NO: 2367 - DNA, 366 bp, Oryza sativa
actaagcttgagatcttttgtccactgctttagtgtatcgggtattcgggcacacacccgcgggcacaatgcgcccgtgggctatgggcatgggcaaccatacttacccgtcatgtagtaatgggtatacccacgggcacaaataatctcatgggcacgggtatgggtaggcactacctgtgcccgtcgtgcccgattgccatccctacccgctgtccatcattgtcagctccgcgctcctcgcgcccggcggcgacggtcatgacgactagatctgcgacgcaaccgacaacgaagccccacggtcggaggcggtggaaccgcgctccccactgcccgatggcggcgaccgtgacgatgagatcc

SEQ ID NO: 2368 - DNA, 432 bp, Oryza sativa
  unsure (1)..(432): unsure at all n locations
agctttaagaaatcagattctaagtatgttacactgagcacagcataaattcatcagtattatacanattgtgcctncatcattttcattagaatcatntttatcacattacatcaatcagtatcagttttttcatcatcagagttatcaagaccagtcggtcgaagatcggtgtcctggaacctctcgactacatcgaccgctatcttgtcggcggctttctgcgcatcattgataaggtcaagagcagcttcttcgctcgtcccgtctgcaaagccgtcaatggcatcaatgtcgattntcgagtaaagggacttggtcattgctagcgccagactcgctcccatactcccggcctctttgatgttcttgaaatatgtatccggagcaactctcagcttgtcaaagatttcggaagcatcgaatgtactc

SEQ ID NO: 2369 - DNA, 371 bp, Oryza sativa
gatcttaagcaccgctgctgcacttttttttttcttccaatttgaggtcaacaagcaagtctactaggggacaatttttgacactccacaaacaagcaagtcatttgatagacagaaaaaaatacagattcaatcctaaagtgtactggaaaaaaaagatacaccaccaactcgacatgcgacacaacccagagaagctagcccggacggcaccgtagctgacgacgtgtatgccacaaaaactacaagggacaccaaatcaccttacaccatcaaaccgttatcacatcgggatatggaagagtgaagaaaatgaacgtctccataggcctaccggatgtggtaacatgagtttatcaagaagacttagc

SEQ ID NO: 2370 - DNA, 401 bp, Oryza sativa
actaagctaatataagagtacatatcatcttacatttgttatatgtaatctaaggcaaacatgcatatctttttgttacttatattcaacgcttaaaacaagctattaatatctaccacataattatataatatttcaacatatatatttaccatttttttaaacatatatttttatcattttctacatatttggtacttatccacattgctaatgtttctatcttctctataaaccacataccttaattgtttatcttccttatttttctctcatgaaccacatgactactttacattgattataatcattacattaaattgtataacgaatagctaatggttatacctttccatggtgataaaatacaatctataacatgtttctgactggtacgtgct

SEQ ID NO: 2371 - DNA, 51 bp, Oryza sativa
ctgcatttaataagtcttcttgccaattggacccttcaccacagtctgatg

SEQ ID NO: 2372 - DNA, 495 bp, Oryza sativa
  unsure (1)..(495): unsure at all n locations
atctctgagtcacctgcggcatgcaagcttgttgtctaaaataaggtgacaacttgctgagtttgtggagaaggggattgagaagtcacaattttagacgcctacccagtttcaacagtatgttctattctatgatagttgaaaatctacaggttctgtttattgtgtcatgagctgcaggatcacagggcatctaccaaaacagggtaattttgaaccatgccattataattntgtaaagtttgagatatgccatcggtatctcaatgacatgtagatcccacatgagtcaatgacatgtgggtcaggatgaacatatctcaaattttacaaaattataatggcatggttccaattttcccaccaaaataaggcatcatatctgccaagagagctagcaacatccagtatgatgtaaagcaagggcatcataccatatgctcagaattgtgagaaatagagtttggtatctaaatactctactaagctccaata

SEQ ID NO: 2373 - DNA, 406 bp, Oryza sativa
tgtgtataaataagataggattagaatgataaatgtattcaagatgtgttgatgtggtttggtttaagttaatctgttcatagtctttcctgatttaatggaggctgattctatactgttgattctctttgcgatgtatgtaagggcccgcctcgctttgaaggggacaggccaaggtttggtgacagagatgggtaccgtggtggtcctcgtggtgctcctggtgactttggtggtgagaatggtggagctcctgctgagttccagccatcctttatggtaatcaactactttccctacaagtgtttcattattgttctgttgtgtcatgtagcttatttgactcgttacgctgaatacaagacaagcacaatcccattttgtactgcctatgatgaatatatat

SEQ ID NO: 2374 - DNA, 499 bp, Oryza sativa
  unsure (1)..(499): unsure at all n locations
agcttatctataaaggacttgcactattgtatgtgcatattagccataaacttactcttgcaatttacataagatggtattgttggagagagcagactgcatgatgtgtagctcacctagtagttagtaactgagaactcgtaatcatttgtttttgtgtgcctgatcattcttcttcagttttgcccaagcagcagctgcagcacaagccggtgcatctgttgtacagatctttgtgggacgtgttcgggtaaattcatcagacccttaccttcatgggtttatgctaattcaaaaaaattatgctgaccacaaattatgcaggattgggcaaggactcactctggcgacccagagattgatgaagctctgaagaaaggagaagatgctgggcttggcttggntagcactataatacctttctaattatgattggttctacagaattctatcaatatgaactaaagtagccacattttgataatcatgaatactgact

SEQ ID NO: 2375 - DNA, 344 bp, Oryza sativa
agattgatgatagaaaagattggatggacatgatttctatgaaaaattataagtttcactgctggaatcgtcatgtgtttcacttccactaagaagagtgaagaattcatgggtgcatttccttgactgctatgtttgtcatttatgctaatttaaattaacctatgatgttttagtttcatagactaatattacttgattagtttgacttgcttattaaccttgaattaattaattgatcaccaatgtgccatgctaagcgtatgtattgacttgacaaaacagtctcaaataaaacataacgaatctcatgagtatgtgatttcaatagaactgtatatgaa

SEQ ID NO: 2376 - DNA, 428 bp, Oryza sativa
agcttagcctgcacctagtacaggtcatcttataggatcttcaaggcttactttcaagttgttctaatcttgagtggttgagtattgttagatgcaatcttaatgatgatgaactgaaggttgattgtgcactgtcccgactgctatacttgcgtattgcaaactgtgagatatcaaagatagaaatgtatgctctcaagctcaagactttcatttacgaaggagcacagctgcctgttgatcccatccaagcacaggaactagaagttgcagatatcgttttcaagggtgatataacttttcagtatgctctcactgtgctccctgtggtgtttccaagcgtgcaaaatctgactgtgcatgctaattttgggctacaggtgggtctaagaaaacttcgcaagtcaataatgatgaccatatcatac

SEQ ID NO: 2377 - DNA, 459 bp, Oryza sativa
tatagttggccaacacttttctgattttcgggaggcgtagtatgtatacatatctcataatgcatagatcctggaggtatacatctcctaacactatgcactattaggtacaaaatgcatatacctttcaaaaatagaagaaaaatatctagaacataatatagtcattaagatggattcccaattctattctaacttatacaatgtagtttgataccttcccaaaaatacgagaaaccccttcaggttaatatgtaagagtatatatatcaataccggatattcgctcgaaagtcacatgataattggatttagttactatgattggagatcggacacgcataatttcactgctcccaaatgccttctgctcgagctataatattgaggggggtaccccagaaccccggctagaaaacatatagttattactaacctattttcatcatgtgtgcacat

SEQ ID NO: 2378 - DNA, 501 bp, Oryza sativa
  unsure (1)..(501): unsure at all n locations
tcagtcacctgcngctgcagcttaataagggtaacgccttctctctctgcctcgatatgaaccgacttatggcggccatgcaaccggtgacgcattgcacatccctaagtttgctgggggggcgcatccgctctatagcccgtatcttctcggggttggcctcaatgcctcgggcagagaccaagaacccgagaagcttgcccgcaggtacaccgaacacacacttatcggggtttagttttatgcgggcggagcggagactctcaaaagtttccgctagatctgtgagtaacgtttcctggttgtgcgtctctacaaccaagtcatcgacataagcctcaacattacgtcctaattggctacccaaagaaattcgagtagtacgttgaatagtaggacctgcattctttaacccgaatggcattgtcgtataacaataggatcctatggnggtaatgaacgcagctntttcctcatcctccctagccatgcgaatctgat

SEQ ID NO: 2379 - DNA, 411 bp, Oryza sativa
ccttgttcgcaaacattctcttcatgcgctccgcaattgtgagataccactccacctttgctgggcctcccctctgtgacttacttccttcaccttcactctttgctcgtttgtatcttgatgccccacagatatggcagacatccaagtcagcgtattccttgtaatacaaaatgcagtcgttcagacatgcatgaattcttctgacctccatgcccaacggacataatacttgcttcgcttcatatgtcgtctgaggtaaattgttcccctctggcaacagatcacttaacagctcaaggagttctgtaaaactcttgtgcgaccagcccattctagccttaagcttcatgaattccaacacgcatgacaacttgctgtgcttcgacttgcatacatcatacaaacgga

SEQ ID NO: 2380 - DNA, 215 bp, Oryza sativa
  unsure (1)..(215): unsure at all n locations
ggacccaagcaccgagctgcactggggccaagatgatctattcagcggccngcgccacgtcgcctgagaaaaaactgcctccaactgcatcatgaacagcaccgaatcctgaatcccgggtgcgcagatgactacttcaatataggtgaactatgctgtctcatataaacttttaggcgccataagaatcagacacaaaactggtacgacgaccg

SEQ ID NO: 2381 - DNA, 348 bp, Oryza sativa
cagctaatgacatctccttccacaaaagaaagctgtttatgtctttgcatgaaacgaagactggtcccatccggatacatgagctggacctgagggacgttcctttcacgacaaaaacgtaccccttcaagccgatcctgagcagatgaacaaaacgagatgcaacgcacctatggcacaacccataccggggaatacgattcacacgtagatcggaccaaccatacgcatagataattgtcaatgataacacacgtgctaaccggcccgaattcaacgcgggcggagcgccagcttctcggactctgaacccgaaaaacccaacaaaccgtgctcactatctcacgc

SEQ ID NO: 2382 - DNA, 384 bp, Oryza sativa
ggatcttaagcacgcgagcagcttgccacaccgatgtttcatttttcagccgtggtgtcaacacttcgtcgcggtcgaaatcttcgaagctgctcgctgaaccgacctctcaacgacagcgatgaccggacctcctcccgatgggggtggagccgatccgagcaccgcaacccgacatgtgttggggcaaatccccagggacgaggcactggatggaagtcggatcatctgaaattaaccgacataacaattttcaaattattgaattccaaccaatcaatatcacatttgattactacatttcaacggagctttaacttggacaactgtgactcaactatttgatttgcaaattacaatttgcaaacaaaaatgccctgaaca

SEQ ID NO: 2383 - DNA, 472 bp, Oryza sativa
  unsure (1)..(472): unsure at all n locations
cgagaaacatatctcagattcatcccaatagttgataatatgaatgcaagcctactccggtccttctatcaccctggatcattacaaatgcgcacggaaatgtgttaacagttctctgaactaatagcgaaataaacaggtgttctgttaactaatataagcagaaaatatacatatataccatctacatgatagtgcttcctagctcatctctgaagatatttgcaagtgcaaccagttagtattaagataatacaagattgctgctacccagccatgacaaccattgacagagtactttcgacgatcagcataggctgcaattttgtctggctattcatagaacaccaagttcccgactcagtgcagtgctgtcatcattcatcaagctagtgaaatactcatctccttccatctcattattacatgaaaaaaaaaagaagtntgcatgatcagtatcaattacacaaat

SEQ ID NO: 2384 - DNA, 389 bp, Oryza sativa
  unsure (1)..(389): unsure at all n locations
gctntctntaatagattaatctccttattctaatatatagcaggaatccggctattgacaacgtgataattctcttaagggcttaccaaatttcaccgttaacaccttcttcttgtagtatgtgtacacactgtattgattttttaccgtttcgtattaagcaggagatttaattatattacattaaaagtagacatacaagagtataagaatcacttactattgtaagattattagaaattgttcgtacatcttgtgatgataatcaaggggagctgtcacggtgtcatacttctggtggataatgacacagatgtaatgatcgctacatggtattgaccgtgcagttagtcatggatgaaatacacaaatatgtataaaaaactact

SEQ ID NO: 2385 - DNA, 459 bp, Oryza sativa
  unsure (1)..(459): unsure at all n locations
tcagctagattatttggctctccagtcatagctaanaaatattatcgaacagttccatcggtatataccttttctttccttgtacctcgttgcaaccgagtcattggacgctgtaccatctgctgctgctgctctgcgccatcattgccatcattgccgtgctgctgtacactatgctgtgcctgcgagtgctgctgcgcactatgctgtgccgacgatgtggcagtctgcgggccttcttgctccctgtgacgcatctgcagagctagcaccatcatgtgcagtagaactgtcctcatctgcatggtactgtacaagagaatcattattaaattttacatcattaggctgaataactgatgcatgatcangatcttctgtgccgtctggatcttctgcattttcttcaaaaacctctggattccctgaacaatattctccatatttctgaatatcatt

SEQ ID NO: 2386 - DNA, 385 bp, Oryza sativa
  unsure (1)..(385): unsure at all n locations
agcttgcaagataagttgaatcagttgaatacgaggtcacaagttntgtatttttgaataacaggtttcaaaagaaatgaaatcaagttataaaatcaacttgctaaatctattttattgcagcaagattaaataaaacaacattgtaaaacttttgctagtaaaatgagccattagtacagtaatagatgtacagtactaataacactggaataaattntgaatgagaaccattaaaagagattatgaagtgcatgtgccattagtttggtttaattaaaagagaaagggaggagaacagttctactnttccagtatttttagagggcttctatgggtaacccattggcataacctaaggtcaagggggctctgataccaactt

SEQ ID NO: 2387 - DNA, 430 bp, Oryza sativa
  unsure (1)..(430): unsure at all n locations
tgccatatgcggaattctcgtacaacaacagctaccangttctgtctacagatggcaccgtttgaagctttatacggccggaagtgccgcacacctctcttctgggatcagacaggcgaacgtcaactattcggaacagaagtattatcggaagcagaagagaaagtcagaatcatcatggaaagggtgagggatgctcaatctcgacagaagagctacgcggataaccgtcgaagggagctcacttttgaggcaggagatcacgtgtaccttcgcgtcactccgctccggggagtacaccgttntcagacgaaaggcatgttggcaccacgcttcgtgggaccatacataatcttggaacgatagggagaagtggcttatcagctagaacttgcatccaacatgatcggcattcatgacgtgtgtcacg

SEQ ID NO: 2388 - DNA, 419 bp, Oryza sativa
  unsure (1)..(419): unsure at all n locations
agcttctcttggtcatacagagtgggtgctgaccanagctgaaacagcaagcgtccgaactgctcaagctgtgcaccatgaattgcacatcgacggtattcatctccaagtgcaagcttacgaagacaatccagtgagtggagtttggaattgtgctgttccgcttgtgatttggtcgatggtgaatggttcacctgttgggtctcacataatctgaagaaatggcagcaattagcaattggcagtcgacagcgtctatgtatagataaactttgcagttatgcagaatttgccatgtcatctgatggcataagggtggatgatatgagtagatngtgagacctgtggccatgttatcactgtccagcgagatgatgcgtatcgcagcattcataatgcagcatacacacagctaattc

SEQ ID NO: 2389 - DNA, 463 bp, Oryza sativa
  unsure (1)..(463): unsure at all n locations
nggttcttgagcatatagaaagcattgctttngaacggataatagtgacaaattgcgaacattntggagggagcataatcctttaaatctcgtcgctgcagtatgagagaggatcagatgcacgttatgacaaacacactttaaccctacttccagatgatgtttatcttccgtagacctccaagggatgaccttatcattntttgcatctgtgttcatgatacagtaatggccaattagatcacatgcaatcgccaacagttcaatacatgaataaatactacttcatggcttgaaaaatacattgacaacctctacaagatactaacatcagaaacaggttgttgtgggtacaccagaatcagttcaatttgcaaatatcttgcagaatcaataactctgtaaaaaggacaggcatgaacagaatatgtccaatggtgatgatctgtgggactatatggaa

SEQ ID NO: 2390 - DNA, 263 bp, Oryza sativa
tctatattgtcgctaaatctatggctctgccattatgaagcctaacatctaacctccaaaatatatacagcctagtgtgcaaatcatctacagcagtgcttaaagggtgatcgataggagaatgaaggtgtgtatgcactaaccaaccttactaccgagctcctgtgtaatgcctacagcgagagccctcttgccggtggcgtgcggaccggtaagaaacatcgcgcgcccggccatcttcttctggtgaatcatgtccacca

SEQ ID NO: 2391 - DNA, 484 bp, Oryza sativa
  unsure (1)..(484): unsure at all n locations
ctctcagtcacctgccgcatgcaagctngttatgagaataaagtcttgacaattgatggacattacctcggcataaacatggttcaaccggatggtcacaagtgttgatctcggctcaagcttgaccccaagatggatggcgcaaggcaaaggtataatgtggctaagaatgttntcttagtcttttcccggtcttggtgtttggtgtagaccggatttgctagatagacgtcgtactatcaagaggggtctatgaagcgagcttgtggatgatcttgtgccatattagttcatatgcatgtaggtgccatttgtgggcttgtctaaccaagtttgatgagttttctcaagtcctaaaccaagagagaagtgggcatgtccaataggagtgagtgacatcttgtgggtatgtccggtggatatcctttggagtgtgagccccttatccttgacttaagttgtgttatttgatgtattnttcatg

SEQ ID NO: 2392 - DNA, 394 bp, Oryza sativa
ctaacttacgatgaattgtgacggaacatgagaaatttgcttgtttttatgttgttgaatgtgatgcatgtcattgctactttatatgaaaaaggggatccatcaggtttccctattgtttggtagagataccgaaccagcggtttgctgtccacgaatacccgaggtatccgaaatggttatttgaccatgtaattatgtgtgtatctgaaaatcatgcatatttatacagctggcatgtattgttgcaacttcttacaacaaacctgttgaaatcaaaattagaagggcatgtttattttgacttaatgagtgaactatcaataaaacgggggctcattatgttgctgtactaggtgaaacgacgaacattttgttatattttcgatcaatc

SEQ ID NO: 2393 - DNA, 491 bp, Oryza sativa
  unsure (1)..(491): unsure at all n locations
cctgcggcatgcaagcttgagtgtgtgcgattattgagctgtttctatcactatttaataggaacgcgcatatttttgcgtatgtttcttgttttctactaacaatggcagggatacgcaagataattggggatagctgtgctcaacatcgacatcttcgtcgagacatgaggagggatcaacatgaccattatgaggtaagtgatgatgttctangtaagatcaaatctgcactgccttatttcgtgggaaactatgatcctcgtgcttacattaattgggagctagcggttgatagtgaatttcaaaagcatgtcttgtcggagaaacaaaaggttatgtgtgcctctagtgttntaattaaacatgcttctaatgattggaaacatctttgtaggtataacacaataccacaatcttggaaagacctgaaacgatatttcagagatngttatgttcccatgtattatgcttgacattctgtcacaaaa

SEQ ID NO: 2394 - DNA, 385 bp, Oryza sativa
catatcatgatagtatgaagtaacagctctggtatcttgttctaaacattgcagtttgctgaacaaaatgtcatcataatacatgggaacataaacatctctgaaatatcgtttcaggtctctccaacattgtggtattttgttatgcctacaaagatgtttccaatcattagaagcatgtctaattaaaacactagaggcacacataacctcttgtttctccgacaagacatgctcttgaaattcactatcaaccgctagctcccaattaatgtatgcacgaggatcatagtctccctcgaaataacgcagtgcagatttgatcttacctataacatcatcacttacctcataatggtcatgtggatccctcctcatgtctcga

SEQ ID NO: 2395 - DNA, 434 bp, Oryza sativa
gcaagcttgtcacggtgtacatatgccaaatttatacttaattctgtagaaaacacggcgctgaataaactcattcacatgtaaatgaacatacatgtgcaacaagttacaagtgtctctaggacctagtttttacatgttataaataaatatacatgtaaaaaataaatgcagtgttaacattctttgggtgaaaaaattttgttatatcctcgcagttggagctatatatatggctgcttgtaaccttcaccaaaatgtacatcatgtcatgtttgggttctaaatgttcagttggaaaaaagcagtatagaatataataattttgagtatattatcatggtaatatgctgcaacctgtagtctctacatctacattttgatcacatttaccataacttaattgttgaagtcactcaacattcattatgact

SEQ ID NO: 2396 - DNA, 460 bp, Oryza sativa
attcttcttgagattatatacacaattcaccaatgactttgcgtcaaaaatttcatcaatgactaacgcagctttcagaaactatcttcaactctacaacagtgcttccatcatgcatctatgtacaatctgcaaaagaaagtgacaatacacaaggatcatcgttgggtgtctcggtgaaagtgaagcatgcatgagtatatccatcaaacaatgaagtacttcagtgcaacggatgtacataccggagttgcggaacgtattgtggtcgtggcacttgctacaatgcagtactccaacttatgtgtagtacaagtgtacaactctaccaataatgtatgggaaatagtttggagccctatgtttacaacctattttgaccaattagtacaccatcatcccatacttctatccacctgtagccatggttcatagtaagggttatttataagaatatgca

SEQ ID NO: 2397 - DNA, 412 bp, Oryza sativa
  unsure (1)..(412): unsure at all n locations
agctgggatggcatctttaactatcttactgaatacttctggtatacttggggggtgagcaccatcaaatggacgtgtatctccatatgaacgtgaatttggatcccagttcttccctaagcacatcatctgcaaacttaatttaccaccatctctgtagccaggagtataaaatcctcctgagccaataccaagtttctggcagcgtctgataatgtcaacctgatatgtgcgataaaagagattagatatatactttcaaaattaaataaacattgggaatttataatacaacctaaataaaatcacaataatcaaataaattgagaaagtgcatattaatgtgaggaattctgaatattctacgaaagttgtagcanactgtgccaatgagagagtcacagtagtgaca

SEQ ID NO: 2398 - DNA, 329 bp, Oryza sativa
tcaagaagatgtcacataggatgtgccatggccagatttgcatattatatggtgcatgtgacatctatgggcatttttttatagacaattcagaagtaagagattgatggacatgttcaagaagttatgcaagcagaatcaataaagaaaatgtgatgctatatgggaacaactagatcgtttgatcactacacacatggaagaggttcggataaagctcgtacttgccatacaagatgagccggatggacttgaacccattcctaatgaagcaccaagtattactcggtgcatgaagcgcataatggccacgaagtgcttcacggagt

SEQ ID NO: 2399 - DNA, 349 bp, Oryza sativa
agcttgtggtgcgtgcaaagctcatgctctttatcatcatctcttgcacttcttcaacgtccaaggagaagaaaggcgcagaaatgaatcaactgaaggacgccgtcgatcacgcactggccaaagctggtcaggtgaactatgcacactcaacaaatactgataataatggaaaaagaactccctgcccactcccttgctaagctgtatactgcaccgccatgaaagaatgccctggctatacagaatccggatatagatatgtatccgaatactgatcgacgtaatggtatcatgcatcaaccctgatcatgatgtttatgtatgtgatggacgatataactaaata

SEQ ID NO: 2400 - DNA, 388 bp, Oryza sativa
  unsure (1)..(388): unsure at all n locations
tcgaagtgggaatgaccgtacctcatcaagcacatgtccataacaggatccttttgtctggcgacactggaatgcgaagagttcgaccattcctgtaacgctgcctctctcaagcagttctatgtctatagcgggtggcacccaaatcgccaacttgtaaaaatgtatatatcgttatgtaagcgccttcggcactttgtaagcctttcggcaaagaaaaaagataaaaagaggaaaatgaaaaaagacaacaaataactagatgtatggctgttatccaccacggaggcccaaaccagtatataatctctgtgtcctccgcttctttttcatttatntgcgtgattgataatntgcggaaaaccaccaatgcatacgcctgatcagc

SEQ ID NO: 2401 - DNA, 70 bp, Oryza sativa
ttaccccgcctgcactattgatactgtgtattataagatctgcgactgagcatacaacgtaaaaactaat

SEQ ID NO: 2402 - DNA, 466 bp, Oryza sativa
  unsure (1)..(466): unsure at all n locations
tgcatgttacttatgacatgacatttcaaacctaattaaatngactgatgtgtcatgtacatgtgataaattgtgtataacataattaaattgactatggaagcagcagccaagggtgaaaatggggcgggtaagatcggatcacaatcagagttttcattactgtcggtaaccgcggttaccgccattaccgcggggtacggtaatagaaataccgcagtatcctccttaatttcaaataaatttagaaaataatttgaatttttaataaattttgcacgggttcgtacggtttttcacggttaccgcggtaaccgtgcttaccgccggtgcgcggtaaccctggccccgatgggttaagaaaccctcatcacagcattctcatatcctaacctacatcttactttanattcngaatccgatatgggtagtggcngataacacatcactcatcccgtattctatc

SEQ ID NO: 2403 - DNA, 402 bp, Oryza sativa
  unsure (1)..(402): unsure at all n locations
tagcgcaatttctgtgggccaacagtggctacgccttcatgcgtggtgtcacgcccagaaattcacgaaccagaatttctaagctgaatgtgcattaaacccctgtccaggaccagccaggatacacaaacgacaactattgacatacagatccacgttttacaaaaatataaaagattacaaatgcagcggaaaaagataaaagcgagctgagcctgaagacttgactcctgcagcggacgactccattccacaggcatccttgacggcagcgacgaaaccaacctcttcgagacatcttcaactgagaaggacttcaactctggtgtggtggaaaagagaggaagactgagtactacccactgtactcagcangtcataccggaagaggaggtatgatgc

SEQ ID NO: 2404 - DNA, 424 bp, Oryza sativa
agcttatcgatacaccgcctctgtcttatattctgtataatctgagaggagttctttctcttttcataacgaaagcctgaaataaattataacaccagtactctaaaacaagtcttatgagaacactactccagcatgcacggcgcgatgaactttagcaactaatttcatgcgattctgagtcatatatattggacagtgccagcgttggcgatcggatatttctccattaattatccagctgcgtgaactgtgttgatacacaggatttcaatagaataatcaagagcgcagcataatactatgtggaaacacaagtgcatgcgtgctagctccggccttagtttttttttttctggcagatcagtacataccatcagctagcgacatgatcattcagcgacgtgcatgtcatgactaactg

SEQ ID NO: 2405 - DNA, 425 bp, Oryza sativa
actttgccttatcatactgtccacatatgactccccatgtctctcttggaacctaactcagatcatatcatactatatcattattacaaggcacaatgaatatagttcaatgtgggggttgcataggcattgttagagaatgtgtaccagcaatttatttcaatgtttagagaatgtgtatatgttatctaatagaaagttcaacatgcatatgatttgaaacaacaaaacactaacataatttcgcagttatcaacatagaagaagcacaaaacttcataatttgaaatgtatacgtaagtgccgtggaatcacacttatcctctggcacatcaaagctagctgggaaacaagctatctattcctagataggaactagaataatgtgatccaactggaacacgcattattcactatggatcata

SEQ ID NO: 2406 - DNA, 405 bp, Oryza sativa
  unsure (1)..(405): unsure at all n locations
agctggagtggagaagatttcaccctcttgtcttttttggcaggagggggaggtgtggcctgctgtcaacctccatactgtcgtccccaaaatcagtatcatactgtaattggatgtcacgccctgaaattcccctttccagctttaaaatntgtaaaataaatcgtccgaagaaattggtgttcttaacctagagatgaatccctaattaataaatgcaaaaaataatcggaatcgacatgtggaattttttcttggattctacatgttaaaatatgctaacaggatntttagtggaattttcagagccttggaaataattttaaccaattaaaatgagcagagggcaataataaatgcctggataaatctcttcttctgtttctaatcctactttttctctct

SEQ ID NO: 2407 - DNA, 431 bp, Oryza sativa
  unsure (1)..(431): unsure at all n locations
tgaacctttgctcgtcccgagtgaaggatgaaaggaaactatgacttggttgttgatcangagttgctactatgctgcatatctcaatgatatangtgcaaggtatatgtaccctctctcagattaaataatcttttgcacggtggcttactcttacccctgattcccacgagacactgcttctccttgccttgggtggttgaaagaaagaacagcaattagagcaccaatcacccaacattcattcaactcttattccggaagttttgaaatgatttttgtaaaagaaagccaagttcctcaagtgattcgctcagactctctaagtgtatcaatatgacttcctcaccagaatttgcctttntgattcctactttaaggttntaatatgtggagctcggagaaatcaaacatggcatacttgcattcac

SEQ ID NO: 2408 - DNA, 297 bp, Oryza sativa
  unsure (1)..(297): unsure at all n locations
agcttctcccagaagcctcctctcctctctactccactcaccaacccactcctcttncaccgtgagagagagagagagagagagagagagatgcctatggttcccacgctgcaagcttccgccgcggcggcggcggcggccgcggcgaggagctggccgatgctgcggcggctctggaggaaggcggtggtggcgcccgtgctctggctctaccacctcggggaggacatcatcttctacggcttcctggcggcgatgatggcggcgaacctcggcggcatcgtgcccgagatcctc

SEQ ID NO: 2409 - DNA, 447 bp, Oryza sativa
  unsure (1)..(447): unsure at all n locations
cttgctctgaatggtgtcttcgtggttctgtgtccncggtgtgaatgccaacgtctctttntatagaggccatggatggcgtcgcctgtgcctcctgcttatctcttcgctactgtatcttcacgggagctggctaaagtcgatgcctttccaccgaaagttttattcttcacagggatatgtcattcaccgcaccctatattgtccccttatactttatagggtgtccttctggattctttcttgggtagtcttctgaatttcttttattcttttattcttcttccacgcccaaattgttgatattctattatcaatatatattgaanaacatatttagcttatatcaatttattcatctggttgcccatggccaccaagatccattgtgtccaaatcagaanaagaaacctctaatttctcatctactgctttttttatttgctc

SEQ ID NO: 2410 - DNA, 426 bp, Oryza sativa
  unsure (1)..(426): unsure at all n locations
agctntacgtttctccattgtaaaaacgaatgttgctacaaccctggccacactagaaatataccttgtagaaacaagatatggcgtgcatgccccaaaggcccaaaccatgccgctgctagcacatccccagtgcatccatggcaaccggcagcacgacagaacggtgaaagtaggctgagcagccataggaaaaagacgtgatcaaattaaggaataagttcactttaggtccctcgatgtgtcgcggagtttgaaattcgttcctaaaccgcaatactaggtatagtgtgtccccgaactcacaaaaccgtgttaacttttgtcccaagacagtatggctcctggtttcaagccgacgtggcgctttgactccggtcagctatgttgagtcagtgtgacacccgcatgggccctacatgttag

SEQ ID NO: 2411 - DNA, 370 bp, Oryza sativa
caactgtgcgttccgacggagaccgatcaatgtcttatctaatgtggctcaatgcgatagtatgcacgcatgggtggtcggatagatcaagccgacatggcatagaaacacgtgctggactagttggattgcagagtttggctgatcataccatttcaacacagtgatggtttcgatcatacgaggatgggccgaacggttcgatcagatttggctggttagacccatgggcaaatccggtcggattgatacgtggggcgagtatactggtggcaacatgctaatcatatcgcatatgaaaatatatggcggaacataatttatctgcgactcgatgaaaggttgagatatttggagttggtccagaatt

SEQ ID NO: 2412 - DNA, 497 bp, Oryza sativa
  unsure (1)..(497): unsure at all n locations
agcttacaccaaagaactgaattagttggtctgtaatatgtgggcatttggatgtattttggtagcagcttcactatgtattcagtactaatactgtttggtaccttttggtagcagcttatctgcttatgtctccactgctaatatgtaacagcagcctatgcatttgcaatgacaatctgtaatagcttagcttggcttttggttaagacttatctgacaatatgtgacagcctatgcatttgcagtgactatgttgttggagatattatgtcattgtgcccatttacacagcctggaattgttttaatgcctggaattgttacaatgcatcatttactgcatgaatgtaccactggctatatactgcctgattgtgctgcttgtgctgccaaaatactgcctgcctgacattgtgctgtttgattcacatttgccacancactgaataactatatatgcagtaacccatattttgaacacacagccaaaacact

SEQ ID NO: 2413 - DNA, 440 bp, Oryza sativa
  unsure (1)..(440): unsure at all n locations
atactcatgctgcataattgagttatggaatggcaattaatgagcggtggtctttntaattttttctgtgatatattaaatgaaaggagcaattatatttttcttatgaaaaatatactagtaacaattgttgcctgttacatccctataggtatgttggagtactgttaaagggttctacaagaataaagtccacccgggacaagtgccctttgtccacaccatatgctcccaataatgtgtgagcctatcaattacgggttgcgttctctactcagtgttctcaacttcatcccacttgtctttcactcgtacgtcttctaaacggttaaacggtgcgtattttttataaaaattatatagaaaagttattttaaaaatcatatgaatccattttaaaaaatagctaatatttaattaatcatgcactaatgagtcgc

SEQ ID NO: 2414 - DNA, 378 bp, Oryza sativa
  unsure (1)..(378): unsure at all n locations
ttaactgcatcaaaccaatggcattcgatgtactcaccgcgttcggattaccacccgtttctatagcgataatcgccgtgatcaattgtggatcgacgccccatgctgcaccggctntctggcttattggcatccactgcatcgcacgttgcaccggaactttcgcgttccacggcgggttcgtatagtcatgctttgatgaacaacccgctaataacacaatcaaaaaggcaaaccatctcaatttcacttcttctatccttatagcctggaatcgccgttgaggtgacaacggcacacctaagcggcatgatatacatttcgtttctgttgtcagcaaggaattgccatgtctctgtttcacttaattgccccatc

SEQ ID NO: 2415 - DNA, 478 bp, Oryza sativa
  unsure (1)..(478): unsure at all n locations
ctcacagtcacctgaggcatgcaagcnttgctattcaagctaaactaatatatttaaccattttttatgaagaatggaaaacatggattcaaggtactcaaatcatatggattaaattattaaaacggatgctaatggtaactaatatgcttgcgggttcaactgaacgagaaatggagaaacatataaagcctataaaaaaaatagcatatctaaaacatacctgtgacaatatctgcttaaaaacatgttctactactacatcaatgggctggagctcaacaacatgcaacaccaatgttctccatgctgcggaacaaaaaacgtgtgtcatatttggggaacatgcaaatttacagcactcagcatggaaatgatcagatacaaaggcacaataactaataagtaaactagaatcaagtaatgacaattatctctgtgcttaatgagaataataactgacaagggttaatcttac

SEQ ID NO: 2416 - DNA, 408 bp, Oryza sativa
atactcatcttacccatgacctgtgatctggacatcattgcccgatctctcattctctttattcacgcactgccagaacttgatctgataaagacacgatcagcaacggtagcatttgaatgacatacctgcttgacaatgatcacaatgaaacgctttggatcaaacaaatcctacattaaatggtatctcacttacggctcaaatagtttgccaagcttctcacacaagcactcaaatcctaataaagctccttcgcgagattttgcaaaagctctggaatggacagatttatatatagtttcttgtcaaaaggacacataatccacacaataataaagtacgatgcaaagtattattccgtcatcgatagatgcacgatcgaagtcatatgttctcaatatgctg

SEQ ID NO: 2417 - DNA, 450 bp, Oryza sativa
  unsure (1)..(450): unsure at all n locations
cccgagaccttaagtcacctgcngcatgccagcttcgacatctaccttgctcttacattcttgcagcaacaggagattgcggcatacgtcccgatgtgtacgtgtcaccttattttatgaaggaagcaatctttcatacttggagtgaggagatatatgggttcgggatctcaggatcttacacaactcatatgtcccaagtttttttcattcccggtccatcgaagttaagggtgaaaaaggggcggcgttagactatacgcatcaaatatgacatggacgagtcggaagctggtgggaggactctatgctgcatcaagtgtgaccagcacggacatacttacaagaaatgcccaaagactgcacagggtccaagcgtcgatgatgttggtccatctggagaggcaagtgatggaagataaccagctggagaatgaacaacaccaggcg

SEQ ID NO: 2418 - DNA, 428 bp, Oryza sativa
tcttccatctcccacgtgcattcacaacaatcatcaagcgtacaatatggcaaggtctgtagccaagtgctatagtacgggaacgccatgtaactgcagttagtagctcaaagctcgtgactgttttattgagatttaatggaacatgacgccttattgcagccatatctatttgagagagaatatagtattcagaaaccatgttttcagtatgcattgtcaccataatatcatcacatgtggtgctctccagttcatcaaataatttcttttggtcttctttgatgtggggttgtagacttgttgcgagaaagagctccctttcccaaactggcaacagtggtggttttgcctcaccacgtgctatatcaactatagctttcaagaattgaattgtgccgaatgcatcagctatgcaatgacacatg

SEQ ID NO: 2419 - DNA, 390 bp, Oryza sativa
  unsure (1)..(390): unsure at all n locations
ttacagtcacctgaggcatgcaagcttgccgttcgccttgtgaacgaccactgtgttcgccatttcctccggatggatgacctcacggatgaacccggcctccaaaagtctagccaccttctcgcggatgaaggcttgacgttccggggcttgccgccgcactttctgccggaccggccttgcgcccggccgcacggcgagacggtgctcaatcacctccctgtggaccccgggcatgtccgctggtctccatgcgaagacgtcagcgtttgcccgcaggaaggagacgagcgcgtcttcctatntgccatccagaagaccaccgatccgtgtggtcttggatgggccgtcgcccaaagcaacctccttgaccgggacctcgtcgcatgt

SEQ ID NO: 2420 - DNA, 439 bp, Oryza sativa
  unsure (1)..(439): unsure at all n locations
tctctcctccccctctcttcttcaaaccagattttntttattgaaaccggactttgcttgacgaatacaaacgctgatgtactgacctccgtggtttcacccaaccttgatggaattgcattggcagcattggtggcatgtaatcatacattggtggcgatgccccccatggcatgaagggaaaggataatccggcgatggcattggacaaggtcccgttggcttgacttgaggatgataagggaaaggttgctccaatcgtcttggtgaatgatcaaatctctctctangaggtgatcttggtcttttacccttgttatgtcgttgttcaacacacttcttttcgtacttgttcaagagcatatcaaaagacaccatctgccttcgtggtgttctatagcttgaagtttcacccttattcttcttccaacaccaactt

SEQ ID NO: 2421 - DNA, 451 bp, Oryza sativa
ggatccttaagtcacctgaggctgcaagctatgccccggtagttgtttgattgtctgaatgagcgactttgcaaccgatcaccactacccaatagaacatgtcctgccgacgtctggcttaccggtataaaatccatcctatttcttccactccactctggaatcttcaacggtgaacagaccggctggcttctcatgttctgccttgcccgctgatatacgttacatatagcacatactctcctatctcacgtcgcatactaccaccagaattgtgctttgatcttggacatcttactgctccagggtgaatggaaacacagatcatgagcttcttcatgataatatccttcactccttattatctggacgcagatacttctcctaccaacagttcttgctatttttacaaaccatggctgcctcttctatgtctattaattcttgatat

SEQ ID NO: 2422 - DNA, 270 bp, Oryza sativa
tcttatcaactcagtcaacaccacatcttttcatacttattctattcagcccgaccggaggggaacacatttcaatgtgcacccatttggctgacgtcgaaccaaccattccgggggcttcgccttgtattcaagaccgcatttcgacttcatcatcgctgctcatgcaccaaccgttcaaccacaggcaccaacaccagtcttcggagcaattcatgcacctaaccatgttgccatggcttggacccatcctccgttctacccatacat

SEQ ID NO: 2423 - DNA, 465 bp, Oryza sativa
  unsure (1)..(465): unsure at all n locations
tatgtatttctcttcatttctatcacaataagatggacttttcccangatgagaatggatcagttattaaatcttggatggaaatttcttttacctatttccctgtgcaatctcttattaacaacttcttcccaacttgtttcactataaaataagataatacaataacagttagaatattttcaacacaaaagtcctctcatacaagagaaagaaacatacctttttcatagatatttcgaatatgttccctatggtaactgggttcatgagttatggtcaacaaacaatacgcgcagcaaggtacattggtcaaagtttcataattaccttatcccacacaaatcgtttacctataacgattcactacccctatgaataatcaattacatcngagcgtttcgggggcgaatcactttgaattgataatgtatcgctgtgaatatgtgtcgcgtttccctataa

SEQ ID NO: 2424 - DNA, 462 bp, Oryza sativa
  unsure (1)..(462): unsure at all n locations
agcttgttaatngagtcaagataaataaatcatcaagaaagcaaagtattagggcaatccaacccacaaaatagagtaaattgcatcgccggtgtatcaacttggcatgtgggtgcaaaatagtgcaagaacttgagaaatgagcaatctagtgtaacaacttggtagataggtgtaatntagtataaaaattttataagtgatcacataaatgcaccaacttgcaaggtaggtacgattttgatacaataattaagaagttatgtggcaacttaattatttgaagcttatttatatttntatcatagtaactagtaactgaatttcaattaaactgaatgtagaaattattatatttggttgatatttgagaaggtgaagaanacaaaaaattcttaaaaggtaatcgtgtcgacagtgggtacccgtagaccggatatagagggtatttgggtacactgg

SEQ ID NO: 2425 - DNA, 252 bp, Oryza sativa
taactttgattatcatgatttatccaactccagctctttaatttaagcgcatatgagttcgttgctcacccaccattgaagcccttatcttcatgtaaatcatggaaattccttgaggcttgcatattggtgagaatcatacggatatgcttgcccatttatttttttcgatcatttaacattattatatcttactgatttgcatgtatgccggatatcatggtatgttacattatatctttacaattgaca

SEQ ID NO: 2426 - DNA, 450 bp, Oryza sativa
  unsure (1)..(450): unsure at all n locations
agctggtgtgcgcgtatcaattccacgtttatagaanatcacgtgaacaggaacctgatcgcttccatcgttgacttccttttcagcctcgggaaccgtgcgaattagttggatgtattgacgccgctgctactcctggacgtgcgcgtagacggcttgctgctgctgcttgccaatcttctgatgcgtgcgccgtttccaggacgtgggctgctgctgccctaatttcgcgcgggcggtagggatgacgccgatcagatcgatccggcgcctcgacgaaccggcggcggctgcgtgacctgtagatcgatctccaaagctctcataccacttgttatggaaatagatgcacaatggagacgcgaatttacgtggaaacccttggggaaaaacacggcgccgacggaatgatcactataagagtgatacagacgtggggatacaagggac

SEQ ID NO: 2427 - DNA, 274 bp, Oryza sativa
tacttccagcacttgatctgtccaacccaatcacacgttttccccacccccgcatatgaccttgcgccgcttaccaatcccactcattcacatccctacccaaactgtaattacagacaactcgaggggggcatctgcaaaataccactactctccgtctcctccttggtccaagggttaaaaatccctcgtcctcgaggtagtcgcgacctctctcttctccgtctctacattccccactcgctctcgcctctcccccctcctccccaccatg

SEQ ID NO: 2428 - DNA, 466 bp, Oryza sativa
  unsure (1)..(466): unsure at all n locations
agcttatcagcgaaatatattatngngtgtcttaatcagctattactccctccgtttcagattatatttattaaaatcaaatgcttaatttatattgggtccgtgaggggacagtaaagttctttgcttaatttatatttcttatttcccaatttccttgtaaatcagatgatatattttgcttggagaatatcattggttttccttgtaaatctttntactaattcatatcattggttnttcctgactgcaaatcacagttcaggtcctctcatgttgtgatttaatgttcagaaggctattatggtttatgggtacttgctctaatataaatnttgtcaaaatatatgtcgaagttaccataatattgcagaatactctttcatctaatccctgaattttagaatggtgcacagtgaattagtanggtattttcttgactaatgctgataaatcgacgtgtaca

SEQ ID NO: 2429 - DNA, 439 bp, Oryza sativa
cttagaatcaatcatcgtcatgttatgcttctctgtccttttgtcacttggtacactactattatcgtcttaatatgatcaatagtttgcctacaactgaaacctggtactcctatgtaatattcatcgcctcaacagtggacaataaggagttagcaatacatggaaaaaatcattcttaagctgatgttatctgtgtataactcttggagcaataaggatactttgccaagatggcttgctgtcaacaagaagatagctgatagaagcctcgcacaacttgaggttcagtcacaattcccatcaatggttttgtttattggcacataaaagatgtgcaattgcgtgatactttattttgtcaatgctgagatagaagggggaactgggccggaaagtctaatgaacatatatctctcacatcatgaaaagaaccgaa

SEQ ID NO: 2430 - DNA, 453 bp, Oryza sativa
  unsure (1)..(453): unsure at all n locations
agcttccaactctgctgctttcatggtcatagcaatcctcctaagaagaacatcacgtgaaattttntgcgcatgattgagcgtgctcgcacgtagttttcgccgccaaactttgacaattgccgttgatcgatcctatcctgattggaactgaactgaactgaacaagaaaacacaggacaaaacacacaaagtttctaggcaaccaaaggaagcgaatttcctggcataaattctgttcctaggatcagaaaatgttgagaggcaggtagatgttcctttcggcgtcgcgtaagcgaaaggcgcacgcgcatcacattgtgtgggtgtgggtgctatgagaatctgaggagttcttgctggaagattgattnttgtcccaagactaaatattgttcactactagaactctgaaggtcaagttaagttcttacatgtggacttccacaacac

SEQ ID NO: 2431 - DNA, 444 bp, Oryza sativa
tactctgcttaactacagtttttcgttggctgttaaaaccatattccactcttttctattaagccaaaagctaggttggtggaacttttctggcttatatgacgtagatatatgacttcaccactaaattcaggacatttaatctaccggtttataaatcatataagccaataaggtgaattaaaagtttaagggccccttttgatcgctaggtataaaaaacgtgggaatatgaaaaacatatgattctgacaggaattgaagtgtaaaacagacgattgcaaaacacaggaaaaacacatgaatggtcgtttgttggagcgcacgaaaacgcctgaatggatgagaataactcaaggaaatttgcaagatgtggagctcttgtaatattctcaaatctaatgcacgtgcattcatagaattcatagattggaagcttaatct

SEQ ID NO: 2432 - DNA, 462 bp, Oryza sativa
  unsure (1)..(462): unsure at all n locations
agacccggatcctctcagtcacctgcngcatcaagcttctccacctagctntggcttaatttgttagattgtcttatggcttcaaaaaagccaaatgaaaaaagccacttgtttgtttaggcttagacttttcggattataagttggcttataaatctaaacaaagagggccttaatagaggaagtatgtgcaggtgtaagaaataaaacaatagcaaattgtgtagatatttagggtgtgttttgaaaggaggtgaaaaagagaatattatgaagatatgcaagataaggtgtaaccattagcggatgattaattgatattaagcattctaaacttgtaaatggatcggtataattatttttaaattaacatttctatgaaaaacgtacgcataaaaaatgagctatatttatcctttgtgcttcanacggacgcatcctcactcctcagtactaacaact

SEQ ID NO: 2433 - DNA, 441 bp, Oryza sativa
gtgtgctcacaagctatccattgttaaatatgtaacacttaatgacagggagctactccctcattctctatatgtttgacgccggtaatgtttttaaacatgtttgaccgttcgtcttattcaaattcttttgtgaaatgtgtaaaactatatgtatacataaaagtatatttaacattaaatcatatgatatgaaaagaattaataattatttaattgttttaataagacgaacgatcaaacattttttaaaaagtcaacggcatcaaacattttgggatggaggaatgatatagcagagaatggcaaccagttaacgactcaccatctctggtgtgcatcaaagccatagcgacttataaacatcaacagtccgtgactcatatggatgctgtactctttaggcagattggattcttcaacatgcacaaaattgctcat

SEQ ID NO: 2434 - DNA, 465 bp, Oryza sativa
  unsure (1)..(465): unsure at all n locations
tctctaagcacctgngctgcagctttagtaataaccttggctctctcatgagattggtatttgatacaactcatcgtttccttgagtttcccattctgccatcttctctggagtctttcattattagaagatgtaatccagagttgttggcacgctggaaaaggaaagatagttctgaatgggacaggatttcactcatccgccatatgagaataggtatgccttgcttttgcatctatccttgtcatcatctcctgcaatctaatggtcacttggtcagtcctagagatgttattcgtatgttactttgtttttccttctagcaaaattntaagtttgtttttcacatgttaaccaaaacgatcccctgttagaatctgatttgggctgtatctcctgccaagctgactgtaagttaatctacaggagatgcatactacaatttcnggaaaccagcggacaaat

SEQ ID NO: 2435 - DNA, 421 bp, Oryza sativa
tttagttgtggcatacatgaatttaacacgtggctccaaattgtggcgttttcacatttggttcttatggggtcttctggtacttcagtgcttctacaagattctggtgcgccatatagcatccaagtccttgtggaatggtcgtagttcataacttcttcatgagtacatgggtgccaatggtaacaagagcaactttaatcctgaaatatgcaacccagagactatggaaggatacaagtacttggtttatggagagttacagataagccgaatgagtgcacacattctaaaagttgaagacttgaagtccctagttaccttggacaagatttggcgatgtgatagtgccttgctgctaacctccatcaacatgcaagggaacaacatgaaggacatggccctggcatttgcattatct

SEQ ID NO: 2436 - DNA, 458 bp, Oryza sativa
  unsure (1)..(458): unsure at all n locations
agcttgatcatcggcgganaactacttgatgtgcattccttattaaaatccctttcacaaaagtgttcgaccagcaacgccactgatatcgtgcagtgggaagcttaattagctataattctgttgatggatatttcatgattaactaagcaaaaagaaatgtgccacgaaatctcattactcacgtttaaagaaaccactacattatctgccctaaaatttatcgcattgcgtcacanacctatgataaatattaaaagagtaaatntcataaacccacctattacggtccagttgaacaaagtcataaacattntgacacatgccacataaccncagatattatggtcctaaagtttcgcacaccacgtcattaaccaaattggcatactcctatatcanaaatttaaaaggttntacttacatggatgtgacattatatgangataataactcat

SEQ ID NO: 2437 - DNA, 451 bp, Oryza sativa
ttacatcttatttcctctattgtactatttggtttaatggtggtggtaacctcttctcttctgcaggatccttgattgttaggttcattataagatggcctgaatgcacttctgaatattgaagtatggaataaagcattgcagctttactgtacattgattattgtttatggaccatggagtaaattttacactatttcctgaagaaaagatggagtataatgattctatgagcaacctttggtttagataccttaactcaagtttgaagaaactaagatctcagtatgtcagatactattgaaactgttctgtgttcttaacattacaacattttgtgttcctgctcaatatttagaatagggatgtattttgcgtgttaattgtctgataacgaaagagagggaggagcggaaatgtttgatgtctgatgtggtcactcaacactatg

SEQ ID NO: 2438 - DNA, 435 bp, Oryza sativa
  unsure (1)..(435): unsure at all n locations
tctcagtcacctgcggcatgcaagcttggccttgtggcctcaagggtgcgttttttgattctcttnctcgtcgccttttcccacacccnccgtcgccctcacccgcacctggccccttcttcgcttggctgcaatctttcctcttttccctcttttgcacttaccaccccctcccatttgttttctctcctttcttgtcctcctcgttgtcatcccttgtgatgtttctacattgtttttcagagggctgctacaaaacggaatcccgttgcaacgggatagatatattaactattcttttgcacgagtatcacatgtatcaggtcctagatatcacaagtaccgagtaacaggtatcacaggtatcgggtactatgtagctggtaccacaacaaagatcaggtatcagatactgtcttataagggtatcccgtt

SEQ ID NO: 2439 - DNA, 428 bp, Oryza sativa
  unsure (1)..(428): unsure at all n locations
ttcccgttgtgcatctattngcattacataattcttaaccacgttttccctacgtatatgattgggtcaggatntgggcaatcggtattacaataatattcaagaagaacttcaatttcttctgaaaaataatatacatagctagctgacacttcgaatataatatgggttcattttggatcagtttgttaggatcgggagatactaagatggccctctggatgatgctcgctcttgtaagtaaatttatacaacagctcgatatgttcttgtttctttcatgttgatgctgataacaattacccagcatgatcgatcaaccatcgttgttcactgaattttctttcagccgactggactgttacgacagaactgttgcacatgtgcaatatcatcgtgaagactgatacaatataacatctatagcg

SEQ ID NO: 2440 - DNA, 488 bp, Oryza sativa
  unsure (1)..(488): unsure at all n locations
agctggcccttgagaacacttcttaaagactatcgaggagtcatcccttctaaatacggtcacatcaacatcggtaaaaagacaattgtagcccatggaacacaattgagaaacggacaagagattatagtttagagattctaccaagaggacgttagaaatggaaaggtcattgtagattgcaatcttacccaatcccattacttttccctttccatcgtccccgaagactatgttctcttgcaaagagccattaggatcaagggagcaaaacattgattcttctccggtcatgtgatttgtgcatccactatcgatcacccaacttcttccaccggagagatattcctacaagagatcaatttctagttttaggtacccacacttgcttgggtcctctcatgttagtgacaagtgccttatgcacccanagaactctcttgatgganacattttttgccctttngcctacatacttancaacaaca

SEQ ID NO: 2441 - DNA, 474 bp, Oryza sativa
gttcatcaatcccatctatcaattatctgtacgggtgatttcctcaacaacggcgatccacatcatctaatcggatcccgcaacaacggcaatcctcatcgctagcctacgctcacggtgttcacggaagtccttaagcccgcaggataaagccattaagaaagatctactacgctagcctgtcccattccaggtcatgtggtctataatacaccgagtttcaaattagtatattgcagaaaatattagaacagatgcgcaaaagtgcaatttttaaattgttgttcgaatagacgaccaggaaccatggatgcgtatggctggccgactaatgcataatagactataagttagtttatagtaatcggactccacacgaagtctcggggattgaatcgatttggaaccgtgttctcctttctagactatatataaccaacagttaataaaaacggtgcatagagagggatcgaa

SEQ ID NO: 2442 - DNA, 391 bp, Oryza sativa
  unsure (1)..(391): unsure at all n locations
tattcaacaccagatctgcttcaatatccttccttgtgtctgaatctgatgtcaaatttcattgttaacacctgctaattagcttttgggcccacaacattgttggaggagatgatcagcttatacgatgacggtccacaaattaacacattttgtttagataatggaataaatattaatagcggggnnnnngacacgatcgacttggtggagattaatgggttgagttgatgcttgaccgatcgtgcatttctaacgcgtgacgtgtgatcgcatagttacacatagctacaaataccatgcatgttgccctctctctcttctcctcttctttcaatagagcctaattacaactaaaacgaccacttacctgtacttgtgggataccctc

SEQ ID NO: 2443 - DNA, 340 bp, Oryza sativa
ctactacagaaactaatcctctgctcaatgaataacatgtgtcatttactcacaataacatgtggaacatataatttgatgttcagctacataattggacatctttaggcccccaacctctactggtttattcattacattttatacctatcacctattagggctcacacatgttgcacaacgatacatgtgttaatcgaaatctacactcaagctgcattaaatctctcaccaattactctatactgtaccacaggtttccgtatacgccaaattacttcaaaggaattggatcaaagcgctcgtcccagccttttgtacttcatacacgttaattctc

SEQ ID NO: 2444 - DNA, 360 bp, Oryza sativa
  unsure (1)..(360): unsure at all n locations
gtcactgagctgcagctttattagagattgttgaatatgtcttgttgacattctgcctttaatgcgctatcttgctttgttatatgtaaagtactgaggagaattccaaggtcttgtgaaggacgacataatttgcatcccatgttnttctctttatgagactgagaataaattatccaggtctagagctataccagttcaaacggtacattgttactttaccaaccatctagacatggtttgaatcggccacagccttataattgataatattataagatgcttactccaggatttaatctgctgatttcaaacagaactggtatcctgtactnggttttattcaatacaaataaatgg

SEQ ID NO: 2445 - DNA, 412 bp, Oryza sativa
  unsure (1)..(412): unsure at all n locations
acactatcaatactaagcttgctatggatntcgtcccgcaattnttgaagagctgctgtgtcatgcatgtcaacctcaatgccatcatagagaagtttctccttggaactgcaattattaggatctacacttcctgatatatcctcttcaataaatttcaacctaactcccaattcacagactttgttcctcatcaaatgataatgttcatcaagccaaccttgaatgggttcctcctctatttctgctgtcagtttacgtaacacaaactgtacagatccaaagctggtggtgccagacttaacctttcttgggttttctttgccgtcatgaaacagcatatttttcttggcagcagagataagctttatggcacgaatcatatcttcaacagcattctctatatcacgca

SEQ ID NO: 2446 - DNA, 300 bp, Oryza sativa
gcgtgacgatgcatattgaaccaatacacatgtgtcgatccggagtggtgacaatatattgacatgtggttatatatatcctatacatattggagacactgtgcttttctcagggagactacatgcttacacgcactaattaatacttagctatgacttgcgagaactgaacttataactactgactctttcttgactagactaatgaaaactacacctgatttcccaagcttatcattatctgcagatacaatatgcaaacataactactctcatctggcgcagcttagaaacattgat

SEQ ID NO: 2447 - DNA, 443 bp, Oryza sativa
  unsure (1)..(443): unsure at all n locations
cgctgtcatttcacatttggatcatctcaggtttggggactatattacatgtatatacaccgcanatttaattcgattatcattatgatgaggcgaaggcaatcagatcagtacaaagcacatacatacattagtatgtctgcagaatcacttgttagctgcaccggcgggcttgttgcctttggcagcggcggatggcttgttgggtttggcggcgctggtaccagcctccttcttctcctggctgctatcgggcttcttctccttgttgctggtatcggcgacgacattatgctgctgcttctccttgctcttggtcttggacttggacttggagtttgaggagagcttgagcttgatgtgcaccccgaggtcgccgccgctgcatgagctgtggagaacaacgagttgttgatggactgacgttgctgttgatcatcgct

SEQ ID NO: 2448 - DNA, 478 bp, Oryza sativa
  unsure (1)..(478): unsure at all n locations
agctntaactttngaaccactataagtgtttatatatactttctccgtttcatattacaagactttctagcgtcatccatattcatatataactagattcattaacatctatataaatgtgggcaatgctaaaaagtcttataacctgaaacggagagagtattttttatcctaaaattactntctccttctataacgtctctttagttctctggcttacaagtgggcctgatcagctatggtagccactacagtacattgcatgctgctgcacggtcgattggttgatcagaggacccacgaaaagaaaaacaataagaggattntttttctctagaannatggttaattttccgtaaccganaagactntgacttagaaaaggagggctaaaggcaacgtgtatccatgatngactatttcacgatggtgaatgctggagcctggagtacatctgccagagtgccaggcacacact

SEQ ID NO: 2449 - DNA, 424 bp, Oryza sativa
ctgccgacaatggtacgtgcagcagcatggtttccgcattttccataatgtatgtctttcagcaattgtctcccttcctcttatgatacgcagcgttgcagaatccctgaatggcttctcttgtacagctcaacttcattcataacatatagtttgctccgccttgaaatccgctcggcttcatctttgtcttgggggagttcttgagaaatcaaaaatcctatgatgggctctcgccagtcggcttcaaccatatctacctcatgagtgcccgcaacttgagtagcatctttgtgaggtactgtcggcgtataaggtgttcgacgaaaacatcagaaggtgccgcttcacgcctggatccaaagttggcgaatctatcggcagcttcattgttgtgtcgaagaacgtgactgagctcgagtcc

SEQ ID NO: 2450 - DNA, 455 bp, Oryza sativa
ctaagccttatgtcaagatgaagcaatcaatctatcaacgagtcaactctgggagttattatcttcttcttcgcttcagagccgacatttaatttcaggaactccaattattacactggcaattttggcttcttcatgccgccacaatctactccaaatttctcaagtttgagatttaatttacatgtctgggagtgtggagtcatcaaccaatcaactcagatcagattcaatgagttgaccaacagcatatactttcctctaagtgaagcatctgcaacagctatagcaccaagttctacagccatcttcataaatcaagaagcgttgcatcagtcttcattatgcacacgctcgtatcaagaaaattattcgagcttcgatatcttctcaacagttgatggattattgcattgacttatcaccaacacctctacctcatgtgcctgacatct

SEQ ID NO: 2451 - DNA, 491 bp, Oryza sativa
agcttaaacttagcacctgttgggtaccatatgccaatatttatatgaatactttaaatatcttagaatccttttcacggccactaagtgacactccttaggagcggcttgaaaccgagcacacatgcaaacactaaacatgatatccggcctatatgcggtaaggtaaagcaagctacctatcgtggaatgataaagcattaagtctaaccggttacctccctcatcaaggtcgagatgcccgttggttgccatatgtgtcttgatgggcttcgcatcatccaaaccaaacctcttgagtagatccttgatgtacttggtttggctcacgaacgtcccatccttgagttgcttgatttgaagtccaaggaagaagctcaactctccaatcatggacatctcaaattccctagacatcatatcaccaaattcccctgcaaatacctcattagtagaaccgaatatgatatcatcaacatataattgacaca

SEQ ID NO: 2452 - DNA, 68 bp, Oryza sativa
agggatgtcctgcgcactctacgcgcccaagaataacgtattggaagcccttttgtcacgtgaggaag

SEQ ID NO: 2453 - DNA, 498 bp, Oryza sativa
  unsure (1)..(498): unsure at all n locations
agcactgagctcagctggcaatatttcttaccttaccccattttgttatcttgaatgttgggactatccgcacgttctccgccttcgcgaccatagggctatcttcaacatttacctgttgttttgcacacacaatgcagatttgttagtgtcatttataagcacttgttggatgtatttgattggagacatgtcaagtgtctcacctttaggaaattcagcgaggggcattcgctgcaaagggagttcaccgaaggtgtaattagtgtgcactgctgattcatgattgacatgaagtaaacaacagacacccctgaagatatagcaaattgttcaatagtcagtcaattgcaaaatatgcaagtctggtatgataaacctagtaaaacacatgtttcaagaatataaagaaggcagtatttcggattgttcatgatgctaccagagcagcaccaatgaagtaatntcanggtatgagatcaagggggaaaaaagaac

SEQ ID NO: 2454 - DNA, 430 bp, Oryza sativa
tctcgatctggcgcacgtgtcatatctggcgggccatcatgcacgcatgcatggatacgtaccttgctgcagtctttctatgcaatttcggagctatattaaagagtctgagaaatatactcaagccacagctgtcattaattcaacataattctaagttgaaacaacaaaatggattgaaatttctgcaacagtaccgtgttatgatactaattcaataaattgaggtgtgttttcaataaatgatgttgctttcacttcagctcctgaatatttcgttttactgaagatgcattctatttttttgtgaatatagtagtacgcatctgtcatctgattttgtcacaactacaaaatatgccttatgtgctggttgggaactctcatctagtacgaactcttggttgatacatgttgtatatctttgtgg

SEQ ID NO: 2455 - DNA, 366 bp, Oryza sativa
  unsure (1)..(366): unsure at all n locations
ctcatgcttatnagtagtgcgcactgcttcataatctcctttaccggctaagtcctctttatttgctcctacttcatggataccctgttgtctctggcgacatggctcttggcagagaatccctccgttctcaaacggttctgcgcaaaagcaatggcgaccacattcgatgctcctgacgtaaattcctcattgtttatcatacttggatttacaattgcttcattacgtcacttatggttcgccctgtcaaatctcttgattcaacattcttacaaggcaaattgtgattcctgttctgcatgacccatcacactattctctttggtacaatgggtgacttcatacccaacttacttcattaac

SEQ ID NO: 2456 - DNA, 388 bp, Oryza sativa
  unsure (1)..(388): unsure at all n locations
cctgtgtccttgtgttcccatgctctggcatatcgtatcaagtcaaaacagtcaagaaccactcttttttgttcttgtcccctgcacaaatgtgtgctgagattttgggaatacaattcctgaaatgattggtgaatgcagaggagaatcaatcagtacattatgattgaattctgatagctatgtttccatgaccaagattcattttggtcagcatgacaatattcatatcaatttttttaagaaaaagaattattttgatgggatttnttatggcgcagcacgaaagagagctcgtcggtgaacatggtgctgacggcagtgcacgtgttgttcatcattgtcgtcattgtgatgggaatctggcgcggagacacccagtatctga

SEQ ID NO: 2457 - DNA, 391 bp, Oryza sativa
tataggaccatggatcagtatggcttcctatgtactgctttataatagcgagacataatgctgctgaatatctgcgatagctgatagtcatgcttccatctcttgcagaaggttaattaagcttaaaatgtaatattactaaacactgtcctaacaaccaattctatctcatgcctgtatgttattcaagcgcttgtttgataacctcaagcgctccacaactttataaatattattgtgcctatgtcacaattttcaatctttggctcgctacctaatgcattgttagaagaaacatggaatatgaatatgtcagagtattgactccattgttttcaacccataatctattataatttctttattcacgaagcagttctcatattaatta

SEQ ID NO: 2458 - DNA, 385 bp, Oryza sativa
agcttgcattttcagacatttctactactctaattaattaagatgttatgccagctacgctaatcgaatagtagtactcatgtagttccagataatatatatgcaggctacaagctaaaccaagcagtttaagcaatctgcagcctgcagggccggccgggcatgctcaatttgggaggttagacctgatgatctatgcaagaactctgccaaatgtatttaaatcgtgatgcttccatgtagcatgccttacaagacactccacctctttatcatgaaaggaacaagcctctgcatgcatgccgcgcgcgctatgtctaatatccgtatatacaaacgggcggacaccactatgagtatatcacagctaggaggaagtatctgt

SEQ ID NO: 2459 - DNA, 348 bp, Oryza sativa
  unsure (1)..(348): unsure at all n locations
tatatgtgtgccagatctaaagaagaaggatgtaacgaatctcatcagtgtngcgaacatgaagcacaagtctaattcgaaaaggaagtaaaatcaaatgcttgggatcctctctctctgacgacgacgatgaagacctcatgcttctcgttgtctcgccaaagacgacgagaacctctaatgtggtgtgtgctacaacgcgtaatacctggttgacgacagtgaanaatgggatgcaacgtgaaagatgaaaggggaataacgggagaagctatattcggttcactctattgtgccacggagaggaacaaatagacagacaagacgaccatgatcatcaaatactct

SEQ ID NO: 2460 - DNA, 396 bp, Oryza sativa
  unsure (1)..(396): unsure at all n locations
agctntntagagcagaacatgttgatgcttataaagtatgcatggaaacaaggggatatgtatgtgatggtataaaacagatgcaagcgtctatgaagcagtgtgaaacagtctaatacctgcggttctttccaactgcagaatgatatccctgtcagcagcatgaatttcacagagagagacttattttcttggcgcacgaaggaagaaaattccctggcaaagatatgccaatgatgtcacagaaaagtgggaatagatgtcccaattntaatgatatataagataatgggaccactacagaactattcagtaataggaagacaaaggggacataatataaaggtgccttttcttgtgatgactgcacttgatcagcatgaaagtctcagaatc

SEQ ID NO: 2461 - DNA, 402 bp, Oryza sativa
tggtgggtgttacagtatagtcctagagactatttggctcgcgataatattacctacatgaagtatctttggtgatcgatgtctttatgctacaaaaggaaattcgtctcaaggtggaaattgttaaatatgtgatccgaattttgggcccacaatatattcggattagtttcctaatatgagtcctattaagtgtctttctattatcccctatatatactcttgtaagccgtactggaaggggtgacgttcccattgtgattcccctacgtttgtaatcatctactttatagtgatcattgccggtcggcgcccgtgctttttttcccgtaagggtattccacgtaaaaattcgtgtctctggtgtgcatctattttcataacagcgtgcagcattgtggg

SEQ ID NO: 2462 - DNA, 423 bp, Oryza sativa
agcttgcatacatgagggataataagattttttttcacattaagaagattctcaactgatgttgtccgcacttcacggaactcaggggcaagctgctgctgaacagcccttatgaattctccaatggagtcacctttacggacctgccaggtatataggtgttgtttcaatcatatggtccacatgttcagaacaatcaaaagaggaacacctttttcaatggttagaaattacctggataactctcctatgcccagtgccatcccagtaactgtaagtaattgtcagaggttcatctgacacacgaggcattttgctaatcagttaggatgcaaaaattactcacaagggaaaaatagagtgaaatgattaaacactaatggtaattaatgctataagcttgtggcaatacttttaatcaag

SEQ ID NO: 2463 - DNA, 403 bp, Oryza sativa
agaatcaaatgctcgatggattctctctctaatatcagtgtgaacaatccaacagttggtcgtaatgctcgtggtacttgcaattgcatgctgtgtgtgctcgctactaaacagtatggacaccttatgtgtgctgttgctagttgatctcaccaataactctggaatacttaagtaaactccggatttgtgacggtgggttctgaactaataatgacgaatgtggtgattagttttattggtcagaagctccatctttggctagcaatccaaaatgagagctacaatctcttattctcttcttggttcccaaaattaatgcaaatttgtatactaaatactgaactgtatatgttctctatgttctcttataaaactggtatatctgtctcggcatgcggag

SEQ ID NO: 2464 - DNA, 398 bp, Oryza sativa
  unsure (1)..(398): unsure at all n locations
agcttgcatatttctctctcccttatgtatatantaatttgggtaagacttgcgagtacaatcttgtacttaaccggtgtctgcaattntaggagaggattccggttatgagttatgcttcttgtgtggtcattgctctgccgagggcggcgagggcaatgagtgatctcttgcagcttggctcttgctcggttggtttgccctagtggagttgtggcaccaccggttttatcttttgcttatgaactctatttgagacttccgctgctatatttatgtgttgtatgttgagacctcggaccctattatgtgtcatatacctcgctgcactntaaccctattatggtacttgctatgnttattaattgcttgcgatgaaagtgtgagactagtcgcat

SEQ ID NO: 2465 - DNA, 451 bp, Oryza sativa
  unsure (1)..(451): unsure at all n locations
tcatcctaaccattacaagcaagatgttgtgtgaagaatggcgaacatgtagattgctaagctgacatgtggtgcacaagaatgaccgacgtgactggtctgactccggtcatgtcgtcagcatgcggccacgattccacgtcgcatctgctcccggcgaaagtggaggtagttgtgggccgtcccatcataatgtgactcggacggcaacgatacaaatctccgtccatttatgaaaaggtgggggaagtccccacaaaaaagagggaaatggtgcatgtggtatccccttaagatataaaaggaggaccttgcccactgagagaagggagattnntttggacttttctagattgggaacctagaacgaaggagaggctggctcatactttgtagctncttcatacacagatctcgccaaacacatgagtatggtattacgcttctcatc

SEQ ID NO: 2466 - DNA, 229 bp, Oryza sativa
  unsure (1)..(229): unsure at all n locations
agcttgagaacatcctgaaacaaggtaagtgataaaggtcagtaatacactcanacaccaccatttcatccccagaagaacaagaagaagagaaagtcaccttcatcacatcatcatcataagggggatccggcgcgcggatcttgatcagcgtggttaaacacgacactacggcgagcttcactccggtgtcagtgtgatccagtacctctctcttaatcaatgctct

SEQ ID NO: 2467 - DNA, 452 bp, Oryza sativa
  unsure (1)..(452): unsure at all n locations
catcaagcttatgaggcggtgtcttgtccggtcgttcatgtacggcgagggggagaaggacaccgtgtggaggcttggatcccctccaaactacgacgtcgtcaacaagctcttcgaggaagagagaaccaaggtaactaattaatttcacgatgaacactactcgtcagagttcatagctaaacgccgaagagatcgaagcagatattgtgattaagttgaaagcattgttgacttgttgtgcacttgtcattaattangaatggccagaggggtctctggaggagaaggtccagagattgctgaagacctgngagatggagctcgtccacaaggtgcgaccagaggaccagaagagtgccactcgcagaaattctgctccccaccaatggtgagtgctcatcaattatattcacgcacagagagtccgtgcaggagtagtattaataata

SEQ ID NO: 2468 - DNA, 441 bp, Oryza sativa
  unsure (1)..(441): unsure at all n locations
nggtcaatgtcttatgtttttctccgtcatggtagcttatgttagattagttggtagtgtggtgttgtaattgtggtttttgctcagttnttccaaattaactggacattgttaggtttggtctcgtttgctccttataatgagacacctttttcttaatataaaacgtcggcaacggcctgaccgttcgaaaataaaaattctttctcgcatggttctgctagcagtaaaggcgcgaagaagcagataacgccgtaaagctggccagcgatttggagtcttatccttggcgaaatatgtatgtaatatgtgtgtggtttaataataacttaaagattgaagggtagccggcgatttgtctggtttatcaagctaatgaaattaattgctattcctctcgaaagaactatattatcgtggattgttgatttgcatatactc

SEQ ID NO: 2469 - DNA, 390 bp, Oryza sativa
  unsure (1)..(390): unsure at all n locations
gctgattcatcatcatttggtgcgcatgttgtcaacctctgcatgccactttggcaaagtgctctaatccccagtgaaaatggcgccttttgatcccccaagcttttgtggagatgcatgcggccgcacttggggagagcatatttgcctttgcatacagctagctatctctaacctttgtgctgtgctgagcacattccatttcccagtttaaaagaatcaccttttttttcttcttcctttcctccctagcttgttgcagctgctgctccaagtagtgtgtggcgatccttatttntttgcacttagggagggtgcactctgctgatcctctnttacttggttcagtatcagcagcgcctctcctccggagtacatgacctcggcgtc

SEQ ID NO: 2470 - DNA, 347 bp, Oryza sativa
ggcacaatgcttcgctccacggacgagatgattcgccacctacgatagcctcattggctttctgggggcgtgccttcattgacttttgactcaagcatcgaccctctctctagtttatttagcctatatgctggtgaaaaaaaagcataattgatgttgagtttcttactagctctatgcacaaaccatttatgagtacatatgccatactaccacctgcctaacttctcctatccttcttgggagggagttcatatgcagaatgcagtgcatgcagccactcctgttgtacatttatgccgtcggctgttttactgcgtcttgttatatactgattactacatttt

SEQ ID NO: 2471 - DNA, 420 bp, Oryza sativa
  unsure (1)..(420): unsure at all n locations
agctngaagtacctcataacttagaaatgtctttgccatccacaatatgtagatnttatcacatgnaagttttggacctatgccatggtaattatattttgcctgacgacattaatcgtctagccaatttacattatttccttgccaaaaaagaaactttgtccaatattcgtgggattggaaagatgaagtatttacggaggctgcaagaattccatgttaagaaagagcgcactgggtttgaacttagagaatnggggtatttgaaagagcttggaggagcactacaaataaataatcttgaanatatagcaacaacggaagaagcaaatggtgctgaattgatgttganaaggaatctaaagacactataactagtttggggtgcagagcagcagaatagtggatctgagattattg

SEQ ID NO: 2472 - DNA, 426 bp, Oryza sativa
  unsure (1)..(426): unsure at all n locations
catgcaagcttattagatcggtcattcgtacgagattcatataaatatacaatcttgttgaaaaaaaaattaattatttgccgactggttctcttaattatgtatgtttgccttgtaatattggactatcccttttatacactttattgtcaacttttagtctttatttaccattcccttattcctacattaacataaatggtggggacaaggttgaccctatggcttcgtccataaggctctatcataaggcggcaactaggcgaaaaaaaaaatatctatctcccagccccttcccttccttcttctctcccagacgacgggcaggggtcctgctacttccttcactagtagagaatangtttaagcctaattaggtctctcccgtttctcttccgttctcgggattatacctgttctttgtgc

SEQ ID NO: 2473 - DNA, 222 bp, Oryza sativa
acacaactttatgttacatactggaaacttatctaacatatattaccgactaaaaaaaatcgacgatttaccttaacacggtttactctttatccgtaaatatagattaatacatcttgattatggtataccactatagataatgtcaatttgaaattaggacattttatggggacgggaccgaagctgggctaaatgtccggacattttttagctctcttt

SEQ ID NO: 2474 - DNA, 425 bp, Oryza sativa
  unsure (1)..(425): unsure at all n locations
agctntaacaatntatggactagttgtggttctggcgcttttatttgcgaaccctcttgtttaatcctaaaaaagaaaacgagtcctttagattagatactttcttctttntttagtaaattggtatttgcttctgcaattccaattatatcaatactttactcctaatttattactcctagagttttctatttatggggacagacaataccccaccccaggaatagctgatttgaggatgatcaatttagaggatatgttcgccgtcttgcttcccgccctttgtttagggcagtggaaagtatttttccttttattttaggagatttgggaacatttcaacaaaggaggtctttcacaggtcaaacgagatctaagacttaatctaaaagaaattactaaattgaatctatttctattaaaaa

SEQ ID NO: 2475 - DNA, 489 bp, Oryza sativa
tactaagctttggcttcgtctgctgacatataaacatccctttccatgtcttcggatactacccaaaatagcttgcctgttcttagtgcataaacccttgtgatcatttcgcgaactttgtgtaactcttccacttctagtaaaaattctggtgttcttgcccgataataagcactagcatgttggtgaagcataatcctcgcgtgggggaatgctatacgcttggtgggttctcctccaagcagaatgaatgacgccatggacgcggctattccgatgcatattgtatatatatctggtgtcacacgttgcatcgtatcaaaaatcgccattcctgagattaaccacccgccgggggaagttataaacaaaaaaatatcgctaattccatcttctatactgagatataccatgagacctgtaatatgaatcgtgacctcgcaacgaatctcttgacctaaaaagtgtctttctcatacaaacattgat

SEQ ID NO: 2476 - DNA, 469 bp, Oryza sativa
  unsure (1)..(469): unsure at all n locations
agctgctgatatgctgatttaccacccatctaaagaactgttgtcaaatctgaatgcaaatttggagtcaccagaggtaataaattaaatttcatttgtattacatgcctggagtgttccatcaatccaatgatcattgtcattagtatatctttngaaatttttgcatttgttcctcaccataacctgcatcatctgtgattgttatgtgcagacaaacacatgcaagagcgtgttaagctcaatttaaggaattatcattagagtggattttttttcgacatgctaaaaatcgtagcgatgatagttgaatacacattctcagattactcctgactgggcatggcactcttgttttctctttgtaaatgncataagaccactaatcatttatcatacaattgctcatcaatattatatgttctgattataagtgcttataatattgcttatatgggactatagtctt

SEQ ID NO: 2477 - DNA, 465 bp, Oryza sativa
  unsure (1)..(465): unsure at all n locations
catatagagtttgttccggaatatataccgtgctctctgtgacactcggaaccttccatgtattgaaacaccggctcctccacccatgacaattccagcgagaagtgaatcctatataagagtgttgtagcattcagcggtaagcattgagcaattatgacaataacaattatgtggacaagcagtttcaaagcaatagcgatagctcacctgaggttgttatatgttgcaatgatataggtcaacaaaaattcatttcggaaaaaatgagcactatatttccagctatctgatataagaaatgcatagtagaactaatcaaatgtcaagaacanaattctctatatattgcatgttaacagtgaattagcatatagcaaatggaaaggcaatggatgttaaaaaaaacagcatggaagctcaagatatgtgacatcatggctcatggatgcatgatattgttta

SEQ ID NO: 2478 - DNA, 415 bp, Oryza sativa
  unsure (1)..(415): unsure at all n locations
tctcagtcacctgcggcatgcaagcttggtcttagcctctttgaacaagttatctgcagatctttcaaacaagataaaaaaatattagtcaaaagtcagggtccttgggccaagaaagacgagagaatgtttaagtggccaaatgcacagagaaatgtttaaaactgaatgagaatatgctacgcataaaagagctataacagatctatcattcattctgaacaaagcatgtgagagtagtacgtagaacaggctctagtcaatgagcagaaaatactcactgggaatcattaattttggcgaatcctgaaataaggatactgtangtaacaattgtcagctcaagaccctcagatttcatttcctcaacgcaagacagagctncacgcatatctctagcaactgcataagcgtg

SEQ ID NO: 2479 - DNA, 452 bp, Oryza sativa
  unsure (1)..(452): unsure at all n locations
tgtgtgtgctctgctctaacctgtaattactgtcactgtctagagtgagtcttgatttgtgagataagggcaatgcaatgcagcacgcaattcttaaaggatgggagcttatgtttgtgcgtgatgacagaataatctgtatcgtgaatctttctggggagaggagatgttaaagcctatgatcatatgacttcagtatcgcttatgtnttctggacagttcgtaaggttcctttgtgttgtagatgaaagggattcttttctttggctttgagttgtaagtgtctttggtcgatttgtctgcgcttnttgttcttgctcgttagctcttgtccctttcctcacaaacacttttgagacatattggagatcggtgaagcctcaaattaagtggtctaaatgtgctgaacgatgcttatttcagtacctacacacacgaactctgttgaacaa

SEQ ID NO: 2480 - DNA, 380 bp, Oryza sativa
  unsure (1)..(380): unsure at all n locations
agctttacatatctagctatttttctcattcagaacacttttcgaatatctgggcagaccatatatacaatatnccaaatttgtttgctgggtaactccactgcactaacaaaagaattctatcatgtaggtggtttatgccaattaacatagggatcacattcatggctggtggcactctangctggatagcatgtaaaatcttgaaaccaccacaacatttcagaggaatgatcattgccttctgctcagctggtaactttcctaggtggattgcatgtttttaccctcatatttntgctgaataatcctaatgttaggagtgtcatcaactgacaaanaaatgcangaaatcttggcaacttgcttcctgattgtgt

SEQ ID NO: 2481 - DNA, 393 bp, Oryza sativa
  unsure (1)..(393): unsure at all n locations
tatgtngatgatgtagtcgtcaagaccattcataatgatgttctaattgcggatntagaagaaaccttggcaagcatccgcgctttcatgatgaaactaaaccctgaaaagtgcatcttcggagtaccgtcagggaagctacttggatntatggtgtctcatagaggcatacaggccaacccggagaaaatcaacgccatcctcaatatgataccgccgagctcccagaaagatgtccaaaagctgactggttgcatggcggcgctcatccggttcgtttcacgactcggcgagcggtggatgccctttntcaagctgctgaagaaaactgacaatttccagtgtggacccgaatcacatatagccttngaagactgtaagaaacttctcact

SEQ ID NO: 2482 - DNA, 441 bp, Oryza sativa
  unsure (1)..(441): unsure at all n locations
agctntacaatgatatataattcactatttaacaagatataattatgattataacttaactaatatcaaataattagatgatagttaacctaaatagtgtgccaatgaataaaaaaaatggatattgtacagtagcgtaattatctttaacacgtcttgtcgctgtagcaactaaataaattagttataatcaatccttcaaattaatgggtgtataggaaaatattagtgccatttactagtctgtgtccaaatataactaaatccatgacttataaattatttacataaagtttagcctcatattttgtaactaaaatataaacacacttagatgaaccttcaacttgtctgaagagaataataacttagctagttgtaagtggaccacttaaagttagttggaatactgtcatatgaagtggaatatatataagttcg

SEQ ID NO: 2483 - DNA, 307 bp, Oryza sativa
agcttgtgtgagtccaagatcttcagatttgtccccaaaccgcaaaaatgggagatttgtttgttactacctttttcatccaaatcaccccaaaagtttcttgaattttacaaacagatccctctggtcgtctcctacctctcggtttcttcacccttatcacctcgttttctttccattgtgctaccaactgtgctcagtgagatccatatatggtccagcaactaccgctgcccatctctctggtctccaccctccctttctctctctagtcctctaaagccgagggttgctgcgaggaaagcgt

SEQ ID NO: 2484 - DNA, 262 bp, Oryza sativa
  unsure (1)..(262): unsure at all n locations
ttgctctctgtttcacacactctgttgatgattatctggaagttcctttcaaaaaggacaggtctcgaattcttgatgcttctgaatctcctgtttttgacatttctcgagttggtcgaattttctttgctaacctcgactcttctgctcctggtccatctcgttgtctcattgcctcacagaataaggatttgtttttctggcatcgacgtcttggtcatattggctttgaccactngtcccgcattagtggtatggattt

SEQ ID NO: 2485 - DNA, 453 bp, Oryza sativa
  unsure (1)..(453): unsure at all n locations
agcttgcctccatcttctcccacttcggtatcgcaacgctatagccgcctgaccccaagtggtgatggtacttcttcttggcggcattttctttgtttctttccattatcgcctgcccttgttcacctgtcttatatgcaacgaactcgtcccagtgatcccttagctttgggaatgtgtcgaaattcggtgtctgccccttcaggatatatttctggtacagatctcccttgaagctctgaaactgttctgccattttcttcagagtccaccttttcactttgtcctctctacccgcgggaagggtgaatgtctcgagcattgtggtccacagcatctctntcttcgaatctgggacaaagctctcatgatctctgcgtgnacttgttctttgccagtacaccgtactgacaggcacgttatcccgcacaacccaaccactgtgacatacat

SEQ ID NO: 2486 - DNA, 395 bp, Oryza sativa
  unsure (1)..(395): unsure at all n locations
tgaaggtcaagcaattgacgaacttctcttgctttataaagatctaacaggcctggagactgggcccatgagaattgaccctcgtggttgaaaaattcctaacnagtgtgagcacctcattctcaacatctgcgttgtctagctctttattcaccctcaacttgtgaaaaatgctatagagaatgaagaagggatctgggcatctgaccagaggaggtcgagttatgctgttcgcatcgaccgtcgttactggcatggggaatcttcccatgttcaccggatgagagctgaatgatgagcacccgttcaggtgagcatctcgcgggtagtcgcacattgccctttattttcgagacctttgaagaaattacagcatgcttgatgtctgtcatatt

SEQ ID NO: 2487 - DNA, 375 bp, Oryza sativa
  unsure (1)..(375): unsure at all n locations
agcttccatcagcgtgagagtctgagacattgttgccacttgacactttcatttgtacgactaattctaccattatgccagtcctagtgttctaactaaaaccactagcagctggcaactaatgactattcatctggaccttatcgtcgagtctcaattccaacctaatgaactgaattntatttaccgtgcaaggcatggtcgtccacatatgcgtctgcagtctccgtgaactctcctttgtgcacgctagcacatgcgaactctgtgcagatctcatggacctggccggttatgtcagaaacacatactagagctgctcaggccatatttatgtgaccctcggtatagaacctgtctgctctcgcgtcaaca

SEQ ID NO: 2488 - DNA, 387 bp, Oryza sativa
agcttgcttacatccagaacccaacaatatttcttaactttataacgactcttaatgtaaacgagcctagctacatgcatattcttctataccctgaaattatgcatcttgccttaagtatcgaaagaatccttggctgaaatatttgagtcgaactttggtcttcactccaggtttcaaaggatatggatgcaccaatctttgtgtattaccagctggataacgtttatcagaatcataagacgtatgcaaatatactttctgatgtcacaagtattttaactatcagtacaaataaacccttggatgggatatatgtacagtttatgcatcagttctgttgaaatggttaagtcagaatgaatttgtgtgaatgctggtttacac

SEQ ID NO: 2489 - DNA, 90 bp, Oryza sativa
  unsure (1)..(90): unsure at all n locations
ccttacaaactcagctntacaactatatgtttgttggagtaaattacacgagcgttctctttatttgttcctcacgcgagaccgagcact

SEQ ID NO: 2490 - DNA, 431 bp, Oryza sativa
catgcaagcttagctatttatccagctatcaggcgttggaaccattaacaaattatctctgaacattacaggaaatacttgatcaggtcatggataacagcctggatatagaacttcaccttttccactctcacaaactcacaaatacatctttacttgacagaagagtacgatcaaaaccatctaaatacataattacatcaaagcattaggcttaccaagaatagagaagaaaatcataaatccagcagaaatctgcaccacacgtctgctgccaacacgtgtcaaacctagcaaaccagcattttcactgtttcagaacggtacaaagtattcttagaccaacattcaatgctagtattaatatgaaactgttaaaacagtaaaatatacgccacagtaatctagaatgtgcttacacagatacagat

SEQ ID NO: 2491 - DNA, 460 bp, Oryza sativa
  unsure (1)..(460): unsure at all n locations
gaggttgaccgaccaagcccagtgtctattcttgttctctccaactgatgaagttagttgttgntctggatacttaaaaaatgactcgcaagtcatgcctagtaagtgagacagaccagcaccatttggaacaaagaaacattcccttcttcataaaagaattttattgcttcaaaggagaagtctgtactgcgtttatcagctatcctaacaatgttgaagttgatacaaatatttatgaaattaagctaaaccatttctgtagtctatagcacatgactggagcatcattcgtgattaacatactctataaaggcatttgctatctagtaaatatgactagttaactaactaatgataaatttcttttgtagatcactgagttaaaagttggaaagttcaaagctcagccctttaattaactacgttgaattagcatacactgaanaggattttagtt

SEQ ID NO: 2492 - DNA, 398 bp, Oryza sativa
  unsure (1)..(398): unsure at all n locations
agcttgtagcgcagcatctatatacaagttgttggagggagctaagacatttatccaattaatagcacangtttttagattaatttgaataaagttagaaaatcaaagtaaaaagtaagtgaataaagttaaccaagcttgcaagataagttgaaacaaggtcacaaattttgtacttttgaacaacaggttccaaaagaaaataaaagaaagttataaaatcaacatgctaaatctatttcattgcagcaaaataaaacaatgttgtaaaacatttgctgttaaatgagccattagtacagtaatagatgtacagtactaacaacactagaataaattctgaatgagaaccactaatagagattatgaagtgcatgtgctattagtttggttaatta

SEQ ID NO: 2493 - DNA, 351 bp, Oryza sativa
tctaaagaaagcgttaaggtaattattctggatcttcatcctgtgaagagcccactatattatagattcagtcgaatagaatgtctattatatatgtggaatcgggttagtatgcaagccttttttgcttctcacgaaaggagcattttgtgatctccctggtgcctttgtgcatgcgtgcctaattaccgattccggaaaatttcttgcatgccatttgaatgattcctgtgcttcgagctataagtgggaaaggggacccatgtcgagatctttctgattctgtagtacaatgctttttcttttctccttgcagggatgccgaggaggccatgaataaagacaaaatgg

SEQ ID NO: 2494 - DNA, 322 bp, Oryza sativa
  unsure (1)..(322): unsure at all n locations
ctctgagtcacctgcggcatgcaagctntacacagtctgagatattatgactatactgatagcttatccgggagatgccttgggcctggtctcatgtttgcatatgacataactctatgtcatgacgatgatactatagtattatccggtagattaagcatagactctatactactccgtatcatgattcgtggttatatgctgcagatgagaggtgtatctctgatgggcacagctgagtatagatattcctacgagcgtgaatatagacctaagataattctctgaggagggcactcctacttattaaccctggatgaat

SEQ ID NO: 2495 - DNA, 321 bp, Oryza sativa
acctatgaatactcagcttgcgaagttatcgttaagagccactccattctgggcgtttaagacgctcgaccggagacaaggatgagaacagagaatgaatgacatcattcaggacataatttctccgtgaccacttaacatggagcatatctggccttcagagctcgtacagggactgtgaagacaaaatggcatacctgctgtctcccaccaagtcaggagaaaccaagtctttctcaacatatccgatgattcactcgaacattatctctgatgcatacctgataaacaactagcatattctcgtcagggacacactac

SEQ ID NO: 2496 - DNA, 407 bp, Oryza sativa
agcttcatgagcatgtcggatgcctctcactcatacatatttctcaggctcggtgctatcggtagcaactaaatagaccctaagtcttgcctccctcaactcatgcccatgcttgaatcgaatccctcaatcgtaaaacccggtataatccatccactaaccctaagacagttaccaatcgaactctcgggtgctctagaagcatctcttttcacgtggcattcatattacattgactggctgagtcagcttgtgtgacccatatggcagtgacaatgattaaaataaaaaagtgaggcccaccatcaaccacacctgtcaaagcgtgccatctacatgcttgagagcggcgtcgctagcgccctatacctcttacatttgtgcatggccgataatacagacctcac

SEQ ID NO: 2497 - DNA, 366 bp, Oryza sativa
  unsure (1)..(366): unsure at all n locations
tgctcttatncagattggcgagcatgtgtagttagcagtttgtatatttacagcctgtctaggaggagtactccgtcttcgctaacagcaagtttaatgggatagctcactactagctgccaatcatctctagccaattcatataacagttactgactatcctataaatacctagacccatctgacatacacacattaagggttgaagtccgcgctgcaggtggctacatatctggagaccattgctcttctcagactatctgtattgctttgcaaaacatagttatacgcggcatatagactactactggaaccgctctaatgatctgctctctaaagagaaggtttacagagtgaactcagcat

SEQ ID NO: 2498 - DNA, 212 bp, Oryza sativa
gaccttaatcacgagctgcacttacagggagttgttgctttttaaatctaggccggattctgtaagagtgtggatccgacaggactgccgtccgattgaacacccaaaagtactaagccgattcttagtggcagaatatgaattatgaaactttcaacgtcgacagacagtgtgaaaaaaaaattgggacccgatgaaaggctttatttaga

SEQ ID NO: 2499 - DNA, 475 bp, Oryza sativa
  unsure (1)..(475): unsure at all n locations
tggcttagtcatattggtttgattatctattcgtcagggtttgcttcctattaagcgngttgaccttaaactctgtcacccggaatggttggctcatggcacagctgcattacagcaaaaagaagatgagctagctagtcttcgcaccaaattggcaaatggcactggctatggaaatggatatcaaacttctgctagtcaaaatagccaccaaaccatggcaaccggcctcagccttgaagcaatccaatggatggttaatgaaggagttatgacctagtatatgaaaacacattattccatgcgttcagggtacatcaaatcatacccgctagatgttgatcttgtgtcttttccaaacaactactgctgaccacaattcaacaagttcaatgaaacgtgatcatcacataagcatgtcgctcatttcctttgccatgctatttgtgtcgcatttccctatcaattggagtag

SEQ ID NO: 2500 - DNA, 428 bp, Oryza sativa
  unsure (1)..(428): unsure at all n locations
ccctctcgacatacatgtacaagctttgggtacatatagcaattcttgcacatggataaagcntagtttacctgaggtaaacaataatggtagctagacaaagtggcctacatgtacgtgtacctactggccgggatcatgcatatataaaatgtacgcgaatcaaagtaatctacaaagcactgtgcaagtacgcatatgtcgatggcatgcacgcatctcaaggacacgatgggggagagggtggggaagagacattaagaattcaatcaagtggacacaaagtgcatgtgcaaagactcgtgcggtggacctgagtactatacccatttaactgactgccctctttcacccctgtaccacgtcatgatcatcatcgatcgaacatgggctactctgccttctataccactactactacaactact

SEQ ID NO: 2501 - DNA, 399 bp, Oryza sativa
  unsure (1)..(399): unsure at all n locations
agctttcgttattctagtgatcatatatctctaacttctcatgtacatgaatgcagccaccaagatatctaactatggtcctgtgctgcaggtntgcaactagaaccacttcattcctaaactcttcaatgccttgtccagaaccctcattaagcctttagacgcaactgtcgtgcgtgcctccaatattcccttcatgttagcatcaatatgaatatggaaacgctgtcgcactcatattctatatagtcataaaacgtgctattatgtaaataaacttaatactctgtcttaccttgtgaactctgccgaagcctccccttccaagtatattggactcacataaattatgtgtcgggccacaatatctgccaagctataaatggaaatatacatttt

SEQ ID NO: 2502 - DNA, 199 bp, Oryza sativa
taggttcacggatacaaagttttctaccactatccttcttcgtgggaaggtcctcgccttgatgtcgtaggagataccgcatatgctgaaactgctacctacgcgaaagacaacaggatctatatggtgtctccctcgcgcgagcgttacacgggatgttatgtacacaaaggctactgcggcatggacttcacatcat

SEQ ID NO: 2503 - DNA, 435 bp, Oryza sativa
agcttcatgagttacgacacgcgtgaatcttgctgtgcttccacttgcatccatcatacaacaggatccggcaatcctccaccaacttactaaacttctcataatctctggcgttgacctctgcgtcttcaatgtcatgcaacattgtatatagacaatgagtgtccaaatctatggtctctccacctacacgagaatgtaccaacatgccttctcgagctgtagcggtgttctctacatcctgatccaacacttcttcagatgcgacatcaagcgcctcttgctcttcatgcttggtccagcaggcatatttcttcatgaatccatacattatcaaatgagcatgcactctctccttgtcttcgatcatctgatcattgttacagcccctacatgggcacaacatgtgcatgctgatactactttttctgtcat

SEQ ID NO: 2504 - DNA, 429 bp, Oryza sativa
ctactactaaccctacatactcagtaggataacactgcttatttgcacttttaaagaaagaataacactatgatgattactctaattaagcgttatggttgtgacaatattggcttcgcctctggtcctaggcactatataatgggatactgagcttgggagattattcgatatgttctcatatatattgtgcctcactgtgctcatatgtgaacaaggggtgcgtaactttgactataattttcctatactgtatgagtgacgtcgctgactactagaattggccagactgcatatcaaccacactcgcgtactaagatgacttactcataaatgactatttggtcgactctactagacgctgttgatatgctatcgtcgaatatacccttcttttaagtctcccttcgcagtatcgctattgtgtct

SEQ ID NO: 2505 - DNA, 340 bp, Oryza sativa
agcttatgggctgaaacatgcaaggagctgtttatgtaatttattcaataggccattcaaggcgccacacatcattaagtctgtgtcacgcggacaccaaagagcgattcctattgacccgatcttgacagttaatcatgccacagagtgtatctttttacaaatctaaatcgtaaaacttttcgcatgatacgccgtccattatttgctcaaagcttaagaattgactgtagatatttcaaaactatggatatctctaaagggatgcgatagtagatgatatagtggggatatatatacatagtcagctgacttagtcatactacctattaaacattgc

SEQ ID NO: 2506 - DNA, 431 bp, Oryza sativa
tgacctatgtcgagcctctatttgaaaactatgtgcaaggaccacagctatatcgtactgacgtactccactgagtagtgcgtaattgtgtatgtccagccctgctcatcagttgaaggctcgaagcaaacaagaccaacaatcccgctctcgctcagctgggactctagctccggctgaacaaatttgcatgcattatctttgcctgcacaccctttttttcccctgattacgatgcagagtttactttaatatttattagcatgtgtctaaagctgctaggagcgagcttgataacaaactatgatagcagatacgatcgcatgctataagtcaactgcgaacacatatcgagtcgatataatataagagagaagagcggcgaactatatatttatagtcatcagcactgactgatagacgtaatgtgt

SEQ ID NO: 2507 - DNA, 292 bp, Oryza sativa
acatgcaaccttcagaagctgtatctcatcattactcctttataggagagcccgagaccggcgccaatatgaagacctatagagcgcgcatatatgagcaagaagatgatttgtcacaaaccctatcatgcttattccaccagagagaccagcatatagcagacgctctgcaagagatacttctgcacttgttattatgtaccccaaaagtctactgttctctccgagcatgtttgcagaactactacccataaggagatggtgtgtagctctatttgttatgcagaaacaa

SEQ ID NO: 2508 - DNA, 484 bp, Oryza sativa
  unsure (1)..(484): unsure at all n locations
actcagcttaacaacttgcttagacaaagatcggaaggcaatctatctatttatgttcaaatgnggggagtagattagatcaagcttgagggagattatggagcaatgatatggttgtgtgaattatgtaatgaggagatggttacagctgcatgagccagtatggtggcaacaaggatatcagtatggcgtctagtgtgcatcgacaaggacaacaagggagcaaaaaggtgtcacttggcctctttcgtgcttattatgctttatgattaaatatgggagattctcatcaactccatggttattgctcctgatggtccggttttgtcgcagtttgcaatgagttaattgaacgggtattgattttaattatgctctgtttatgccttggacagttggcgttagttacatacttcctcccactgtattaaagttgttggctttaagacagtaatttgatatccatattatttaaaaaatatta

SEQ ID NO: 2509 - DNA, 311 bp, Oryza sativa
agcttgccgccgacggagtcttctcggctgttgctgctgtccgactacgacagtgcgatcgtgtcgtcgatgtcgtcgccgtcgccgtcgtctggcacgccgttcaggccgggcgtctcggtggtcgcgggcatcctgactagcgtgttctccatcacgttcctgctgctgctgtacgcgaagcactgcaagcggaacgccgcggagtcgtcgggcccgtacgggagcggcggcgcgttctggtcgtccggtgggggcggggcgggcgaacggctgaactccagcgtcgaccgcaccgtggtggagtctct

SEQ ID NO: 2510 - DNA, 470 bp, Oryza sativa
  unsure (1)..(470): unsure at all n locations
tagaggtntctggcatatgaactncaagatccaangngtttgtccaaaaggcaaaaagaacattgctgcaatatattataacatgtcacggctttatcatttcctatgtccacggatatcctattttttggggtttgatcgctaacaaagatgggggaccaacgggaagccacgaattggggccacaatatccatttccatttaatactcttctttgttctaccttgtgttaatgtgttatgacctatggacctcctttcattcagntcaggctaacaatctcaaaataacttttcacaacctttatggaagtcttatttcagatacttcgctaactgaatcagttccatcattttctttacatatagatcattccattgaataatttattttcatcttatggtataagtagcataagttccaactaccaacaagcaatagctattcttgcttaaggatataacaacata

SEQ ID NO: 2511 - DNA, 329 bp, Oryza sativa
agcttagctagctataggtaccacgtgtcttatggtggagtaatattgagtcttaagaaagcatcaactgaagaaaaggacaagtagccggcttgctggagaggaggtaaaaaggataaattaacttggtgtttctttcacaggtagtcatactacaacaaataaatggtatcaatcatttaataagctagaaaaaagtacatcttttttacgaatgttacttgtatgcctatgtcaaagaaccagaccgacgaaacatgtaataagtcatgtatgtaggattaattaagtctttctcatttaaatagcttatcttccagatcagaact

SEQ ID NO: 2512 - DNA, 403 bp, Oryza sativa
tacaagatcaaacgaacaccaggccatatgtgatccctgtttaatgaatggatggattatttctcagatcaattccgcacatcagtctgtatccccaatttctttcgaccaattaataataaaacgcacagcaacacccaacacagatgatttctactatgaggagaattcgggcgtaccagaagacgaattgagtcctgaagacgacgaggaggaagaaagatcttggctgggaggaaggattgattggtgctctgcaattctgcgggcgatgactcctccgcctatataggaggcggccacgtccagtgcgtgtcactgacgcgtggggcccaactgggtgggtgggacgaaccggataggctttgaccttgtgcgccgcgtcactgacatgtgggagcca

SEQ ID NO: 2513 - DNA, 453 bp, Oryza sativa
agctagatcaaaacaagaattaagtacatttattctgaaaggagataattgacatgcatatgcctcttatctttatggattacagaagagaagttatgaatggtcctattgtaagtaatgcttttagggtgaaagaacatattgctcttaatttatttgtaggaaattgtacgcaaataccaccgaaacatagcaatgccaagcagtcgattaccatcttactccatggaaaaatcaattggcaaggagagcaagttaacgaatgataattactgaaccgtctaaaagaattactactaaactgcctgtgtttacgttattctctatttccaaatttaccctttttaaatcaacggtggaattgaagtatggtggaaggtacctcctatacctctcaagcacctaaaaccctttttatataattatagactagctatacactggtgtgattac

SEQ ID NO: 2514 - DNA, 468 bp, Oryza sativa
  unsure (1)..(468): unsure at all n locations
tctataatacttattnttttccagacatatttctcagagttattcatttcaatacgaagatatattatcatgtaacaggcaaacatacatgaagttgaactagttattcttcattctaacttcactttgataattttaactgttaaaaacctcataatttgatcatgttctttgttattacgagggacattttcacatccagtgaatagtccagtgaatcaaattaacctatcctgttgtttaaagttgcttgaatttacgtatttggcaggaaaaagatatgcagaagcttcgggatgctagagttcancaagatatgcttgatcgtgaagcttcccttttacgtgcaaaaaatcaagcagctttagcagagggtatctcatggggtatgtctgaagatgcaatcgaagattcttgaaaagttaagtgttttgcaagaatatattttgtatattgataaattacata

SEQ ID NO: 2515 - DNA, 414 bp, Oryza sativa
  unsure (1)..(414): unsure at all n locations
agcntgagtagtntcctagataccaatgtgtgcataactaanagtgatgcaccacctcttgatttatgacgatggccatagaacttggtgtcggagctgttggccaactcgttgaatctgagttgattggtcgataactgcagactcccatacatgtagattaaatcttgaacttgatacttgagaaatgcagagtacattgtggcaacgtgcataagccaaaattatcacgcgaaataattggagttgctgaagtacaacgccttctctaaagcgaagacgaatataatgactcccggagttgactcattggctgattaatctgatgcttcatcttgacataaaccttgtcaaattttgagccttgtattagtctagcccccgactcttatgttgttatgaacaactgaacat

SEQ ID NO: 2516 - DNA, 439 bp, Oryza sativa
tggcgctaagcgggctaattacgccctctattccaaagatgtttacatattccatagagacactaagacaaagaaaagcgtgaaactctctcatactatatgtactctagcaacaaactcagagcatgtaccatcaccatgattttctagccaatagcaaatcaagatactgcatgtggaatataaatacttgagtgcatgcatgcatgaatgctcatttactccgatgcacgaatatggagaagacttaatgaatggacacaaagtatgggatcatttacgacaaaaagtgatatgtcaatcaattcggaatggagggagtatgtgataatataattaacggatcagtagaacgacacgtggctatatatatatgtgtggagtatatataccgcttcatgtatacgctcgcatgcaatacaagcttgctagctagtga

SEQ ID NO: 2517 - DNA, 384 bp, Oryza sativa
  unsure (1)..(384): unsure at all n locations
agcttacagctaaacatccttactgcgttatacatgggcccacacaatattttgtcgctcatccacaatccgacgacgggatggacatctcttacacgcaccgccatgggagaaaacacaccacacaacgctagcgagcaggccaaccaaagcagcataaggccggcccagcagtctcaacccaacagccagcccacataacagaggagcaccnagcagcacagtactgcacggtactgtagcaaccgagactgtagcatccgggtactagcacacgaataactgtcccacagcttgagaaacactcaagcacctgcttaaatatgaggctcgcacctcgttgtctacactgtattatagagctggacatacgtgtccttagac

SEQ ID NO: 2518 - DNA, 405 bp, Oryza sativa
  unsure (1)..(405): unsure at all n locations
tgtgaagatctgagagctgcaagaggagttcgctcgacttatctaagaggaccctacgctntacggacggccaccgacaggaggagcccgcatccgctccacaccaatgtagtccaccacatctgcagagcgcatccagcttgctgcctatgaacccgtctcagactacacactgtagcaccggctgcaggtgcagcgccagctccagctctagctccagctccatctaccgcagcatattcagcccccgtgccaaagttcggcttaactttcgtgccagattgagcctacaagggtctaacaggtggcacnagaggatggctcgcatcttctatcaaaggtggacatgtggtatcaaccattgcaacttggagcatgcacaggaacatctatcagacagagtac

SEQ ID NO: 2519 - DNA, 299 bp, Oryza sativa
agcttgaggtgtttacgagagtgtgcgctattcatcagccgccaccgagacatatatctgcacagattgcaagcaatagatgctcgcgcctgctcctattagcacacacaatattatactcatgcactagagtgcctagcactcaactcaaagtgaccgtgccttgaagagaaatcgtccatgaccttaccactaactaagccgacactatggtgaccacactcatgggcggaccagctatcatgtgacaatcgatacaataagttgtgccgccattcacagataagtcgacagtagca

SEQ ID NO: 2520 - DNA, 363 bp, Oryza sativa
  unsure (1)..(363): unsure at all n locations
ntacactaacacggctggactatggcgcaacgttactgttttttcccgcgaaagganagaaaataacccgccatggtgtacgctactcactccctccatccagaatagctccgaactggatggaagcgttcctatccagatcccgaagatgaggatacgccccatccgatcctatgctgctatatgcattcttggaccgatggcagccctagctgatacttgggcatgtgcgctgtgagtcccaccataccgatatgctcgcccgatgggattggctgtacatcagcgaacccganagaaactccttgaagacgacgcctgtccttcgtggccatacaattgctttgtgggtcgaaaatgaac

SEQ ID NO: 2521 - DNA, 176 bp, Oryza sativa
gaactgactcacataaattgggtagagaacactgtccaatatttaagcgagaaaactgcgtgccaactgcactaatgagtggtcaacccaacctcctagcggcgacctgtccacctacatctcatacagtacagagacaatacccaagttctaccagctgcccgccaattatctgc

SEQ ID NO: 2522 - DNA, 457 bp, Oryza sativa
gacctataaaactcagcttacagctgcaagagattgtagaatttccttttttgttcacactcagtaaatgtagtaatataaacagatgctgcagcatcaacacaacactaggtgaaaagttggtattgcttattataaacttctaattggatcattattcatgaaacatctgaaattgcaacgagaggcataccaagtcggttgataattgatggcagcagatcctgcagctctgtacagaaaagggaaacataaaattatcgttatgcaaacacacgaagttaataatacaactttatagagctaatattatattagctcgagcaacaaaagatctttgagaaatggaaagtccacattaccgcttgcatacatatacatactatgggtagctattatctactctacacacgataattgaacaaaatgacaggcttgaattgttgtttaagaatta

SEQ ID NO: 2523 - DNA, 449 bp, Oryza sativa
agcttatctcttacgctccaggaatggattattcagaacatcaccactgacttgcctcgtccgccgccgactggtgtttccgcctgcacggctggcctattatgccgccgttgttgggcgtttacgtcttcaccaaccagccgcctcgtccgccgctgactggtgtttccgcctgcacggctggcctattatgccgatgttgttgggcgtctacgtcttcaccgaccggccgcttcaccgaccggccgtctcatccgccgccgactggtgtcaccgccgtcacggctggcctgttatgacgccaattgatgctatcttcttcacggctggctacatcgccgtcgccgctaacaggcgtcagcatcttcaacacaagctgcctacgtctgctgccgactgagttcttttcttccatggctgcatgattctgctagtgttgattgggctta

SEQ ID NO: 2524 - DNA, 455 bp, Oryza sativa
  unsure (1)..(455): unsure at all n locations
tggtttatctctctttaaaacaaagnctttttgtgaattctcttcatttatgagaagnggcatgaaaatcaccttccttgatctggcgaggaataatttccatggaagcttaccacagtggataggtgattagtcatctttggtgatttctcgactaaggtcaaacatgttctctggtcaaattccaagtgacatcacagagcttgaggatctacaatacctggatctaacataacacaatatttcacgaataattccacaatctcttgcaaccttgaaagggatgtcttcaaagaatcaagatcctcgccaaacatgactgaatcggacttttgacagacatctcattattcggataagcatggaattgaacggttgatgaagcttgtcatggcattaaaggaggaacttcatttcagccaccgaatatatgtgagattgatctatcagcctat

SEQ ID NO: 2525 - DNA, 403 bp, Oryza sativa
  unsure (1)..(403): unsure at all n locations
ccttgacctctaagcacctgangctgcagcttacacttacatacacgngacgtttcagtcngtattctaggngcacacagcccccagatattcgatatacctggcaaatccgaccgacgacattgtaccggtccacattacacagcttgtagagaagaaaatggatacaacatgataaatactttggtcagcaatcgggaagctatgaaccgccaaatctgtaaaccaccaacgagctagaaataccattctcacctcaaaaccgaaagcattgctctattctgtggcaggagaaagattgctaacagcaccaacgggtggggactggacaagatgaacatcgattggagacggaaataaccacctattgacatcagaaccgagaagaacaagcgggcaacgc

SEQ ID NO: 2526 - DNA, 393 bp, Oryza sativa
taccatatatagagactcacctttatctaacaacggggtttgaatctctttaccatatatcacatatgtgttaccacacaatcttatcttatccacagctggagtatatcaattagagagcaccagatcgctggtcaaagctaaggaaaaacaagctttccctataagtcccgcaattccacacactaaagcagcacatgacgcacagcacgaagaggtgaacatacctgcccattctgaatgagcgaaactaggaagcatttcttgtgagcttcaacagctatagcattcaatgatgacgttgggacggctacagccttgtcaaatgcattacattgttaacactgcacccttgaacagtagacacaaaattaacatgtttggagcctcaca

SEQ ID NO: 2527 - DNA, 395 bp, Oryza sativa
  unsure (1)..(395): unsure at all n locations
agcttccatagctagatagctagatattatctntcttttcatacttatggctgcatcagctaagttagatctcataagtcgtgcttagaattataatctctaggcagctctttggttgccgattagagtagcatcggggtttcagccgatcttacctgatttagccttatatttcatgtgcttaattgatatgctaaatctgccctttatgttaaaatcttattgcttttagatgtgttaagctttttgtttgatacatcttaatcgctttaatatcttaatgtagagtggtatcggagtattagccgatacatgctagatctatcttatcgcgtatgctatgaacatatataacctcattgttaatatatatttcgatctaagtgatgtatact

SEQ ID NO: 2528 - DNA, 489 bp, Oryza sativa
  unsure (1)..(489): unsure at all n locations
gagctatatctgccaagtccatatcagctccaccgagttattgaggtactgacaatgccggtccacggagagcctcaattgatagcttagacttgggaggtgtaagctccgtcggtcgacttggacgaggagtcatcttcacaactatgtcttctttatgccattgtatgaacgtcttgcgcgcatcgcccaaagtcatgatttcatcatttgtgggcacgggcagcggatagcctgaccaggtgtcctttactgtatcgatggacaccttggcatacccagctagcaggtctgcgccgcggaccttgtctgtaaccgagggcttgaaagccatgccctcagcgacttcaggagcgaaagttgggtggactctcgctagtaagacacactgtgctgcgccctgcataaggtgaaagtttgaatntaatattggaatgtgtaaatgtcttttattagatatggatcggataacaacaattacctcgatgg

SEQ ID NO: 2529 - DNA, 374 bp, Oryza sativa
agcttcgaagactctctgatttagtgctcttttatcgcatggagccagctaagtcattggaatctctcacagctcgtggacagccctctgcatcagatgccgttatgacggccattcgtccttcactatccgtatcatctcttgctggagaacatgcatcctcagcttccatcttaatgaacttagcactgttcataactcacatgtgctgaaaaatgtcatcatctctctgaacatctttgtaaccatacctaacaatgccgcggttcatccgatacgctctaggtccaatcctgcccacaaggtattgattatctggcgacacatatggtactggtactgactcgacacatagaaacactaggacttcatga

SEQ ID NO: 2530 - DNA, 418 bp, Oryza sativa
tagagatccgtgactgcttccagtactgatgtgaacatgtaatatcttgctccaacgaggatgcagcgtcgaccgtactgcatctgctacgaccagtagctagagaccaaaccagacgttgacagatgcttacatcgagtgagcaaactctttactactgcgatttgagctcgaatccacatacggacgtaccttaccaaactgaaccatactaaaactcatcatactataacatcgacaataatctggtaacgactaattatgaccgttaaccaaaccacggctatcaataccagcctatagaccgagggagtagacgacgagcgaacaaactttttactactgatgtcagtccagactcacactgccacacacgcgcaaccctagtacatagcatattcaaacgccagctaaagat

SEQ ID NO: 2531 - DNA, 360 bp, Oryza sativa
agcttgtacgatgggaccaactattgtattctcctaatttataagagcacgaggtattagctctaagactagatgaaaacacttattctatgatgagacatacgtagtgctagattattatatctttggaattgaccaatccattctatctcaaaatataattctatcttgtgtttcaacgaaacttctgaaaagatcatcagcccatgacccggtggaagtcacatgagttgaggagatatggaacactgtgaagattttatgactatctatataccacccttgagtctatatacattacggtgttttgctatccaatgcgaatagtagaagtatctatgttttagacggatggagcct

SEQ ID NO: 2532 - DNA, 296 bp, Oryza sativa
tgctctgcgcacattaagctacgccgctattgatgcttcttcggttcttgccgttcggcactctgacgaacctcgcttgtatctcgatgacgacccaaggctgaatcttctaagagtctaacctcaccctgagcaagaggacaaccccgctcctcaaatgagaccttgggatgattgattataagactatgaaaagtgatattgcccatcatatgtcgcgtatgacatcacgagggatgcccacactcctataattgactatctgagctagcacatgatcactctagcgcatactc

SEQ ID NO: 2533 - DNA, 419 bp, Oryza sativa
agcttcaagaagagatgggttctaagctgttctctaggactgcttatcatccgcagacagacggacaaactgaaagggtatatcacattttggaagacatgttgagagcttgtgctttagatttcagtggaaggtgggataagaatctaccttatgcagaattttcatacaacaacagttatcaagctagtgttcagatggctccttacaaagcactatatggtcggaaatgccgcactccgcttttgtgggatcaaacgggagaacgtcaggttttcgggacggatatcctgacggaagcagaataaaacgtgaaaatgattcaagagagattacgtgtggcccagtctcgtcataagaggtatgccgacaatcgtcgtagggatctaagttgtgacgaatgagactatgtgtacctt

SEQ ID NO: 2534 - DNA, 382 bp, Oryza sativa
  unsure (1)..(382): unsure at all n locations
ntcttacgctctagtaatggcttcgcgtcttgctaagctctacttccaggcccacaaagtcatagtcccatcacagtactccttgtgcgaaatactccgaggcaaggaagtcactggccagctcatcaagtgggcggcagagctatccccgttcgacttgcatnttattgcacgctctgctatcaagtctcaagtgctagctgacttcgtagctgaatggacaccagtacttgcccgcgaccccgagcccgatgaccagttctgggtgatgtgctctgacggttctgcaagcgttgcggcacgcctctttttcccgaatggtgtgtcgatttggtacgcggcgagaatgcagttcgacacaaccaacaatgcagcagaatac

SEQ ID NO: 2535 - DNA, 363 bp, Oryza sativa
  unsure (1)..(363): unsure at all n locations
agctagctcctataagaagttgtggatactagttgattgatattnctctaatagctctctatcgtattttgtagcttaactatatgctttatgtaccattgccaaagcatctttgtatcactgatatttggctgattcatttacaatattaattgtcaccgtatcgttagcacggacacactactagtatatccacacattccatttaatgggtgaaaattgtataacatgcccgagttccgcgcatcttgtgaagattcataacttcaagctagcttaagttcaaaatacaaacagagagagaatttcacgctatcattgcagctgtaccacaacctgaacaagttgcctggaggataactc

SEQ ID NO: 2536 - DNA, 452 bp, Oryza sativa
  unsure (1)..(452): unsure at all n locations
tcagggttnggcatactttgtgaacttatttataaaagtttcaccatcgcataacgcngggaaatgagttcagttgaccaccctaagacactgcattcttagagttcattgatatatatgaataagaacacgattaacgcctaattttaatttatgcttaggtacatatacattgggacagtgtttagcgcataatgctggattattatgcatatgcataatgcatccacagtgcaactgtagcggttcatttgtctgaaagaaaaaaaataagtatctttaaaaacaaagcagcaagtatgatggaggaagtctgagcagcaagtacgaactcccggagaagncaaaagttcagtagagtaaagcaaacattcttgcctggcagcttaacattacatggacacaaatagcaatcgaatcttacactaaaacttactaacattatatgcaca

SEQ ID NO: 2537 - DNA, 334 bp, Oryza sativa
tcggcagcatgttcgtaggtcccggctgtgttgatgatactttaattactaacgcgcgccaagccatcgctcattacacgccatgctattctccggcgccaagtgtcacaaatgctgccttactgggaggaaaggaaccactactgctactttgaccactatcaccccgatcatacatggcctgatgacgctgtcggcagaccactgaagacattcatacactgatcctcccacctcctaccgatatttggatgctgcagccaaccagcaggctgatgacctttagccttgactctctggcaaacacgacataccgctcattgacctgtgatgg

SEQ ID NO: 2538 - DNA, 310 bp, Oryza sativa
  unsure (1)..(310): unsure at all n locations
agctngctctatttataggattatatgaatggtttgcagagctcacaatctcagcctcgctcagacgaaaaatgctatttgcatacagtcagatcaattattcgcatgctcatgtggaccggatgcaacgataagagcaccaaagaaattgctaaataaaaataacgccggcgcgctccgttgtcggtgacatgccagtgaacctccgtccgcgcccgcctgtaaatatgggtaggaggaaacctaccgcccgctgtcaaccggtgctaccgagccgacattgcgccgttcactttcgacgtcggatctg

SEQ ID NO: 2539 - DNA, 420 bp, Oryza sativa
  unsure (1)..(420): unsure at all n locations
ttgatcagtgcanggagaagctgaacgaggcttctatattatttcttcccgacatctagaaagactctgttatatattgagatgctcgaaggctacgactacgaggagtgctgatgcctgacggtaaacctgtggactatgcgtcgcgacaattgcgatcacacgacgagcactaccctacccatgacctataactatcggctgtggatcatgcgctcaagattggtagacattatgctaatggacaccattgttattattacactgacgcgcaagagtctacagcatatatggagccactctcatctcaacttgtgggatagacgatggttagaattaatcacggactatgatatacacgttgactataaccaggcgaagcaaacgtcgtggtcgacgctctgagtcgtaagagccatt

SEQ ID NO: 2540 - DNA, 429 bp, Oryza sativa
agctaggagctctgacatttcttgatttgttcaagaacaggttgtcagggaagataccaagggaactcggtaatctggttcagctgcagaccctacttgatttgagcagcaattttttatcgggttggatcccccaggcagccttctgcaaactgctctctcttcagattctgatcctgtcgaacaaccagctgactggaaaactgcccgactgcctatggtacttgcaaaatctgcagttcttggacctttccaacaatgcattctcaggtgaaatccctgcagcaaaggcaagctacagatgttcccttatatcgattcatctttccagcaatgacttcactggagtttttccatcagcgttagagggatgcaagaagctgatcaatttagatattgggaataacacattttttggtgatattccta

SEQ ID NO: 2541 - DNA, 363 bp, Oryza sativa
  unsure (1)..(363): unsure at all n locations
tagctctccanagatctatctatcgatcgacctcagatttttcaaatcttgtgaactttggcgtgatcgcgatgatcgaatttctgcatgcaggctcgcggaggcgaggcaaccgctgtggaggaaggtgccgatcccgtcaagcaagatcaacccgtaccggatcgtgatcgtgctccggctggtggtgctctgcttcttcctcaagttccggatcacgacgccggcgatggacgcggtgccgctgtggctggcctcggtgatctgcgagctgtggttcgcgctgtcgtggatcctctaccagctgcccaagtggtcgccggtgacgagggagacgtacctggaccggctggccctccggta

SEQ ID NO: 2542 - DNA, 460 bp, Oryza sativa
agcttaacgatacggagcggaagcaacgcttgtgttgtctcgagtctcttgacctagcctaagcgccgccgccgcttcgccttccccacgcgggtcgccggcgcccccagcctcaccggtgttgctcccccttcacgcgctcgccaccaccgacgctccccgagtcccgtgcgcgccgctgtcgacaccggagcttggccacctcggcaaggccggtgacctccaccacctccagagtttcgtctctagtccattcatggattcgaccctaacaagcggcttgacttcgccatcttcaaggagactgacctcatcgttcatcgacatctcttcaaggaggccccgctctcctagcccctagccgaagatcctgaggtacacagagaaagtgcccatgaggttctcttaccatcaatcactatggtttcgtcgttttcacggtcaatcactactccttggt

SEQ ID NO: 2543 - DNA, 155 bp, Oryza sativa
agcggtacctgtgcacccatggatggccataacggattattaacccacccgctgccatgttaaacacctgtccgacgtgcccaaccggtccgacccaaactacgatgtgatccatcacgtatccggcgataccccacagcacgtggaacaaagac

SEQ ID NO: 2544 - DNA, 376 bp, Oryza sativa
  unsure (1)..(376): unsure at all n locations
agcttgatataggcacagaagcctgaggtatggaatcttactgtactcatgatcacaggaccggctgtgcttggatcgtcaagattatgtacgcgcacatgatttatacagtaaacatcatcctagggtatttgatgcatacccgtcaaaggaaaaaaagaaaccgacagaaggtgataatattgttcaggaagccccagcagagataccttccctgctggaactgaagcgcatctactatgaactgatgattcggatgtcttcctgctcagatgagactaattcatcatgagttcatgtcgcttctagtaatgctgggtgaagataatgctaccccctcacgtcgcanaatatagctacctttagctatgaatat

SEQ ID NO: 2545 - DNA, 321 bp, Oryza sativa
ggccaacgatgaggcccgacggaagcccacgtcgtagagctttgataggtttctctgcgtgatacaatccgatgtcatggacctaccacatcacttcatggctgcattgccacttgctgagtgtgcgataaccgacatcaagcgtatatgtcactgatatctttgataaggacagctagatgcgagttagggacatcggcttcgaacctagatagacgtgtgtacaccaacttgaaatggcggcttgtgcctactgaacctggagctcttctggaagcgctgcgcctgctatggacagcctatcgcttacgtctcatggat

SEQ ID NO: 2546 - DNA, 473 bp, Oryza sativa
  unsure (1)..(473): unsure at all n locations
agctntagttaccctcataaatgtcaccattataaaggtacccatgttaattccccagtacacattaactctacggtgcatgagcttgtactaaggctataaatagccccctaggggcatgttatggggggttctcaaaaaaattcctttaattaatacatattgctttactttctagtgtgtgaactgtgtgaaccacgtctttcgatgtacgcagttgtcattcgataacatatatattatatttacttgttatatatttgaacaatcgttgttacacaatgagtttcgtgtgttttcatttccaaaggtacttgcttgggtgaaggaaaagagatcgagcgtaaggaatgcatggatgatcaaaaaagttgattaaagaccaaaccaagaccttctccaagtccacttgtacctcaccacgtcacttttggtccatacaagacaatagataaagttcaatancgtttgga

SEQ ID NO: 2547 - DNA, 459 bp, Oryza sativa
  unsure (1)..(459): unsure at all n locations
tctgcattgagataccannaatgcagagattatggtatgtttgactgtttgaggaccatgaacagcctcccttgtgggcactaaacaatggaaccatggttgcctttcttgcttgcaggcatgtatggccacttgatcctgtccgcggcgcggcgcatggtcctcaatcatggagcagcccctgngtactgtgcctcagcacccatcaagggtccatctatgatcacattgttaagtaagtgctcaccctccttaaccattatcataagcaatagaatatcaggggcatgcatttagacttggaagtgtctcctccaaggcaaaaaaagaaaataagtactgaaattgcatgtgaggtggtgggtggttatggtgcaagctctaaagatatcctttggctcctctatataagcaaagattgcatcactgcagtctcattctctacccgcatatcggcat

SEQ ID NO: 2548 - DNA, 470 bp, Oryza sativa
  unsure (1)..(470): unsure at all n locations
accggatccttaagtcactgcagctcaagcttagcatacaaatattttaaacttttatgatattgcagccaagagagagagaagatactggtcttcgagtatatgccaggcagaatcttagattcattcataactggtagggggttcaattcaactagctttatgcctttatctactcagtttcgagaccaaattctattgttcatgttcactcaatgatgcagtacatacatgtttgtcgcatttgattacaggtgagcgagcagaagagttgcctttggactggtctaagcgctcccaaatagttaaagggatagctgatggagctgtatatctacacaagcaatgtgagccacgtattattcatggcgatctgaaaccaggcaacatactcctggatgctgncttgaaacccaagaattgtgactttggtacatcgaaagcacttaagccangtcaagatatggact

SEQ ID NO: 2549 - DNA, 481 bp, Oryza sativa
  unsure (1)..(481): unsure at all n locations
cttntcttcccaacagaaattacttcanaactcactaccatttacctgagagttcacaagcgaaggatcagaagaattaacagatctgtccaagaattaatcgattcgagtgcgatcttgtaaaactggcatgaatgcaattataagattccaaaaaaatatgtagctgtagaattccttanaatacttgccttcagcttacttattgcacgcaaacaatcatctgatgttaaggatccaagatcagctttcctcttctgacacaggagtttacggagatctagcaagtcaatcaagccaccgttggtcgctctggttgctatgcatatgtcaacaatctgaactcctggtgcaatagacacagatgctaagcagaacataaatggtccaataataaaagaaagaaacttccaggatcanaataaataagatagcttaaattaagttaccaacccaattcatagtagaagtcaccaatccg

SEQ ID NO: 2550 - DNA, 286 bp, Oryza sativa
agcttgggaacaactcaattataatgacttatggcgcttacgaaccaggacgatactctggtgaagcacgaactgtgtgctagaccctacagagagccatctggacctatatccgcccatcttgtatacaacttatgtgcaagccgaactctactcaccgcaccctatatgtacatttgcttaaggctatgatgtgagaaaccctgataacatcttcccaggactgccgacctaagtgacgcaatcgctaatgccacaggacgaagagaaaacgtatgtatcacat

SEQ ID NO: 2551 - DNA, 426 bp, Oryza sativa
agaccgtgtacgcacttttatccgttatgaaccggctagacacatagattttgagaaaaccgcttcaaaccgataaaaatatttgtgccgaaccgctggacaggtgcatgtgagtctgtatcagctcagaatatacctattgagatcggaccaatcgttgaaacggcggcccttagaagatagttaattggcttgagcgctaggaccgttggttcattcattgaggtactcgccggttcaacgacccgtctgacctctataacctgcaactgcatgtctactgtacagcttcactctgtcagtgtgccgggccctgtccaatggataaccgtagatggcttgacaaggccgttgtttacgcacatgattattcttcttctgtttcttcttttaccgtgccgacttgcctcgtctcgacagtgccgc

SEQ ID NO: 2552 - DNA, 468 bp, Oryza sativa
  unsure (1)..(468): unsure at all n locations
agctnttatctcatcgtttattgccattatggtcggagcgggaattaccctggcggtgctgattctctcagggtcgattgaatttatcccgatgcaggtgatccctatcgccgggatgattgccggtaacgccatggtagcggtggggttgtgttacaacaatttagggcaacgggtcattagcgaacagcaacagattcaggagaaactgagtcttggtgcgacgccgaagcaggcttcagcgatattgattcgcgacagtattcgcgcggctttaattccgacggtcgattcagcaaaaacggttggcttagtgagtntaccaggaatgatgtccgggctgatatttgccgggattgatccggtgaaagcgattaaatatcagattatggtgacctttatgctgctctcaaccgccagcttgtcgaccattattgcctgctatttaacctatcgtaagtttataat

SEQ ID NO: 2553 - DNA, 128 bp, Oryza sativa
ttcaaaacaaaagaagacagtctaggcatatggatagaattaggaggtccatcattcccaaatgagcctgaaactccatctgctattaaacatctgacggtgcctgcgatgagatgtatcaaattgca

SEQ ID NO: 2554 - DNA, 382 bp, Oryza sativa
gacacaagaaactcaagctggaggagacatgaccccccaccattttactggtttctcttttttataccaccgccgatagcatactcgctttaaatcgcatcgtataacactaaaaaaacatagaaacatgctaaatggacaataccacatggatatgatgaggtcgaatcacgctacgcatgactaacgtagttattatgttgacacgaatgaatgttgctctgtaacatatcgcttatatatgggtacttggtaggcgctctctctaagaagggatatcagtagcctataattatacgggatccttatggattaggggtgcacttgctgatttacgtccaagcgatcgtgagaggtgagacaggcaataagaataactatg

SEQ ID NO: 2555 - DNA, 466 bp, Oryza sativa
  unsure (1)..(466): unsure at all n locations
agctncatctttatcttctccttctaccttcnataaaaggtgnctagattctctctacactagccatggatttcctggccctgacaaggtaacatgtgtgatgcagctggccccactggcagagtcacattcagctgggtgcagatccatccaattcgatcacactgtcagctcaaggaattgcagctgctgctgctgatgcatgcattgcatccaagaacgtcccaagaaataaaagcctgcaacatcttcagtggaacatatggtcttataatgaatgttcagtcgtcttcaggccactttcctcccattctaagtttcanagtgaatttctgtgtttccgttttagatgggggaagtaatcgctctccggctttaacttcgaaaaacatacacatttgcattattataagcatgtgcgaaaattcatgaaatgtttataagctagaacaactcgaaattatgc

SEQ ID NO: 2556 - DNA, 459 bp, Oryza sativa
  unsure (1)..(459): unsure at all n locations
gatcaacctgaagngccttgctgaacttcagcctatagctaggaganaggctaaataatttgatcggttctcatatcgcanagttcaattatggcatcagaaatagctattttgcttctggtccaagattacactttaagaacaatgtagatgcaatgataaaagtagccaaaacccaaaaggtggagtagtgaattcagaacggtatatgtgtgatcattntgagccctgtgcatattgcaaagtaaaattattgcatcagaattcagaaacagaaacatttttttttcttccagtccaaaattacacttttagatcattgtagatgcaatgatatgagttgacaatacttgccacaaggtgtagtggtgacttcacttcactagctcactanggtagatgtgtgatcattctgagccctgtgatcttttccttgtggatcacaggaagaaatgcctg

SEQ ID NO: 2557 - DNA, 251 bp, Oryza sativa
gatcctctaagcaccgcggctgcagcttatagggtcattctgtccatgtgctttttttctcgcatatctcaaacatagctatataaacgatgttttctctgatacagcgcccatatcgttacgcctttcttgcgggtcggatcttacccgaccaggacattttcttccttatgactcgtatagatacagacgtcgttcaccggggctcggtcgccggctcccctgtcattcattcaccaacatccttgacc

SEQ ID NO: 2558 - DNA, 476 bp, Oryza sativa
  unsure (1)..(476): unsure at all n locations
actacgctttatattcggctcagcttttgccgcaggactcttcttacagtatcgncttcgcagtagaggttaaccaccaaattcgggatggattggtgtggttcctctacgcctaggacaccagaatatcgaaccatgaacgaggaaaggcatgagagaaatattggctagtaattgtgaagccccaattcttgactggaagggacaccaaaggcctctgccctccctctctatctatccaagagatggaagggcagagcttttttttggttttttcatcttttcatcaaagagttgaacaatgaagatagatggcaagtgccttgatcgattgatcaggtcgtgtatgaacaaggttcaaatcgttcgttcgttaggatgcctcagctgcatacatcactgcacttncacttgacacctatntaaacggctcggctccgcgctaccttattctattttcatgcttctgtcgctca

SEQ ID NO: 2559 - DNA, 430 bp, Oryza sativa
  unsure (1)..(430): unsure at all n locations
gctacaacggatatcgaaactggctagagcattaacccgagttcttatatgttgtgggccgccgggcacagggggctccccggactagaagccggacgtattggcgatcggcggttgatgaacaaaggggtcaaggttccccagcgagtctccggcgaggaacaaaaggattaagttccctccataactcctgcgaagccttgccgccgccgatgcatggaacagcggnggtcgtccgcggaggactactgaggcttcgggactggaagcgctgtaagcgagcgataataatactgtggaagcaaagcaactgcgggtgcaaatccagcgtgtggtccactagcgcactatcgcgcagattgtgcaccctatagggcctcctggccactttcggtgtgtgcttgggcctcatagcctccgcctaccactt

SEQ ID NO: 2560 - DNA, 433 bp, Oryza sativa
  unsure (1)..(433): unsure at all n locations
agctntgtagaattttctattatacaatatttattacatctgtcttggactggagttacatacgaattacgaatgtaattacactgctattatacgataattacatttgccagaattatacgctgattttctatcaaaagttagataggcagtctctatttctaaatctaaatgacaatgatatgcgcgtagaaatatatgcaatgcctttctatcattagaaatatacacaatgcctttctgccaactgtcccaccacccctctactcacctcgtattatctcccctttactccttatttataagtagtagagataatacttttaatgtatcataatagatctcacagaagcaactcttacgtacctcaacaattattattcgctcacaccgttatatatcttacaattaaatgccgtagcctctccggacc

SEQ ID NO: 2561 - DNA, 317 bp, Oryza sativa
atccttaacatcaacctgacaaagtgaccaacctctagagacaacaatagataaaatggttctaattgtagctggcttaacaacaagactaaaggtgatctcatagtctataccaaatattagtttaaatctgtttgttactagacgagccttgtatcgatctaaagttccataagacttgtgtgtatgcttataaacccatctgccatctatgacatttttttccttacttggcggaactaagagccatgttctattattcacgaagcacttactctacatccatacgattttcagttttgttacagagacttcat

SEQ ID NO: 2562 - DNA, 407 bp, Oryza sativa
agcttgtgaggttgcgcgaatacgacaagtgtgatatgtttaaggaaggttccacctcgaccgatcgatccgaccccatctgcgtattggaccaggcgtcgtgccaatctgttcttcttccatacgaggagctgacacggctctgaacaacgtgcgcgaacctacggactcacctcctcttcagagagatgctacctggtgacgtcctccagagaagagggtgggcgccattcatatactcttgcacagggcgcagcgatggtcacgcgacccatcgacactttggattattaggataatgcgataattgaccctgtgactacgtcctgacttgaatatactgccgatgcaccagagaactctgccccgtcacacaaccacaatatgatcactatgttttaaacacg

SEQ ID NO: 2563 - DNA, 401 bp, Oryza sativa
  unsure (1)..(401): unsure at all n locations
ntgctntccttcttatcgattcagcgtgatgagctcaaatactctattaattgtaccagtgagaagtactaacgtttcatgtgcgcacatatttattccggtcatcactatatatatatggacctcacatcccaggaacaatattacgcaggaagacaatctacgcatattgaagatatctatactatccaagtaaatacttatctgtgcaattctaaaagatagcaatggtggtagcaatgaatctaccactcactaagtaatattgtatacacaccgtcccaaaataagttcagttatatatataaatatggatttactagcatgtgtatagcttatatatatatgtgacaaagcacgggtataaatgtagctagttgtccacaatggtatgttctcat

SEQ ID NO: 2564 - DNA, 471 bp, Oryza sativa
agctcaactgaactcagctatataccgctttcttgatatggcgaaggagagtccatatgacattccactcaggaaccagggaacttccaattggaagacataaggaatttacatttatcttcagcaagtaactaagtagtatatgactgtgccacaaaaaaaataaagtgggttgagtttacatactacactcacgaggaaaaaaaaagaggatgccaggattataagcagctataggaagcccatatcaatcaggcaaaatcatgctttgcttataagagaaacagaactcttgcgatataagaaacaatctgaagggtgctaataacatgaacataatcgtgtagtatcaacttaagaaatcatatccactagaaataagctatgttagaagtaatccgtcaactaacacaatatgctgtctgtatctatgatagcgaagcaatttctgacataagaaacataaataga

SEQ ID NO: 2565 - DNA, 356 bp, Oryza sativa
gacctatgaaactcaagctttgcacatgcactgcaagggctgacctttttataccttattcacctgatgaccccaactagatataaatgaccatgcaagagtgcatgtgattcacacagcatattctaataactaaaacgatatcactgtccttgtaccgatgatgtgacaaatgagcgtactgaccatacctggctagcactagacaggcttaggcactcctactctttggatgcaaaacactgatgaccactcctcaaataaacactgctgctgcttgagtgggatgtctattagggccatggctaagatttactacatacatcttacatacaaacctttggagcgtgcctgat

SEQ ID NO: 2566 - DNA, 267 bp, Oryza sativa
  unsure (1)..(267): unsure at all n locations
cttactggtgttaccaaccgggactaacgttctattngtattttgctgttggnaacaccaaccgcgaaacaagatctacatatacggagaggcgtgcgcgtggatcggatagacacatatgtnctcctcctctcctactgtcctaacaccctatctctttctatgcttatactttccctctcctctcctataactgacaatattctctctncataaacgtccaatntanctccttctttgtccctcccccctgctacccatctgcag

SEQ ID NO: 2567 - DNA, 289 bp, Oryza sativa
agctgttctggctccagcctttttttcatgtgatccattaactcagcacctaaagtgacattaaaccagttcgatagtaattcaagcacacgagccaatccctggagcaacggcatggtaagactccttgtatgtgctaagttaactaagatgggccttaaactgctttgcagaagatcttttggcatcctttgctgctgaacgacctgtataatgcaaatcatcaatgagaacatgctacatgctgcgagcgcaatctagaatttgaacttttaaagcaaaacaaaat

SEQ ID NO: 2568 - DNA, 472 bp, Oryza sativa
  unsure (1)..(472): unsure at all n locations
cggaggctaggccatgggcggcgagnttatgccgcggattctgcttttctgcccaccaagtcgttgggcgttggtgagctgaagagatgggcgcggcctccattacgctcctttggcgccagagtgatggatgccgagctgcactcgggcgccggcgttggatcctgccttctcaccagtcatcagcgttgcatccgacctatgatggatagtatttacatgccccttgtccccaccgctgcccccatatttgtcgcaccccgattgttctgccaaccaaaccggtagtgcgaaagtggaagggcctaatagcaaatatgcggccacgctgaacagccatataggacggtcaacctggtctgttttggaccgcaatgattcacttaaacaaagtcatggaccttaatgttgattctacaacatcatggatcgaagtgacaccaccttcaactctaaggaccgataatgtatt

SEQ ID NO: 2569 - DNA, 391 bp, Oryza sativa
  unsure (1)..(391): unsure at all n locations
agctagattaatgcaattgtatctattaattatggtatttacgtcgntntgttagagacttggcaagagaccaccatgaaggtcttgaatgtatcttatctttatgaaagttcgagtcgtgtttataacggactaagtttgtactcggngtataaatatgaaccccanaccatngtaaaagggggacaatccaatacaacttcggcggatcgccacccttttgttcttcttgtgttggcgagttctctcgacaagaggtaacccgtctcgatggcttgtgctatcgaggctattatgtcattttaaatattttagtccttttatcatanccatctgctatcatatggtttagctaatctagtcttagcatcttgatttagctctaccagct

SEQ ID NO: 2570 - DNA, 466 bp, Oryza sativa
  unsure (1)..(466): unsure at all n locations
tggaagaattggaagtcgaatctcttcaccgtttttgnctatccgcccggcaatcatacgccgttcgatgaataccctcaaataaccgaagcggtgtgggaggaattctgctctttcaagaccacccaagagtttagggaatcaagcgaggcacatcgtgtactgcaacagcggaatgagcacccgcatcggctgggcaccgcatggtacatcggcaaggaggcaatatgggcccaagaagatgcagccgctgcagcagcgaatgtccctgccccgttttcagacatccctgaacaaagagctcgcaactgggcgcgggcaaggggtaaggtcaacccggacggctctgtcacatttgagaacaaaagtgatgccgtcgtctatcaggaactggtgagttcgctacttaacctaactaatntncgttcgtataaagtacaagttcgtataaacgactatcttcttt

SEQ ID NO: 2571 - DNA, 382 bp, Oryza sativa
  unsure (1)..(382): unsure at all n locations
accggatcttaatcactgcagctgcagctgactttagtaattttgcttacccacagagagtgtggctaggcaaccgcataggtaatgctgataagacatcgggcctgctccaataatatgcgaggccctgaggtagatacttgcatctgcaagcaaacagattgtgaggacacttcacacattacttccagaatcgacctactgatgatgaacataccctcgcctataaccatctgaaccgagatgctctcgtcaatagtattaactcttgaccagaaatcgaatagtcacgatagcgcggtgacttttttatagacatatgccatgaatagtgacacaggccttccagttnagaatgtcgatatatccatcttatgttcat

SEQ ID NO: 2572 - DNA, 402 bp, Oryza sativa
tgatgccatgggaggaagatgttatgacgtttatgttctgtgtggcgatggacgatgatggagaacgcggtatacacatgtcccgcggcgcatcgaaccctctggaagcgaatgctggcactaacgacgaactagcggcatgcagtctggcaagaaagaatggcatgtaacacgcttcacttggtatttgtgggcacataaccgcataacctcacgggccaaccgattaggaaatcagtctcctgaggttattgacgatagaggagcgggaatgggtggcatcattgtagcttgatggcttgatgataacatgaccatggactataactattccggggaagagatcatatgacacatcctcttgtttatttacccgagcctagcgattaagctacttatttg

SEQ ID NO: 2573 - DNA, 252 bp, Oryza sativa
cacctgcagctgcagctgagccttgccactgagaaagttatctcccttctgatttgccagacccccacgatcatatggttccagcttccaagacattgaagactatgtaggatccaagccacactaatcctactttaccgtagatacaccaaagaccccgattggtagatggcaaagaccaactcaagaagacaaacgacaccacgcctactataaacacatgacacaagatatcatctctgtattaagtac

SEQ ID NO: 2574 - DNA, 387 bp, Oryza sativa
agcttaccatcaatgatagccctcattagtatgtgcacatattctcttccgccttcaactattgtttcagaattatttatcgctggagtttcaacacttccaaaggtggaggggtcatcccacggaacattaagaattggacgtcatcctaatgatattttcagttttgattccgatgatattttagagctaatgatatcggatgataaatctctatcattccatagcttgaggtccctaactagattggtaatagatggttgcaaaaaccttatgtctgttttatatgaaagtttaaggcaactcttgcgtttgaagagtttggtgatatacaactgcccacaacttttctcttcaatgtcccatcggagctaccagtgaagacac

SEQ ID NO: 2575 - DNA, 392 bp, Oryza sativa
ctcaagcttaccggcagggtttattctggcctactgcagtgtccgactcttacaagattgtgcgcacgcgcgaaggatgccaatttttcgctagacaaattcacttgccagctcaagagttgcaaactatcccgctgtcttggccgtttgcggtttgggggctcgacatggttggcccgcttaaaaaggcagtcggcgggtacacacatctctttgtggccattgacaaattctccaagtggattgaagctaaaccggttgtcacaatcacagcagataatgctcgagacttcttcatcaacattgtgcatagatttggagtgcccaatcggatcatcactgataatggcacacaattcactggtggagttttaaagacttttgtgaggact

SEQ ID NO: 2576 - DNA, 261 bp, Oryza sativa
  unsure (1)..(261): unsure at all n locations
ccatccctggagcaacggcgtggtaagactccttgtatgtgctaaactaactaagatgggccttacactgctttgcaaaaaatctttaggcatcctttgctgctgaacgacctgtaaaatgcaaatcatcaatgataacatgctagatgctgaacgcgcaatctanaatttgaattttaaagccaaacaacataacttgaaaaggagaaaataatatttctgaaatgctgtcatataaaaagcattgcttaacccacctgc

SEQ ID NO: 2577 - DNA, 430 bp, Oryza sativa
  unsure (1)..(430): unsure at all n locations
ngcgtggaggtactgatggtgatgacaccgcctaaaggcgttgtctgtcatgtgtatgcactggcgcaaggcaatattctggttggcggcgcacgagccttctctggcggtagcaatgttcacgctaaccaactgaacggtggacagatcaccaatggcgctgatattgaacgtcaattgcccagccagcttggcgtctggaatacccttaatttgcaacgtaacgacgaagatttcatcatggcgcaacaaatcgctgacaccatcaaccgcgtgcgtggatatggcagacccaccgagtataatgcgcggactattcacgtgcgcgtaccgagtggcaacagttaccaggtccgcttccttgccgatattcagaatatgcatgctaatgtgaccccgcaggacacttaagctgtgattaactcacgca

SEQ ID NO: 2578 - DNA, 472 bp, Oryza sativa
agcttatggataagatgggtcctcaagtcttgtgtaaccgtcctgaaaactgcgtcaactacaataacagtcataaagacccacctgtcaatgacccatagaagtgtggaggcatgctgggccagcctaagttcggccgaaccaggggttcggttgaatcttggctgctgcggctccggctggccttacacgtggacgtctaagatggcttgctgatggtggttgccgggtagaacggtcattacatcttttctacaaccttcataccgaccttataaatggaggagctcattttacttcacacacactcaagcaatctcaagattcctctctacactttagattagtattcttagtgctaagtggagtagaacataatagttcccatagtccttggaagtcttcaaagagttctggtatggctctagtagcttttctatctgcttttgtagactttcagtataataaaata

SEQ ID NO: 2579 - DNA, 404 bp, Oryza sativa
  unsure (1)..(404): unsure at all n locations
tagttaactngatctatgtcggatctgggtttactttctattcccgcaaggtcatgttaacttcttctacttgtccctcttccgagaaaacatcggcctgtagtgcttcacattcatccgaggtgaagatctctttgagaccagtgatactggagctagataaaacattacaagtggcaatgttttctgcagtcgtgacatgggcatcttcttgcatttcttcccgattttgtgcagatttttgcccccagctcggctgcataaattgcgctaacgtcgggagtgtataagttgggcgagggaaagattcatctccctctgaccaggggacaaatcttgctggcatgcgtcgacgactcgggtcatgccacctccgtggtgccggggcaccgagcattgtcgag

SEQ ID NO: 2580 - DNA, 297 bp, Oryza sativa
  unsure (1)..(297): unsure at all n locations
agcttagacccagnggatcgtgcatgaactttaccgttaggtggctaccttactgcgtgctggataggaagatcaacttgcacaacatggcccgatgcatatgactagtctaatatagcataggacttagcagcatcatatgcactatttatacacagcagctgatggctagctctaacatccattcgagtacaaggcaagtgacttagagcttcaccgatcgcagtgaatggacataactgatagagaagagcttgtagacatctcagagcatcctacagtgtatcatataattta

SEQ ID NO: 2581 - DNA, 379 bp, Oryza sativa
  unsure (1)..(379): unsure at all n locations
tgctggggccatagatgtcgaggcgctgctgcgcctgcttatttgtgataccctcgcggctgcatctgaggatctcaaacacttactcgacgagaatattctgctgccggatagaaacaaacagacatgaattcgccaatccaactccgtgggcgaaaacggaaacacaatacgcatcatcccgcccaccgaattgtcagccgtcacctattaatgcatgctggcattgccactacatctactatttctagaacggctgatccagatacagacaacgctggagctggagatgccaatgtcttcaccatggtattatgtggccgagccaaccgcagaaacccagattnaccagagcgaataaacgaattctcacataacg

SEQ ID NO: 2582 - DNA, 388 bp, Oryza sativa
agcttatcatagatggcttgcacacggctgtagtgttcgttctctgagcagagagataaagatcggatacattctaaccgcgcttgcagacgtcatcactactatgccagcccaaatcatgatcttcaccaactcggattgggttctctcgcgaaaaccgcgagtcgcacagatgagaaccatgacaagcatgatcccgaataatataacacataccgaggaaaccacagcagggaagactaatagagtctcgtcttttgacattctgtgctccttactcactcaatgattcattcgaatttcccgaccaaaaattctatatgtctatgcatagggcctcgttgctaactgctacaagatctagcgcactggaactcgggatatagac

SEQ ID NO: 2583 - DNA, 465 bp, Oryza sativa
  unsure (1)..(465): unsure at all n locations
ggacctataaaactcaactttctggattggaagatctcttcacggtattgcgttctgttgatcgagtatcttgatcgctacttatgggcgcgcgctcaaaggatacctacatggattcgcagacaaaaaggggaatctttgtgaactctttcctgtcgcgtaaaaaaaaggctttacacgagagcgctatatgatgggatacatctatctgttctgagcaacctcttttggattcttaagaccacccttgcagtaggataccgtctgatctgggctctttattatattatctccttcgagggagttctaagatcgctcaggctatatntagtctatcatggcttatactgtctccttttctcatggaagtggttaatgacctcagaagatataggagatgcgcatgcgcacatctccggaatacttctacggagaatgctcattgaatgctcatactccgattat

SEQ ID NO: 2584 - DNA, 353 bp, Oryza sativa
  unsure (1)..(353): unsure at all n locations
gcacaatagtaagtcactccccatttgtatatctggaatgcgtggactcgtcagtctcagacgactctctatcacacttgactattntacagcctactcctacttcttctgctcctatacagcgatcagaaggtgaccggactccatcggctctatggagtcatcatattgaggaataataacagcgcactgctcctgctatcccagtaagttatctttgaaacatcgaatctcacatcgactgtctctgactaacattaagcttcccttgcaggccttagccgatctgacttctttccacattaaagattagtctgaccaataaacagaaaaggactccactagacaatctc

SEQ ID NO: 2585 - DNA, 414 bp, Oryza sativa
tcttgcttgaggtatgggatgaaatggagagtgtgatgctcttacatgacggcggtgatgggtggaacgagcggatataccctacaaccgtcattgggggttaaaccacactgtgcatgcaaagcctgctatcggagggagctcaagagggaaccattggcccgcccaatacacaccagttctggctgggggtctcttagacatcttctctccatagacctgggaatgatgtgctatgttggtcatgtcaactaggcgatatcagcccaatcgtccgactgtgtggtgctagacagcatgcgatttattgatcgatcagacagctgacgattattctgcatacagtgtttattctctgcatgacggtgtcatactagggctcggggatgtatactattgtgactcacatatgca

SEQ ID NO: 2586 - DNA, 436 bp, Oryza sativa
  unsure (1)..(436): unsure at all n locations
agcttctccaataggtgcgcatgctcgtattatcttattttcgttagttaatnagcttcttgtcactactgcctagatctccttaattaattcgctggtatggagtactaattaatttgatgtttgtccggtctatagcgaaacaaccattattacgtgtgtgtatatacgagaaactttttgttgcattaagtatgtacgccatgctgcagtacgtcgtatcaaccaccttgcatgagctcttaatttggttgtcatccaagagagagaaataattgtggacccagcaatgcatatggtgtgtgagtactgaagaattatatacttattatgcgttttccacgtaacgcaaaaatataaatacaataaatatacttggtgaaattgtaaagcagtactctatgtgggttgaaaataataactatctgtttaaata

SEQ ID NO: 2587 - DNA, 401 bp, Oryza sativa
tcttaagcaccgagctgcacttaggctgcacatgcccattatggattataccttgagagtcatttctgcataccctctattatacagactgtctagagaacatatagaatttgcatactactccaatcttgccaaaataaaccattttatacttactcctctcgaaacatgttcagctaatatgcgcatgctcttttatcccttctagatctaaaagtatgagttgttcttctacagctaatctcaaccctatgaattatcaggattcttacatattctatccttgcagatggatagtgagtaacactcataacagctgttgtatcatgtttcatatctaaccctgcatgtatctatacactcaccgttataagtcatctcttctgtagctatactagccg

SEQ ID NO: 2588 - DNA, 267 bp, Oryza sativa
  unsure (1)..(267): unsure at all n locations
actatgatacttgctcatacgcgtttgctaatgttacctgtctcaccacaccaaggacatacgggtngatgccggattacgacttactcccttgacaattgctctggtatagaaggacaatacattctgactcgagtaatgcatcaatatgattacggcatgtgtgactggccctaatagatagagatgcctaatatctggttacacccaatttgtgccctctgaataaaatatgacaattgcccaagtttggatatctgccgactc

SEQ ID NO: 2589 - DNA, 383 bp, Oryza sativa
agcacctgaagctgcaagcttacaggaaagccgaaccgatcttaagctattatgtactaccgagccctacaatacatgatctttccatcaaatttactgcatgtgtaatggagggcacagctactccatcagattacagatccacatatcattacctcacagattttgacgtgcttgctttctgcattgacactgtattaatagaacagattatcttttttgcattctactaacaagatggctctagacacaaacttgcatatgatcataaatcttatggtgccaagcaagacaacaatctgaataaccttaatctttgagatctaactaatgaaacattccaacaggatgctattgatgtcaacgaccttgcactcctcata

SEQ ID NO: 2590 - DNA, 409 bp, Oryza sativa
tcctttaattgatccaactgcaccaagaacacaactgctgtcgatttgattatctcccatcgggcgattctaagactctgaagccgatactgactctaagccgatgatgaatatgggcttaccaaatactggcggttactgatagagtatacttaaacaaatatgcatgcaagcgttgctactacttatttctggatatattgacagtcgaaattgggctataacgaccagaaacagtcaactatcgatgttctagatcggcaataagaaaaggattaattggatccatgccattgtaaatatgctgattcagagaaattgaggggctcgggtatatataactactccacccctcctttgagtggctgatgctcttggggagtttaagacacattcttagcctaatagc

SEQ ID NO: 2591 - DNA, 272 bp, Oryza sativa
  unsure (1)..(272): unsure at all n locations
tgaagtttaatatgattatgcaagaaagactggcatatgatgatataaacacgtacacattattttaaggatagaaacgctagcggaatgcatcacaagaaaactgagcacagcctantcatctactaccacaacacatagatggctgaattaacaccacgagactcactgctgtgatgcacaaacgccaactctcaagcaatagaatcattgtattagttcagcgtggatgcatgatcgagaggtcacatactagatctcaccgaaagtac

SEQ ID NO: 2592 - DNA, 457 bp, Oryza sativa
  unsure (1)..(457): unsure at all n locations
taatcttatagaccatattatgtttntagctntataccattattctacatcttggtgaatgtgtcgatcttcaatctgttgctgcatcctgcaatggttatgttggagctgatttacaagctttatgtcgagaagctgcaagacgtgcttatggtagattatcaagctcatcagagagtgagaatgtgctaacgctaatcatggaggattgggagtctgctaaatctgtggccaaaaatagtgtgacaagaggggtaactaaagaaattccagctgtttcatgggatgatatangaggtttgaaagctgttaaggtaaaatatgcctcattntaagatttctttaatcaaacctcctttaataggtattggtgctatgcttcagaaaaaacttcagcaagctgttgaatggcccatcaagcatgctgcttcatttgatagacttggaatatcaccta

SEQ ID NO: 2593 - DNA, 283 bp, Oryza sativa
taccacgggcgtaccacccgttcaagcgaaacgcggacaatgggacaccccagctgccgctttggtatggatcatgatcgccgtgaccgacttccgttcacggggtcgaagcatcttgagacacccgtatcacaatcaaaggcaaccattaattactttttatctaacctgaacgcgtgaggacacgccccaacgatgataacttcgtttgtgcacaggatgcatgcttgtactatgccatcgtacgataaaccccgctggggatcaccctacgaccggatat

SEQ ID NO: 2594 - DNA, 400 bp, Oryza sativa
agcttaatacgagcgaagcttgcacgcagtttactcctttccgcttacagcgagacggatgacggggccttactccatccctgaataactgataaccatagctgtactatttgaatattgacatacaattactctgaagtgcgaataggaatagaataaaagtgtcatgatggatgcttagaatataatacaacctcagtaccatattagtcctttgagtccgtgaaaacctttagtcaaacgacgagagactaagatcatgagggaacagtgttcactatcacccatttaaacacacagggagtgtaagtgcttttgtctacatgattgacaaggctgaggaagctatctctgaattgaattgtcaaccagtagtaacatatctcaacatatgaagggg

SEQ ID NO: 2595 - DNA, 453 bp, Oryza sativa
gctattacgtgacactatgaaactcagctttggtgctgcctggtacggggagcataagcgatctctattgttgcaatgacatttggtggacacgctgagtgttccggatcgcgctgtacatccgcctttcatgctggatgtagaccctatgcgacctggcttcatgacaccagagagatgatatgtcctacctcctggttctgtacacgttttgcttgcatggcgcatgctcgttctgagaggccttagcgctctttctgcttcttcataacgaccctctattactgtgctcaccttctgatgtaccgcgcccttaccgactggtatgcgtgcgcgtgctttgctgactaacaaaccgcgtatgttacgagcgatgtgtgtccgcatatcgcactatgactacatatgttcctctgtttattgatgcacctctgccgctctctttatgcgcta

SEQ ID NO: 2596 - DNA, 385 bp, Oryza sativa
agcttctcccactcagcccattggtcgaatgttcagtggcgcacaacctctctccgagcgctagcggtgacgacggagagcagaacccgcgtcgtcgagctcgtactccaccgtccccctctcgccgatgtcttgggcgggaggaggtgctcgagggggtcgaaagatccgcgacttcgccgcccacgggcgatggagaatgacagcgagacggtgagcgtcgtctcctcgtctatggcgatggcagcacgccccagggcgcgctccaggctgcgggcgcgctcctgcgtcacccgcctgtcatccccgatccagagactccagcccgacgttggctggatgacgtggccgacttggtcatgacggcgcagcagcgcctatgcgc

SEQ ID NO: 2597 - DNA, 430 bp, Oryza sativa
  unsure (1)..(430): unsure at all n locations
tgtttgagtcactcatgtaagagaaacattccattgtttttcagatnttaagaaattgtagttataaattcagaatataaactagaaaccagaagctagaaaatctagcttctaccgtatcctcaaaatgtagctaccaaccaggtatttctcggaatcttaagctctccgaacaagccctgtatcataataaaacactgttgtactctctagctgaagctgtgcgtgcagccttgagtccttgacagctgacgttaaacattccaacggcagatggcatcatggcaaacaggcaaagagccaaagatgcaggctgagcatataaaacccttgctggtcaagccgcggcatgactgacaattgcacaaacatgcgtcaaagaagtacaaggccaaggaaagatgattacaagtcactggttaactcgaga

SEQ ID NO: 2598 - DNA, 465 bp, Oryza sativa
agcttattctgatacacgatcttggcagttgtgtgctttcgctcttcacctagaggtatgggacattctttttttttttctaaaagagaattatctgcttctcataaactgttcaatgcaagtgtggtatgcatggttgaacgaccgattagagtgggcctcgcatgtttgttttagaataagttttttaaggttaactttcagaaattttaacgccaaccgaatgcacttctggttcagaacataagtgcttcatttcagaattcattcgaggaccgtttatagcatgatggaaactttgacacaacaatacaacataggaacaatatatacccctaacaattcaaaaccggccaaaaccaccacacaagagatagttgaacagacaccatcttaattaattcccactttgccacaatgaagctgcaatacagccagtatacaaaaatgactgagctcaaaaca

SEQ ID NO: 2599 - DNA, 395 bp, Oryza sativa
tggaggtctcccgacgtggctgattcctactggctgggttatccggtttattaatgccgcgcgggtaaagagtaccccctctgcagaggttaacaaactgtttgaacagccgtgcccacggtcatgggcggatgtgaggtgattcctaccgtagttttgtttgactactgcttgtgaaattgctgttgtagaaaggggttcgatgattgaaaaatctgcagctgatgggatcagctatgcccgggtggccgtttgaaagttgttggcccgggtggccagttgaaaagctgttggccgggtgccaaccttgaatcaattctatagactgatacattacacatactccgaccagacgagacacactgtctcatacgtgtcgtttgagaagcactcac

SEQ ID NO: 2600 - DNA, 364 bp, Oryza sativa
agcttcagccataaattgccagttggttgtgttgctgcaacttgatccacagaaaagaaatttttctagccacattaatagaaaggccacatgttctcaaggggtgaccgagccctggcccatgtatgctgctacatagcctaaccaacctcctatgcttttggtcttgaagtcatattggttctttgtgttcaaactcataaggttggccgatgaggtgacattcagacctgtgatcatactgatatctatgagggttggagtcatcggcccttgattgaacagaaaggcattggtagtgtttgaccagaagtaagaagcagctgccatcaggggttcatctttggctgagttcgctataata

SEQ ID NO: 2601 - DNA, 445 bp, Oryza sativa
  unsure (1)..(445): unsure at all n locations
ttanaacaatatgctngcatatcctgaaaatcacgctatacaacctacattactgcggaagtagattttcgtcccttgaggggacatccccttgtttcgtgcatggtgttcaaaaagttatcaaaaaaatttaaaacaaattgtcaatataaatcaatatatgatatatcttttcgcaaatatacaagttaaaatttgacttatacaattcgaaacaaaaataacaaatttgaccgtgaattacacgttctattcatagtcaaatttgttatttttgtttctacttatataattagttgaatttgaatatgcatgtctgtgaaagtgacacatcacatattgatctatcatactaaatttttttaaaatttttttgatgactntttacatgacatgaanaacaaggngattaagggatgaatagattnttcgcattaactacaat

SEQ ID NO: 2602 - DNA, 427 bp, Oryza sativa
  unsure (1)..(427): unsure at all n locations
agctttacagatgatgataagatgacactttatagttntgctacagtagttcacaaagacctcactgtcacaccatcaagatacagactacgacgagcgacaaggttacctatggacgctattcacggtgatgaaatagctcactatgatatgttatgggattatggacaagagcttaggacatctaattcaagcagcaaattgttcttgaatctacagaatatgtgcttccatacatgcaatgtatcatttgatgcttgcaaaagaggcttcttaagtgtgtgtagacctatcattattcttgatggatgccacatcgtaaccaagcttggaggacatttattgactgcagtaagcatagaccccaatgactgtatctattctatagccatggcaattgttgaagtggagagtngcatctatccta

SEQ ID NO: 2603 - DNA, 423 bp, Oryza sativa
  unsure (1)..(423): unsure at all n locations
ngggcagagatctgctcggctatctatactatatgatgagcaatgcatcggctaagatagcagtcggatcagtactgggaacaagtggaccctggtggctgctacaaacctaactaaacctgatagtcatgaaagttgacaatcggacatccgtatcagatactaacttccgatgactagagccgagtgtatgggatgatggataagagcgcactcatcggagatgcacattatacggagaatacgcttctacaccaactgatgctggagcaaaactatcggctgaactgctcaacgattcggatttgtatcttctatgaaagctctcataaagatgctagagtctggttcctttatgaagactctgcacaacttgaacacccaatggacttcatattccaagacatcaactatgaagtatac

SEQ ID NO: 2604 - DNA, 468 bp, Oryza sativa
  unsure (1)..(468): unsure at all n locations
agcttactattgtacattagttaatacgtatagctcattgagaagtaccctgacagatgtggaagctcataacaatctccagatgtaccagaagctttaacttgtctaacggccaacagtgatgagattcagtaccgggctgctcctgctcacgatgtggaagctcggaacaatctccccgctgttgctccagctcgcgatgcagtaccgggcggcggtcgggtctctcgtctctactcatggcgcctctggtaagggagaccagcggcggtggcggctggtactaccagcggcgggacgacgatcaggtcgatgaaagcctttttgagatggtagatacactatataatctgaatcaatattggtatataaccctatcaactgttntctggcaacgaatgctatccgatgaggccatatggcaatgttggtctagattatatagtatatatgacaactagacgatta

SEQ ID NO: 2605 - DNA, 320 bp, Oryza sativa
  unsure (1)..(320): unsure at all n locations
ntatatggcattggatcgatttgatcgaactccacacgttatgattcgattctggaagagatgagactcggttttagggataaaatcacaactaattcgattccgagagaatactccacgattcgttttgattcttgggggatacgaaagaggagaacgagaggaacaaaacccctaaatcaatcggactccacgagaccggattggatcggatttggatggggaaacggcggctcgggcggcttgcgcgacggcggccggaggttgaagaccgtcctgacatgtgggccccacatgtcagcggctggaggacgaggggg

SEQ ID NO: 2606 - DNA, 359 bp, Oryza sativa
ctgcagctgagctgaatattaaggctctcttgtcatatttgttcttttttagaagagagtgacgtgacacgtctgatgaatccggagttcctgtaatctgctctcatttcttagattctgtttattactctgactccaatatagtatgcttactgagtaacttacatctatcttgtgagaattatctcttggttagttcctacatagcttaccggatcattattcactataatctactaaaatatagtgattgctttggtgagttatacacattaaatgtatatattaattgcttacacatggtgtgtaatggatcgctatccgataattgctgcgtatcccacactctgagatcactt

SEQ ID NO: 2607 - DNA, 94 bp, Oryza sativa
gagatccattccaagaacacggtgactaatgtgaagtcagatatttaatatccgtcaacttacaaaaccgttcactctatgttctacgatggtt

SEQ ID NO: 2608 - DNA, 328 bp, Oryza sativa
agcttgtctgtatagccaggccatgtgaatattcttcgtcttttgatgagagtaagagtaaaattgggccgtcggatccatttgtgttatacccatcacacatgaggagagtatcagattaatacgtcctatgcatcgatcggtgtatatacatattgattcctatggtagtactgaaagcaaaactagtctagatggagagctcgagcaatgctgtatgattgacccgcaactacacaattacattcaccgtgatgccgatattattaagaccttgttagttcatgaatgaaaaactttatgctactatatcgaataaattggacac

SEQ ID NO: 2609 - DNA, 161 bp, Oryza sativa
catactcagcttcctatctctgaactcccgacgcacgtacgtgctgtacgtggatttctttcctcccagttatcacttagatgatatgccgttaccaagatgctgtctatactatgtggtggcccactgatgcgatggtttatatccggaaatagtgacag

SEQ ID NO: 2610 - DNA, 386 bp, Oryza sativa
  unsure (1)..(386): unsure at all n locations
agcttgatgcttgactagacttccgaacattcatttatctgacagtttatccnccacggggcaacaactataagaattggagggacagggaagagaattttgaaaaaccgtttcgcaaagaatagacgaaaggcgaggggagacattcttcaaatatggtttttacaaagctcgtccttagggtgtgaccgtttggctcaacctacagacgacgtggctctgataccactatgtcacgcccagaaatttaacccaaatttccagactattttgcgtataagatccctgtccaggaccagccactgtacacaatacgacaagtaatatacagttctcaacgtaaataaagcgtagaatacttacagaagaggcacttagtcctcaca

SEQ ID NO: 2611 - DNA, 444 bp, Oryza sativa
actcaagcttcgcagaaccctcatcgacggcggcagtgcactcaatagcttcttcgccaagaccttttatgatatgcagattcctcgctccgagctaaaaccaagcaatgcgccttttcacggagtaattccaggattatccgcaactccactcggccagatcaccctcccggtcacttttggcactcgggaaaacttccgcacagagaatatcagctttgaagtcgccgatttcgagacagcataccatgccatactcggacgcccggcgttagccaagtttatggccgtcccgcactacacttacatgatgatgaagatgcctggtccccgaggagtcctatccctacggagcgacatcaagcaagccgtcacatgcgacaaggagagttgcgacatggtccaaacccgcgagatggcgtcagcccgagaggatatccgact

SEQ ID NO: 2612 - DNA, 478 bp, Oryza sativa
  unsure (1)..(478): unsure at all n locations
agctntatatgagctcggattgaagagatttatctcgatactataggaatcgactcgggaagaaatcaaactcggtttttagggataaaacaaaacgaattcgattcggataaaatacccaacgattcgctttgattcttgggggaaaagaaaggagaacgagaggaacaaaacccctcaaaaacccggaggaatcgggctcggatttgggcggaatcggagcgggaagcggcggctagggttcgggctcggcggcggccggccggaggttgaagacagccctgacatgtgggccccacatgtcancggctggaagagaagggcgcgggcggcggcggcttgggccggcatgggccgcgcgcggagagagagaagaaagagagagttgggccgaaatcggcccaacggcctaagaagaggatttntgaacttntaaacaaaacaatttgtgaattggatgttcaattattaacaatac

SEQ ID NO: 2613 - DNA, 475 bp, Oryza sativa
  unsure (1)..(475): unsure at all n locations
ntagccgactntgtcgccgagtggatcgagtgccaagagtattcgtcagttgaaaagatggagtattggactatgcattgtgacgggtcaaagagactntcaggcactgtggccggagttgttttaatttccccaactggataaagactgagctatgtgctgtggatacattttttcgcatctcacanagtggcagaatatgaggcgctccttcacgggctacggatcgcaatctctttgggaatcaggcgtctgacagttcgcggagattcacagttagttgttaaccaagttatgaaagagtggtcctgcctcgacgacaatatgattgcttatcgacaggaggtacaaaagttggaagataagttcgatggactcgaacttactcacgttcttcggcacaataatgaagcagccgacagactagcgaattttggatcaaacgcgaagcggcccttttgatgtgtcgtcgaca

SEQ ID NO: 2614 - DNA, 432 bp, Oryza sativa
gacccgagacctctaagtcacctgcggcatgcaagcttgtcaactcgaattttgatgtatgtatcgtgatcgaagttcatatatttatccgaaccgccatgtgtattgtttttttgggcgtggaactcatcttttctgaccgtggatgatggtttttcctgacgggtccacgtcaaaaataacctgtcagaaacctgacgccagttgattctttctgtgatgcaaccgacaggaattcctccgtaggctttcttctatcaaacataagcttgtaaaaatgatatttctgtcaagaaaccgacagaaaaagttaatctgtccgtaaccttgtttctgtccgcaatttttgacagtgcacccacagaaaagcattctctgatggtcattcatattatactgacgcgctttggcctacagggtatacctgaactc

SEQ ID NO: 2615 - DNA, 417 bp, Oryza sativa
tgctcagacgcgtacttcgctatcgatgttatacacagttaatgggcatctctatcagctgcggctaaatgaaaatatcttgctataccgatgtggtactgtacaaggacagtggcacgaggcagagaatacttgctcattccataattcatagtgagaactagatgatattatgtgaaagttgatcatatataaagagggattaatcgtgcttacaccaatatacatgccacgggagtgtttaagttaaagttagggcatgataatagctctgtactttctataactacggagctcctctctttttaattcctttgttgcgaaactgaagtagctgtgctctgcttcttgtgatatttcgtggatatatttgctgtcggtctgatatctacccttgtgcttatcgcattgctcatg

SEQ ID NO: 2616 - DNA, 475 bp, Oryza sativa
  unsure (1)..(475): unsure at all n locations
catgcaagcttataacaanaaatgattattgtatgttattaactatcaccncaagaggagcatagcatcttagttatatatataatatatgaagtcacgtggctagttgaacatcatactgattgattgtcctgagcgtgttggttgcaccaacgaatcttaagtatgaaacaagcatgatgtggcctcatcattatataatccaatgacagatatgaattaaaagactatatccattttttttttgtaaaacttgctacagtacatcgtgaatttgtgacacataacatagaacaatctagacacatataattattacatgatgctctagtttagtggtaatttgcacagcaaatactatcacatgtattgtaattgtttttacttaattggagcgaagaaatttataattgatgcctttaccccatgccaggttgtaagacccacaccacttatattttcattcttgtctaca

SEQ ID NO: 2617 - DNA, 419 bp, Oryza sativa
  unsure (1)..(419): unsure at all n locations
cccgcgacctcagagtcacctgcggcatgcaagcttatctagcactagccttatctcattttttttgngnaccngcagacacacatatatgtctgcactgttgaggtgcgagttgcgacttgatcagagtggcatcatcttggctcgcttgaatcacctttcttgtttggtagcactaatatatgtgatgcttgcagttccaatctgtggtgggatgaggtcatgtccatcacatacagatntaggcttctctgcttcctctgagctgtcgttttatcgtaagcatactctccttcacgtggcgattgcatatgttattgctcgcacattgcttgctctatgatattacatctgaactatgcataggttgctgctgctaattcattgcatgagatcatgcgttcttcgcagttgattat

SEQ ID NO: 2618 - DNA, 359 bp, Oryza sativa
tgctcatgcatctggaagatgagaaagatcatatgtgtttgtgggactacagccctggctggcttgacccaccgtggctaaagatcaccgggatctttactccgcgtcgaggcatgcatacgctgctgctgacgcactccatggggtttaacatattcttcgacaaatgttctgactgacgtgctctacttgtgtatgtccttatgacattgcttgacaacatacttgactgacttcatagtagttgtgttgagtttcatgatgagagtgctattgatggaccattaaataattgcagccaccttttgataccatacttgggaatacatttattatccacttcacttacggatgtgact

SEQ ID NO: 2619 - DNA, 457 bp, Oryza sativa
  unsure (1)..(457): unsure at all n locations
agcttgttgcacagcacaattgttttctactattatattatgancnccacacaganggatcttatatgaatcgtatgatgaagtaccacatgagtggatatatacgaaaagaatacacatctgccgaatcgctcatgttatgatcttctacatgctaagtctcctgagtatcgtcatctggcttatgttcctcatgtaacattcagatcgaatgactctatgaaattacgtcgatactcctacatattatggagaacgtaagagacatccctatttttccccggaggtcttaattaccactgcttatctttcaattcgcctctgaccatcaaaataaatgtgaataactccgtctttctctcttataaacaacgtgcgcttcccgttctgagcgtgcttcaacaatttgtctttccataatacctatctcttgagccataatttttatgaagactac

SEQ ID NO: 2620 - DNA, 479 bp, Oryza sativa
  unsure (1)..(479): unsure at all n locations
aactaagcttcctaaaagctagactaagcaataaagtatcgcgnattttaccttttgcttccggcagactcgcaataccttctacagcttgtcctgcagcagtaccttgaccaactccaggcccaatagaagcaagacctacggccaatccagcagcaataacggaagcagcagcaattagtggattcatgatgagttcctcgtgtcacaaaaaagatatggttaacgatacaatcaaccaagaaattcatatttttaagctctattggacagaagtaactaaaaagtacaaattgaaacgataatctgaattctccgaactgcttcgagatctcctttttagtttctaatcattagaggtgtgtgtactcattattctaattctctttctgtccaaccaactgatctttcatatcatccttctttctttcctcttcgaatacttgagttatatatttccgctatcatctaatcataat

SEQ ID NO: 2621 - DNA, 389 bp, Oryza sativa
agcttgtacacaggagagagcgccttgtactgcctccagaagcgcctgcagagagctgattcaacggcaagcttcgcaaacatggaaacattctttcattggtcaggagacttagcatattttataccataaatcatgtaaacctgactgagcagttcatcagatttatatatagaatcactgcaaatgttcatcagacttatatatagaatcactgcaaatttgcacattcaatcattctgtttgagcattagctacttcacaataatctgaatagagaggagggaaatctgcatactaatcttgtattgtcacgaaactgacctccttccctcgcgtgcatactttcttgagcacgcgagaatgcaccgcggacgcgctcatgtttc

SEQ ID NO: 2622 - DNA, 341 bp, Oryza sativa
  unsure (1)..(341): unsure at all n locations
ngccgcagacggctgacatgtgtgccggngagtcgactgtgattgtcttngggattagggaacacaggagacattgccatgtatgaagcatacagtgtgttgaagagcggacggaccaaatgttgccctgatactcagcaccagctcatacgcccagtacagggctgctgccgggaggcaagcgtaatgccccagggcatagagatttccatgcgaagcacgtgccagagccaccaacatctgcatgacttgcatagccagtaaagcacctcctactgacttggagccactgcgcagaatcagactctccattgctaccatgctatggtgacccacgcgga

SEQ ID NO: 2623 - DNA, 343 bp, Oryza sativa
agcttgaactgtaatgcgaggatatctgttatagcgtattaccatatactacttatacaccgtttgcggacgactccaattctttttcttcaaacgttgctctaatattgacattgcatatatcacgtcattggtgccaacagccttacagttctaaagctctaatagtgagtcaccgtcactactatactgacagatactcatccctctagagatcctaattagcactgactgcctccgcttttgtaggttgatctggcccttctcaaatctatagacgaacgcgctgtaaccgtgtagatgtattctcacatctccactgttgacgtagctaactatactc

SEQ ID NO: 2624 - DNA, 426 bp, Oryza sativa
  unsure (1)..(426): unsure at all n locations
taggtgcatcangaacaggactctccccacctatcggacttattactgaaaggacattactcgtccatctggaggacgagggatacatgatccatgaatcatcaaacaatgccacaacgccggatggcgttttcatccagcatcactcttctgcacaacaaatggctgtatctacatgataaagtgctgcggtgccgaaatcgggtgtggctgaacaacacatgtcgaaagtagctactgaatcatgaatctgagactacaacctgtccattatgcctgtacaaattcacaaactctcgctattaaaaaggaaatggttatgacagccatgcagtggccaactgatgaattattcaacaatgcacacactgatatgattcatgcctncttctatacctgacaactcaatcttcctactaaatcaca

SEQ ID NO: 2625 - DNA, 372 bp, Oryza sativa
  unsure (1)..(372): unsure at all n locations
agcttgttcatgctggaggaggaacgagattatatcaagggggggacttttagtgttaccaacctgngctaaggatcaccggatctttagcccgcgttggtctcaccaaccgggactaaagatctacaagcggtgctaatgatgatattacccaccgggtctttggatcacgtatgctcggtgtgaccaccaacgaggcccggttattactctatctgatactattgtggatttccgcccaccgagccaagatgcgttctccaccagtgtgtccaagttgaactcattaacagagaggtcgtgacaaggacctactaatacatagatgcgcctgcatgtccatccttcggataacaacagcatcaacttcct

SEQ ID NO: 2626 - DNA, 414 bp, Oryza sativa
  unsure (1)..(414): unsure at all n locations
tgtaaagaagctctttggcttataggtgtgctcactgagtgttgtggagttacgtctcgcatgaatatantttgtgatagctcaagtgcaatataccttacagaggatcagatgttccatgagagaacaaagcacattgatgtgagatatcactttattcgaggtgtgattgccgaaggtgatgtcaaggtatgcaagataagtactcatgataacccagctgatatgatgataaaggcagttcctgctactaagtttgagctctgctcaagcttggttggtgttaaagtatagacctatagactatttggcgcgcggtgattttacctacatgaggtatttnttggtgatggatgttttgtatgctacaagaggaaattcgtctgacggtggagattgtaaatatgtgatccg

SEQ ID NO: 2627 - DNA, 451 bp, Oryza sativa
agctttactgtttgacaccttttaagatgcattgttccaactcctaataagtcgagtaactgcggtataaaaggattttaaggtattgggcacttgatcacgcgcactttggcctaagcgaaaagtgcctaagtccctaaaagaacgtgacaggccacacctgaaaatatgggctgcagacatattatgcctaggccaaaaaatatgccttcgacaccctttaaaggatgacgcatgtaacatgctcccgagtaataaatcttccgggtaatatataccaagtgcagctcatatgaatagcttctgatctgaatgattatcccttataggatactccaaaataaatataataattgaatcccgactggcacaagtattcggttgatagcccttacggggaataataattggtccagtctttgagcatagaaaatagactcatgactatgaa

SEQ ID NO: 2628 - DNA, 394 bp, Oryza sativa
  unsure (1)..(394): unsure at all n locations
actcagcttatgggttacctcaatcgctagtgttggatcgggactatatctntacatgtaccctctagactgagttgttcagcctaagagatactcaatagaggatgagctcagcgtatcatgcgcaaatggatgggcaaactgagcgggtcaatcaatgcttataaaccattttgcgctactttgtgcatgcttacccgaagaggtggtatcgatggttggagttggcggaattatggtataacacaacccatcattctgggcctgttcagctgcaagggcgctacagcctgtaggaacagtgaagcatgtacataaagaagcagtggctggacccggtggctgcaaacagctgctatacctgccatccgagcaagccctctgtgttggtacg

SEQ ID NO: 2629 - DNA, 435 bp, Oryza sativa
  unsure (1)..(435): unsure at all n locations
agctngatcttacaaatatattacagggcagacttatggtccttctttattactgcactggaactagcccatggtcatgctcctttctcgaagttccctcccatgaaggtataatcaaacgcatgacattgagataaattcgagacaatcccttatgatgggtttggtggacttttctgaagttatatagttcatacactntgtcaggtcttacttatgacacttcagaatgcccctccgggccttgactatgagagagataagaacatttcaagggtaaatatgtttaatatttgaacagacctaccattgtnagttttatgatgagcatgacttcttatttgtcaacaacgattatctcctatatcagcatttcaagcaaatggttgctatgtgtctggtaaaagacccttcaaaaaggcctacagcgaaaaa

SEQ ID NO: 2630 - DNA, 317 bp, Oryza sativa
  unsure (1)..(317): unsure at all n locations
ngngaatgtngatgtggtggagagcatgaggaggatagctctccaagatattaacacaaagttcatgatcttttaatagaacgctaccgtaccacaataccacatactatcacaatattgtgatgcatatggatactctgttctcttttctctatcgatgatcaaagcttgaaaaaactaactttatcctcaatttacgaccagtgtnggtctagtgtaacccaaagctgaatcatatgcgatactatttgttgctcactgaatcatacatagactcctatctcatggaaagctccgcatgaccgtagaccatggcc

SEQ ID NO: 2631 - DNA, 447 bp, Oryza sativa
  unsure (1)..(447): unsure at all n locations
agctcgctttcgtttgaaaacatgatgccatttttagtgggaggtgtcacttttacgttntcaatggtgtcacataagtaacaagacatttaattgatgattaaaatagctcatactcccttctttcacacaagttagacatataactttggtgaccaagatcatgtagacattaacttatcttacatgtaacaaagatatacacgcatgcaaccaatgagtattaagattactcctcgggttttaatcatcaaacatttaatttacctctccatttaagttttggattcatacatagaataacttttttgganaaactaaataaaatatgaaatatatctaactctcgtggacggagagagtactataatacggttctatttttgttgttntataggtagtacatgcaagatacaaaccgtgtagacattattttatttcatactt

SEQ ID NO: 2632 - DNA, 333 bp, Oryza sativa
acatatcacttgggtcataactgggaatagcttccacgaacaagccactcagattcactttcttcatggtcagattacttttccgctattcttctcatgttggcatcatttagcattcaacggattcctgtgcacattcaaccttgatgtgttcttccccattggactacaatcaagggtcttccttgagcggtgcagagtatgtttcttgttatcaatcacctttcggcctacttctctcatgctggagaacatctttgccaatctcttttatcgatcatcttttggcttatctcgaacaggtggtattctttaatgtggattgcggacgct

SEQ ID NO: 2633 - DNA, 373 bp, Oryza sativa
  unsure (1)..(373): unsure at all n locations
tcagcttatacatctctcaagtntagtatagtctctagagtatagtgttatagatttataatagaatcttcagtcctcggagtctttggaagaattcgggtatggctctagtagcttctccttctcttgtaagacttgtacttttattagattatttctctgtatactactttggtattggattatttttcgagtatatgaataccagctttactatatgttcgagatatatttattatgatgctagcttacctgtgagatgcaatggtgtgggtataatgatcgtatttacgatgactctatgtcatgacgatgatattagagtactatttggtaggttatagcgtggcgtttagattactggatatcatta

SEQ ID NO: 2634 - DNA, 172 bp, Oryza sativa
ctaaatgccgactcaaaaacaacagatgacacttgaatacataagaaatcaccagcacgtttgcacaggataggacattctgcttgtttgagcttccaccaagacaaaatatcaaatggatccttggaaggtcatattaacaggggttgttccatgtaaacttggaactcgg

SEQ ID NO: 2635 - DNA, 217 bp, Oryza sativa
  unsure (1)..(217): unsure at all n locations
ctcagcttatgaaggaaggaaccttggaaaaaaaagctcatcttcctgtttaaatngngacatattttgctatcgccgcctactgtatgaatctaatggagtggcgttctgtcgaccgtctgcgagcgaatggccacggctgtgatggacagcgagttctgcagcctcttcatagtgtctgcggcagtgtgggccgaaattgtctactcccgcctcg

SEQ ID NO: 2636 - DNA, 394 bp, Oryza sativa
atataggggtgagactttagtcctagttggtaacaccaaccggggctaaagatccccgggatctttagtcccggctggtaacaccaaccgggactaaagttaactttgcctgacaggccctgacagcatttgaaccgggactaaagatcaaatatgcccgttaccctttttaaccgggactaaagatcatctttagccccggtttttattgcatccgggactattgtggaattcggccgaccgacaaaagatggtttctccaccagtgataggacggatgatggatgctagctgctcgtgcaaggaggtaggcttcattgggccctaccctaccctctgatttttaaaaaaagaaaatcttgaaaaaatatctaagatgggcatgcattggaga

SEQ ID NO: 2637 - DNA, 287 bp, Oryza sativa
  unsure (1)..(287): unsure at all n locations
tggncattgtgccaaagactgtcgacagccactacacgtgtcttcccacatcgcacgggtggaggaggaagagccggctctgctcctagctcacgcatgcattgagctacctccagcggcacctgccgcatcggctatcctccaccttgatgagccgaaagtactcgtctccctctgcgacggactcagcaacgacaaggctgatgggtggtacctctacaccggggccacccatcacatgaccggccgacgggaggtcttaccgagtctactccagcgtccgagca

SEQ ID NO: 2638 - DNA, 273 bp, Oryza sativa
agcttgaagcgttgtgctcagatttctgctcttacagccattgtaatgaaagctttgacgtaattcatgtctgattacagccgactgatagaacataagcatgtcttctcggaggagcaagccaccggatttatcatattttgatagctaaaattcctggctaaaacgaacatggggtttaaaaaagagcaaggaatttcacccccattaggattgagtgacattggaaggaatcactcaatcccttcctggatatatttcacttggagaata

SEQ ID NO: 2639 - DNA, 479 bp, Oryza sativa
  unsure (1)..(479): unsure at all n locations
actcagctacttatgatgctatgatattcttttctgagcaatcctcatttggtattctgtgtcacctgattggttgcagcaaagtcacttaccacttcactgatgaacctgctgacatgcatatgctaagttcacaactgaagtagttgaatatctgtggagatagcttntatcctttgttcatttctgcctaatacaaattagaccatgttgtaattatttccctgattatttgtgttagtgctcttctagtgacaatacaaaagcattctataacttatgaagtttcaacaggtattactctatgtatggcatgtcgccaactaactgagggatcaaaaaggtgcttcatttgccaatgcgggaagttaaatatggaggtcagttaactctcaaggcaaattcattttgactgacaagctcactgacacatatcgcatgtatcatactgtatggcgtaggatcaaatattcattttt

SEQ ID NO: 2640 - DNA, 417 bp, Oryza sativa
  unsure (1)..(417): unsure at all n locations
agctntgaagcgttggtgctcagattagctgctcattacagccattgtaaatgaaagctttgacgtaattcaggtctgattacagccgactgatagaacaaaagcaggtctgctcggaggagcagccacgggatttatcatattttgatagctaaaatccctggctaaaacgaacatggggtttaagagagagcaaggaatttcaacccccatagggattgagtgacatgggagggattcactcaatccctccctggatatattccacttggagattaaatcccaaggaaccgaacaaggcctcaagcgggacaagctgcttgagtagcacaagttcactcaaatagaactttaccacttgaatagtgttttcccaatcgctagagtcttttccgagttggatacttagaattctca

SEQ ID NO: 2641 - DNA, 295 bp, Oryza sativa
  unsure (1)..(295): unsure at all n locations
agcttatccttgcgcacatgcgatgtgaagacttttctctggaaatattagagacaaaataacatttctcagcacagactttgtgcttatgtaatgttgaactagcaagggaaattgtgtctgtatactatgctatccactcaagtttgctaatcttctatctacattttattcctcatctgctaaaagttcggcccatcaaacagccggcaaaaatttctcgtcttcagcagcaactggtgcggattcttcactcaatttgtggaaaacgagcttttgctganggagctgacca

SEQ ID NO: 2642 - DNA, 314 bp, Oryza sativa
  unsure (1)..(314): unsure at all n locations
atgctggcaatggcaggtcttctntcttcctctctcatatcgtgctccaccaccttccatggcgaccacgtgtacaccacgtcctcctcctccgggtgcatcgccaagaacctcacctcgcctcctccatgcgcgaggtgttccaccttgacggcatgcttcggccgccattggtcgtcgtcgtcgagctcccaaaccttgataagctcgccgtcgcggaagatgtaatgcaaccggccgccggagtgcgcgacgtgggcgtcgccgccgtccaccggctcggggaggtcgatcaccgccgccgtggatgagaa

SEQ ID NO: 2643 - DNA, 355 bp, Oryza sativa
  unsure (1)..(355): unsure at all n locations
ctaggcaagtngtatcatgtggcacaagtatttcttttaaatatttagccacaagngnggcaatgttagctctaggtatctgagtatgacatgtgggacctaacggtaggaaagtgtggcatgacacaactgtggcattgaaataacacacactatgaaaagactcataaaatttctgaaagaggtgagtctcatagtcctgcttcacaattggaagatgtgttctcggtgaaaacatcaaagcctttaaaagctgggaagcttatatgctcatgtgcttaattaaaggaaaggaaaacaatgctcaacagttctacaatgtgcatgctgtttcagaagtcacaacatataactt

SEQ ID NO: 2644 - DNA, 427 bp, Oryza sativa
  unsure (1)..(427): unsure at all n locations
agcttgattatgtccttgccctcactgtngagttcttcctcgcaaggcgtcttcagactcttgtcttcaaggctggcatggccaagtccatccaccatgctcgtgtcctgatcaggcaacgccacatcaggtatgatgatttaactactacagatctcctgtcttgtaaatgggtaaatatgaagctctaggtattacaatttccatggctcagaatgttctctctttagtttgtattcccaagtatgcttctatatgattcttctacagcagcatggaagctgtatcattctctcatagtaatcgntcactgtatattcatcatttctcttgatccagcattgtgtaagcagagctaaaatgtcattntatgcacaacacatgccctatgagctgaaagctgaagtcataatatattagtattggt

SEQ ID NO: 2645 - DNA, 430 bp, Oryza sativa
  unsure (1)..(430): unsure at all n locations
gcttanaacactgcaatctcgatcgaaagtcgttctttcgattgtagcaaaaagcaacttaaattagctnttgtaaacaaaaggctntatatacaatccagtccgtgcaaagcaacttaaattatcttgaaataagccaaacggtatatttataaacgaaaagtaatttgtaaatataacttttatatacgcgcttttagcgatctaaaagcaaaaactaataaataaacttcagcgtataaagccacaaatcagtttcaatttaaaggttgaaaatttaaatttagctgataaatataaacgaanagatggagcccatctctactcgtcagtggtatcacttgattaattagggggttaaccatttggtttctcgttgaagctggtgcggtacaaaatcaagacgtgctacaggatatgaccggggcgt

SEQ ID NO: 2646 - DNA, 347 bp, Oryza sativa
gggccatggatcaagccattttcacgaatcacgacgccaactaactggctgtggtgcttgtataccaacatggaatgttttgaagtgcttcaatttgcatatgagacattcaacatcattctcttacatcataccatggtccatggcaaacctccattgataaaaaaggatcttctaacacctttgagcctctgaggcgcctgtacaatctgcctcgagtgatcttgaagccttctagaaaccgttgaggatttcggcatggcttcaaagatggaagttttcgcttcgatagcaagtgttacctttgccttaactcaaaggtgcgagaaggctcttgtttcataaat

SEQ ID NO: 2647 - DNA, 430 bp, Oryza sativa
  unsure (1)..(430): unsure at all n locations
agcattctagaagaacatgcncttttttcctctgttagacacaacagagtcattgtaaatntgaaactactgcatagaaaagtgaacatgtgatctaaataagcatatctgttttttttggactgaactgaagttaagatctgaagccttttgaggttcacaattcacatactgaatatgacaagaattaaagaatcatgaacaacagaaactagcatgattcaaacgagtgtgttcggtatacagaattcacataaacagcaacaactagcggttcacaattcgaatactaaatatgacagggacgaaagaatcatgaaaaatagcaactagcaattagcaggattcaggtggtgtttggttggagggactaaagtggggctaaacttaatccctagttcccaaacaccccctcaacaatatgaatatc

SEQ ID NO: 2648 - DNA, 378 bp, Oryza sativa
  unsure (1)..(378): unsure at all n locations
actaagctactagttgatgctaatcggggcactttactntaagttatctgaactgcattaaagactaactagctatatgtntntgttcgttgttttagcaatattttgttcagtcgtgcccncccggaggttttcagcttattgatcttttacaagaacatatgccacacgagctgtggaaattaaagctggactatcttgttttctttcaacagcttgaagaaatctgcagttgtggatgtgggaatggcgctgaatcgtgcaagaatgagatgggtacggtcgttctgctggcttcatgtatctcgctgctgaacttactctctgcttcttgagatggtgattgcgcttgggcacngcaattatatatgagtaccg

SEQ ID NO: 2649 - DNA, 440 bp, Oryza sativa
agcttacaataacgtatctaaaaatttcagcctttttgccaacatgttttagttagacaagttgaaatcctgacagggataggagaaaaaaaaaaggagaaaggggcaggtacattcccaactttccattggccattacacaacactttcacaatcaaggcaggttctagctctagctcaatctcttctagagctggagtctaaccaaacgatttcagctccataaaaaagaaagcggaacaagctaaagtgatatgagaaaaagaactagacaggtggagcggagtttgggctgctccgtggctctattgctaaagttagatttagtagttggtgccctaccaaacagatcattgataactctacaaataaggagacattttgttcactttgttaaggaaagattcatttattacggcaaaatttcactttgcaccaaa

SEQ ID NO: 2650 - DNA, 442 bp, Oryza sativa
  unsure (1)..(442): unsure at all n locations
agcttcgtggggatgggggtgtggcgtggctctttgctgatcgttatcggctccgagtccggccacgtcttcgtctacgacctccgctggtccaagcccatctgggtccacccattctcccacgccgacgccttcgtcagcgcggtcgcatggcgccagctcgccggcgacgacagcgacggccagctcgtcgccggcggctccgacggcgtgctcaagctctntaccacccaccgccgtctcacccccgacgtcgtcggcgtccggggcgacgacgacgacgacgtggctgcatgacagtgagcaacgcattgcaaacacatcatcatcatcctncattaaataatcatcgccaccgtgctcgaccgtgacgccggcattcttaaataatctcttctttgtggttgtggttctggtaatcaccacatttttcttccatttc

SEQ ID NO: 2651 - DNA, 272 bp, Oryza sativa
  unsure (1)..(272): unsure at all n locations
tgaactaatggcatgcagcatagctacagagtttatatcacttatagncgccatggcgggttactacctatcctgctaaaagaacttcagggtagctgcaccgttagggcaactacgtgcactgctatctacaactagatggaataatgttgacagacacgtcaacttgttgtctaaccgacatgatgacaataaacaatggctaccattgagatgtcactgtctgtagcggtttatctcatctggagtgacaaagttttctacaggacaaa

SEQ ID NO: 2652 - DNA, 448 bp, Oryza sativa
  unsure (1)..(448): unsure at all n locations
agctttcaaactagtactccctccgtttcatgttataagacgttttatctntggtcaaaatcaaactgttttaagtttgactaagtttatagaaaaaataataacattttcaacccaagacaaatttattatgaaaatgtattcaattattgatttaatgaaactaatttggtatttataaatatattcaattatttgtctataaatattatanaactaattgactatatttcacatccgcagataaaaaattaagtattcggataactacacaacttatctgttataataaagggtacagaaaatacctatttccgtagtagaggtcgtggaacatgtctcgtattcagtttctttaccttcttcaacacagtactgaacatactcagaaatgtgaaaatagcatcagaaatttgatcatgttctgtacttcattcaaagcagttaa

SEQ ID NO: 2653 - DNA, 394 bp, Oryza sativa
  unsure (1)..(394): unsure at all n locations
taacatgcanagatgccacatcatcatccactaacaagatgttccatcattatccactaacaatcatcacatttaaacattatggaaacatgctatatctttatatgttttataatttaaaagcttttcaaatataaacatgttaaattatcatccaacataattcacataatgtttcaatgaatatctttattatgttgtatgatattctatatccttatatagttcatcctcgcttagttagtgtttaaatgattaatatatggtccaaattatctctctcccttttttctctaattaaatcatatcacatcaattggttttagcatttagatgattaatctacagtccaaactatcatcctacttttcttctttcataaagtcataccacc

SEQ ID NO: 2654 - DNA, 455 bp, Oryza sativa
  unsure (1)..(455): unsure at all n locations
agcttgaagaatattggcttatctgacaatcgtttgaagattgttgtaggttcatactggattcctccctttcgactgaaagtagctaatttagcatcttgccacataggtcctttgtttccttcatggtttaagtggccgatgggcatttcacacattaatatttcacgcggtaatataattgataggcttccagactggttcagtaattcattgtcaaatgtctaagtgttggacatttcgggtaatcaaatcattggagcattgccaacaaacatggagaccatgtctttgagtaaactcctcctgagttcaaacaatataacaggtcaaatacctttattgccaagagaactatattacttggatatctcaagaaacattttatcangacctcttccattgaatcttggagctccaagaattgaatgcctcattctacgttccaataattt

SEQ ID NO: 2655 - DNA, 392 bp, Oryza sativa
  unsure (1)..(392): unsure at all n locations
atatcctagaattgagagcatacctatctattttgcagatgagaaaagttgttgtggcctaagtcgatataggccaaatttgtgagcatacctatctcaggaggcanatgaaccaggccattgtagcttaagtccatccatgtcagatttctaagcatgcctatctcagaaggcagttgtcctgtgagatcagtttgtgagaggtcaaggtatactaaactggaaaacactcccattgatattggcaggatgcctgtgatattgttgtattttaaaatcaattgctgcagtttgctggccgggcatttcgccaaattatcaattaactcagttatgtttccagatgagagactctgtgtgagggccangatttctaaactgatagatttctc

SEQ ID NO: 2656 - DNA, 319 bp, Oryza sativa
agcttgaaatcgtcaactgtttgttccactgtttcgttgtgcttttccagtatttcctcttcatcatcagataatagagaagtgtggttcttcccatgggcactggagttctgttcgtcaagaccaatcatcacagggttcttcaaactaatcttggctaaccgattcaccttttcattgagagttgcaaataacagaagggtttgccttttcataggttccattttgtttttattttggttagaagtatcattccttgaacccaagtgctctagtatatcctctagtgctttcccaaaaccaagttcaagaatgctgc

SEQ ID NO: 2657 - DNA, 425 bp, Oryza sativa
  unsure (1)..(425): unsure at all n locations
tccatgagataaatccatatgcttggtagatatatgtctctgtttacccagataaattccttatttgcccctgaaagattacccattcccttatttgccccttggtctttcaatgacatgtgggtccagggacagatattattgagacatcatgggcacataagagattgcatggaaattccagtggcaaataaggattaaggaattgtcaagttccataagtatatacttacattagtatactaagaaacaaaaatttctagcatctgcagatatacatntaacttgcagacaggagcaccaagtattacctagcaataatatctgcagtaactagggtaccgtattatctgaatattgacttgttgaggaataancacgagaganaactagcgaagtaccaaacagaacatagcataccaata

SEQ ID NO: 2658 - DNA, 419 bp, Oryza sativa
  unsure (1)..(419): unsure at all n locations
agcttgaccatggggacatctctctgcaagattattgccacaaatacgagatttgcagtatttatgataaatataagcatctacaaccattcttctaaatatgttagaaatgaaaaccggaagatggttgtggtcctcgcaaagcgacgtgacactaattccttatgtgagcatgaatcctgngggattttgaaaaagaaactttcatgctcatatgtggaatgttttctctcgtcctcgagagtcaatgtcttaagcttgtccgtggcctgaagattttcgttctcaagagatacatcgtgcaagaatcgggttgtttcatgatgataaacaagaaacagtgtttgagggccagagggacaaggcttatgcttgatcgagggtgatgagggttgtttagtttcatgaagatgggaaat

SEQ ID NO: 2659 - DNA, 462 bp, Oryza sativa
  unsure (1)..(462): unsure at all n locations
ggaccttcaaactcagctattggatgttaggtatttccaggccttctcttgtgtgcataaaaatgccttttcaaagtcaaatactnttacaggaaaggtcaagattaccagctcctggagatgcgaatgagctctctgtcattgaaggacagctcacatggctagtccacataattgcagccattctcaagattaggcagaccattggttgtaggtgagaaattaacattccttgcttccttccttatatactgtttgatttccttttcttttcacttacaatgttcattntgttatgcagccaagaatcacaggagttaattgacgcagaacttgcagcccgtgtttacagttgataacgttactgcacatggggcacgccaagtagatgaaatgattggtctctacatgaagctgaggctgactatgtcttgagcacaacaatttctttctagatgctgc

SEQ ID NO: 2660 - DNA, 437 bp, Oryza sativa
  unsure (1)..(437): unsure at all n locations
agctntanaaaagaanatgtatagagcgatatctgttggttcttccccttggcactctagtgcattgttattgatgtcgttacaaagtttctgccgctttacgcccattggcctctcagaactcacagaaggtcctccagggacagatgactgaccagagtgtcttattctgtcttcctgcctcttctgtatggcctcataatatgccttcatgtattcttcctacaccgttaaagaaagaactactgaagctccacagtaatgaacacttttgactgtaaatccaactttcagatcatagcacgttntctaaactgacctgtatatttgtacctccctctccacacacagtagaactgttactgaggtgtgcttgcttaagtttcataccttttcttatcagccatgaaggctagatctttaactctgaaacacct

SEQ ID NO: 2661 - DNA, 353 bp, Oryza sativa
ttacgcgaccttaaatactcagcttccttagcaacttagccaacccagaactcttgtatggtgcgcccagatggttgccgtcgaatcagccaggtctgggggcttcgccttggagtcaaggaccgcagttcgacttcatcaatgctgctcatgcaccacctgttctgccgcaagcaccaacgccaggcttcggtgcgaaccaagcaccaaaccatgccgccatggcgtggccccagccaacgttcgactcatccatggcggctcatcaagcaccacctaatggaaccgcgcagccgaacactgtgggccaaccttactcgcaagccggtacctcgcctttcgccacgccatat

SEQ ID NO: 2662 - DNA, 436 bp, Oryza sativa
  unsure (1)..(436): unsure at all n locations
agctttgaagattagggagttttgtcgncgctttatcgacacctattagacatcgtcactttgcttcattttctactcgcagattatacatcatggaaggatctcattacacgaaaaaaaaaagatactttccccttgtcgcttgaatggtaaactatatgaaaatgacagtcagagaggaacaattggttcatctgttaccaagataatcgtatagaaggaagaaagttgcttgcttagagtggtggtgaccttgagcaactgccaccttttggtcaataggagtggctctaaattaacaggaatttgcgtacagtactacagtggtgtattaaaaaagaacccgcttacatgcctacttagacaagccagcttctagaagtntattgcttaactacatatgctntggtcccaacaatagtattacagtgtacgt

SEQ ID NO: 2663 - DNA, 394 bp, Oryza sativa
agctttactggttgacattttttatgatgcattgtttcaactcctaaaaagttaagtaactgcggtataaaaggattttaaggtattgggcacttgatcacgcgcactttggcctaagcaaaaagtgcctaagtccctaaaagaacgtgacaggccacacctgaaaatatgggctgcagacatattaggcctaggccaaaaaatatgccttcgacaccctttaaaggatgacgcatgtaacatgctcccgagtaataaatcttctgggtaatatagaccaagtgtagctcatatgaatagcttctgatctgaatgattatcccttatgggatactccaaaataaatataataattgaatcccgactggcgcaagtattcggttgatagccctta

SEQ ID NO: 2664 - DNA, 369 bp, Oryza sativa
tgagttgtggcgcatgcagaagctgcttttaatctttccttaataacagagctaacttagacccgttctgtccggtggcttctgacaacgctgtcaacgcacaagatgagtccttcctcagttaatcttagatcatgcgcactgaccacacgatcgacagagaggaataatggtcaaaacgtcaagcagacggtccgcacgcacgcaccgactcacgcaccggcgcgccgcgagggggtgtgcatacaaaccggcgtctgtcacctacagagaaatcctgcggggatcgagctatgcgcggacgtatgcagtgcacggcagccagagacatggaagttacactacgatgcaccgatggatggattgatc

SEQ ID NO: 2665 - DNA, 429 bp, Oryza sativa
  unsure (1)..(429): unsure at all n locations
agcaagctttgctgtatcacaaatagttactttagttgattcgtgtaggtaccagaaatagagtatgtacctcaaaatgatggggtacttacccaaaaatttgaagttatgggtatgtggatatgtaccgtgttttagttaggcacatatataccttgtttataatttgaattgaatttcaaactagagatgtattttttctgattattttttatcatagatatattccattggatatatacccgattttaagttgggtaaatgccattaggtatcaaacatgcgaaagcagtaaagcactaattagtgggtacagtctccatttggaatatacacagcagtcacaatgattcaatgaattaatgataaataacctcttgtcacaatatattnnttttatgannaatacaccacaagttattcagatat

SEQ ID NO: 2666 - DNA, 417 bp, Oryza sativa
  unsure (1)..(417): unsure at all n locations
tcgtccgggcgccggngtngctatggtcgtcgcggtgtctttggcgcggcacatagtacggggggacacatccctgccggttcctcctcggcgggcgcctacgcctgcaggccgccgttcaccgtcgacgccccctccaccatccacgcaaccatctggcagtcgtcatctggaggtcgtcgtcattgcggtcgaagtgcggtcgaagtgcggtcgcaaccatctggcagccgcacgccctccgccttcggtcgccggactggctgacggagtgccgctttctgctgtccgccaggctgtcggcctcagctgctcacctcgaagttgtcttcttggctgcgccgacagcacggtttcaccagcgccttccattcgttctgcgggctctacgcccaaccgctggcgctcttcctcccc

SEQ ID NO: 2667 - DNA, 328 bp, Oryza sativa
  unsure (1)..(328): unsure at all n locations
atctctaagcacctgagcatgcagctgccttgttggggtattcctaatttatctgtggaaatctccatttggtttggcccatggatcaagccattntcacgaatcacgacgccaactagctagctgtggtccttggataccaacaaggaatgttttgaagtgcttcaatttgcatatgagacattcaacatcattntcttccatcatcccatggtccaaggcaaacctccattgataagaaagtctcttctagcacctttgagcctttgaggcgcctttacaatctgcctcgagtgatcttcaagccttctagaagcctttgaggatt

SEQ ID NO: 2668 - DNA, 467 bp, Oryza sativa
  unsure (1)..(467): unsure at all n locations
ctatanatactcaagcttcggtcctacgtcactcactccttgagaggtttcctggtcttctctggtgacaagatatacattcttctcttcagaacagctgttgagccactaagctaccaacgataatgtgcgatatctctatctaccgaaacacaagcgtagattcgatgcaatctgtaatttcgaactgaagctgtattatatgctcaacgagtagtaagctcgggtagaggtaaatggccacttctctacatgcctatgctaaactggaagacagctaagctcatgtaactgccatgtaccacgtgagctcctgctgtgaaagctccttttgacttgcatactgtacctaactgaaattccaaaacttcctgtgtctgcacaacgctatgcaattaactttaagctgcaatgtctttatggctgtggcctcggagccaaaacttttggcctctatcgtgtatcac

SEQ ID NO: 2669 - DNA, 434 bp, Oryza sativa
  unsure (1)..(434): unsure at all n locations
ctgcagctggngggcggaggcttctcggcctctgggggcgattttgccatggcgaagtcgtcttccttcggcagatagtcttcgccttgcacccttcgcctgagacgcctctggcctggcaagacactcgtacgactcttcgcctcacgccgttcttgctccatagccttcgccacgggtttcggcagatttggtcgaagggcctcatgccatccgtcaacacaatgccatccgccaacacaatgaatggtccaacaacaatatagttgctttatattaaaaaagaattccatatgactatataaccttggaagaggtttcaaatatttatgaaacttatgcacatacggaccatgtcacgtagctgtccactcagctatntcattcaaacaaatagcgtgcagctataacatcagaagaagaaagntatttat

SEQ ID NO: 2670 - DNA, 318 bp, Oryza sativa
atgaaatgtttaccccgtatttggaatatcgaaatcttctgtgtttatccgtaccaatccctggatcagtagttggtatacacatacatagttggatcacaacatatcacgaatgaattcaggctataagaattaaatacttacattatggccaggtacgccaacaactattagagaacaacagcggatgacaaaataatataatggcccggttaacatgccacaggtagtcgactgtggaacgagacctataacaagaccgcactccgatcatcttgtgagatacgcaagcgtaccgacaaaggcttctctcaacac

SEQ ID NO: 2671 - DNA, 392 bp, Oryza sativa
  unsure (1)..(392): unsure at all n locations
catgcagcttgcactttactacatacaacatncatttctttgcatcgttactatcctgnngnngagcngcctcattggggtatgctttcaatatgtagcaaattgtattgacaactacaattggaaacaagatctaatatggcggacaacttattccagatttccttcactctgttnttattatcttcctggcagaaacttttcatttattcacatcttccttttaatatctgttaagaattcaaccttttcagcctagttatttaagctgacaggcctattgaatgttaacaagaaatgtgtgtgattntcatctgtagaaagattcttttttgtcatgaatgcatgtgtgttcacatgttgtcactgttcccctgcttatttttggcatg

SEQ ID NO: 2672 - DNA, 455 bp, Oryza sativa
  unsure (1)..(455): unsure at all n locations
ggggcgcatccgctctatagctcgnatcttctttttgttggcttcgatgcctcgggcagagaccaagaacccgagaagcttgcccgcaggtacaccgaacacgcacttatcggggttcagttttatgcgggcggagcggaggttttcaaaagtttccgctagatccgagagtaagggttcttggttgcgcgtctttacaaccaagtcatcgacataagcctcaacattacgtcctatttggctacccaaagaaattcgagtagtacgttgaaaagtangacctgcattnnttaacccgaagggcattggtgtataacaataagtttctatgggggtaatgaacgcagtttttttctcatcctccctagccatgcgaatctgatggtaaccagagtatgcatctagaaaacacacaatgtcgcaccccgctgtggagtcgacaatctgatctatgc

SEQ ID NO: 2673 - DNA, 331 bp, Oryza sativa
actctgacgctcccagggattctgatatcagacaccgagcaaaaaaacccgacaagttgcatcataaaactgtaagccgcaaggatgttttctcaaatgttgattctcatgaggttcgaacttctggaaggaggaggacagctagaaatatttcatatgctgaaagtgaagaaagtgatgatagtgaggaaaagttatctaatcaacaaaaggtgagatttttgtgtggttatctgcgcaagaagcatctgaattgcttatgaaccacaacagataactgacataccattctagatgattcgatgttattggttgctatgctctggaaact

SEQ ID NO: 2674 - DNA, 456 bp, Oryza sativa
  unsure (1)..(456): unsure at all n locations
ctctntgcccctgtcactctcacacactcacttactccttatttctgagcattctggtgcatttgcatatttgcattgcaccatacagctagctcccttgagctagtttacaaaatctctctgatcgctaacgcaactgttttcaaaatcaaaaactctcttaaacagttcagtatcttctaaagtcacaaaaatatcgttgaattcataaagtaaactaaaagtcagaactttgctgtcgtagcttattcgaaattatcactagatggatttccatcaagcgtttctcagaatctaaagcgactgacccaaagaaactcttggtctctatctaccctgcttggtgtgtggtgatggcctaaccatcaagacatgatccaaccccgtgacactaatccaccctggtctttgataatcctacatagattaacaacaatcgactatcaccctatgcga

SEQ ID NO: 2675 - DNA, 431 bp, Oryza sativa
  unsure (1)..(431): unsure at all n locations
catgcaagcttaaagccatgaatcccttttatgcatattttgatctggattttgcanaacaaacatataggatgagtagtatctgatataaatataatactcgagaaaaaatcaagtattttaaaatatttataaatatgtatttctcctcttgtcaattttgatttccccgagcagatgactcattacgtttaaacactctggccgactagtcatagccaccaagcactgggagtcggcctaagcacttcccaaacatgcatatgagtgacatgagttcgtcattaatggaacaaagtttcacggatcggagtttactactcgggtacttttgcaattattaagagcagaaaataaattatcttatctctatgcttttgattattccgaaaatactaacaccttgcgtactcggccatccacgagccccg

SEQ ID NO: 2676 - DNA, 365 bp, Oryza sativa
  unsure (1)..(365): unsure at all n locations
tcgagccgatcaatattggattngatcggaccttcagatatctgatcaagtttggtcttttcttcatgcacaagctgccgattagcttggattgtggcctcaatctctttgtgctcacggcattcggctagtcttagcttatctttttccagcttgaattgatgttgctcgagataagtggctggagttaggacatcggccaaatcttcgggaatcagagcctgaacttcatgcagccgtgacctaattgatccacagtcaaccaccaagctatctaaagaagaggcttctaaccgatgagagatgtcttcaagtggttttctcacatcatcggatagaggagctagaagcttgctcgaagtatc

SEQ ID NO: 2677 - DNA, 418 bp, Oryza sativa
  unsure (1)..(418): unsure at all n locations
cgcatgcaagcttgcagatgtggcacttcaagaaaangattatctccaggtgttctgtcagtattgtgttcctctttttgcacacggttttcatcctccatggaagactgtttgacttgcaggtcatcgttgatttgatcagctgttgcattacccagtgcctgagaggtgctctgctcactgtccggcacataacgaaattcggtagcactttcatcatcaatatggngttcagcttctggctgatgatcctgcgtatcagctgagactttggcccgttctttccagtccgccattgcatctccaatgctcctaaaaagatatgtctgtttgatctgcgatggtggagtatcagtctgcaactctggcttatagttagacaataacctagagccatccccagagttgggcatatata

SEQ ID NO: 2678 - DNA, 312 bp, Oryza sativa
  unsure (1)..(312): unsure at all n locations
agctggncactgccagcaccttcttcctgctcacatcaacagttgtcagaaatgtcgncttgtcattccccatgacgggttttgtcagcacgtaaatgacatcgtcatcgatgctcatggcagggtaagccatgcccaggcgtcccaatggcaacctcgtcgtgggtgtcgttgtcgcctccatggccttattatcatcatactctttaagactttctttgctcacagcacacagcaactcataagcctttgtgttgtcagtgctgagctcggcagattcaacaacgcaatcgcggcaccaatctgtccatg

SEQ ID NO: 2679 - DNA, 335 bp, Oryza sativa
cttcaaccgatatgcccttatgcacggccatacataacatagaaatcacacgtggaaggggtgggcaattagctagagcagcaggtgctgtagcgaaactgattgcaaaagaaggtaaatcggccactttaagattaccatctggggagggtccgttggtatcccaaaactgcttaacaacagtcggacaagtgggtaatgttggggtgaaccaaaaaagtttgggtagagccgggtctaagtgttggctatgtaaacgccccgtagtaagaggggtagttatgaaccctgtggaccacccccatgggggcggtgaagggaaagcccccattggt

SEQ ID NO: 2680 - DNA, 468 bp, Oryza sativa
  unsure (1)..(468): unsure at all n locations
tctttcaaagcatacggctntctagatgtatatgacgatctctatacagacggatcttatatgaatcgtatgatgaagtaccacatgagtggatatatatgataggaatccaaatctgccgaatcgctcatgttatgatcttctacatcctaggtctccgcgttccgtcatctggcttatgttcttcatgtagcattcagatcgaatgactctatgaaattacgtcgatacttctacatattatgggtaacgtaggagacatccctattttcccccggnggtcttaattaccactgctaagccttcaattcgcctctgaccatcagantaaatgtgaataacccgccctcctctctttgaaacaaagngcgctttcgggtctgtgcgtgctcaaacattatggctttccatataccatatctctagagcaataatttctatgaggaactctgaactcaacacttgctg

SEQ ID NO: 2681 - DNA, 410 bp, Oryza sativa
agcttcagtttaggggctgttataacagcctcttttgctctctctgtgggatagagcctgaaacaagtgtgcacctcttcatggagtgcttttatgcgagacatgtatggaacaacatctggctgaagctaggccttcagattccatcactgtctccctttaatggtgacatgcttgagtgggggaaagcttctatgaagcaaatgatcaaagaacaaaggaggtatttcaacggtttaatcatctacacaacatggggaatttggctccaaagaaatgatcaagtctttaatgatgcatatggctcggtgcaacaagtggtgaattccatcatcaccatgtgcaaagcctacgatgaagcgatcagttgtctttgcaacatttgatgctgtttgttgccttgcattctc

SEQ ID NO: 2682 - DNA, 342 bp, Oryza sativa
ttattaatctcagacgattacatcaagtttatatgaatttgattagtggcaggcttacattgaagatgaatatatgtctatgtatatataccactttgagaattattataagaactaatatgaaagaaaaatcttactatcaatcttaatttgcattgatatatatcccacggtgaaaatttggcatggagatgtcaagtgctatttgttatgtatatctatatatcaaggcccagcctatatattatgcccatatagtccctgaggactctatatatattgtcatccagagagaaaaggattgtattgattctaatccccaacgtaagtaatatggtatca

SEQ ID NO: 2683 - DNA, 426 bp, Oryza sativa
  unsure (1)..(426): unsure at all n locations
agcttcacaaatcttcgatttttccgngaattgttaaaatccgggaacctcgactatacgtaaacaatcaaaaacctaaacaaaataccaaaagaaagaccctatttagactaattaatagtgccattagatagatctaattttatggaaataatggaagtggaacggggtcaattggatgagcggttgagaagatatggatttcggaagtttatttggaatttctggaataagaggaatggtttatggaatttatagaaataatattcacaagaatattattgatagtcactgacgtgcggaaccaaggaaaatgattcatgtgaatttggaataagggaattgattatggaatagggggaaaaggatttatctaaacccttcttggaaaggaaaagaaagggggagggagattagacttccctc

SEQ ID NO: 2684 - DNA, 346 bp, Oryza sativa
  unsure (1)..(346): unsure at all n locations
tggtttactntattgacttaccttcctactttgatttcttaactttactcaaattaatccacgaacttgtgctattaattggataaatgtcttaactccctcctttcacttgtctttatatgccgcgttacaagcctgagtacttgtttggtgttgagggtattgtccaggagttgcgtacgatgtcctttgtcattggatttgggactgcccctttttatgcccagattcctcatgatcgtcatgaagagaagtgccgagtcaaagtcaccttgaacagtaataataaagatatcccctcagtgatgttcgaagctggaagatgacactacatccatggatgtca

SEQ ID NO: 2685 - DNA, 427 bp, Oryza sativa
  unsure (1)..(427): unsure at all n locations
caagctcactataccaccatttttcactnaatggtaatatctttactgcaatcgggntgcataatttttgttactgatattaaacataatgtatttctacaggtatcgcactaaaagcattgtctgcagttatttcactggcagattcggaagttgactcatccatggtgtgtgcatcctctctacttgagtatctagtatatatacttgatttgcaatagctatatgatttttctttctttgacctaaataataaaagaccagtaatttcatatggtgtaaattatgttataaaaccatgaatagggaagtggctttgaatggatggagaacatatatagcactcatcttatagattatattacctctgtaactgataaagaagtatcgatgaccatatatagctaaatattataatacaagttca

SEQ ID NO: 2686 - DNA, 333 bp, Oryza sativa
  unsure (1)..(333): unsure at all n locations
gaactatcaaactagctngaactacaaaataatgagagttgtgtttggtgttataactgagccataggcgcacaggcaacggtgagcctggagccgagtcagggcgccctctgatccatatacgtgatctgcaacaaaatccaatgcggactcagattatcgccgatacgaagtccgaatcggactgggatattgcgcacgtactaccacataaaatacacccgtcgnctcttcccatcgagaacgaacgactcccgtctccaacgatgtctcgtcggaagacatccatagccctcattgcgaactcgcatacgcgcgctacgaaccacaata

SEQ ID NO: 2687 - DNA, 66 bp, Oryza sativa
gaccttagagacacccgcggcacgcaagcgcggagccatacaagtttgtactccctctttttcaca

SEQ ID NO: 2688 - DNA, 421 bp, Oryza sativa
  unsure (1)..(421): unsure at all n locations
tagttcctgatggacttatcagtatgtgtcaatgtcctatctgttgaatgccaatgaaggaccttcntttccattgccacatgatctcaatccttaatttcatcttcttctgtacaggtgggcagcagcttcgtctgaactgtcactgaatgctatgattctccctgctgcattgtactattggcaaataccacattttatggcccttgcatacttatgtcggaatgattaccttgctggagggtaactctcctatctgaattgattattagcatactgactgtagaatttacatcagaatgattcaagtgcacaacctgtatgtgacttgtagaattgtatgttcttgtgattcaagacccgaatgtttctttgctgacctactggaaaaaactgctggtatactcacaattgctataca

SEQ ID NO: 2689 - DNA, 244 bp, Oryza sativa
cacctactaccatcttgcatccagattctcgcggctcatttgccgacagaacgaaccgcgcgggcccgtcttgacggattcaagaaccgtcttcgggctaaggatgaagaaatacgccgcaagaacttggagatggaggccctcgccaacaccctcaaagaggcgagaaaaacttatggatctcgggtctgaaagggtaattatcgcaccccctgaagatgccccctctacctgctttaaaatt

SEQ ID NO: 2690 - DNA, 340 bp, Oryza sativa
acatttcatggatgggggcttcagggtgccaagcatcagtgtgatgcagaatgatgtccaggaatgggagaagttcatgaagcgctattctcgtgcttactttcgcagatcctgcatcggattccttcacatctggtacaatgataagctatgccgggacatggggtgcaacccgaggaggaagaatggagtttgggctgatttattcgacgttcatggccctgttgattatattgatcttcaccccaagaaagagtagtactctgggcttcgagtcgtgtggaataatattatcgtctgatcatgctcgtttaagatcatactacctgctttcttggat

SEQ ID NO: 2691 - DNA, 334 bp, Oryza sativa
agtgcatgcaagcaagtgggaaataatctacaattccacttgcagacatggccagaaatgtcaattattggtgaggagcaatcagccacctgatctttgagccaatcagaagaggaggtgctgaatccaagacacaaaattaatttcacacgggcacattgattgtatgtagtaaatagatcagaggtcaacttatgttcattcatggcaaggataacccagggatcatcgtgttaactgataaggcaggcaacctggcagtgcctgctgaattgttcaagatggtgtgccttacaaaaaggacaaatatgggaagctctggcgctatcatcag

SEQ ID NO: 2692 - DNA, 370 bp, Oryza sativa
  unsure (1)..(370): unsure at all n locations
tcgcagaggagaanaggctagtgtgggcacacgcttacattggcggacttgaaggcgtacggcaggttggagacgaacaccgtggatgggctgtggcctccgccggcggccgcgtcgccttccgtggctgctcccccgccgccgcgctgcttccgcttacccatcgccgctcgccggtgtcgcggtggaggaggatgcgtgcgaagctctccagtaactcgacgagggcctttgtgggctacgagttaatgatgactatatgggctggaccgccgacacccagctagctccagatctctccgcacctcgctctcgcgatcagaagctcggtgaggcggggaggccactaacttatctgtggacgaggatg

SEQ ID NO: 2693 - DNA, 361 bp, Oryza sativa
  unsure (1)..(361): unsure at all n locations
tacaattcagtttgaacgacacaaaccacaaanatgccccacaaattctctctctctcgcgaagttctgaaactcagtaaaactttgctttctctgttctgaattccttttctgcgttcttcagttttctcgtctgttgccgtgcccgacgtatgcagtgtgcgcacacggtgttcgatcgggtgactcgtagctaacaaatcttgtaccagttcgtgctatttcttcgtttagtgatgcagccatgtttatttgatttgtgtactaatatttgcaacaagagaaaattaacttgatggcgctacttaacttggtggcaagtacgtacgtattgaacaatgaatagctaaaattagattct

SEQ ID NO: 2694 - DNA, 391 bp, Oryza sativa
  unsure (1)..(391): unsure at all n locations
tactaaagacctangagtatgacttatacgctccacccgatgtgtagtctatatacggtatattaccagataagactctgagtgaaacttgcttgcacaagacttgcaattcaaggcgtagtccattgttcaagttgtgaataagtgtagcttggagttctagatggatgttcaaccttaatcggtctccatcgaaccgctggtatataaacagtacattggataaggaaaatctcagtgggattttgagatttggttggggattggtggaattaatggatgggccttagcccactggaagaataattctttggttaatctttggtaaatcacaaaatcccaccacatgggatggcatgcatgtggagtttagtactacctcgcttattct

SEQ ID NO: 2695 - DNA, 445 bp, Oryza sativa
  unsure (1)..(445): unsure at all n locations
gcatgcaagcttcgccgccgcctccttaggggtcgnagtttttatttgaaggtctttcacccctccattgtcgncgctcatcgccggaaagtcgtcgttgcggtggacagtacctcgccgcccttcgaagctcgacgccggccgttttctgtcgtcgttcatcgtcgtgccgcccctcggtgagctcccctcgtcgtgctctttcctccggttcagatcaatctaagccatccaatcttggtcaactctatatccagattaatatcagctggccaaaatcaatataaatccgttccctcttttcagtgacatattattcctttttaatatatgtcatctatcaaatataatctaatctttttcggaggctatttccaatctcttatctcaattataaatcattgggtaattacttaactattttagaatagtctcttctttaata

SEQ ID NO: 2696 - DNA, 444 bp, Oryza sativa
  unsure (1)..(444): unsure at all n locations
agctntttcatcttaattaatatgaaaagagtgttttatccatatgtaaaggggtaccctagttaccatttcaccaacagccattgttcccttctccccttcccccggtgcatctcctccctagaacctagcggcggcggctcagcagacgaaggcagcaagggcgacaggaggccatgatggcaacaacctccctctcctctccctttccacgaaccgagctttgacggggccaaatcgagctccgatggcacagaccgagctcgtgctcctctttgtccacggccgcgacatcgacggtgtggcccaagggctcatgctccacaaggacaccggcatcgtcattctctcaccggccaccgccgatgctaccaccaacaagaagaggaaccacggtgcctacagatgtgtagcactcctctaagaggccgcaccgatggtcga

SEQ ID NO: 2697 - DNA, 298 bp, Oryza sativa
tgcacttgaccctctggaacaccaccgtcggcgtgccctgcggcgcgagctgtagcttgagcgggcacttaccggagagcttgcacttggtgtaatgcgcctggtacctgacctcgtcggtgaccgccacctcctcctcgaacacccccgtcgcgttatctcttttgaactcagcgacgccggcgttccctatcgccgcgtatgcgtagtcgctggtggagtctatgtggtacacccacatatatctcgccgggtgtttttccacttcccgcgagcttgtagcgctctaaccgctgtc

SEQ ID NO: 2698 - DNA, 442 bp, Oryza sativa
  unsure (1)..(442): unsure at all n locations
catgcaagcttacctcgataatccataatactctctatgttcacaaatatttgttaagttgnggcctatgggcggtctttgggttcacttcacccctcatttttgtaggtcactataccatgttgccctctctttttcagttgagctgaaactaatttacaggagtatactggtgtccatgaatgcagcctgtcacacttgttttgttccctcgtgcatgacatgacatgattaatttgggacccctgctggctgcagctaactagctagcggctgttgcttgcttgacctgtttattttaaaactactagtaacagtaagagtagaataatcagtaaggagttctgaaaccttgccctgaacagcttcagcttgctccaacagtccaactgcacccacgaatagttaggagtagcttnttcatatattgccattcttaact

SEQ ID NO: 2699 - DNA, 382 bp, Oryza sativa
cgcgatagcttgcttaagttgagtttgggtggccataactccggccagagttggtaagtcgggtgtctgagtttcgtcattgctggttgttgcccaacgtcggcttgccatctgtgtatgttgatggagtaagtatcctaattttctaactagctcctatggctttatcccattaagggagttatgttgatatgaactttgttctgcaagcatggtggaataaactcatctataatacaacaacaatagatattataaataacatcacagagtttcacatatggtacatgaatcatgatgcaatcgactgcatacatacgcagtcccaataaaggtcatccaaaagatacaacgaactaatcatcatactactcgtcaatct

SEQ ID NO: 2700 - DNA, 456 bp, Oryza sativa
  unsure (1)..(456): unsure at all n locations
tgcatactgatanaaacttttaagatatcaaagatttgttnttgaactatcaagcactttttttatataccagtattgtacaaattgagcctccatttgttacattcatactcagtcagaatcagtcctttcatcatcagagttattggtgcttggctgaaggacgttgttgcggaattgctctacaacgtcacttgcaatcttgtcagccgcattttgagcactactgataagatcaagagcagcttcttcgcttgtcccgtctgcaaagccatcaatggtgtcaatttcaattctcgggtacaagggatttggtcatcgccaatgccatgctagctcccatactttcagctntcttgatattcttgaagtatacatccggtgcaactctcagcttgtcaaagatttcgggtgcgtcaagtgcactcggaccactggtattaaagaacatagctt

SEQ ID NO: 2701 - DNA, 424 bp, Oryza sativa
  unsure (1)..(424): unsure at all n locations
cttattgtataagctacacctttatctagcaaggccctgaataccattgctatgcaaacttaagcaatatgtgactagtaactctattctatnttgcaggacttgctagacaaatacttactcggatccaattatatgatcgctggctcacacaagaatatgcctcttgctacaagagagatggagcaacttgttgctgcaaattgccagcttatcagcatgtttagggaggatatccaagttctatgccaccacgatgtttcgatgagatctgttaagaaagttctgctctcttcgtntgaagagatgctggagaaagtatgttcttatatgtatagagatcttaacatatgtagaaatcttgtattctgatgctaagactggaacacacactaatgttcactttattactggacatggaagc

SEQ ID NO: 2702 - DNA, 381 bp, Oryza sativa
  unsure (1)..(381): unsure at all n locations
gctataancgcctgaccccatgtggagatggtacttcttcttggcaccattctatttgtttctttccatcatcgcctgcccttgttgacctgtcttatatgcaatgaactcgtcccagtgatcccttagctttgggaatgtgtcgaagttcggtgtctgccccttcaggatatatttctggtacagatctcccttgaagctctgaaactgttctgccatattctttagagtccaccttttcactttgtcctctgtacccgcgggaagggtgaatgtctcgagcattgtggttcacagcatctctttctccgaatctgggacatagctctcatgttctcctccgtgcttttgttctgcgccaatacaccgtactgacatgca

SEQ ID NO: 2703 - DNA, 445 bp, Oryza sativa
  unsure (1)..(445): unsure at all n locations
tgtagtacacctcaagaaccagtctaatgcttagctgactcctaatttgcagcatctgcaactgttgctctcatcctctctcagagagaaaacgaaatggaggaaaatttatcacaggagatagttaggttcacacacacaacaacagcaacagcaacaagaatctctagatgatcacttggcttggtccgtgcgaaatgccaagtggcaactatcagatgcttatgcattgagaggcacggaaaaaaatgtcgatgcactaactaatcagcaccaatnttcagcccctttgatgagagttttcatatggagttcaccaattcttgggtgcgtgttcaacttaacagcgtggtgaaccttcacccaatacatcagaacgtgttttcaaccttcaacacggtgctgactcctcactaaccccaatgcaagattactctttcgattt

SEQ ID NO: 2704 - DNA, 392 bp, Oryza sativa
  unsure (1)..(392): unsure at all n locations
gcaagcntgcccgcaggtacattgtttacgcactgttcgttgtttttttttangcgggcggagcggagactctcaaaatgtttcgctagatccgagagtaaggtctcttggttgcgcgtctttacaaccaagtcatcgacataagcctcaacattacgtcctatttggctacccaaagaaattcaagtagtacgttgaaaagtaggacctgcattctttaaccacaagggcattgtcgtataacaataagttcctatgggggtaatgaacgcagttttttcctcatcctccctagccatgcaaatctgatggtaaccagagtatgcatctagaaaacacaaaaggtcgcaccccgctgtggagtcgacaatctgatctatgcgaggcagggg

SEQ ID NO: 2705 - DNA, 384 bp, Oryza sativa
  unsure (1)..(384): unsure at all n locations
ngacttacacataagctgaacacatcacagctgccagatctcatgcagtatatgggttggtcaagttttaatattatttcgtctatggtacacagcataggaaagatagatatatcaggacatagagggtacctcccgtggtatgcagcccagtgtacagcagtccaaccagaagaatcacggatatccaaggagaaccccgacaaagaaaacaatcgaatagcccaagtataacctatgagagaacacagatggatagctccttgtcctagatcatcgcgaccagtatacttatgaccttccattaccatttcaacaagccactcttgcaacctatttcgcaacactagttcaagcaagctttcaagtacaggaacatatgtg

SEQ ID NO: 2706 - DNA, 366 bp, Oryza sativa
  unsure (1)..(366): unsure at all n locations
tagctntaagcactgaactgtatttaataagcttatttactccattccatattataagactttctatcattgtccatattcatataaatgttaatgaatctagatatatatgtgcctagattcattaacatttatataaatatggataatgctagaaagtcttataaccaactgtcaaaatagcccttaagtgaaacttatagggacaaaattgactattctctcttgtcactaccacaactcattctgttcaaagtgaattctcgttagtttgccaatcatcgatcataccatggatcacgctacaatgcccagaggtgttacacagtattatgttggtgacgacaaaagctgacaatacctact

SEQ ID NO: 2707 - DNA, 391 bp, Oryza sativa
  unsure (1)..(391): unsure at all n locations
agctgggtctccttgacagtattanaggaactnttcattatttgtttttctcanccnctagcccgncaaaatttaatggtttctttctcgtgagtagctctaggacaacaaccccaaaactgtatacatcactcttatccgttaatttccatgtttgcatgtactctgggtcaaggtacccacgagttccctgcacaaacgtgacgaactgtgcatcatcggttggcgataagatggaggctccaaagtcagagaccttcgctgtgaagtcaccatcaaggagaatgttggatgacttgacgtccccgtggaggattggaggcgatgcccatgaatgaangtaggccaatgcttcagcagactggtgagcaattctgaaacgcgtggatat

SEQ ID NO: 2708 - DNA, 369 bp, Oryza sativa
  unsure (1)..(369): unsure at all n locations
tagtttgtatagagagcctcatgatagcaactctaagctgttcttanaaacatacgaaccacaacaatgggtatttgaatgtgtcgtaatccaactatttgagtttttctttttcttccttgtttttggctttgatttcttccttccctggcgtatgccggtctggccgattgcattgtgtaacaaacactctattcctctaatatattgacgtgcaatccttttgcgcattcgcaaaaacaaaagatggttggcacagcatctggacagtgttgcaagatactttgtatccagatttaccttgtctgtggagtaactattacgtcataaacagtggcatatatttcttctatcaatagtagttatcat

SEQ ID NO: 2709 - DNA, 358 bp, Oryza sativa
  unsure (1)..(358): unsure at all n locations
tgcgnanataagncnaagggatggactcgtccacgcggattggagcttatgagatgtgagcatttgactcgatgatcagcggctagttcgtcggtgctgcgcgatcgatcatatctcgatccagagcttaatcgtgtcaatcttgttgatagggcttgaaggagaacatgtggatggcaatgatctcaaattctcaggtcatttgcgtaaacgccatcggcggcactccggctgagcgagccgacaaggcgcgccacctcctcgcggcgggcgcggcggagccggtctagcgttcgttcggcaaggagctcgtgcaccgcccgccagctcctgccccgctggctgctcgcagtgcagc

SEQ ID NO: 2710 - DNA, 369 bp, Oryza sativa
  unsure (1)..(369): unsure at all n locations
ggcctcaaattcacacaatatgctgcatttaatttagactctgtgcatatacaagtttgctttaattcggtgcaaggttaatcggcgggtatttgcttaacccccgtccgagtagacttgtattcttgctctttgttgtagctatgaagaaacaactttcgggcatattcaagagacgatcaagctcacggacaagccgacatggtaagccgagtacaccttcttccacggatgcatccatggaggaggcgcacattccaccaaggctgtacgacaactccgatctcgacctctggggcgactgtgaaatgcaagtctatcatatggtgaaagaccaaatgtgtgctcanacctgagcataccactcga

SEQ ID NO: 2711 - DNA, 326 bp, Oryza sativa
  unsure (1)..(326): unsure at all n locations
attaggcngaacaatcttaacgagtccaaccagtatgaagctctatctctggttttgcttgcttgttgcctcaaacagataatataactcgagtagtaattatgaatttctgagaacaaggtgatcctttttttcagataaaccgcatagttcacctaaaaaaggagaagtatgtcgttgtccagaagtaataattcaccctgttattatcataactgtactgaagatatgggactctgcagtcctgaacaataaattcaaatgggttctcatttgaatatatgcgttgctacgacacaagcatggtgaagtctggagctgataca

SEQ ID NO: 2712 - DNA, 401 bp, Oryza sativa
ttgggaccggaattcagcaactccagtagtgacgagtggtcttgagctagactagcacggatcaacacacagaagttcaagacaatactggttctggagcattgaaagatgccatattgattttatagcatccaaaggtcacatcataattttgatagcattggaaagtacattcggtgcttctttgtagcattccgtccaaacttccgtagattatgttctaattagtataatcttcaacaaaaactataatcaaccccaatggtgggcctctttctcttgcttagtaacttccaacaagaaacttacaggagctcaaatcgtcagtcatggtgtaacacacgatcaaagctggctcccaagctcgcatgtaatacgtagtgaacccgcctcacaactga

SEQ ID NO: 2713 - DNA, 197 bp, Oryza sativa
ctactagtgctgatatatattgacaatgcttatgcttggtgcatggtacatcaccatatgggaacaccttacatcacattgaacatgctacggctggtccattttcattcacaacttcatgatcatagaaactatctacatgcttttgatagatactcagagaaatggtcaggaatatttataatcttgataggaag

SEQ ID NO: 2714 - DNA, 373 bp, Oryza sativa
aagaacagaatgaaaaaaatacaatatattaaaccagtgtgcaaattgattattaccaagcacttgttgagcatttagccgccgcctagggtctggattgagcattcccttgacaagatcctttgcattatctgagacccttggccatgggtctctcttgaagtcaatgacagaacggataattgcctgagcaacaccctgttcagtttctgcattataacatggaaacaaaagaaggatcaggaatagcattcaacattacaacattgccaggtctacaacagacacagacaaaagtaaagattgacagtttctaatgtcgcagactgcattagtgcagaaatgtgatcagaaaggtcaacttctatacact

SEQ ID NO: 2715 - DNA, 404 bp, Oryza sativa
acttcatactcagctttacttccggaacaggttccactccggacaagtttcctctatccaatatgtgcaatattcctcaacatgcggtatatgttgtaatatttcctgtacagtattccaccttatttctcttaaagttgaattgaggcagagagaagcatctctgtgcttatataagaaattgacttgtcaaaatcttactacctagatatttgacggatatgacttttgattagtcatgtgagtgctcatgcaaaaatcaagaatggacattgtctttcattctgccatcaatctgcaccttatattatattctgtcagtgacaagttcgtacgatgaagaatcttgtgcacaactatcttcttgtgatactttaaggccctatatgcttgatgactcctat

SEQ ID NO: 2716 - DNA, 389 bp, Oryza sativa
  unsure (1)..(389): unsure at all n locations
catgcaagcttgttgccttttgttatgccagaanaggattcatgctctattattnacncattatacctagaaaatcagaattttatttttccattaaaaaatccaaaataaaaaattgattttattacgacacgctattttttacattcattacccttgaagatagtcgcggtcttatataagtgtaccccaccatttattttactaagttaaaccatgcgcgttgntgcgagagtttattatgattacaataagtaaaaataaatgtgtaaaataactttaacaacataagcttacataaacataaacataagtttaaataagttgatgtgatttaaatttaaaaagtactacctccgcttttaatagatgaacccgtgatcattttt

SEQ ID NO: 2717 - DNA, 424 bp, Oryza sativa
  unsure (1)..(424): unsure at all n locations
agctttgcccatcttttggaatgccttccgctttagcctatcctttgcttcggctggaaatgtgaaccatttctccattgccgtccaagctcgctctttctcggcttctgtgaccttcccgatatctttatggaggatcccgaagttctcacgtgccgctatcccgcagcagttagaccatcttccaatgacagtcctgggcgccgtgggcctaccactagcgtcaacctctcttataacttgcactgtggtcggccatatattttgtgaccgcggatttctactagacctacttgcacttgtctcgcccgacatcgacgtatgttgntcctgcggcaattctgcagcacaaacagaaggcaatatttgctaaagggtgctagctaaaatttatgtgggcatgtggtgaagaattatcctataa

SEQ ID NO: 2718 - DNA, 458 bp, Oryza sativa
  unsure (1)..(458): unsure at all n locations
gggtttactntatntacttaccttcttacttcgantntctttactntatttctaattgatccacaaacttgtgctattaattggataaatgtcttaactccctcctttcacttgtctttagatgccgcgcttcaagcctgagtacttgtttggtgttgagggatttgtccaggagttgcgtacgatgtcctttgtcatatgatttgggactgcccctttntatgcccagattcctcatgatcgtcatgaagagaagtgccgagtcaaagtcaccttgaacagtaatagtgaaggtatttcctcagtgatgttcgaagctggaggaagatactacatccatgcatgtcaggaagtggcaaggatcgccatatgagaactcctcgatctgttcagtgatcagttgggcgacactgagtatcgctaccatcctcgtcaaccacaaggaagtgatcgtgcag

SEQ ID NO: 2719 - DNA, 424 bp, Oryza sativa
  unsure (1)..(424): unsure at all n locations
agctnttacttttataccgggtatttttacctttgttacactttgtaccaccattaactttttatccatctacatccaacttatcatatgctaaaaaaaatagtattacatatagctatgagagttcgtgtagctatctatagaagtttgaagccctaccaaatatagccttcattgacgagtaggagccgacatactcgagatcgttcatatgttttagaagagagtcatatggtccatagtaaaacaaagacaaactcatcctgtccaaagtataaaaagattagtaaaaaagtgatacaaagtaaatcatcgctcgctaattaaatgtgataaaagtaaattttaatcaaaagcaaaataaaaaggtactacgcctttnntttttctctacgccctctccttcccttcttctctctcactc

SEQ ID NO: 2720 - DNA, 305 bp, Oryza sativa
  unsure (1)..(305): unsure at all n locations
ctcaagcttggagaacttcaacatgcttactaatgtaagctncttcatgcttaactattacnnttgaatagtngggtttctaaataatcaatattatatgaaagatgcatntacatttcattttagaaggaaatataaaagatctagaaagtcaacaatagaatctaatgttacataaatgcattgactaacctacgaacgcatgagtgcatgaccacatatttctttgtcatgcacagcgtacacaacggctaatgaattaacaaaaaatgcaattggtctatgtggattgttctgatggtgct

SEQ ID NO: 2721 - DNA, 432 bp, Oryza sativa
  unsure (1)..(432): unsure at all n locations
agcttaggaggcaggactttaccggtcgttanngtctgcgagggagagnaagacaccgngtggatgcttggatcccctccaaactacgacgtcgtcaacaagctcttcgaggaagagagaaccaaggtaattaatttcacgacgaacactactcgtcagaattcataactaaacgccgcagagatcgaatcaggtattgtgattaagttcaaagcattgttgtgcacttgtcactaattaggaatggccagaggggtctctggaggagaaggtccagaggttgctgaagacctgngagatggagctcatccacaaggtgcgacccgaggaccagaagagcgtccactcgcagaaattctgcgcgagcaccaacggtgagagctactccctccgttctgcatgtgtgcgcgtgtcttcgtattttaatatttt

SEQ ID NO: 2722 - DNA, 62 bp, Oryza sativa
taaaccccgcctgtcactatagcagactgtgaattaataacattttgcgactggaacctaca

SEQ ID NO: 2723 - DNA, 436 bp, Oryza sativa
agcttatactccctccgttttattttgatcattatataagtttatgtatcgagactaaggataatttaaatcacatcaatgaagtaaccatatacatattctcccacaatgcatgcatcgattaaaacaccatgtcaattatacattttagcatgcacatgttctctcatgctgcattaattgtattatgatgaaatccgtgtctatgcggttacatgatgatcaatttaagaaattttaaatttcattatatgatgatcaatttgggaacgagggagtagttagcctatactccctctacttttgatagtcatattttcatcttggcacacagaccaaggataagttattctacttatcatccatttaaacatgctactaatcattcctcgtaaacaagcgattcattaatatttacatttcttaatgaccatgt

SEQ ID NO: 2724 - DNA, 297 bp, Oryza sativa
  unsure (1)..(297): unsure at all n locations
ngctcctcagcgaattgtcatccatgcattcttaatcagtcctatagcgccgcgtgcaacagctccaactccagcgagtgcattaccacaaggtgtcaatgctcaatttcagccccagccaccagttgacaagacagatgccagtatcggcattatacctttggatgttccagcacagcaccctagatatcaatgtcaatatgataaacccaagccaatgggaatgagatagcattaacggaacctaccagagctatatcaattgtggttaccgaaccatcatttggcacagccttt

SEQ ID NO: 2725 - DNA, 423 bp, Oryza sativa
  unsure (1)..(423): unsure at all n locations
agctntcctttttgaggttgactctttaatatgagttttgaaaaggttctatggggaggatcctttgcaatcagaagacttgtcccgtattgtgaattctaaccatttccgtagattgacaaatttgatagaggataagaaagtcgcccaaaagattgtatatggtggccaaacagatgagaagcaactgtaagaatttaatttgaaatctgacattactgttgggctactagcaaaaggagtttgattgatctttaacactttgtttccatacattgcaganaaatagctcctactgtgttgttagatgttcctcttgatacaacactcatggcagaggaaatttttggtcccttacttcccattgtaacagtaagaggggtttctcggcctttgtcatgtttctcttataattaatatcgc

SEQ ID NO: 2726 - DNA, 412 bp, Oryza sativa
  unsure (1)..(412): unsure at all n locations
agcttcaagaaacatattttatcacaaaggnnttttctgttgtacatctctcgctttaatttatttgttaagttttgtttattagaatattttagacgaatatttaattagatcatactttaatcaagtagataatccacaacaacaatttgtttaatatttttttcagctagtcaagttccctattccttttttggagacagtccctattcctcaatagctcccaaatgcgtcgtcagcgacagtggcacggaggtggttaattaattttcaccctctaggggacaccccctccccttgttttatgcacataatctgaaagggaataaatatattcgtaagatcgattcacacataaatagaaacagatattactattaccattgggcaatggtggtatatctattttcat

SEQ ID NO: 2727 - DNA, 416 bp, Oryza sativa
tcttgtgtgaagccattgatcatagagttctgtggcatgctttgaaggatcgaatagcaagaactaaaccaactagaggaggggtgaatggttggtatacccaaaaaccaaaaacttttagcggaaataaaaggtactgtcgacttcgacggagatcggtctgaccgtagtagattatccggtctgaccaaagcgtatctgccggtctgaccggtatagatattccggttggaccgccctataatacctgccgcacctgtcgccgccgccggtctgaccgccgcgatgccgctagtctgaccgccggtgtgtcgtcggttagaccaccgaaacccagtaaaacacaaatcgaagaactcttaaagtggatgacgactttattacttctctctgtgtacaaagtgcaccaacagcac

SEQ ID NO: 2728 - DNA, 394 bp, Oryza sativa
  unsure (1)..(394): unsure at all n locations
agcttatttagcaaactgcataatatgaaatcaccgttttatattgtcaaattgttcacacaaatgctgattagcttccagcaaagagttaagttatttcttttcaggttatgccacctccaaatgtgactggagctcttcacataggccatgctcttacagtggctatagaggtagtattttttaatgcttgtagaaatgtctatgacattttaactgtatttactagataatgagtttgagcaatgcaggatgcgatgatacgatggcggaggatgtcaagttataatgctctatgggtccctggagtggaccatgctggcattgctacacaagtctgcattaacaatcggctcgcgatctgctggagttcatcttatgaaacataanacta

SEQ ID NO: 2729 - DNA, 324 bp, Oryza sativa
  unsure (1)..(324): unsure at all n locations
accttggtctaccttgtatggtgcgtaagaagatgacgttgacagtgaanattctggtgatgaccagttatctgaaggttccgcagatgacagtgaagaatcacttgattcaggtactactttgcacacacgcacgcacttactcacttggtgtaacatcattttcgtgatggagagcaaatagagtcttgctactgttaatttagcatatacatgggatcccataggcaccacctatatctgtacccatcacctgtgatccactcgacctgcacataaaatcatggttgctatttatttgctgaagtaattagctctgcaact

SEQ ID NO: 2730 - DNA, 448 bp, Oryza sativa
  unsure (1)..(448): unsure at all n locations
cctgacgctgcaactttgggtgactggcagtcatgcttttattatggatcagagcctttgtctcgagttcgaattctggctggcgcgcaattaaataaaataattgcagctcgcgtgaaggggagtgttggagtgtataaagtgaattgcccacctttccctatcagcttangcttttaggtgcaactggctggtgcatgtaacttaataggtacgaattttttcaacttaggttgcgttctttacctccggtacgaattggatctggatttttcaacttaggctgcattctttacctccggntcccaacttccctccctcgttntccgcgtgcacgcttttcaaactgctaaacgatgtgttttttgcaaaanaaaaattatatacgannattgcttaaaaatcatattaatctatttttttaaaaaatagcaaatacttaattaat

SEQ ID NO: 2731 - DNA, 407 bp, Oryza sativa
agcttggtgtcgagctcgcctccagtagattatttacatgctgtttattgctggcaacatcaccgaaggcaatgcatctgcgaggatgaagtacttgagtagcactcttaattgctccatggacaaggtcgagtatatggtcggcaaaatgccaactattataacactttctgaggaaaagcttcgcagtaagattgagttcttgagtagcacccttaattgctgcgtggacaagatcggtcatatggtttgcaaagagccatttattctagcaatttctgaggagaaacttcgcatcaatacagagttcttgagtagcgctcttggatgctccattgacaatatctgtgttatggtctacaaaatgccaagtattctatgactttctgtgaacaatctttgcagaa

SEQ ID NO: 2732 - DNA, 390 bp, Oryza sativa
  unsure (1)..(390): unsure at all n locations
ggctcaatatattcaagaggtgattctctctccccgcgattnagncaaaaaaacactgattaaatgaagctggtatacaagtatgctcataaataaaagatcaacctaaaaataatttcctatacatgcaacgagcaaagttgtgacagatagtgcatagtattccaaacactgtcacctcatgtttggatacaaatattgacagtgagaactcaagacaaaaagacattttgcagaagttaatcagtgatatacttccaaaattaataaccaaagagtggatgaatagttgacccatgctgggagtgatacttcagaagctcatgaaccaaacacaagaggaacatcatgatctctctacataagtcctgaggaatatatggataaact

SEQ ID NO: 2733 - DNA, 195 bp, Oryza sativa
  unsure (1)..(195): unsure at all n locations
taaccttctgagcagcaactgggctttcaagggaaaggctttttttgcctttttaagtacngcttcactgcgctgccacacgcaaccgtcttgcctgtttgctatctgacatcctcacaacacttatatacttctgtcacaaaaatctgctggacacacctataaaaagatgatattggatgccttctctgattt

SEQ ID NO: 2734 - DNA, 385 bp, Oryza sativa
  unsure (1)..(385): unsure at all n locations
agcttgagcttgagctgctccaggcgttgcctgtgtcagagtagttggtcttgaacaccaactcctccgacatccggtctccgccgccggcgccggagagcagcctcacggcgatcctgaacagcgccacgatcgccttctcggcgaacgggacggggagaagagcggcaactgggacacggcggcgaagcagtcgtgcaactgcggccagaacgtggtgaagcggtgcacgttcgccgacgacaccagcacgatgaggtcctagcagaagccgaccgtctcctcctcctccaccggcgtgctgaacttctgccccttgccagtggcggcgaagatgagcgcccgacctatgttctgcaccgactcgtncggcagctttacgctc

SEQ ID NO: 2735 - DNA, 314 bp, Oryza sativa
  unsure (1)..(314): unsure at all n locations
ctgctactgggttcgccttcttccttatgacgagatgaccaggtatgagctccgtgggtcgaacttntttgttgtaagttgccgaagtgcttgtggcgtacttgtgcatgtgctcgagcgctttgactcttactccttccaagagttcgagcgatacttcgcgtccttcttcgcccccggaaaacatcacccttggtgagttagcccctagctctgctggggtcattgcctcatcgccatacagaagcataaacgggctaaacttggttggtcttgtgggggtcgtccgaagagcccacagaaccgatagcaat

SEQ ID NO: 2736 - DNA, 420 bp, Oryza sativa
tagcttcgcagaaccctcatttatggtggcagtgttctcaatatcctcttcgccaagaccttggatgatatgcagattcctcgctccgagctaaaaccaagcaatgcgccttttcacggagtaatcccaggactatccgcaactccacttggccagatcaccctcccagtcacttttggcactcgggaaaatttccgtacagagaacatcagctttgaagtcgccgatttcgagacagcataccatgccatactcggacgcccggcgttagccaaattcatggccgtcccgcactacacatacatgatgatgaagatgcctggtccccgaggagtcctatccctacggagcgacatcaagcaagccgtcacatgcgacaaggagagttgcgacatggcccatactcgcgagatggcgtca

SEQ ID NO: 2737 - DNA, 502 bp, Oryza sativa
  unsure (1)..(502): unsure at all n locations
tcagaagtgcaatcatgaattctgaatcacatcagaaggttctcttaaagacatcactgaaggtgctgcagagactcacaagaattgaaggggaaattggcataacgctgcggtacaagatatcaaaacatcccttcttattcagaaacctcgcggagatcttgggagacagcagcagcaatcaggaattaaagaagctcgtggcaggaatcctcagaaaccttgccattgacagagacacaaggcaggagattggacaaatgcaaatgctcattaccatgctgatgaaggcattcctcgattctagcagatcatttagttcanatgttgattgcttgttgccaaaggtcgccgggcaagcactggtaatgctgtcatcagataatccacataactgcttcgttatgttgaatgaacccagattcattaataaacttaagaatatgaatctaatccatgatgactaatacatatatgtggcagcgagtcttgtgcgtaatat

SEQ ID NO: 2738 - DNA, 403 bp, Oryza sativa
  unsure (1)..(403): unsure at all n locations
agcttcaaaccgttcctaaaccggaatactatttataatacatccattatctttcaaaaccgagtcacactaaaggtgtgtttagttctaaagttttttttttccaaactttcaacttttcatcacatcaaaccttacttttcagtcacatcgtctccaacttcaaccaaattccaatctaaacacagcctangtagtaaggcaatgttgcttccggttttaacagacgtagcactcttaaagcaaaaattaaaaaaaacataaaaaaccacgtgggatccgcatgtcagtgaagctttagacggttgacttaagtgaacgagctcctgctcgcgcatcggcctggcgcgcctctcctgctctngtggaccgccgcgcccagagcgctcgaccagtcggcggg

SEQ ID NO: 2739 - DNA, 407 bp, Oryza sativa
  unsure (1)..(407): unsure at all n locations
cttggcataaatattccattggcaaacctttcttcttcctatcttcangcttggcacgctcaatcctgtcagcttcagcattctcttttctatacttgtgaccccagggcaatgattggagaatgacagacatcaattctttgatatcttctaactcaaattctaaacattcattggttaagaaaagatccctttcatttgcagcattgccaagaacagtctctgaacctttctgaagtagccttccatgaaccatttttgctccattaagtttctgaaacatgtactcaacaaagcacatgaccacgtctnctgaatcatcttctagtgcatctgtccgtcccanatatattctgagctctcgaacataaacacatttgtatagagcttcttcagaggtgttttac

SEQ ID NO: 2740 - DNA, 413 bp, Oryza sativa
  unsure (1)..(413): unsure at all n locations
agcttattaataaatgtttattgaatcttatacgtatgtactttgcttctaagttacacacaaaatatatcttaatgttgtttattatattatattttgtggatttgatttttttggaattactcaatacaagattgtcatgtggagtcttaataactattattgttctattggctgtttttaaaatactccctctatttcaaaatacaagcatgtctaattcgtttaatagaaattaaggcttaatacaaaatactttgatgcccctcatgaatggttggggtgagagggtattttaaggtaagctgggaataaatttaaatgatagatgattgatggaataaatagtaatccgaacagtattagaattgtttattattgatanatttaaaatgtgataagtgtgtatattt

SEQ ID NO: 2741 - DNA, 389 bp, Oryza sativa
tggagcggcgcttgcgatcgaagaacatgtctgacttcctacgtttacaagggataggaatcaatgcatgctcatatccaaatttataccaagcaacatatggcccatacaactagccaagcatgatggattttatgcatagaacatttttcatgaacccggataaagacactaatgcgactgactaaactatagcttaatgcataaactagatgcatgaaaaatgatgcgcgtaacattgccccatcgaatatagacacgacctaatgcatattacccgataaattccccactgactgtcaaataaactccatataaaatgtttctaaaaccctagaccgagctaatttaaggatccgatccgaatgaacgaccaagaattttcccac

SEQ ID NO: 2742 - DNA, 348 bp, Oryza sativa
gtacatgcaagtgtgcacagtgatttctactgattatatgcatacacacacttaaacttttctgatgtcacttcataatagctactggcgaagtccagtattacatttatgaatagaatgggcggtatattacttgaatgaataggccaacatactgcaacactcttatgccatcactatctatcctggagcattggcgtgtacttaagagagggatgaacaatatacactaggatttcttgactagagagctcagacggaacctccctcttgtacacccatacatacaagtataatgttgaatgttaacctccaatttgctatcctagtggctaacgataacttata

SEQ ID NO: 2743 - DNA, 468 bp, Oryza sativa
  unsure (1)..(468): unsure at all n locations
tatagataactntgatgcncaatatcatgttgtggcaaattatggtgatgtaatatacattttgaccaatagaaatgctcctaagaacaagcttgtaagagtagatatcaagaagccagaattgtggactgatattctttctgaacatgaaagagatgtgctcgaatcagctgacgcggttaatggtaaccagttattggtatgttatatgtcagatgttaagcatattctgcagataagagaccttgtaactgggaacatgcttcataagttgcctctagaaattggttctgtctcagagatctcctganacgggaagacatggacgtctttattggcttacaagctttctttccctggtatattacaggtgtacctccatttggatcccaaaagaaaatttgtgaattcattctgattgacgacaaattgaggtagcaggcatgcctactgctagtggctatattt

SEQ ID NO: 2744 - DNA, 421 bp, Oryza sativa
  unsure (1)..(421): unsure at all n locations
cgacctgnaggcaggcaagcnaacagctacccctttttntacgatataatacgcttttattcacgncaaattcagcgaactttatacataaatatagtaatatttataataccaaattagcgttattaaatcaataattgaatatattttcataataattttgtgtgtagctgaaaatactattatctttttctacaaatctgggcgacttgaatcagggtgacctcaaccaaagacaaaacgtcttattacctgaaacatagggagtagatcactggctcatggatcaattttgtgtctctgcctgttcataacctgaagaatggatatgtctataatccaatcgttataaattatgtatctgatacacttcttttgaagtcatatattttcagttcaaatgattgttatttatattata

SEQ ID NO: 2745 - DNA, 449 bp, Oryza sativa
  unsure (1)..(449): unsure at all n locations
cgcttactctnntttttcttctcaaatatggagaagagagtctagaaatatagagagcatgcttttatgcaagagtcaatcttgcaggcgatccataagaggtgaatgaaatagaggaactgaagaaagagaggggaggataaaaattggagacagctttgtagacaaactattgtactcctagatgttagctgcagtatactacgtgtaagagctcatagacaataggtaactctgctattaaacttacttggagaagaatggtgctttcagcgaagcataagactcttctttctacaaatgattagtaagtgccttgtgcatgtttctagtttaagtcgggcaccgatactactatccaaccaataatcggcgtacctgaatacattgatatgggtatggagatgttcagggtccaaaaccagcagaatctatcaagaacgatagac

SEQ ID NO: 2746 - DNA, 414 bp, Oryza sativa
  unsure (1)..(414): unsure at all n locations
agcttcactatactttcttagtttagctgattttctcctgcaacaaaagtcattacaaaaaagcacgggagatgtaaaattagaagagggagaaagggaagagtctaacaatcttctaaggtaccataaaccaaaagtttttaccctctggggatttattccagcagcagcaacatatagatccaactttccaatggcaataccaataccatgcaccccgagatcacccaggcccaatatcctgcttccatcagtcactactatcatgtcaacctgcaaaggaacggacatantttatttactttgagattatatgacantttttttcttgagagatgttcaaaaatcaaaagcaaaaggtagactgtcttatgctctgagatagcgntactgaattataccactaaagataaa

SEQ ID NO: 2747 - DNA, 217 bp, Oryza sativa
ctctgaagctgtcctcgtcggctcgcagtccttgtctgaaggacaaggctcggccgcgctaggaatcttctcgggctcgcatgacgtcgatgttccgttctccgccacggcgggaggatccttcgacatgggaccgtcccggtttataaccacggcgttctcggttccggttattgatgaacacacccagattggcaccgtggtgtaaaccgggaag

SEQ ID NO: 2748 - DNA, 432 bp, Oryza sativa
  unsure (1)..(432): unsure at all n locations
agcttggaccaactgaagagacttttctgaatttctangtcataaataatggtgggtactcaacatgacaagtaggacaaggccacaccaaaaaatctcttctatgtagctttaagtggcatctttaactttttgtgcagtctctaatatgttctattttaatcctcgtgttttctaaatttagatcaaagttcaaaattttacactaaacactctaaaatccaaaactaatataaaatcccttcattatttgatagtctatcccctttcccctccttactttccatactctaccccaacctctgctctccccccgactgtggcgacggctctccagcgttctcctaacggtgacattcgactcctctttgtgcgtctgctacaacttatcctggctttggctgcttcaatgggacacacaggactctgtca

SEQ ID NO: 2749 - DNA, 384 bp, Oryza sativa
  unsure (1)..(384): unsure at all n locations
tgcagtagctttccacctccgacgaaaccggagatccttcttcaaatacgaccaaacgtgggctttccatcatcccaaaatcaaaatacgaaaaagggtaaacgctaatagcatcaccccctctgaaactctgacgccattgcgatcacatgttaaacctgtacgtttggcatgccagcagctcatgcgccagaagcaattgagcttgccaaacattataccatcgctttgagtgcgtccggtaaagcacgcgcgcttccatgccagcgtacgtcggcgaactgatgcggtgcatgtaagatagcgtttcacgaccctcacctatgcagtcacatggttagttggtcacacgctgatgcgcgccanatccatacaccgtttttt

SEQ ID NO: 2750 - DNA, 439 bp, Oryza sativa
  unsure (1)..(439): unsure at all n locations
agctttgggttattaaattntaggacactgatttcttgctttccataattaggcagctaattaagctgatctccatactaatacatacgtggacacgggtcgcttttacagatgagaagtagatggatacgaaatgattaattaaccagatcagttacactttttgtagccatatggagacgaaatgagttggctgttaattaccatttgattataaattaatttgtctgtttgtttcggaagatatggcttgaattgaaagataaattaattaatgtgcggctaattaaattaagttcttaacttgcacgcttgatcgaccgcgtgctgtgcttttgctgctgtacacatgtcactgacagtagaattagacttgagaataatagtagcaataaattccaatgaaatgtgcattatattttgagtacattatatattg

SEQ ID NO: 2751 - DNA, 431 bp, Oryza sativa
  unsure (1)..(431): unsure at all n locations
gcttgttggtagaagaaaaaatgcttaagactagtaacagtatgtgtgctaattggtgatttcccttagagcggcagcaaggtgtgtaacacctcattttgcttttgcagtggcaagcatgttccaggaaacagatagcagcaaccctccaagggcttgaggtggatgagaatcagtggagccagaattggttagagaggtggatggctgcacgcccatgggagaacaagctgcttgatactaatgccaaagagagtgctccaactggtgatgataaccatgctgatgataatgaggccaatgctccgaacaaaccataaggaaaagtgttcatttctaccactcatccgaatggctcatacaagaagaacggtgcatatcataagaagtcgcattccgatataagtggctcttcatcanggcaatctgca

SEQ ID NO: 2752 - DNA, 466 bp, Oryza sativa
  unsure (1)..(466): unsure at all n locations
ttagagccacctgcngcatgcaagcttgattaactgaactacaaacaaaantcctttattctcttcttctctatactctntaaatcattaataacatcatctaataaaaaattcgtacccaaagtaatgacacaaagattatcaagagaagcagatatttgttcatttgtaaattgtaaaaaagaaatattattttgagacttacctttagcctgcatatacaccaagttcttttcagctttcagcttctcagctctttcaagaacaatctgatcgctatcacttgctcttctcttgctcttcctagaaggggaaattactgcttcaggaattgcagcaagttttgtccccagactttcctgagttctcagctnttcaaccactacaggttctcccttcaggccatcaaactcctcatcagaagcagtcaacccatcatattcaggtaacanactcaactgagcag

SEQ ID NO: 2753 - DNA, 395 bp, Oryza sativa
ggcctgcctgacaaaatacgttgcttactgtgcacatttctcccatttggggcatatgaactcagacattgatttatcttatgttcggtctttgacaatcttcggagaggcagaagactctgttttagaattctccagttatgaactactgagagtcttggatcttgaagaatgtgaatatttgaaagatgaacatctcatgaagatatgcaagctgttgctgctcatgtatctaagccttcggggcactgttacaatgctcccaaaggagatcacaaaactgagacttttggagacactcgatgtacgataaacatagataaatatttgcccatacaagtcatcaagctgccatgcttgacacatctatttggaaatttcaaacttcacgatgt

SEQ ID NO: 2754 - DNA, 358 bp, Oryza sativa
gcttataaaaatgcagcacattttagcttatacaaaatacttaaaagtatattcgatggtggattaatgaaactagtttggtgttgtagatgttatgctcttctataaacttggtcaaacttgaagaaattgacttaggacaaactcaaaacgtcttataatatgaaaaggagggaataaaaaactgaaggaactaaaatttaacatgatcatgtttatgtagatgatataacacttcaaaatgaagtggttaatttggttcattgaacaagtgaatgctggcatcaaggcctttaatattattgttaataataataacactcgatccaagtggagagacgttccgaaagcattgctt

SEQ ID NO: 2755 - DNA, 451 bp, Oryza sativa
actaagctaatcttcttcttgtcccaggttgcagcacctctcatatatcatggcatagaagcccttgaagtcgagccgcttcgacggatcatccttctctacatctctctttgattcttcaagcttctctccttctgctgaagtttcagcagcagcagcctcattgggagtttcagctgcagctccttctgtgtgcagctgctgctgcacagttgtgacaacggcctgaatctcttccacagcttgtactaccacacctgaatcttcatacttgctggcagaggcgccctcgtcggcccttttcgcagtctcaccttcctttgccttctcctcagattcatgttccttatctcttgatcatgtgtaaaattatgggaaaagatgtaagataaggtaatattcatgttgtggatgttcgactatacacaatgcaagtgcttctatagttcta

SEQ ID NO: 2756 - DNA, 435 bp, Oryza sativa
  unsure (1)..(435): unsure at all n locations
agcttgagccgatgctgttcaagatagactgctggagtaaagacatctgctagctcatctggnaatttgtcatggatttcgttgaatctatcctggatggatccgcaacttgtcaccagagtttccagggagccttcaagtctttttgacatatctaagagggttgacttgaggtcatcggctaaaggaactaaagcttggcttgtggtttcttcttcatgcaagaattgactaatatcaaaagagaacatatcacctagaacctgaaaggaaaaatacattgatgattgtaagattaggaaaggatgacagctgatatttctgaagttaaagaaaactacttacagggacagcaggagctggtgctattgcttattcttcttctatatgatggctttctgcggccgatggagtattntcacgtgattctgggac

SEQ ID NO: 2757 - DNA, 468 bp, Oryza sativa
cttcctgagatgcaagacgatccagtccgtcgtcggtgctgtcatcgtcgctatggcgtggacaaccatgacgttgctgagcagctgcagcgcgccgcgcagtcctcaatgacgtacgggcctctgccgctgctcgcctgctcctgcggtcgcgggtagtttgggtcacacgacggcgccatttccgattgcacgcgcgtacgcttggctgcgggcggagtcatgtgtcgtcaacttctacttctccccgccggtcgccgcatgtcgatgacgtcccggcgccactcccctttcgccggccgccacgcgctgaatatgaaaaatgaagaagtcatgctagagtcctctcagcataaatgcacgtcctctcagcgagatccatacagatattgcgtagataagcacgcataaagtattaatcatatttatcatctacaataatgagatactattataaaaaatttctat

SEQ ID NO: 2758 - DNA, 382 bp, Oryza sativa
  unsure (1)..(382): unsure at all n locations
agcttgtcatgtatcacctgttataagagatttatcatctggtcatatttgcctgagaaaccagtgaaacaagtgaatcaatagaaaagttaaaatctgtaagctcatcgaaagcacgccatagcatttgctgctaaaaaagaaaaaaagaacttacagaaaagagtattcagtaagcttccacttatccactagcaccttcagatgcatgctgtcaaaatgataagattgctccccatcagaatagattcagctctcacctggagatcagatcagctttagcacagtttccagctggtccacgaacaatctaaaggggcctgatgcagcaaggacggtggcatactggcatggcacgagttcatccacannaaactggtgt

SEQ ID NO: 2759 - DNA, 418 bp, Oryza sativa
  unsure (1)..(418): unsure at all n locations
agcttcatttcctcaagattcaatatgagactttctccatgtcgcctcattagagtgtgaatgacatgtatgggaggctcaatgtcattgtgaatgatcttaaggggcttggggcaaactacaccgattntgaggttgcccaaaagatgcttagggctctaccggagaagtatgagacccttgtcaccatgctcatcaactccgacatgtcaaggatgacacccgcaagcctcttgtggaagatcaacaccaatgacatgtacaagttgaagaaggagatggaggaagcctcaccttccaagaagtgcattgctctccaagccgaagttgaagacaagggcaagggcaaggtgaataaagccaatgaggactnggaggaagagattgccctttttgctanaaggttcaatgatcactt

SEQ ID NO: 2760 - DNA, 375 bp, Oryza sativa
taattcattaggatagaaataatagatatgttcttccaatattgtgaatatattgaatatgaacccaaaacgttgtgcatttattttattgtacacgttgcccttcagtagaacacatagctgctgacaaaaatcaagagctcatttatttgccactggattgtaggtacttgatgaaatgaggacgctgataacgaaggaatcaggccaagatagttcagagaataccttcttattggatgatgaaataaggtgaacaaaaacaatataactatgccaatatggcactggcgttctttcaggatgtgctgaacagaaacgctggcgtactgtattatttttattaatttgtgtggtgaacatgcccatatcact

SEQ ID NO: 2761 - DNA, 388 bp, Oryza sativa
  unsure (1)..(388): unsure at all n locations
agcttgccagcaaatcttctatttatcccatatttcctggatatccaacgnaagcaacgtgtcagaaaactcaaacatatgcatggtctaaaatattacttcaacatcggtattgttgagaagcatgtgcaaattcagtaaaacacggccaccaacatgatatacttgtcaattcaactaaggtttattttcgccatattctccagtcaaatggtcgaatgcctgctctaagcatgagtgttacactcatgcaactggtcaaagtgttcgcactagcactcaacgtacatatactctgtacgccacctgcacgacacggccaacacagtcatgtgcgcttatgctgaagatttgtacaaatgcatgtatagacgataaatgcagaaat

SEQ ID NO: 2762 - DNA, 429 bp, Oryza sativa
tctcgcccaacttctctataagcctctcgtagttgaaaaacttgggatatatcatgctggtctagaagagcaacacgctgttctcccaattctcaatcctatagcaatgtggcctcgttgttgtagcagatatagtacaattctttcattctgagtgaaacagcaaggatgaattttagctaatcaaacaatgataccatcttaagagacacgagttctttattaaaccaacaatagatgaaatatacaagttgatccaataatatatctttataattatataagaaaagaaatgtttgcatatataccctgtcatcaagaaatcttgagaactctataagactcgctctgatcttttcacccaatgggtctgctgaacgattgcttcacatttcttctcaatttgaggtaaatagatcgataatatca

SEQ ID NO: 2763 - DNA, 414 bp, Oryza sativa
agcttcagaaatgcaaatctgagcttgaggttttcgtagctgttgaatcaaaagcaacgtcagcttctgatgacttgatgttggccctccaacagttgtcttccgagtcaaaaaatgccctgcaggaagctgaagtaatgcaaaagagtgctgcagatttaaaggatgaagctgaagctgcacgagtagcattagcagaagctgaacaaaagttgcaatctgctttaaaagaagcagaagaggcaaaatcagctgaagcaaaggcccttgatcagatcaagcaactatcagaaagagcaagcgctgctcgggcctcaacatctgaatcaggtgcgaagataacaatatcaaaagaagagtttgaatctcttatccgaaaggtggaggagtcagagaaattgagtgagatgaaag

SEQ ID NO: 2764 - DNA, 498 bp, Oryza sativa
  unsure (1)..(498): unsure at all n locations
ntatatagctgtcccgctgacttttctatatataagtcattgtgctgtttgggattttaagcaattgattggatacaatatcattgcttttcgccacgtacgtgtgcatttttattgaccaatattatggcttaggctgattatatattgtggtcattttctatgcggctggtaaatcctttatgagtatatttactcggattttacaccacatatgccatatatttctatgtgtggtgaaaccatgtgtcttctatggacttaagcacatctgttataacactgtgcgcatggcgtatgccctatactttggaaatttctttattcacaatattcaagcttctctatagctattcgtgtatatcactcatcatatgtttacaagcaagttggatatcactcggatcatgttatttggaggattacaccgcatatgctattatttgatataatcacttgggtgataccatatcagaccacttgttggtggatattatt

SEQ ID NO: 2765 - DNA, 353 bp, Oryza sativa
agcttgcttctaatactgtcatctgtttctgttgtttcctttcgcagcgagctttgaaggtactgtaagttaacttatttgtgactcctttctctctccaggttgaatatgtatttacctgaatttcatgtattggtcatcaatggtgcgactaataagtgatatcacattaacagtacttgagtcagtgtttttgttctgcattcacatcattgtttttgatttgaatgatggcatgcaaataagtttgactgtaatttcacagagagcaagacaacaatgtcaattgttctgcattcacatcatttgttttgattgaatgatggcatgcaagtaggtttgactgtaatttc

SEQ ID NO: 2766 - DNA, 321 bp, Oryza sativa
tgactgtcctgagagggcttctcccgaacttgccgaccaattcttcgtggcgaatccctctggtgaatgcggcgatgataacgtcgtcggtgatgtcggagatcttgttacgttgttcggaatatcgtcggatgtaatctcgaagggattctccggacttctgaataacgttgtagaggtcgtattgtgtgccgggacgctcgaatgtgccttggaagttggcgatgaagtggtcgcgtaattcatcccaagatccaattgtaccacggggcaatccatggagccaagatcgggcggaatccgctaaagccactggtaaat

SEQ ID NO: 2767 - DNA, 425 bp, Oryza sativa
  unsure (1)..(425): unsure at all n locations
agcttcccctcgtcgccctctttcgtttgccttatctaccgagctctaccgtgcatcgtagcgccgccgtcgcgtgcactaagctcgccgccgtcgccggtcgtcttcggccgcgtcgcgccgccgcgttcgccgtcgccgacgcttgccgtcgccaccattaggtgcgccgtggagagagggacctcggacacccgttccccttcgccgccgaccaccggagtttcgtcgtcgtaggcaagccgagccgccgccgttgccctctcgtcgccggccgtcgacgtgcataggttgtcgtcgtggagagtaccgttgggttcgcctcgtcgtcctctacgtgtacatgttctgcatagtcgcagncgaccatgcaatctccagcgagctcgcaaaccctaaccgggcggcatggtgacataggatga

SEQ ID NO: 2768 - DNA, 371 bp, Oryza sativa
tgctgagagcagtttgttcaagatgccaactgcagatgcaaatattgctgccctgcacaatgaatgggacgatgcattgtgcccaatttgcatggatcatccccacaatgctgttcttctgctgtgcagttcccatgacaaaggatgcagatcctatatatgccatacaagctatagacattcgaattgcctatacaggttcaagagaatgaaagtagaccacaatgacggttcgtcacagcaaagtgcatcgttgcctatggacataagtaggcaaaatgtaccccagagatctcattttgatcccactggagatatccacacacgcatatctgaatcccatgaagatttcaatcatcgagatgctatcc

SEQ ID NO: 2769 - DNA, 430 bp, Oryza sativa
  unsure (1)..(430): unsure at all n locations
agcttnagtaaatgggnttcacttatttataatttatcgntcaatttttatcctttgactaaagggcttgtactgaatcacgtaattttaatgtgtaagttttgcaagaatctctccaacaccttaaatgatgttgtttggaaatcagatgatcttcaaagtcaacattcctagagtaacttgggagagtaggattgtgaactattagcataccattcttttgaatcaatattcctacttctagaggcgagaaaaggagaaagcatgtctattgcacttgtacatgtgaatgaccctgtaaattatgtttggtctccactcctgttgtatgtgttgctattatcttttagagaacctctctgaaagcttaagtgaagctgatcatgcaatgagttntatttgttagtaaagtttatgtgtanacagtatg

SEQ ID NO: 2770 - DNA, 338 bp, Oryza sativa
  unsure (1)..(338): unsure at all n locations
gcacctcgccgttgtctctgtcttcttcgctctgtgccgtcgctgcctccgggaatgtatcgtcaaggtgaagcccggccaccggttttcctccgctgaagatcgccgaaacggcgccgcgtcgctgaccagtacctcgccgcccttccaagctcgtcgccggccatctttcgttgccgtccgtcgtcgcgtaagtggtggtaaggaccgtcgcctcgcgctctttctcccggtgcccaccgtttgcatatatgtgccgtggttcgccggcaaccgccgctcccatgctcgtcaccggcgtaagttnttccctagggccttcaattaatctaatcttg

SEQ ID NO: 2771 - DNA, 410 bp, Oryza sativa
agcttcatattgaaatagagcagctcaatcgactaaactcaaagttgtgtaattaatttcattcaacaaaatcacacagcaccgggcaaatcagacagttacaaagtgattgataaaaataaaaactccgggccagctgatgttcatcagcaaatattttacaagaaaaaaaaaggttctggattattaagacaaggcttttagataaccacagatatattgtgctccagggttcgatctatcggaaagggaaaaattctgaaattccgatccgaaattgtgaatcctgttagagcctctatatatcaaaaccgcattatgtaacggccccagaatgggaaatcgatcaggtagccaagccatatcatgccagcgcctgatgcagatcaatacttgtagtccttgacgtg

SEQ ID NO: 2772 - DNA, 467 bp, Oryza sativa
  unsure (1)..(467): unsure at all n locations
actatcaatactaagcttgcccaatgaagccgatcngataacctttggnttatcgttttgaagaactggcacaacttgatgattgggtctcgaaccttttctagaaggatacccctgattgcgactggtagcagctgcgtcataagaacatggcagtcatgtgacttcattccaacacaacctctttctttcatgctaactagtctcttaatgttcgcacagtaaccggatgggactttgacaccccgcaggcattccaacatactcgttttttctgcagcactaagagtgtagcatgccggaggtaggtagtagcggccatctcctctgtcatgatgatgcagctctttcctgatgcccatgtcttcgagatctttccgtactctgcaaagggtctttgtcacgcccggaaatcactattaatctccgaactcatttgtcataaaatcctatccaggaatcaagcg

SEQ ID NO: 2773 - DNA, 462 bp, Oryza sativa
acctgcacgcatgcaagcttctgataaactgagattttcggctaacctatcactaactcttcgatatatttcttgctgaaagtatccctgatcccactgataacgagtaggcccaaacaattcaattggggtagttgctgacccataccacatagttccggcaactacgaaagctgcaaaaaaaacagcagcgatactactggaaagtacagtttcaatattgcccatacgtaatcctttgtatagacgttgaggtggacggacactaagatggaatatgcccgctaatatgcccaatgtacccgcagcaatatgatgagaagctattccccctggaacaaaaagatcaaaaccttttgcaccccacgcacgatttacagcttgtacttttccagttagtccataatgatcagacacccatatcccatgaccatacaaacccgttacatgaaatgcgccaac

SEQ ID NO: 2774 - DNA, 414 bp, Oryza sativa
actatgcaattggcaaccaagcttggtgtatcaagttctgtgtggacacattaccaaatcattcaggcggaagtatcatggctatggcattgttgcttgcgcaatctttggaggataaaattatcgagtgggaagtatatgttggcagcacaaactatgagaggagtaacacttgtttaacctaacaatacattcctggttggcctgaatattctgtaagagctgaattggtccaatttcaaagaggcaaggtgacaattacacaataccatttgcacctacaagctatagtggtatttgttcaaatattgctggagtttgacattcagataagatcttcaagagcatgtcatccaccattagctacagatcaccgatgcgagtattctgggatcctggtgtctccatgcatcg

SEQ ID NO: 2775 - DNA, 233 bp, Oryza sativa
agcttcacagtccacagtgcaagtaccaaatcttgtattaatagtttgtcctatcggcacacctgtttactttttttatctcccaatctctctcctctgtttattactactactatcgctctctcaacaagtagtactagtgctctttcccagcggcgtgggcggtgacgagcggtggcggccgtacggtctgccatctgaagatggcggctgcgataagcggtgtccctatg

SEQ ID NO: 2776 - DNA, 400 bp, Oryza sativa
  unsure (1)..(400): unsure at all n locations
agctnggactgaaaccatccggccctggcgcattgttagaattcattgcctgaagagcaagaagaatctcttcctgtgaaaacggtagaccctgagcagccagcaagtttgaatctctcccttcatctgagtaaaggtgttgtagatcgaactcccaagaaggctgcaaagatgatcccaggagccggctgtagaaggaaaacataagttgggactttccaaagtggtcggcaacttctattccatcgngttttattgtctttatacgagaattcctgaagttttttgtagcatgagctttgaagaaagctgtattatccagtcccagttttaaacgcttaacctttcctcttttgtttgagtatgccagcttgccttgcacctncaaaactaatctgtc

SEQ ID NO: 2777 - DNA, 220 bp, Oryza sativa
  unsure (1)..(220): unsure at all n locations
ggaccttagatactcaacttggcatgtcaatngatggagccgggctgttcatgccgattctccaacctagcacatagtgttttccactgactgttcctgttgaagatgagaagccaatatatgccgagtcagtgagcactggtgatagattgtaagtagtagatagcagtggcttcacaggtttttccacattgaggggggccatgggcacatcgatctg

SEQ ID NO: 2778 - DNA, 431 bp, Oryza sativa
  unsure (1)..(431): unsure at all n locations
agcttgaggacaaagttgatcgtttggagatagttctatccgcgtgaagggagaagcaccaccacaaaaggccagggttcgtcttaccacaaggaagagagctctatttgtccctcgctaccagttggcgcctaaggttcgtgtggtggaagaagaagaagttgtcccagtctcagcgaatccttcggtcgttaacgtaagtgatgatgatggagaagaatcgaagcgcacccattcaaaggtcgagtggggagctactcaagatgatgggggcaagccgaacgagccttcaatcaattccgatgcccggaagatctagaacgccttgttaagtcgttgccctagatcattgtgttagttggcttggttaagtttggntgcgtgtgtgggtcttgcattgtggttacatcattgttgggatgtaaatgcat

SEQ ID NO: 2779 - DNA, 401 bp, Oryza sativa
  unsure (1)..(401): unsure at all n locations
tatcaagtctactntcagatggatcaagcctcatgtccatatctgttctggagcggccgcaatcgtcgntgtagtcccaactgctttctgtccatggtgctgtgtcacctcctttggcccaatgggctgtgtatcaagttgggcccattatgggcgcatcctatggttggagcacgaccctgtgggtgttcttcccctcttctgatacctctagtcgctgccaagaacactcgggttttgatgatagagttagctacttgctaccggctcgcagcgcgcgtgttggctaaaccgcccatctgcttgtactcagaaccccaccatattgtgtttttgtgtgtgaaaaccttcatcgtcatctagcaattcagtgcttggtctacttggtcttgcttgttctt

SEQ ID NO: 2780 - DNA, 407 bp, Oryza sativa
agcttccagtctcttttggtttaaacccaaactattccctcattacgtcagcaatcacattggcccacagtcgttgctgagctaccccttgtgactattgctgcatgggctcgaactgaccgtattgaggcgcaaactgaggttgagccaatccccctggctgatattgggcttgcggggaaggaggctgatattgataattcaagttacccccttggtaattatgaaggttcggctggatattacgtaccaaatgctcaggaacaacttgaggtattactgtgccatctgactgtacatggtgaaccaagtgttctgggacaacttgatttaaaaattgttgtacaggctgaccaccaggcgttgcaaacccggccgatgcgcctaatgaaccttggtgctggatc

SEQ ID NO: 2781 - DNA, 404 bp, Oryza sativa
  unsure (1)..(404): unsure at all n locations
tgcactcctagcagcnatcctccatttgcttcatgctttgcagccccatccacctctgcgcggacttcttttggctgaagctatcttcttcatcttctccttcatatacacagctgtgatttcctcttcagatttgtatccgccacctctccatggtccttgctggaatccatttcattgggctgctctttagaatccttgattgatttgtcttctttgatttcttcttccttgaagtcttgctctctgaaggtacaggagcaccattcttatcaccaccattctgcttatctggctttcttttcagctgtaatttgggaaaaatcaaaatacttgctcgttattaaaatatatcatatgatcaaataaacaatagtaatgaatactccctccgttcctaatat

SEQ ID NO: 2782 - DNA, 443 bp, Oryza sativa
agcttaaaacacaacaactgtgcattaaccacattacacccaacgcagctgtagattaaccccccttaactacgatgtttctgcaggcttgaaaaccagcaaacctgcagagagcagagtagagacaagaggagaaggccgttcttagacggccatttaatcagatccaggaagggttccttctccttttttttttgtcaagatttaagaggccggccatctctctccctctccctcctcctcctgctctcatttggcgcctgccctgagctccaaacaccaactacctgtgtcgccccccatcacccctcccccctcttccgctctttaaaactgccacctccgttaacgccaccatagttgtgcacccaccatctcgtcttcgctccctcctctgctctgcactccatccatggcgaagcctcgcaagaactccaccacta

SEQ ID NO: 2783 - DNA, 299 bp, Oryza sativa
  unsure (1)..(299): unsure at all n locations
tgttgccttgcaagtacagcactacaggttgtttggtcgatcaagttcatcagaatcactgcatgtctctatttggaatattngcagccagagccaatacattgttgtggtcggggggtttgtttccgttaattttgatgaagatttaaattttgggtcagaatttcgaaactggtttctgaatttgaaaaaggaattgaaatggagtgtacgtacgttggggtgtatataatgtatttgaagacggggagcgactggaagaagccgtcggggaacacctctactgttgcaatggccat

SEQ ID NO: 2784 - DNA, 164 bp, Oryza sativa
  unsure (1)..(164): unsure at all n locations
agcttggagtgtgtgagagatgtgtaaangtgttttccttatatagggtaggtatgatggttaggaaaacgcgaaatgtccttttagcccttcaaccaccattaggaggagatctggactgtccacgccaaaacatggatccgacagtgcagctggtggttctt

SEQ ID NO: 2785 - DNA, 412 bp, Oryza sativa
  unsure (1)..(412): unsure at all n locations
ctgaacctttgctcgttccaagtgaatgacatattgaaacttagacttggttggtgatcacgagttgctactatgctgcatatctcacagatacaggtgcagggtatatgtaatctctctcagattaaataatctttgacacggtgacttacccttactcctgattaccacgagacactgcttctccttgccttgggcagttgaaagacagaacaacaattagagcaccaatcatccaatcttcattcaactcttattccagaagttttcaaatgatttgtgaaaagaaaaccaagttcctcaaatgattcactcggtctctcaagtgtatcaattgaattctcaccagtttttcttcttattctactctacagcttgattgggagcttggagggatcnacatggcatactg

SEQ ID NO: 2786 - DNA, 418 bp, Oryza sativa
  unsure (1)..(418): unsure at all n locations
agcttgtggtattaaaaagaagcgatcggccttagtccgcaggaattcctttctttctgttatggatcttgagaagaatacttcacaagaatcaacaagattgccgcggtcatgcatggaagccctgtacgagagttcctacataaaatntatgaccaagaaacgttcacagaaggcacggctcaactctcccaattccattcaaccaaatatagatcagaaaaacaggttttcatctgaaaccattttttctggtgggttcaatggattgaaaagatcagaggaaactttccagaaaactttacctcagattccagatgataagaggatcaaccttgacattcattgcgaagtaccagtagaaaactcaccaaatacatcaacgccaccatatatgggattaccttaanggagtaca

SEQ ID NO: 2787 - DNA, 362 bp, Oryza sativa
  unsure (1)..(362): unsure at all n locations
tcactaaatntatattataacatactcggtaattggagtttgtatcaagatataaaccccaatatctgttatccctagctaaactattcaataagccaatcctagaacttcataaggccacaggagcattatatttctttcactatttttctagagatnttggagaactacagcttattatatgtcacaaaacaattatcattatgcgataacattaataactaacattngctactcatcacgtgaccctacctactctagccattagattgagaccagtgaaagagagtctccttccacctctagccagctaagagataattgatgtggcacaacaagcgtacggagtacttatcaattat

SEQ ID NO: 2788 - DNA, 355 bp, Oryza sativa
agctttccattccgtagttagcaatgaccggttctacaccggcatcgacaaacagacccgcagccgcagaaagcacaaaatacccatgcaccacccgctcaccgaaaatagattcggcagcagcaatcttatccatatgtgcatagaaatgatcgccgctgaggcaagcaaagttaacaatatcggcctctgtcattgtgcggcggagagtcaacaggctgtcgcctggttgtagctcctcaaaatatttgcggaacggatgaatacgatcttcttcgactttcgcaccgcgcacccactgtttactgatagcggcaagcatcgtcggactaccctgaacaagcggtcgctgcat

SEQ ID NO: 2789 - DNA, 344 bp, Oryza sativa
  unsure (1)..(344): unsure at all n locations
aaaactcagcttgatgggtatcattgtttggtactcgcttgtngatatgctcaaacacgctccagaatcatggcgatgccctgaccgacaccgatgcacatggtgcacaatgcgtaacgaccgttactccgatgcagctcatggctggcagtcagtgccaggcgggcaccactcattcccaacggatggcctaaggcgatagcgcctccgttggggttaacatgtggggcatcatcaggcagccccaattcgcgtagtacacccaacgcctgagccgcgaacgcttcgttcagttcaatcacgtccatatcgtgaatactcagccctgcgcgttccagcacccg

SEQ ID NO: 2790 - DNA, 341 bp, Oryza sativa
  unsure (1)..(341): unsure at all n locations
agcttctgatacactccatctcctctttcttgtttatcaaaancgagcttctctttctgcttatatcagaatcgaagcaattctcgatctttaaggctattgatacactcgacctcctcttttgattattatcaaaatcggagagaatccgattctcgatctctatggcgatctataaggcttttgatatactcgaacttctctttctgtttttatcaaaatcggagcaaatcataggaaaaatgaggaggggtagtggggaatcaatgaacgcatggtttggtccggcggcaaaaaaaaacatggcacataaaaaaacaaacaccgtgtacccatatcct

SEQ ID NO: 2791 - DNA, 462 bp, Oryza sativa
ccggaccttaagtcgacgcagctgcagctagatgtccaaatctgagactttggatatactattgtaaaagatgttggcggcttgcatcaccatgtcgatggtacgacttgttgatagtgcatgtaccttagaccttcagctgattcaattgcgatgtctaggcgtaagcccaacgggagagggatgttggcatcaccatggagaatgtcttgcagattccccttagcggcaaactcatacaccaacattggaacattcacttccaagcaacaacccaaaagcttgataatgttattatgcatcatttgcgattggatgatcacttcatttgtgaaatcatcctttcgagcttcatttacttcgattgacgtcttcactgcgaccggagtattgtcttcaagagtccctttgtacaccttaccaaagctttcttgaccaagaacttctgaattattctttgtg

SEQ ID NO: 2792 - DNA, 369 bp, Oryza sativa
atgatgccccgcgcgacatcagtagtggcaggaccatcattttctttatctatggctgtccgctcgcaaccagctctggacatatgtaaaccgaagatcagaatctactgccgccattacattcggagtgcatgggacttctaccaccaaaagagattccatatctacgaacagaggttcttacatgtgtccatcaatagctccatactcatcctaatttgtggtctacaacatgtaaatctagggcgatatatcttgctgacataatatgaatgagactgggtgatgtcacccttaaggaggatctctcacgaatcgtgtgatttattggaggttcatgagggggctggcatgtatctttgctaccaa

SEQ ID NO: 2793 - DNA, 460 bp, Oryza sativa
  unsure (1)..(460): unsure at all n locations
agcttctgtcgtagtcgtgtgacctggtttgcttgtcttgcataccaaccactggttgtctctgctgcttagaggctattgttgtgttgagtacgttgttgcaaatattcgctggaatatatactcctaggtagtatgcatgcttcatctccatcagcaggagattctcatctgcaaatgcaaaagtagttctttcggcaaaaaatatagtgcctcaggtatccactcagaatagcaagtgcttgtcgttctcttgctagaaatgtgcactctgaggtcacatactcacattatgtactctntataaagcctgaacttttcgcanatnttcttcatgtgaaatagttgcaaatacacaaaatttagcacaaccttagttacatctcagctgcaatatataaaatttacagcaaactactactactggcggttagatggtatttttccttggatttgatga

SEQ ID NO: 2794 - DNA, 342 bp, Oryza sativa
  unsure (1)..(342): unsure at all n locations
aaaaaagaccgaaccgaaaaccgaaccgtataactgagaccgaataattcggcacaaattcggtcatcaggtgtaactaaccgaattttacacggtcttttcggtcatctcgttcagttaaccgaaataacccgaatgaccgaatcactatgaaagcccaatacagcccaatagcccattagctacagaaaaccttaacattccatcccgtgcgcaccttcttgccactctgcccggtacctccacaaccccacttgcgcgtagtgctgcctcttcctcgcgtgtctcctcctactctccgcctcttcgatctctgctttntcctactcgcaccacgccggt

SEQ ID NO: 2795 - DNA, 418 bp, Oryza sativa
  unsure (1)..(418): unsure at all n locations
agctntgccgtctctacttttctcgcgtgcctacatgcattcataagatactgctgctggctgtgtaccctctcctcccccaagctaccttgtctttcgcccatcaccaccccacagcccagccacccaattaacctgcaggactgtactctgtgcatcatatatgttttggagtagcttcctctccctgcatgcagccattgcaactntgcaagccatgccaattcttggatcatatcatactccttccaaaaaaaataacgaatccggagggagtattatctaagctatatcctggtgcttggacaatatggctcggtttagagcatgtttatcggggctctaacccttaaatctaaccttaagagtagagtctgaagtatggtcgaagctagagcaagccgacactactacttta

SEQ ID NO: 2796 - DNA, 416 bp, Oryza sativa
  unsure (1)..(416): unsure at all n locations
tgccgcatttggactctcctcagtattttggaatcggaagaatatagttgaatgttagattggttttgaagtcaatatgaacttaatgtcaaagatgtcggtaaggcaaacttttcacatatgtatctatttaaaaaaaatacgcaaggttttcgataaatttacatatgataaatatgtgtacgtcgtcgtgcctcgtgcatcagattctattgttggtcgtcgaccaaagcacaaagtctattttcttgcgatcgtccgcgtgctgatcgccaaatcaattttttntgcgtttatcaaagcacttgttcaaataagcggcgccctctgttcccgcatggacgattaattaataaggtcgttgtgacggctctcataatatgtctttcattatagatcacatccaacctatcccg

SEQ ID NO: 2797 - DNA, 311 bp, Oryza sativa
atgcttttctatggatcaatttgtacaaacgattctagtatagatagttactttcgaagtgcacttgacttgaaaatacagtactaatgtgaacagcgctataagctgctgattggtttatgttcaagagtgctaacttcaccctggtagtttgcaattactggttgttatcaacagcgagaaacagattactttttggctagtagaaacattagtagtgagccaatgttcccctgataaaatagttggtttatacaatacccatacaattgtagatattaagtagaaacaaacattatatactttgatac

SEQ ID NO: 2798 - DNA, 392 bp, Oryza sativa
agcttctcaaatgctatcatggttagctactcacaccttctacaagtagtgccatacaacgccttcaatcctcctccactggtatgtatcaaacataccagcctctctcaaaagcttgcctttatcttctgcaaggttgactaaaaacttggaatatcatacataggaatttgccttgatgaagactgatcctccgattgctcaacgccgctcaccttgccgacaggctggtcaagctagtggagggccaaaaatccggtccgatgctcaaccaaacacttcgaagtcgactacccagtcagactcttgtaagagagaagtggttttgagtgacgacgaaggtgacgacgccggataaacttgcagcaaaggggtgactgggaaacagccga

SEQ ID NO: 2799 - DNA, 383 bp, Oryza sativa
  unsure (1)..(383): unsure at all n locations
agctngtcggtaagtaatgagttaaatttggttccatgtaaaaaatatgatttctagttgcaatcttcttcttgaatggtccaaactattcattgcaccaacgtttttttctaaaattaatgttgtgctcgtcaggtcaacaatattctcccaatgagaattttaccttccaactcaagtcaccggtaaagcttcatgatggcaagaactatatttctcttctgagcgggacagttggtctaagggttaatattctcttttcttactaagctcatcagacaattcgagcaataccctcatctctttctttgcaaccgtgtgtgatgaaaatatatttatttcattcttgtcaaacagaactatggnggctcatttgagctgct

SEQ ID NO: 2800 - DNA, 426 bp, Oryza sativa
  unsure (1)..(426): unsure at all n locations
nncggtngtttgtctttgtganngactcaatgggcttcatctcgattgtccctgcaagatggttcacacttgacctcttcgcagctgtgtatgtcacaaaatggaaacatcctatttttccatcaaagatgcagtttccatttgagtcaaaccttggtctggcgagagctgttaagatcattattttcgggatgaagtttttgttctgaattatcctgatgcgtcgcgaggcagatggagctgcgtaatattgcaccgtcttccttgtaatgttgaaccacttctcatatatgaaaatgtaatcaaatagtggtttgaagacaggattgtgaggcacactccttgtgtcaagcatttcaatacaccactntagccggtcaaatttgttntgatctgtcaagtggggatcaaatgagctagatacat

SEQ ID NO: 2801 - DNA, 422 bp, Oryza sativa
agcttctctggtccttcacgaaccggagctataagtgctgaaatccaaaatgctaaaataggaataaggcttgctattattagaaatgcccaaaaaatatcatattcgtgaagcagaaacataaatgtactcccattaatgtggaataggcggaactgaattagtcaattcaagtcagcattgtcaatttatacagaatttctctcttttcctcggtgaaacaaggatcggtttttctcaaaccaaagggcttagtttagcctttgtttcctctttgccacgtcttctttaaagattcatccaatggaatcccgaccccctttctttttgatttcctttctatttaagtatggcggagacataattcttatagaaacaaaactctctcgcttcactttgtctcaatttctctagaatctcta

SEQ ID NO: 2802 - DNA, 418 bp, Oryza sativa
  unsure (1)..(418): unsure at all n locations
atgcatggcgaatatgagccttggaatggtcttaactgaatattcagaccaaaaaaaaaaagaaggaaaagattccattaagacagttatgagtttgattgagtttcccctacttgaccaaacaagttccaattccgctatttcaactacactaaaagatctttcgaattggtcaagactctctagtttatggccccttctatatggtaccagttggtgtttcattgagattgcttcattaataggctcacgattcgactttgatcgttatggattggtaccaagatcaagtcctaggcaagcggacctaattttaacagcccggacacgaacaatgaaaatggctccctctntagtgagattatatgagcaaatgcctgaaccaaaatacgtcattgctatgggagcttgtactata

SEQ ID NO: 2803 - DNA, 478 bp, Oryza sativa
  unsure (1)..(478): unsure at all n locations
taagcttcatacatttcttttcaaataagtatgggttggtctatgccatcaaatttctacgtgagatctatctgtgttngattattatacacaatcgcgagggtggctataaaagttattcatacttcattcctccaatgttgttcttttcatattacatattggagctatgttttgcacacttctttgtctccaaaattttgctgtttgttgatgagagagaaaatatgtgtggagataaaagaatatatagaaatttagtttatttggtaaagaaggttttataaaaaagtcgacaaggaatacttactgaaagttaatctttgatcatagaaaacaaagttaaatgaaaaatttatataagtcaacacattaatattaggttataacttataatcgtaaatatattatttctcgggtacatttcataatatttgcgtgaataatgattgacattattggtagactctcgaacaat

SEQ ID NO: 2804 - DNA, 451 bp, Oryza sativa
  unsure (1)..(451): unsure at all n locations
tctttctttggaaagaatgccagtcttcatctccaccaaggatgacaaaatagtggaggagtatacgactataccttgttccttcagtcatatatctcatccacaacaatgtgcagtttgccaccttgacctatgttgatccatctacctatcagataatgggaaaccttaaanatgtcacaactggaattctgtttaggtgactctcttgtaccttaatgtcaaatatttccactgttattcttcctgatattattggcatgatagaatatatattaaatatccttgtgtactctgcttcattngataaaattcaaacttcaagtgcattctgaacttgaaagcagtcaaagacttatctcaaataacatacacgatagaaattnttagctttgcttcaaatattaagcagcttacccataatgccaaatgtcattagcatatattatct

SEQ ID NO: 2805 - DNA, 438 bp, Oryza sativa
agctatgggcacccaattgacattctttataccaccgagtataggagaacccacatatctagcaacaatgctaccatcatgagccttcctaagcatataatgagaatcatacatgcatgtcttatgaggcttaccaccggggcaatcattcaccaaatgcccaacctcatgacacttgaagcaatacttaccattgctcttgacaaaacgagtggcacggtgagaaggcttcttacccttctttggaatgaatccaaggccctccttgttaaggatgcaccgttgctcactcaaaatcttgtcaagagtgttcttacccttgagcacctctcaaactcttgttgagctagccacctgcccttaagctattgttctaacaaggaggcatccaaatgaaacacaaggctagactagagctggcatatcacaagacatcac

SEQ ID NO: 2806 - DNA, 458 bp, Oryza sativa
  unsure (1)..(458): unsure at all n locations
agcttgcaatttaaatctaaataaatgcttagtcagctcgtgtgcgggaatacaggttgttcacgttttagtacgaatttgactagttntcttattattattgaaaaaatgttctaattattggcttttgttttttttcctggaaatacagtattggcaagtggatactaatttttaatgtgaaattagttggattcagttcgtcaagagagttatatatgacgaagaggacagataatcacttaatcagatgtgatgcaaattgtacttcaaaaatgcaatttcagtcaactctatggaacaattaaataaacataacatccccgcaaaaaaaaaaaaacaaagagaaggaaacagcgttgaaataagagaagataataaaatggaggatggatacagtgctggaaagaaaatatttggagatgttntttttcctactacnttatacagnatcctac

SEQ ID NO: 2807 - DNA, 393 bp, Oryza sativa
  unsure (1)..(393): unsure at all n locations
gggagcttgctanggttttgggcgtagaactcgaactctatctcgctctcgctctcntccctcttccgtgtcccgtgtcttcccgtggtcgcgtcgcggaataatgcgtggggttctcgttggaatatcggtgtgcttggccgtgacgcggctggtggtcgtctcctgtgtatttgtagattcgagaaaattggtatggagcacccgcacgatgagatgggacccttnccaactcatgagttttcttttctttntttttactgcctctatattatgcggaggaatgctacgtagtggtatccattaagattaaatgatacctcttaaatatcacctgataccttaatatcagccaatacataccanatatcagacaataccttagaggtatca

SEQ ID NO: 2808 - DNA, 452 bp, Oryza sativa
  unsure (1)..(452): unsure at all n locations
agctgtcattggctcttttntataggatttgatgagttctttcattggctggtgtttgattcttactgcattctaaatttctgactctctgcaagctgaataaaaacaaatgtgcatttgggaatcgaatcacaatatcacattgtgcaccatcttcattgatggcagatagtttaggattgccaaaatcttctaacaggattaatgaaaagaggggaattaaactccttttttggatccatctatggaatgtgactacatcgcactaaccaacttcactacattcatggcagttctgttttcattggtgtctcaactcctcttaccaagtttgttggaaattcagtgggaaaaaaacttcattttggaacatacatcatcttttggttagntntatttactttcgttactataagaagctactcaacactgacttgctctcgtattcttct

SEQ ID NO: 2809 - DNA, 404 bp, Oryza sativa
atgataatttgcctcgtttgttagccaccattgcccagaggaataataatacgtactatgacctacatacatttacatcggttgatgatcgaacaaagagtgtgctgcaaagagcctttttctcattgggtgcttgcatcaatgcttttgtgcattgtcgacctgctctatgcatagatggaacttttatgacaggtaaataccgaggtcagatattgacagccaatgggtgtgatgggaacaacccaggtctacctatggcttttgcatttgtagagagtgagaacactgaaagctggtactggttcctacagagagtgcacattgcagtggtgtgtatgaagcccaacgtttgccttatacatgatcgtcctgcgggtatgttgcgggctattgactacttg

SEQ ID NO: 2810 - DNA, 455 bp, Oryza sativa
  unsure (1)..(455): unsure at all n locations
agcttcaacaaatatatccnctaggtatatatgccatcaaacgtactccctccatcccaaaatataagcatttttagttatgaatctggccaaaatataagcatttttagctaatccagattcattgctaaaagttgttacattttgagacaagttaattaaagaaattaagtggtaatagtaattgatgcagctactttccttaagaaaaaagtaaaagccgtaacttccttcgaaatctattttttcatcctaagttacaaaaccagttctctctcgctttcaacttttaagaaacaaaagcacatgacaccatataacatatttcaacgttgatcaacgttaacgtggtttgatcaaggttccagtgtgtttcaccttcaaacttttaaaacctactaacatttactataccctgaaacatatttcaatatgctttctattgatatggaagt

SEQ ID NO: 2811 - DNA, 449 bp, Oryza sativa
ttaggacttataaaactcagcttctagagcctacacgaattctcttgaagactcgaggactaagaatactattctaattcctactccactatcactagaatactactaaacttgagaaagagctcttgatcttcttcttgagtgtgtgcttggaatgaaggaagtgagggggtattaatagctaggtggaggagctttggtagggtgaagatcttccatggcatccaaagagcatcttcatcctctcctggacaaatgtcctcctgaggtcagtagttgcgctagaaatggtcgtaacgacctcaggtagttatcaactgccagctcatgaagttctatgccgattgggccaactggtggttcggccgaacccaactcggcaggtgtactcctcattgatttctcagtccagtgatgtggtggtttgggcccatttgatattattcact

SEQ ID NO: 2812 - DNA, 442 bp, Oryza sativa
agcttagcgattagctccctcaggataactgtgcagcttgtggccagatgctcaaacccatccgtcgcctccactgccttgagattcccgggtgagtagaggaaatccatgcacgccttcttcaagctcgggcagcggtgctgctcagccagcgccagcgtggtcgcggcggagctcacgtctatccgcttgcacagcttgtcctcgcagatcagcttcagcctctccaggttgtacctgtccgccgcgacgagcagatgctgcgccatggatgaggtctcctgtgtcagcaaaacggaatgatcaaactctgaaatcgctcacactcgctcactctgaagattgccggacaacgacagtaaccctgagaaagttcaggaaacggtcaaaaactgaagaacagagtagaaatttttgacagcgcaacttccgctgcttttcg

SEQ ID NO: 2813 - DNA, 404 bp, Oryza sativa
cgactctatggtaggctgtactgttaagctggcagggacacctgactgtaccacggtcagcctcaacttctccaattctctgcacaggcgatcttggtcaggccgtatttgagctacattgcaatagaccttgcgacttagcgcatcagcgaccacattagctttactggggtggtaatgaattccaagatcgtaatccttgattagttccaaccatcttctctgcctcatatttaactccgtctgtgtgaagatatacttaagacttttgtgattggtgtatacttcgcatctgttcctgattaaatagtgcctccagatcttaagagcatggaccacggctaccaactcgagatcatgggtgggataattgactttacgaggcctgagctgcctggatgcat

SEQ ID NO: 2814 - DNA, 400 bp, Oryza sativa
  unsure (1)..(400): unsure at all n locations
aaaagaagaatctacttcaaccgatatgcccttatgcacggccatacataacatagaaatcacacgtggaaggggtgggcaattagctagagcagcatgtgctgtagcgaaactgattgcaaaagaaggtaaatcggccactttaagattaccatctggggaggtccgtttggtatcccaaaactgcttatcaacagtcggacaagtgggtaatgttggggtgaaccaaaaaagtttgggtagagccgggtctaagtgttggctaagtaaacgccccgtaataagaggggtagttatgaaccctgtggaccaccctcatgggggcggtgaaaggaaagcccncattggtagaaaaaaacccacaacccctttgaggtatcctgcgcttggaagaagaact

SEQ ID NO: 2815 - DNA, 409 bp, Oryza sativa
  unsure (1)..(409): unsure at all n locations
agcttggctgagctagaggatgataaacttatgtctcgngcgcgagcaccgctgttgctgaagacctttgagggtcttatatatataacactggggcttctatggctgtggaaggatatccacatagaccgcctttttttacttttacctctattaacgttgtggctccagatgacacaacgatttctcactgagttctgattacatatcgtagatggctcacacgcaggctttataatgtcaaggctgaagtgcgcacttcggaggttcgatctaacagcactattgatcctcttgattgggctgccgactctgatcttagtatataccttcatggccagaaagtcactattttctcagacaatctgggataagcccccagagcccttcatagacttcctgactacta

SEQ ID NO: 2816 - DNA, 392 bp, Oryza sativa
  unsure (1)..(392): unsure at all n locations
tagcgtgactttcacaaaggaaggccatgccattcaagactgtgactgtctttcccttatgtcctgtcaaacgcattctgttaccccataatggcgcaatttgtccaaagtagactctgatttgagagggaatgcatctatttttcagcggatcatacggctctctggttcagaggacatggtggcgaatgatccacggtggggcgaagcngattattgccccatgactggtctcttcatgacactaatacatgtgaaggagacgacttcgatgacttattaacagcagactttagtgagctcctgtgaatgttgggatgcacatctgacgaaaagagaaatgataatcccttcatgggatgctctgacagtccaaggtaggtgggtatcag

SEQ ID NO: 2817 - DNA, 413 bp, Oryza sativa
  unsure (1)..(413): unsure at all n locations
agcttcatgcccggtaaacaagcgttgaatgctttcacttanggtattaatagccccaagtaccgggttgaagtactcgttgggttgcattccaaaataggcatactgagggtgaaagaaggcatttggatcatacccatgaggaggaggaggtgctgagcttgagctagctccaggatgagaggagggcgccaccctaggagcacagggagctccaagctgaaggcggggcttgtactgcttgtgcttcttcaaattctgcctagcagccccaagcttgtcttgaatcaacctcatgatgtaaggggcataatagattccctgagtgaaggtccccttggagatggcaatctcttgcagcatgagagtcacaatgtcgaactgtcggccctgaatgattgcatcgatgacgt

SEQ ID NO: 2818 - DNA, 452 bp, Oryza sativa
  unsure (1)..(452): unsure at all n locations
tgtcnggacagtgacgntgntgaaagtgaggtctaatggcttgaagccttgtataaactgtgagaaggccatggngaagggaggtacgacttgggttgcgaccatgtcgtcttgcctgaccgggacgatggacggcgaaggcaacccacgggcaagctcgccgacggcttgtatgaactgtgctatgccgacaccgtcagccaggccatggctccatgtcaccccgacgacgaagcctccacaggatagcgtggtcacctgcacccacagcagaagaggagggccgtcgtcgccgacgtctggcgtgcagttgaaagcgagctgctgcaccaccgccgtctcgtcgtcagtaggttgtgtgtcggcgacacgcatgagctcctccatggtgcagtctgcggacgcggccacgaacatgactccgagctcgcttgtgcagtcgatgtagaaaa

SEQ ID NO: 2819 - DNA, 378 bp, Oryza sativa
  unsure (1)..(378): unsure at all n locations
agcttncagtcttcaacaatattgtgctagttctgaataaaaggatgcatagtaactttattgtttaaaccaggctgtggacacgaaatttcggaatcgagtaaagagatatgtgggcctatggtgctgtgtgcagctccgtgaaatagggcacatatattatgacatgtactgggatgagaaaccaggctggaagccccttcctccacagaccaaggtggaggaccatccaccttggttggaggtacaggaatgaggctaactacaatcacggatgttattctttgattcaaagcaagatagattcttactacagattaacttctatatcataagcagcactacctgttgaaatccattgattcttttgactgttac

SEQ ID NO: 2820 - DNA, 337 bp, Oryza sativa
  unsure (1)..(337): unsure at all n locations
tgattcgaagtgggaaggaccgcaccttatctatcacaaatacaagacgggatcctttcaactggcgacaccggaaggcgaagagttcgaccattcctggaatgctacctctcaagcgtttctatgtctagaacgggtgacacccaaatcgccgacttgtaaaaatgtatatattggtatgtaagcccttctgcaactatgtaagcctttctgccagaaaaaaaagaagaaaaaaaagaggaagatgaaaaaagacaanacactggatgtagggctattatccaccacggacgcccgaaccagtataaaatactttgtgtgctctggcttcttttta

SEQ ID NO: 2821 - DNA, 462 bp, Oryza sativa
  unsure (1)..(462): unsure at all n locations
atcctcagagccacctgctgcatgcagctataggtcggcccatattattgaacttactgactgaaacatagtggatcatgaatttcaaatgttgngtatgtgtacgatgtcggatcaaatcattagatgtgtccaaagcgcttttcttttcttattaatgtctaatctcagcttctatcaaatgctgttaagttcacatggatttacactgttcagagtcctaaagcgagggggaaggttcctatgcttggaattgagtcatgtggatgttccgctctttaaagagatgtaagtttctttagccaagtatatgtttctttcctacctaatttagaaacacaggtaggatagtttcatataaggtattttccaagtgtcttcttacacatggtgtaaattacagagaacatacagagttaatccattgtgaacaataacattntagctttataactggaatca

SEQ ID NO: 2822 - DNA, 455 bp, Oryza sativa
  unsure (1)..(455): unsure at all n locations
nttaccccttntcaaatatattattcacccactgaataatgcactttcatatttagngctccatgctattttgacttttgacctgtttctttctgcaggggacgtctcaaagcacaaagttgagagtgcagtaagtatatataaatacactcacatttccatagctttgcatccgctattccattttctctctatctgctgttccatcaaagacagtttcttcagaaatgaagttactgtttccccacctaatactgctatactcctgctgatcttgcgctcctgaatttatatgtatgcagctcaagaaaanttgcaggaaggcgcatattgnggtataattaaataatcaactcatctgcatatataatctcctacttcctccgtttcacaatgtaagactntntagcatngnccatattcatttagatgctaatgaatctagacatatgtat

SEQ ID NO: 2823 - DNA, 360 bp, Oryza sativa
tagcttgaaggccgcccccttgattagtataagattcctgcgacggcagcggcagcatacaaaacagggggatggattgcacggtcggggttagcggtaggagacgaggtgagcagccgatgaggaatcgagggcagaaatggcggtggtgctggtggtcgcagcgccgggcggagatccggggggcggaattcgcagcccgcacgtcgcagcgcagaggcctagcagcatacgaagcgccccgccgcggtgcggtgcggcgcggcatggtcaaaccctatgtggaggaggaggaggacgacgacgacgaggtatacctctacctactctagcgcatggcgggccggtgccgtggattgc

SEQ ID NO: 2824 - DNA, 484 bp, Oryza sativa
  unsure (1)..(484): unsure at all n locations
gtgatccttaagtcacctgangcatgcaagcttcatggagatgtaaccaggcatgcttattctaactctaccaagatgacaggaggcggctgcagtatttgggcaataaaaatggcagtttcaagtttcaaccatgttctgcaactgagggctttggtggtgttttcttttcctttaagtatctttaaaagggatacaagtagtaaccaccagttaatgaaatcccagcaattatgtcaaaaaaaattgaaatcccagcaaaactaggctcttttggctctagttcctaccgggcatgctcccgtagaaaacaacattacgtcaaacttgggggcaaagcactcattcattttcaatatcgatcgtttaaattaattgttcgtcacacatacaccatcttgttcaagaatgatggctcacattgtccgtaatccctgcttaactacatattgactccctcattttatactcaacaatacacacc

SEQ ID NO: 2825 - DNA, 420 bp, Oryza sativa
  unsure (1)..(420): unsure at all n locations
caagcttttgggactcaagtgttaactggttagttgttactaaactgtgctaataagatgaaactgactgtcaaccttgtttatcatactttgaagaacctgactgcatattgatggagaaaacctggtggatttctttcaccactggattatctccttcactgtttttctccctggttggcagtgcaccttatttctgttttttccttttaatttgcttctcagattgaatgcccttgtatttatcatgctatctagagtttcacatgtctcatgtctgagtccacctaccttcttaattntactgcaacctctatttttattttcagtgtttactggatcggngaactatgatatcatttctgctgccaatacatatgcacaggtttgtacatgtcagcattctctcattaatttcac

SEQ ID NO: 2826 - DNA, 452 bp, Oryza sativa
ttgatgcaacttaataaaagctttcttctatgtaaaagacagattttatgcaactcatgttacattttactgtagtctgaatcaatatatctgaaatcttgaacagaacatactccctcatttcaattgtccaccagatgctactcatactcgaaatgcttggcatgctggcaaacaaattatgttttattaagttagtaactgttgaagtattcttgttgacattatacaatttaggagcatggaagtttgcaatgatcaatgtgccattactcgggtgctgcccatatttgagaagtcagaacccgaccggagagtgcttcgaaccgctaaaccagttggccaagagactgaacggcgaaatccgggacctgttccgtgacctcagctccgaaatgcagggaatgaagtactccattgacagctcctatgaacttattttcagcctaatt

SEQ ID NO: 2827 - DNA, 462 bp, Oryza sativa
agcttgagccctcgacttctagctctcgctgcctgcagtattggtaagccctatgggcttacagcccacgtgtcggcccaactcatggctgctggtgcccgtgggcttcatgctgcatcgagttcaaaagaaagggggaaaaaaaggaaaggaaatcgtaacactgccctaagcacgcctactttcaatgaaatctaatccctccgccctataatataaggaattatgagtttttgcttgtatcgtttgatcactcgccttatataattattttataaatataaaaaataaaaagctatgcttaaagtactgtttataataaaaaataaataataatcttaaaaacattcaaataagacgagtggtcaaatgttgcaagtaaaaactcaaaatcctctatattatgggacggacggagtagttatctaccaatcaaatcaaatgtattctcatactactatc

SEQ ID NO: 2828 - DNA, 461 bp, Oryza sativa
  unsure (1)..(461): unsure at all n locations
agcttgtctgcagaaatgaaaggtattgttggatgtgcagaaattgaggatattattggatacagcaaattgtacctattaaaatataacagatataataacttcatgcttaattgcttaccctttccaacaatagcctcaagagactcaagggtagtgagagatgcagcgagatcatcagcccagatgttgcgtccatccacaacaccggcaaagaggtactttccagaggggaaaccagcactcttgataaggtcaagagtcttggctccacggataaggtcaaaaccataagcagtcacgctgttcaaggatgtgagggtcctgcagtgaaaaggcagtatcagtgttctgccactaaaaagaaaaagcatgctaaaggaaaggcgggtttggtaatgatacgatagtacagganataaacatacttgtatgattcagcaggaatgtcagcgaagtat

SEQ ID NO: 2829 - DNA, 496 bp, Oryza sativa
  unsure (1)..(496): unsure at all n locations
actcagcttactaccgtntccctttcggaaacccgaaggtaggtacaagcaagctgttcttaccttacacagcgttataacacaactccttgcttcaatatactatgcaaggtaggctaaagtcactactactaagaacggtggaatggagggtgagagcgcgcttggaagctttgctctgaatggtgtcttcgttgttgtcttcctcagctgggcaggcccctccttttatagaggtcaggggtggcgtcgcctgtgcctcctgcttatctcttcgctactgtggattcacgagagcaagctaaagttgaggcctttcctgccgaaagttntattcttcacagggatatgtcattcaccgcaccctatatngntcctttatgcttatagggtgtccttctggattccttcttctggattccttcttgagtagtcttctgaaatcttcgtttattcttcttccacgcccaaattattgatattctattatcaatat

SEQ ID NO: 2830 - DNA, 457 bp, Oryza sativa
  unsure (1)..(457): unsure at all n locations
agctntactgtttgacaccttntaagatgcattgtaccaactcctaanaagttaagtaactgcggtataaaaggattttaaggtattgggcacttgatcacgcgcactttggcctaagcaaaaagtgcctaagtccctaaaagaacgtgacaggccacacctgaaaatatgggctgcagacatattaggcctaggccaaaacatatgccttcgacaccctttaaaggatgacgcatataacatgctcccgagtaataaatcttccgggtaatatagaccaagcgtagctcatatgaatagcttctgatctgagtggttatcccttatgggatactccaaaatagatgtaacaatggaatcccgactggcgcaagtattcagttgataactcttacggggaataataaatagtccagtctttgagcatagaaaatagaaccatgatcatgaattcatg

SEQ ID NO: 2831 - DNA, 349 bp, Oryza sativa
  unsure (1)..(349): unsure at all n locations
cagcccaatggccaagccagcaaaggcgcacgacctctcccttttatgagcggtgacgacggtgagccaaacccacgccgtcgagctcgtactccaccgccccctccacgccaaagttctatgcgggagaaggcgctcgagagggccgaaagatccgcgacttcgacacccacangaggtggagaaaggcggcgagatggggagcgtcgcctcctcgtctacggcgacggcagcacgccccacggcgcgctccaagctgcgggcgcgctcctacgtcacccgcccgtcgcccatgacccggagtctccagcccaacgttggctggacgatgtggccaaattggtcatga

SEQ ID NO: 2832 - DNA, 424 bp, Oryza sativa
agcttctcgccgggcgccgctgttctctctctgtgttgttcgagtgtgcgtgcaagtgtgggaattgcactgcgggaaatgggcggcgtggtgagggggaatttataggtgggatgtagccgttggtggtctcatggagggcgaaacgttcgaatccccggtgaccgggcgggcggggcccagcggggcccgttggcgggccgctttgagtggagtagccgtttaaagctaaaggcggtcaggagtcagtcagtcagtcagcaggtagccgttggttgtgctggaggcgtcatgcgtgccggcggagggaattcaatgagggacttcgtggactctgtgccgcgcaaccgaagatgatggggcgtgccgactaatatgtggcgtgcggactgagtggcggtgctctctatggctttcatttctg

SEQ ID NO: 2833 - DNA, 453 bp, Oryza sativa
ttgttgagcttacgcaaagcagagaaaggcatctgcgcggggttcctatatgatgctgccacctccatccccttgcgtcacgggcgtgctgccctactggtcctctggcacagcatctaaggtcatctgccaccacaaccaggttgcatcttcaccgaatgtgaccccactttgatggcggcgagctttgctttggtagtgttgctgtcaatttggctgtgcatttctttaaggggttcatctacgatccattgtagcatgcagatgactttaaattacaaatgagttaatgcataagattctttgtttccaagtataagaaattgatatatcttttgttgaagtatgagtatgctgatttgttccagcaaaatatagcaatgtacaatatattttgtggataatatattgataatgctccatccaaatgtagtcatgcatcttcatcaaaat

SEQ ID NO: 2834 - DNA, 97 bp, Oryza sativa
  unsure (1)..(97): unsure at all n locations
tctcctgtgccgaaggactantaaagcccaattgctgatcatgaaagcccagtcgtatgagcccatgtacgagacattcttgccttcttgagaagcg

SEQ ID NO: 2835 - DNA, 404 bp, Oryza sativa
tgcatgcctgcaagtaccatctgctgatgcttgagtccgagctgtatttttctatttgagccagatactattcactggccgtgcgtttacgccacaggactggaaaaccctgcagttaccaacttaatcctttgggcatatcacactttcgcaaatggaccatatgcaacatggccgtacgaacgccttcccacaattgcgcgaactaatgccatagagcctgatgtgtatgactgcttacactgtggcagctgtcctcagatattgcgcaccctcattcgatctgattgatactattagcaagacatgccacaccttgccaacatcctgacacgagattgtgctcggcttatgtaaatgctattacgttgcttggaatatctgaccgcactagtcggttattt

SEQ ID NO: 2836 - DNA, 433 bp, Oryza sativa
  unsure (1)..(433): unsure at all n locations
agctctctatgctgtgatccattcatgttgatgataggtatggaaaacaacagttctaccaatctgggtcacttgtactatcattattcacaaatcgcaacagcagcagaaatcaactgtgccctgcatttgggttggttccaaaagtgtgcggagattagtgatccgtagaaacacctccagcattctgtgcctcacgagttgagaataacttattcaaccaaggaacaatagcccagggtctgttactggtctcgctgacgtttccagggccatcagctctgacnttctcatggctgtcctacactctaccaatgttgctaggctcgttcaagtcttttgactcctcagaaggcagctcataccggctaaccgggcatgaactatgttattcaagccatggcaggatacaataagaatgaaacttatgttc

SEQ ID NO: 2837 - DNA, 372 bp, Oryza sativa
tccacacccccaacctcgtctccaccacctatctcctatggcggaccagcttaccgacgagcagatcgtcgagttcaaggaggcgttcagtctcttcgacaaggacagttactgtaactcgcgccacccaccattcccccctctctctctctctcttctcctactcttactccccccacgttggggcacgcgcgcggtctctgggcggcgcggccggatcgggcgacgcggagctcgatccgggcgaattgccgtgtcccggtagggtttcgtgtgtccatgggcgctatatccggttgattctgtgacgggttggtgtggatttgggttccgggtgatacggatatttccctcgttactgatttgctggca

SEQ ID NO: 2838 - DNA, 417 bp, Oryza sativa
  unsure (1)..(417): unsure at all n locations
agcttgtggctggtagtaaaacatctatttttcttttgagatagagttcgatcctcaactatttctcgcgatatcttcttacgaagttttgttagggcatctataacagcctctggtttaggtgggcaacccggcaagtagacgtccacaggaattaacttatcaactccccgaacagtactataggaatccgtactgaacattccaccagtaatagtacaagctcccatagcaatgacgtattttgggtaggcatttgctcttataatctcactaaagagggagccattctcattggtactgtaccggctgttaaaattaggtccgcttgcctaggacttgatcttggtacccatccataacgatcatagtcgaatcgtgagcctattaatgaagcanattcaatgaaacaacaac

SEQ ID NO: 2839 - DNA, 445 bp, Oryza sativa
  unsure (1)..(445): unsure at all n locations
tatggacttgtcgatattgtaagggatgaaatgcttgacgagcactgcgatactgatccagtgtggtttccagaaatgtntaaagattggtagtggccacatttcttgttaatttatttcaaccctaaattcgggttttatgcaatttaatggaaatacttcataatgatcaatcattcaggttaagatcgatctaaaccaatccattttttctatatacatacgacatgccaacggttaaacaacttattagaaacgcaagacagccaatacgaaatgctagataatcggccgcgcttaagggatgtcctcaacgtcgaggaacatgtgctanggtgtatgtgcgactcgttcggatcatgggttcaaacaaataagacaatntttgaagtatccatgatcggtaccaatgaatatgatagagcttctctatcctagatttcta

SEQ ID NO: 2840 - DNA, 265 bp, Oryza sativa
agcttccaacaagctgcgcagccacgcgactcttcctgacgtgcgtcggccaccacttcgagctgctcgtcgaggacgtcgcccacatcgagtttgtccatgttcccttccctactgcaatacactgtcgtcatgtacaaccacgctacgtacctcgtcgccactgtcgccggctgtctcgatgacgaaaggtatcatgcctaattctcacatgtaccaagtatggtacctaggtatcaggtatcatgggtactatgtatcaggc

SEQ ID NO: 2841 - DNA, 372 bp, Oryza sativa
atggtgacttctgtctagaagaggctgaaagactttgtaaaggtgcatgttggtgtatccaagataatgaggtcaatcggccaacaatgagtggaagtggtcgggttcttgagggactacataattttgatatgcctccgatgccaagactacttgctgctttagctatatgatctgatgtggatcattgtgatagttcatatataaatacttcgtagtagctccttgaagttctgacgtgatggaaagaaagtaattgtaattaactttgatgctaaatcgtagtagactaccatatatagatcttgtggctcctggtctttttttgtattcacatcttaagtatcgaatgtggcatatggcagcagcaca

SEQ ID NO: 2842 - DNA, 386 bp, Oryza sativa
  unsure (1)..(386): unsure at all n locations
agcttggccaccttggcggtgcatagacttctggcgggcggcggcgcatgcgataatagatatagcgaccagaacgagcgagcgtatgaaaagaaccgttgacagggccgacctggcccacgttgttgggcccaaagagtcgagacaaatcacatctcgaacttccgctgaagccttgccgtgcaatcaaaaacagacgtagatgcgtaaaactactgctggatccggttcccacgggcataccagaacatgcggcaaaggtttatgatatagttgtaggcatgcatgcttcggttgttctgctgacgtaaatacaatatatgttaatttcttggggccttgtttatatagaaaaaaattgtgcaaaaacgtcacattanatgttt

SEQ ID NO: 2843 - DNA, 478 bp, Oryza sativa
tagcgacctataaaactcagcttcttatagctgtgttgctatgtgaattttcaatgatgtagtcaactttatgttgcatgcatcatattttacaaagcagtcggtatatcactcggatcatgttattcagatattcacatcgcatatgctatatattgatatcaagtcaatcgggtgattacaattatcaaaaccactcagttggttggattatttactccttaactatatgtttagtttgttcaactatccacgtagtcgggggctacacctattaggtgcatctagtcaatgcacctaagtctacattcaattatttttcagccctccacagtcttcagaattggtaaaagtactcgggagaccatggcaaagatgattgaagtactcgctggggagtaatctagttcgagagaagattatcttttcgactgtgaaggtctcaggggctactgtggagattatggataccccatat

SEQ ID NO: 2844 - DNA, 450 bp, Oryza sativa
  unsure (1)..(450): unsure at all n locations
agcttctacacatacaagactaaatcaagctcaatctatttgttgaataggaatgtccatttttttcctccatgctttgtgtcactgggcctagaagaaatctgctaaattttgaagaggattgtttaattgtcatgttcgtatgcaggcttcaacaattgggagagctaggaggttgcagccgatcgtgtccttacggtgagtttgaggggaaggggattgagaagatacgtaaaacgggatgagccattatcgcatgattaattgagtattaactattttaaattttaaaaatggattaatatgattttttaaagcaacttttctatagaaaattcttgcaaaaaatacaccgtttattatgttgagaagcgtgcgcgggctttctcacctcatctcccangaacgaacgcccctaagagcaagataatagtgagctatagtctacta

SEQ ID NO: 2845 - DNA, 441 bp, Oryza sativa
  unsure (1)..(441): unsure at all n locations
taaccttttatggggctgattgtcagtgagctaaacttatccaaaatcactgtgtcgcaaaccttcaaaattcagtggttatccccacacctttgtgttgcgtaacgccttcacacactacagtggcattaaaagaatgttgtatatttgtaaaacatctcattctgtagtctcaactatatattttaatagatatttcgcctatatgggttaatgcacatgtcaaacatgcaaaatatgtaacacaaaatatgttaattccacatgttacgctacttgaataatgctgctctaacttgccttctaactagaccattgtaagtgctcctcaatagtaactttcttatcaggcataatttgtctcagagatccaattagaaaaagaaataaatgaaatttccatagaatgtttcanataagtaaatttccatctactacatg

SEQ ID NO: 2846 - DNA, 405 bp, Oryza sativa
tttgtttttctttatatcggacatacctgttttctgtgtcagattgtgatcacgatcaagatatattcaacataagatggcccaatctgaataggcaattacaggagagattaacgagtgagacaacttgagttgtttgacctgtggtctatggtgcttaacatgttctaaaacaaagcatgctagatgacctcttgtaatagagcactcgaatttaattacgaaattcttgcctctgcagcagaaaaacatgatacatatgtataaagttactgcatggaacatgaaaaatatcattatataattatcggaggacatgaacttattagtaccccaagcgttccaacatattttgttcattgtaaacatgatgtgaatgagcattcgcttgacgacctgttaata

SEQ ID NO: 2847 - DNA, 395 bp, Oryza sativa
  unsure (1)..(395): unsure at all n locations
aacatggcacacagaatgtggactgcatgcacacaggtaacaagttatgactggactacataatactggagaactgtaatagcttatctcccattatattcttgaccaaatagcaacaaacttgggactactacacaaaataacaatactgcctatcaccataaggaatattatccagcccaaataagagcgcgttcctaagatacatggcgcacaaatagaggacttctctcttcaaaagtatatggattctctgagattcccagagaaatgccacaacataacaaggaatgagacgaactttatgtctgttgccaccttaacaagttatgcagaagggtaacaagattaanacattgtcaatctggcataatcctcttaacagaataaatgtc

SEQ ID NO: 2848 - DNA, 448 bp, Oryza sativa
agcttaattgtgaggagagagatagagtgtataatcatcacgctgacgaactctccatgaggtcttattatggtaccagtcatcaacccgaacgatggacgggtttttatggactgatactatatgtatttgaattttaatattatattaaacatgttggttatcttcaaaatcaaaattataatgcttatattaaaagcaatctatattggctacaactgattaacaattaattctaagttttaaaattaaactaataaaatactcacttcatcctaaaatatagagattttggttggataagacatatctaaataatagaattgagagttcaagctggtacgattaaatatgactttttgattttctatattgaaggcaatgatattttcagttcatgatttatctaagatcaggtaatttattctaagttaacatgaaagctcac

SEQ ID NO: 2849 - DNA, 332 bp, Oryza sativa
  unsure (1)..(332): unsure at all n locations
ctctatagaaacttcagctcgctgagctntgcttacctcttgtactcgacgtccacggcggcgagctctgtgagcgacgcggccatgccggtgcgggccatggcggcgaacgccgggctgctcagaacgaggccggtgcggntcgtcctggcgcggtccgtgacgacgacacgggcgcccgcgttgctgcacagcttcttgtccttgcatctcacctgcagcagcgaatcggtcaggatggggaagccatggacatggcatatgcagctaagctagttgcctatcttcgngtgtgttctccttctcgatcgagcttgattacctggtagcac

SEQ ID NO: 2850 - DNA, 420 bp, Oryza sativa
  unsure (1)..(420): unsure at all n locations
agcttccctggatctgggaagtttctctttcacggtattgngatcgtttgatcgatttccttgatcgctacttatgggcgtgcgctcaaaggatacaaacagggattcgcaaacaaaaaggggaattcgtagtcactttttcctgtcgcgtaaaaaaaaggctctacgcgagagcaatagaggttgggatacatctatctcttctgagcaacctcttttggattcttaagaccacccttgcagtaggataccgtctgctttgggttctttattatattatctccttcgagggatttttaggatcgttcaggctatatntagtctattntggcttttactgtctccttttctcagggaagtggttaatgacctcagaagatagaggagagcgccaggcgcagatttccggaatacttctac

SEQ ID NO: 2851 - DNA, 299 bp, Oryza sativa
agcttatgttacgcagagatgtagccacgctgtccgcctatcgcacgtgagactgagcttatgccattcggacatacactgtggtattcccatgacgagtacactagctgtccaacggctcaacctctgcaagagcttgcttgtcttcacgtacatctacgagcaagatacccaattttgtagctcaatgtcggattgataggagagaatagctctctttgtacggcaccgcccggcagttgcacaagtcttaatagcgggcacggaatataatcgtgcaggaatcagttgcgaactct

SEQ ID NO: 2852 - DNA, 217 bp, Oryza sativa
tgacgagaatgtcgggctatggcggcgcctgacaagtgttactggcgctgtctgttgaggcgaattccagctagtcgacgctgtcgtgggctctcggtcatattcaggccacagtcatagtgaacacgcatgttcatgtgccgccgcatatgatccacgtcagtacataactgcatcatccgacagtgtaccttacctacttctctctattatgaaa

SEQ ID NO: 2853 - DNA, 427 bp, Oryza sativa
  unsure (1)..(427): unsure at all n locations
agcttcagtcggccgaaccgagtctgtgttttctgccctcccnctccaaattcggccgtctcgttgttccgtttccgaaattgattgaggggatttgttgccgttattcttaatcttgccttcccctcgagaaatcgaagaaatcccgtggtttatctccccgaatcggagcggttttgatctcctatcttgccggcgaaccctaactcttccgcggccaatccccgccgtgtccgagccgatctcctccctctttgcctaactcttcgttggctccgcaaggacgagggctacctctgccgccggttcccttgcgccgaagaccaccggaagctgctcgccgacgcgaacccgagcgccgctgccttccatcgacctccagccgccactcaccgttgtttccaccatcgncgagcttctccgtcgc

SEQ ID NO: 2854 - DNA, 456 bp, Oryza sativa
  unsure (1)..(456): unsure at all n locations
tcactgtgatatgcatcatgtgtaggagattgtttccctaccctccactgatgtgtaggtgtcccagctctacaaatccaaactgaaggccgatccatccgtccagactcgccaggagatgtatcgccgttttcctggatgttgtggcatagggggcagaacagttggatttgtcatcttcatgccatttttctgtaaagaaatgggcgttgcacaaggattgttactgtatggatgctgggcatcgacctaagccatgcccatgccatggtgctacacggtctccaaccgtgtttttattntttggttcagatagatcccaagagatcgacattgtgaccattatatnttgcctgccctggttttgtttacatacgtcctcttcccggaatagagagagccatgcgcaacgccagcagacagatatacatatacttattgcatgtgatccttctc

SEQ ID NO: 2855 - DNA, 384 bp, Oryza sativa
  unsure (1)..(384): unsure at all n locations
agctnttcgtatctacaatgtgtattaattattgacaacgctcaagtttgaagcatagccaagggatgtatacactgttcgtttcaaccacagcttgagaaaagaagagtctaataaataaatttctatctatctattctgttgatgtgcccactcaaaagttctacaacaccatgaaaaaaaatactagaccaaaagggtggaacagggtgtacctaccacatacctttccgaccatgatgtgccaaagtattggagtcaaaagggacgaagcagtggggaataggaaacagtaactggcagcaatggcaacaaggattgatgatggagtaactgggtcaactgcagtggctggaagcatagaaaatatgattttcatgtcta

SEQ ID NO: 2856 - DNA, 407 bp, Oryza sativa
  unsure (1)..(407): unsure at all n locations
tcaacagtacgaaacggcctttgggttgtttttgtctctgttntgcttccgtgcctggccgctcagctagctcgaagcaatcggatagtaaaagttccaactgctcgtacgaaacggcataacgcggggccactccagtacgcggatcaacagtgagagcagcagtagctgtaactctgtaagctgtagctaacgattccatatgaatattccggctctgatctgatcgtttgatgtactgctcggagagtgaggggccgagtggcccgacatgcgcagtcgatcgacaaaatgttttcctaattttttttttaaaaacatcacatcgaattttggacacatgcatgaagcattaaatatagataaatgaaaaaactaattacacagttagggaggaaatcgcgaga

SEQ ID NO: 2857 - DNA, 66 bp, Oryza sativa
ttgtcacgcgaacgtggatgctgttttaagaaaactacccgtttactgttcgggaactacgggaaa

SEQ ID NO: 2858 - DNA, 436 bp, Oryza sativa
  unsure (1)..(436): unsure at all n locations
agctnttgtatccaaatttagattaataatccgatggtcgagattgaaactctctagcatccgtttctcccctactaagtaggtcttgatcgacggccacccatagcggtggtccgtggcacgatggaagtctgctcgaacggtgccgatgataaatcttattggagttgtgacacctcttttattctaaatagctgcgctattcacgtgagagggacaaaaattgactagtgggaccatgatgcttacgtggggttgtgcggactacggngtccacacatataacctttcacaccagaagataagaaagacaaatctatgttatatntagcacttaattagaattaacatatatctctaagatacattcctatgtttctcaatcataccattaatcaggatccatgaaattattctgacataccanaaactacac

SEQ ID NO: 2859 - DNA, 330 bp, Oryza sativa
  unsure (1)..(330): unsure at all n locations
tgttacaaatggactaagctgtctntgtacttccaaccagaaacttactctgttcaactactcagatctgctacttagatctaccccgcagataggcaatagaacaccaaaattaccccctcgaaatccaaaaattctgcagagaaggcatgtatacatatctccagatctgcgggcttaattacttgaaattttcaggtcaaaccctcgatgaacacataacacaacatgatttatcaacaattagcgccactagcaacaaaaatcgcaagctaatcgcagccttatgcgaagaggaaaacactaaccgcgagcgcgagcacagccagg

SEQ ID NO: 2860 - DNA, 445 bp, Oryza sativa
  unsure (1)..(445): unsure at all n locations
agcttgtggtgggacccacatgccagtcatttaagcatgcttcttcttcttttttttactttctattctttctttttttttttttgcatcaaggagactgtacgttatcccgtttgccaaacaaagcgaaggcaaaaaggttgataggagatgcagtctaactgtcaaacaaaaagcttgtgatggaactgcatggcaatggaatcaggaatatttctggctctttttataagcagataaagcaaaagggaaaaaaagttagaggccttatttgtaactgtaccctcaatttcaatgtagnggatcaattaaatttggataaaatcattatttgcctctacaattaacccgatcccttattntcctctcattctctcaatgacatatggatctaggacccaatgtcagtgactcggcatgagaaataaatgattgatcgtgtgta

SEQ ID NO: 2861 - DNA, 462 bp, Oryza sativa
  unsure (1)..(462): unsure at all n locations
tcaccgtcacagctgcagattcacaagagggacacgtgatttagacacgttctgtgtgtgtggagtagcaagttgtaagcctattttctctgttctaaaatctatctaaaatatcaaatcacatcatatatatacacgacgactaagggtgtgtttagttcatgtcaaaattaaaagtttggttgaaattacaacgatgtaacgaaaaagttgacaagttacgtgtgtagaaaagattcgatgtgatggaaaagctggaagtttgaaaaanaatattggaacaaaactcggcctaagatgcatcagatcccatttagatagtgatattttgagacgaaggtatcattacctaatagtagcgctactatagtattcccttcgttagaaaaaaaggagaaacttagcctatgataaatgtgatcaatctcttttagtacaataaatctagacagataattgttc

SEQ ID NO: 2862 - DNA, 448 bp, Oryza sativa
  unsure (1)..(448): unsure at all n locations
agctntatcgaagcacaataagtcagacgattatttatcgataatactggtcggttttacataaatcgaccagagaataagatattactgttgatgcttctgctaattcattatttatatttataatttcaattttatctataaaactaactatataaataaacataaacatgccgttgtgttcgccctttgattagcaactctggttttctttcttagctgaacaatctggttatagcgtgcggactgaccgttaaatttctccatcttactggataacacaccatgagctgctacctttaaaacacctgaatgtcaacaggttaactcgtgccatatcgttataatccctttgatattagatgcaaattaaggtcatatatagccttatcgataacatggctaaatttaaagataagaatatgcctgctgtaatacataaagccct

SEQ ID NO: 2863 - DNA, 456 bp, Oryza sativa
  unsure (1)..(456): unsure at all n locations
agcttcgaaacagctaaataaataagatatctagattattataaaaagaaaagtttatagatactaagcttcaaacttctttgaagtcctatagctttatactcctacatgctctttcttatgtagcaacaaccctttatatcacaatttacacaaaaacttttgatattgaaatcaaactatggtcaatagtcatatgctgcttgttcactcctatcgcactaaatcggtagcgaaaattgtggcgctactattcctagtgaccttatgattntgcaggaaagttttgatttgtctcgctaccattggcggtaatcataattatttttagaaaaaaaatatatctcagtcgctactaattatatcgattataataataatgtacaaattgatccatttttaattgcttcacaaccatctacatcggtgtccaacaaaatcgtagaaccaccctca

SEQ ID NO: 2864 - DNA, 395 bp, Oryza sativa
  unsure (1)..(395): unsure at all n locations
tctcgaaccacctcagcgctgggagacacaaaatcgttggctccttcatttttttcgccattgcaaaagcttgtgcatcaggctccctgcaacagatccactggcgctggagaccataggcttgcgcctccgccgtcgtagccaagcagcacctacatgttgcgttcgccttctcctgcatcacaatcgcaagaccctacctctgccgccgtactgctagtgcctcatccgagccatctcaatccgccggggctggcgccgcccncgccgacctgtcgtatccatgacatcacgggaggtcgcanggagggagagatggatggagcgtggagggaggggaaatgactcatcgccgtcgagggataagtgaaagtcgtgaggagagggaggagatg

SEQ ID NO: 2865 - DNA, 382 bp, Oryza sativa
  unsure (1)..(382): unsure at all n locations
agcntttgngcccgcactggtgatgaactctgagttcctctcgacactcaaggctggtgttggcccgatctttcggtgagttgatgaaaactacgatttggaagaaacgttgacgacccgactacaaccgtacaagacgttgcgttgcgccttagcgatcgatacacctctccgtgggttgttgatcttgccggtgcaaatcaaccttattcctgcaagcaaatcgaagaaacaagctagaacaagataaaagcaatctgaattgaaataggagttaaatacgaatgataagttggggttccgaagaacaagcagacggacggtctagccgacacgcgcgctgcaagcaagtagcaatggcttaacattaatctaacaaaac

SEQ ID NO: 2866 - DNA, 472 bp, Oryza sativa
  unsure (1)..(472): unsure at all n locations
gctcacggtccttgatagggattaaatccctgaaagcggaagtatgcttgaaggtcatcgtgctattgctgcatcatgttgctgatgttggcaaactgatccattctcctagtgatttcacccaagtcccaacgagaggaacttgagcgccattcacttggagatggaggcacaccacttgatctggggtgttggctgtccgttcgttgtatgtcatgaggcgcatgccaccggtcctcattggcacttgcccaacttgagactgccatgctgtggcgtggagcttgagttcatccgggtgcatacccagntggctgccaacctgcctcatacatatacaccggtgttgatgatgatgaactgtcccgttcattcctcgtcatagtgcgcgtctctctgtatgctccacctgcacgagattcttctatggtctgtatgggaatggtgagtcattacagttgtacaaatgata

SEQ ID NO: 2867 - DNA, 419 bp, Oryza sativa
  unsure (1)..(419): unsure at all n locations
gcaagctttcgccgatcagtgcaatgggttccgtctccggcatcgacgacctcgtcttcccacccgggcagacgtttcggttcggcagcctcgacttcgtcaccaacaacttcggcaagatctctctccttgactcggggtcaaaccagtcgggagagaaccggatttcagtcccgtttggactcccaaacgcggctaaaagttaccccaagaccatctcaatcgagtcggcttcaaaccactcgggcgagatcgcatcttctccaacgacaccagatcaagatgatggggcttacccaccggtcttgatgaagctccccgatgatttggcggncatctccatcacgacagcgtctccatcccgtatgcctatgcggaagtcggcttcaacaccgatctcgcctagcttcagggaagtc

SEQ ID NO: 2868 - DNA, 366 bp, Oryza sativa
agtcggtaagaacctggccgagtgacttcagaaattatgaatgggcctttctacgacggagataacttgtgccgatcccgtgtagtctgaattttcccaaaaccaagtcgccgactaaaaaagctcgtgatcgaacattgcgattgtgattacggcgcattccttgcaagtaccgagccgactgaattaaagctgcttcacgggcttcttctagtcggttgaggtcatctactcggtcttcttcatagcgctcctcgctgaagatacgaaatcgtagagattcaaattccacctcacttggcaacattgcttccgctccatagaccaggaataacagtgactggtcctgtgcccgactgggagtgg

SEQ ID NO: 2869 - DNA, 392 bp, Oryza sativa
agcttcattttttattcagacattatactatttgaaagaacactctatatagaaacattggtttatcccatgcggcctctcgcctaagctgagtcgtgtagccaaaaagattgaccgtacagataaacatggtcacaaaggtgatgttttgcggcaaatggaaatttaatatgttttaagaagatagtgtcaccagagatatgttgcatcattaagtacatctagagaaaaagaacttacagcaatttacacaaaatgaatacaattttctcttttagactccataaattcttaatgctttttctgcacttcacgtttggtaatctttcaacacacaagcttcttgaacatggctctgaagctgaagcactcacttcgatgtgcataacagg

SEQ ID NO: 2870 - DNA, 453 bp, Oryza sativa
tgcctgcaagtccttctttgctgcttactgttgttcattttcctgagccataattgttaccactactgtctaggacacgaagttaccatcaactaatggcaagtgacttgggatatttattcagcattactatatgtcattggattgtgtaccactcatatacatatatttggccttcctagctccacatattacttctggacagtacgtacaggttcttgatccctacaatcgctgactacgccttctaaggatcctttgctttgctggtaagaaccttataagagctcggataggaactccatattgctgagaatcgttgagaggcaccactacacctgcgtagtagaatattatggataaccttcaccagtttgttctgttttggtgttcaatgtcacgaacaaaggtgaaagagacccaggatattgctgatggtcaccaagagcacta

SEQ ID NO: 2871 - DNA, 429 bp, Oryza sativa
  unsure (1)..(429): unsure at all n locations
agctcgcttagcagntntttcttttatatttttgttcaggagggctaccacacataccgtggaggattttggaattactttagtatgggtaagagttcctctggtatccaaggcacagcatgatgtttttttttttttttggtttatgctagttcttgctctaacagatatcaaacagtcaccgttgttatccagtaccttttaatcaggacttgttaacaatattatcgcagaacatattttagtatcttttaagcatatcatgattaataaggcagttatagaaacatggtcatcatgacttcacatactgcagggatggatgcacaagtgtcttacgaatctcactctgagaggaagagaaattccgagaagttcaagaaccagctaacaaatcaggttcttctcgtttctgtaaggcaagtcttg

SEQ ID NO: 2872 - DNA, 469 bp, Oryza sativa
tagctgattggtcgatcagtttcttcatgtcttcaacatgcatgcatgttctgaaagattattctacaacaaagggcgcaaggaattataggagtgtaattttttttggaagcttgtgcttttgttcgtacaccatctgtcccaaaaatacatatggagtctatccacgattcaaggtatgaaccacctaggatattcttttcagcttgacagtttcttatcgaaattcacaaagcttcttatctaaaatgaaatttgatcgatccttcttcagctgcccggaaaagaaaaaaaaaacacgatgcatttttacttggcgatctccaattttataggaagagggtggcatctcaatccctaattcaattcgtacgaagaaagtgaccctcgaacaaattgagatgctgattgaaagtaaaataatattgcaggcttataacttaacctgaacaatccttcgaaagctgat

SEQ ID NO: 2873 - DNA, 428 bp, Oryza sativa
  unsure (1)..(428): unsure at all n locations
agctcntgttgcagttcttttatacagatctgtatgtaaattatatgtaaccatattgcccataacctgatttgctcaatgaaagcataccaactttacgtttagggttcaacattttattgtcttgtgatttggcagatcagttttatcataatagatatagtttttagccgatgagtgggtggactgtcaatgatgctgacacgccaacatctggctggctggtactgtgtcatgttaagaccgacgattttggcccgtcctatcgtccaggtcggcgtgcattgttatcttgtcactgtccatccgcggagctatcactggatagtggtctggttttggattcgagtgcttgctagctcgtgctttcttcccccacagngggcaaataatgtgatgcgtacatgcgttggtatcattgtaacttt

SEQ ID NO: 2874 - DNA, 388 bp, Oryza sativa
  unsure (1)..(388): unsure at all n locations
cgtagaagaaacaattagtgaatcgccgtatcctttcatgaggaataaattgttaatgaagaatgtgaaccgctaataaatgtagtcgctgttcaatataaatatgaatcaatgaatatttacatatgaatgtgtgacatgatggacgatgtaatttntatggatggcgaattntatattatttgttctcatgggttttggtggttaaaaaaagagaaaagaactaaaatttataaaataagaaaatcatgatatattagctactgatggtgacatcatggagactctgatagaaaaacctgtggnttacgttttggggtgagggttgggctgggtggnggcactactagagccacacggatggaggctggcagtcggcatggttggt

SEQ ID NO: 2875 - DNA, 439 bp, Oryza sativa
  unsure (1)..(439): unsure at all n locations
agctntaatgaactgcacaccataataaccttacttaagacaagcaatgcaataacggatagcaaaaagagactaaagcatcagttacaaaccttgcctgactgatccccacaataaatgtggaccttgtgatccaaacctcccattgccaaaatgagatggccttcctgtccaggcaatactgctaatgaaagtgaaaccattggctttggaccaacggatatagaatgcaaacaagacacttcacagctgcctgcacatatggaagcaaattacttcagttgggcagcatagcacatattcttaaactctaagatcaaaatcaaacagttactataaatataatttgaccaatagagcttactgtagataccaggtataaataatatggatttctttcagatacaataacaagatattgtctaactacaattatcac

SEQ ID NO: 2876 - DNA, 321 bp, Oryza sativa
  unsure (1)..(321): unsure at all n locations
taaactaaccactatctgttttcgcctgctctaaaccatcttatatggccattaattataactcatttgactgtacataatggctattaactcttgtatatatgcctacctgctgtggcttaaatggctaaatttgaatggccagtcaagcatgctgcaaacctatcatggacctgaatgacctaacaacccttgaaagattcctttcgaagtgcacttgctcagctcgccttgatgtagatccatggaccacgtagaatagaatagccattntctctctgatgatagcgatgacggaccaggaaaaggtgacataacagt

SEQ ID NO: 2877 - DNA, 104 bp, Oryza sativa
gcaagcgtttatcccaaattaaagaggataccctcacttcaaatacccactttttctgtagaaggaatcctcgctaatactctttattgtaaggttgaggcata

SEQ ID NO: 2878 - DNA, 404 bp, Oryza sativa
agcttgcccggataattgccagccatgattatagactcgggaggaatcatagagtcatacggcgatgaccttcccatgtttaagctgcagatgaaattcaagcatgacaataaaatagtcttccatgatggagcttctcgtatcttgattcttgagtatactttttgcttctccttctcaaagagaggaataatacgatggcagtacatcttctggtttttcttctgtagacgattgttgcatatcatgtgtgtactggtgactaatcataaaatttgagatgaccgtttgtcctacgttgaaccaacgacaattaatttcattctgagatacccgatatatggacgagaataagtcttgccagttgagttataaattaaagccgctaccataattacgagttt

SEQ ID NO: 2879 - DNA, 392 bp, Oryza sativa
tctctttctcttcgtctttttccacaccccccggcggcctcacccgtacctgtgaccttctttgtttggctgcaattctttctcttttccctcttttgcacttaccaccccctcccattagtttctctcctttcgtgtcctcctcgttggcataccctgtgatgatgctacattgtttttcaaagggctgctactaaacggaatcccgttgctacgggatagatatattaactcattctttgcacgaatatcacatgtattaagtcctacatatcacaagtaccgagttacagagtttacaggtatctcggtctatgtaactgggacacaacaaggatctcgtatcaaatactggtttattatgggtatcccgtccaacgggataatgttgt

SEQ ID NO: 2880 - DNA, 383 bp, Oryza sativa
  unsure (1)..(383): unsure at all n locations
agcttctcgggntcttggtctctgccctatgcatcgaggccaaccccgagaagatacgagctatagagcggatgcgcccccccagcatgcttagggatgtgcaatgcgtcaccggttgcatggccgccctaagtcggttcatatcgaggctgggagagaaggcgctacccttatttaagctcctcaaacgctccggaccgtttacctggacggaggaagctgaacatgccctcgctcagttgaaggcgtatctcagctctcccccagttctggtcgccccggagccaaatgaacccttgctactctacttagcggcgaccccgcaagtggttagtgcggcgttggttgtggagcgcgatgatgacaattctcatttcgcgcat

SEQ ID NO: 2881 - DNA, 407 bp, Oryza sativa
  unsure (1)..(407): unsure at all n locations
ctgtttcatatcacatctttcttgtggattccatcagagatatattattatgcctaacagaagccacataaaaagggctatgtatactgtttangataatatatgttctagttccagtacactgacaatagtggcatctgctgggatccaatggaacaaatcataatgcctgcattatgcttatacattgtatattttttaaggtgatgagaagaaaaaaggcctatagaagtgacatagattggaaaatatattcatgccaaaatatattcaattaatttgagcataatctattatatatattatattccgtaaccgatagtgcaattttgtttcgttgtatgtacatgtacttttattttataaatggaaacttaatttgttaagcaccgacatgtatatccaca

SEQ ID NO: 2882 - DNA, 449 bp, Oryza sativa
  unsure (1)..(449): unsure at all n locations
agcttggagactattgaaagccctcgtgtgagcggttcgtttactgcagcttctaatttgaattcatctcatgctggttctccattcccggaatgtgttggatatgcagcagaggagctgtctagtaacagcatgtgcagcagtcctgatgaagtttgctgcaatcaaattcaacctgaactcatggcaggccatttgagatcactagtncaacatacattcaatggcgctgttcttgctgtacatacatatctagatagatatgtgttggcagcagctggaaatgtggtatgattagaagtcaatttttatcatatatgatagtatatctattaaagagtagcttatctccgggatggaactatataaatatatttgcacagaagccttgatgctcgataggcaagttccggactcttgacatcagaatcagttaatcaacatttatc

SEQ ID NO: 2883 - DNA, 485 bp, Oryza sativa
  unsure (1)..(485): unsure at all n locations
ctacatgtgaatagaaaaaaatcaaagtggtcacatgaaagtagtactatcttgtttaaattaattgttattttaccttttcaatacttggccatcagtaataagaaatcaacttataataatatacatattttttaagaaacacagtacaaacgtaggaacacgttacgcgcacaacacccatccctatgaacacacaacttcccctataagcatatcagaagactagaccaacatattttgaaattaacgaagtcaccacgagtgccttacggtcgaaaggtatgtcacctaccactgaaaaaataattgactgtaaatacgagcacacgtgtcaagtctagaacttaaacccgggtaggctagttccaccacaaggaacctaatcattgagctacgctcacttcacaaaataatatacatattggaangttgtanggaagtgatatatatcgaatgaagtaaatttctttgattatatatcg

SEQ ID NO: 2884 - DNA, 451 bp, Oryza sativa
agcttctgcttcttctatgcgcagcttctggttatcattatcatgcattatgtcctcatgattgattgcactctgagaaaactagaagaaagggtatccttttcagaaacaaaaattgacgcatattactcgtgtgggagatcatttttctttttgcttacatgaatgccttgagcacaaaaaggacttcaaaatgttggatacttcgtccatgcttggatgagctcagctcagtctcagaggttgtcggagcagccaaagcagcgcatagccgatcttattgctttatttggaatcccggtattgacatcttcagacaattggctgagaatatttgagtgatagtttcacttaatcattattttcatttgtttgcagcgtgaacgaatcattcacatgtctggcttataaaaatacctctgctagagtatttagtactcgttcacaggaa

SEQ ID NO: 2885 - DNA, 305 bp, Oryza sativa
ctcccttttttgtcagctccattcttttacctcttttgttatggctcattcaggaacgttcatgatctctgtcgattaatgggtacacgtgtttttggagagaggatgtgattgtttgaacatgtacgatgtaatgtgatcggccatagactttttactcttgcttcacgcagaaaactgccgtcaccttacaaaacactagcatgtaagtaggactgcgagaaatgccacaaataaacaacatggactctctactctctgcaaaaaattgcttattgagggagaacttaactcacctcattttt

SEQ ID NO: 2886 - DNA, 408 bp, Oryza sativa
agcttcaggcaagttggcgaagatataactattcttgatattaacagatattgaaccaatacaggttaaactaagtatattaagcataacaagcgtttcgttcttgtagagaagataattggattttgattgagatatttttcttacggaaaaaggaaaaggaggattctaaatcctttttttttcagactttcccaaacacaaaataccttcttgtattcgcactctcaaatgagagtggaagaaattcgactttcatataatatcttaatagaattgcatgtaatgatcaatgcattttctggatgctatattattcgcatgtctagaatcctaccatgagaatacccgccatctttatgttattgaagtacgattgacgaatctcacttaacataatactgttat

SEQ ID NO: 2887 - DNA, 392 bp, Oryza sativa
ttcgcgatataatcacgaaacgtgctacttctaatgttatgattgctaaaaggaaaatttgggaaaaggaacccattgtgtgggaaatacttcaagaagatatgaggggacatcctgtactgttgaatagagcacctaccctgcatagattaggcatacaggctttccaacccactttagtagaggggcgtactattctgttacacccattagtgagtaagggttcaatgcacactttgatggagatcaaatggctgttcatctacctttatcctgtgaagctcacgcggaagctcgattacttatgttttctcatatgaatctcctatctaccgctattgaggatcctatttgcgtaccaacccaagacatgcttatcggacttatgtata

SEQ ID NO: 2888 - DNA, 427 bp, Oryza sativa
  unsure (1)..(427): unsure at all n locations
agcttaacactggaggttacctagctatatttgttcccttcatttaagacanaaaaatcaaatcctaataataaatctgaacatgtaaatgtctagtagcttcataactaagatttgataagcacatacttcgaaggagccatggcagtgcgacgcctgcaagcagcccgggttcggcgagctgtacgcctgcgacgcctgcggcttccacctccactacatctgcgcccacgccgaggagacgatcacccacccgctccaccgggacaggtgctgcacgttcacgctccacgaccgtgcgccggggcgaacacggcggttctgcgacacgttctgcgagatcgcggagcctgcggtgctcgtctaccactgcgcctgcggcagtcgcgacctgcactcgtgctgcgccggcttgaccggagccggc

SEQ ID NO: 2889 - DNA, 363 bp, Oryza sativa
ccttctgtgggtgtttatttctctggataaaatggaagcattcaaaagctatgatggtgttgtcggttatcaagcggccaggaacaaaggcactttggctttggggtatgaggtcatccagtataggtctcaacctattcaccaagcacttagaaacattcttataaattatattgcacaaactaataggtcaaaaatccttcaactccactggattctctattttcaggataaggacaatcgttttgtcattgattccttcaggaagaacacttcttctgaaaaaaagacaagcaccgccttaccacatctttcaaaataccccaattacaatggtagaaatatcccgggaaaccgtctgga

SEQ ID NO: 2890 - DNA, 439 bp, Oryza sativa
gcttaattaatccatgattaactctatgttatgttacacgtaacattctctaattatggattaattaggcttaaaaaatttgtctcgcgaattagctttcatttatataattagttttgtaagtagtatatatttaatactctaaattagtgtctaaatacatagactaaagttaaattactggatccaaacatcaccttaatagtagtactacccaacacaaatggaatactggaagaggggcagctgtgcagtataaaggagtggagatgatgtgtgatcgggcagtgtgctaatacgaaagcaagcagttggagcatgtgagagagagagggagacttatacggtgggacccaccttgtgtatttcgatggcacctgccgtaaatggaggtaaagtggatagcagatggaatactgcagctgggtactgcgtacgt

SEQ ID NO: 2891 - DNA, 415 bp, Oryza sativa
  unsure (1)..(415): unsure at all n locations
gcttggtggggaatacataatcttttgctgcagttgttcagctgctgttcgatttaaaagagctaatggagctttgtggccaagctgattagatccagagtgaggtgttccttaaaaaggcaatgaaaaaagcttgcagagattctgatgatgctggtgcagacatagtgtttcaggccctaaaggtagatgggttcattctgaggctattaaagtatctgaagagccaattcaatttttgccggacccaggcatggaagataaggaatgagatattgagaattggtggtacacccatcaatgatccactttccaaagattctccttgaactttntgcttctgggcccttgaaccacctncaatatgggacgttgttctagaatcattgagacatatgctcctgattaccacata

SEQ ID NO: 2892 - DNA, 463 bp, Oryza sativa
  unsure (1)..(463): unsure at all n locations
ntaaatgggatcaacatgctcaaagggttgtttggaatctgtgtgacttgtcttgctggccttggaactcttcaaattcttctcctgcagaaacggactctccggaaacgtcggaatctaagcagaaagaagcaaaatcaccaaaacagcacataaacaagcatgaacagtacatgtggatatttttaacatgtagatctcaattttagaaaaatttagagacttgaaccaactgaatcggagctaagatgaattagttatgaatttttgaagattaaatcggattaaaacacttatattgattntaattgaattatgacgcaataatgaattatttttgaaaaggaaaaagggaattattgcgtcagcggctatggtttgcggtggaacgggcgcacggcagcggttcacgcgaacggacggtcgagatcaatccatccaaaacggacgggcgagatcgatc

SEQ ID NO: 2893 - DNA, 451 bp, Oryza sativa
  unsure (1)..(451): unsure at all n locations
agcttatccagaagagaccgagttctattagaatgcggcatggcaagttatctattaattagaaatagtttgttagtttccttttatctttaggaaagtgtgtttagtgtcctataaggactttatcttttccttttatctttaggaaagtttctttcttgtccgacaaggacttgtatcaacccatgggtataaatatgtacacccggngtctatgtaatcaatcttcacaattaatacaattcggcgcatcaccaccctttttacctgttctacttcattatatcatccggcgggacttggtgcccgacgganggctgcatctgtgttcgatctccggcgaagtggtagtccaatgtttcgtcggtctatgcagttatatcgctacgtcggagtcgttagtgctgttcaatacattcacactttagaattgctctggttggatgctata

SEQ ID NO: 2894 - DNA, 466 bp, Oryza sativa
  unsure (1)..(466): unsure at all n locations
tcgctactactcgccgtacgtacgtacgcgttataacgaatctaagctattctatgggaacaatgcgatgctgatacactactaccggtttcgtgtcacaactagctaggtggttctctgtgtgtttggattccctccatctcaatatataagagatttcgaagtaatacgatatatcctctgtttcatattataagattntctagcattatccacgctctcatatatatatatatatatatatatatatatatatatatgaatgaatgaatgtggttaatatgttagaaagtcttataacctgaaacggagggagcagtattataaatctggacgaaatttctttctagattcggaatactaatatgtatcatattcttctaaaatctcttatattatgtaacggaagggtactgcgtgtcatttttccttgctgcttgctgcatggactaatacgctggaattg

SEQ ID NO: 2895 - DNA, 440 bp, Oryza sativa
  unsure (1)..(440): unsure at all n locations
tagctttcttttgcagactgagttgatctttgtgccagagaagttcacacctcagagctgtttaaagcttcagacgattaacaaggaggaaaaactcgctaaacaagatctggtatgtttctttttttttctctatattggtccttcttttcatgaattggtaggtttttgttgcattagctcacactaaaatgtcttaaactatacatatttattgttttagtacatatgcacagagaatctctgacattagttcatttttttctatctcctagctcttcttcccaattgtttgggacgggcactatgttgttgtatgcatgaatattcttcatgaccagatcaattattntgacccatgatgcaatgactcataatggttccattactctcagaacctcgtaactatgtcagcacgttccattttattattgtcaatt

SEQ ID NO: 2896 - DNA, 375 bp, Oryza sativa
  unsure (1)..(375): unsure at all n locations
tgctctgaaagtggcaaggcaaagagctaatgtagatcagaagtagagatcttttttactgagagaattgaattcctggcaaaagaatatattctgggataaaccaatgccctgactttattgttccacaaatcttcccaaaacaaacaagaatttccatcttgcacagtacaggccgagatgcctctaaaaatntccacaaattgcaaaacatccctccaccaaaaagatcctttangagtaacagcatgaggaggttctgcagtgtagtaagtattccaaatcaaactgacctatggaacangatatctattatagaacttatgcagattcttcaagagaagggcattattttgcaatctaaagtctattaca

SEQ ID NO: 2897 - DNA, 335 bp, Oryza sativa
tgcagcatgcaagctagagccgagctcacgagcccatactttttgtccacccctaagcggacagagctatcaaaacatcgagtttcaaatacagacggtgagcactgcaatcaattcaatttgccttatctgcattcaattgggacataagagctgtatatataccagattatcgatcagaattgtgctgtgacctgtaaattaacataagaaccacaagaggagcttgctcatgcccaccgcgcaaaaggctagcctcttgagcacattatttttgagacaaaggcagcaccttcataattaaattgcatcagcattaagtacctcccgaatat

SEQ ID NO: 2898 - DNA, 366 bp, Oryza sativa
  unsure (1)..(366): unsure at all n locations
tctcttttatgcaactatattcccttcttttttaaagattntactggggctgttgttttcatctttgcacaaattacatgttatgctccagtatattagaagaaaacacatagtattatcgtatagagaaaatagttatacgggaatggtgtaacatacatatataactattactatatactggcaaataaggactgacctattttcctcttatccaggcaaaccacactaagtcactctctgatctccagcaagttaaccttcctccattcctctcccattggaatatcacctgctatgaatatgaccaaacaagctagcttgtggtgcacctgtggtgtgtgattcttgaggacatattgatgc

SEQ ID NO: 2899 - DNA, 411 bp, Oryza sativa
  unsure (1)..(411): unsure at all n locations
agctntgatggatatagtaaacaaattgctaatagncatattttttattaacacgttctcttaccgggtgcttcaaacacggtaacgcaccacatgttaccgggtgtgaatgaaacacggttacacaccaaatgttaccgtgtgtgaaggacactcggtaagccaccgttccgttagaagctccgttacacaagagttcagctacgcacggcagccttaccgtgtgattcagcacacacggtatgtgttttggccttcccatgcgcataattgtaaaacacccgggaagtgcgcacggtaaactgatgaagccgccgagtatctgttcccatgcactagcacccggtaacgtcgttaccgtgttgttttggcctgttaccgaagttntgagcacacgagagccttacagtc

SEQ ID NO: 2900 - DNA, 438 bp, Oryza sativa
  unsure (1)..(438): unsure at all n locations
tttaactaagctcttacaagatcttaccaaggcaagcggaatggtgacatacaccgactcaatcaagcaccccaatagaggttggatgtatcgatgccttggcaaacacttgctgtacggctgcaatcaaatctgtggagctctaagtaggcttaaatatgtagcaaaggaatagcaaatgctcaaatcagataatgcaaagttgaataattgttcaaagtcaagtaccgtgctggtcctatgctagaacgtactaaagacgcgagcctagacacaaacgataccacaagatagcactaggaacaactcatgcacaactctgatatatgaagttcagctcaaacataacagtatttttgtgaaagcaaactcaaagatacaactcgattttctcttttctttctttctntttctatcttttactttctttcttttctt

SEQ ID NO: 2901 - DNA, 431 bp, Oryza sativa
  unsure (1)..(431): unsure at all n locations
agcttccttgaatagattatatttcttatctcgaatcctccaagaatccgactgctagcaacttgataattcccatcggtcgattccaagactctgaaaccgatactgactctatgccgatgatgacttctggcttaccaaattttggagttaacaatattcntatgtttctgaatctgaagaagatgatgtcttcgaagtagcatcatcagccgaatgggcgagaaacaagaatggtttaacatgttagtcggtcaagaattctgggaaagatgagagatgattttgacatcaccaaggctgataaaatatttaatctactactttggggaaagcagatccaactttctactgtgcactcaatctcatccgttgatgaatagagaaaagataatattgaattggcataacactggtctatactaccaaga

SEQ ID NO: 2902 - DNA, 460 bp, Oryza sativa
  unsure (1)..(460): unsure at all n locations
tggccggagggagaatcgtctttatatcgccttgcgcacctatgtgatcttctgataaagagaagacaaagtttgcttaagcggtgaaaacggaggttactgtgtgaaatttctcgggggtgacggttagtatttaaagcgctgcggtaacggtcggaaaaacggcaatgagcaatattctatgagaagcagatatggcaaatccgaaatattaccaaatataccggacttggggggcatgtgttaacgaccaaatttggtaattcacgtatcggagatggagataaaatcgaagcgaaatccaagatagaacaagaatcggcttaagtccaaatcggctatgatcaggatcggaagagttcgagtcggactaagtagccgattgagccgattccgacaatgtgactcgatacacagtgtcnggttgaagtaatggtgttcatatggattgaacgcacgg

SEQ ID NO: 2903 - DNA, 458 bp, Oryza sativa
  unsure (1)..(458): unsure at all n locations
ttaatctgggtcctttttaccggcctttntttcgctggttttttttccaatcgaaccgatccgttgttgtttctgtccggtttttatgtccgtgggttttcctgatccaaaccgatgcaccgcgcgcctccccggctccccgccgctcgggccgaacctaataaaaaaacgcagcctggttttttttgccgctggtttttccgattcaaaccgatttgttgcaattttttttgtgtcaatctgttttttcgagaatgctagttagcgagcgcgccggcggcacgcgtttcatgcccagaagaccctgcgccggcgcgtgcgccttcttcgcacttatttnttcttttttaacctttatttccttttctttcccgactttttctaactctttttaatctttagcatgttttgagtttgaaagtttataaattttgagttgaaaattntcaaatctgaac

SEQ ID NO: 2904 - DNA, 263 bp, Oryza sativa
ctcagaccaaaacgcgcgactgcccacagagcagttttataaccccccacgccgcgaacgacggggctcacggaacggcagccccttgcgtcagcggggcaggagtctcccccactgagaacgcccgaaagaggccaaacgggagaacaggtgccggaaacgacacctactcgacggggacggggagaacaaacggcacaaaatcagttaaaccctcttctcatcttagcggcccttacggcaggccaaggcccacccagaag

SEQ ID NO: 2905 - DNA, 148 bp, Oryza sativa
aaccctggattccaaactcttcctcacgtctatccaatatgttttaacaagagagatcgtatcatgctggtttacataaataccaattatatcaattctgctctacaagaagatctaaaggggcgatttctcttgaatctctctaatg

SEQ ID NO: 2906 - DNA, 444 bp, Oryza sativa
  unsure (1)..(444): unsure at all n locations
catgcaagcttgaaaaagggtgaaattcttatttgagtgcacagtatatgcattttatgaaactaatgagagtaaataattagagcagaaaattntgacataaatcttgaaaataaaacaaatataataaattaaaaaaaatatttgaaatattaataaggtaatgtttttttatcgggaacattcataaaaagtcatatatttgtatgaatgctactcatttttatgaatctttaaaataaaataaatacatattttttatttcattatctaaaataagttgtgtcatgatcaaggaatatttctccaaactggtttatagaaatttttctggtcgctgcatggctcctttggaagcagagtaatgaattatatttaacaatgtttctcctccctcccaaagtggaaataagtctcaagtaggagctaagtctataattaact

SEQ ID NO: 2907 - DNA, 375 bp, Oryza sativa
  unsure (1)..(375): unsure at all n locations
atgctccaccaaagtcaagcgcacaggctctcaacatatcctctattattttgatgactcgctcggtctggccatctgtttgtggatggtaagcagtgctgaaattcaaccgggttcccaattcttcttgtaatttctgccagaactttgaagtgaattggcttcctcgatcagacacgatcttcttaggtacaccatgtaaacacataattcttgccagatagagttctgctaatttcttccctgagtaagtagtgtgcaccggaatgaagtgagccactttggtgagtcggtcaacgactacccaaatagaatcatgccccaatgacgtcctgngcaaaccggtgatgaaatccattccgatttcttcccact

SEQ ID NO: 2908 - DNA, 427 bp, Oryza sativa
agcttaaatctccgacgatagccgtcgatatcagtgtaaggacaatgtaccaggatgttttgtggttatggtgggacatcccgcaggaggttgtcacttagatgcggatgcatcacctttgccggaggcgtatgggaaaagtaggatgagtggagatcttgcagggaatggcgtgcgtggcagagcaagtggacaaccggggtggagctcgtggatctagcgggtaaccatggtggtgctggttatttcggatagaatactactcctagacttaaatcactgaaccactctggtcgatttattatgtctaaatgatctttgcatgcagcttcttttgaaatacagctataagttaaaaatcttttcgtatgcgaatgacttagcaaccaaccgtggatacactttatagaggcagatgcgcaccgct

SEQ ID NO: 2909 - DNA, 476 bp, Oryza sativa
  unsure (1)..(476): unsure at all n locations
ctcaaagagtctactctngggttctaatggttaggaaatgttcacgtgttctaaaattggaataatgttcaaacactccatgatgtccacatttgtaggcagaatcactttaaggaccttaattccctatttcctctatgtgttcgtttggtggctaccctttatattgtcagtaatcccttgtacatctcggtacaaccaccttaagtactatatgcattataacaaggaagacatggctacagtgaacttaagccatatcttcattgtaatacacaaagtactttattactctattagatatgattaggactgtggcttgtggaatatgatcatcacgcaattgattatccaactttcaaaaatgtaatgagcttcagttntgatggtaagatcgagtcacatataacgacaatcangtgcactgctaattgactttgatatgagaagagtgatcgacactatcaccaacagca

SEQ ID NO: 2910 - DNA, 433 bp, Oryza sativa
  unsure (1)..(433): unsure at all n locations
agcttcactgctngaattttttattattacacacagacacgcgaacaccatactcacaaaccagcaaatacacctcttaacacacgtccaaatagacagaatcacaacatatttttaagtcttacttattttttattaaaatcacacatacatgtacgtaatatttatggatatcaggagttaaattctattggatgaaatcagatattcatgacttaaccaccacactcctacttgtacttcactccagtgaaagttaagtctttggtaattgcatcagctagtacctagaaattcaggtgcgaaattcacccncaagacctcttggcacgacaacaatgagctgctgaatgggaatcacctatntgttagcctctgattnttgcaggcaggactgacgggtcgtgcaatctgaatagtactcagctggagt

SEQ ID NO: 2911 - DNA, 397 bp, Oryza sativa
  unsure (1)..(397): unsure at all n locations
aagcttctcaaaacttgtgtgatttaattacaggtacatacgtactgatccgctttgtgcagttgctggtggtattttgttctgaaatgtgatacaaaggcaagctgctgcgggtgctcgtgctcccgggaccggctcctctgtctttggcatcataagtcaggaaagcacagtaatttaagtcttacgctacagtgcaaaacagtaaaagttattgtatagaggtactttgcaccgtactataccgattgatctcgttcgtttactttgaatgactaaaaatacctccaaagtcatgctagtgtagctctctgactacactttacacaggatttcattccctcccgctctcacttgagctgcccagtggactgctctgattcngtggacttggagt

SEQ ID NO: 2912 - DNA, 424 bp, Oryza sativa
  unsure (1)..(424): unsure at all n locations
agcttataatatgaaacanaaggttgagttcatgtatatatcataactagagtactccctccatcctaaaatataagaaatttcagatagatggggtgcatcttaatattaggaatctggactagcttcctgtctatatttatagtactaggatatgtcacatccacctaaaatctcttatattttaggacggatggagtatattgcatttatttaccaatcagcgttcaatttggagtagctcacatgcatgatgtttggatttagagaaactggctagttctgttcctggttccagcgagccgcgaggctgtgtgtttagtttctgaaattggggaaaagtttgggaaagttggtagtttgaaaaaacagtacgagttatgtgtgaggaaagttggatggatgtgaggaagttggagttggg

SEQ ID NO: 2913 - DNA, 409 bp, Oryza sativa
taccaccaaacgacccccgctaagcattgttctactcatctaggcctactttatctttctgagacgagacttccaaaatgatggtctcacagtggtcatgacatacacgatgctgtcatcgtccatctaaaaagatgaggtgttcacccataatagctcgacaagaaagggagagggtcactctctacaacgcctcaaagaggttatgacgcccgaaggcatatccactgtctgtccggagaaccaccgaactacgcttttgcctgtgaccctactaccttgactgtagatcgccgtccacctactctgaacctccacatggacgaatggcatgtcgtatcttccaccacatcacaccaaagcctctccgttgtgcgactttatctaatcaccactcctgagagctgtc

SEQ ID NO: 2914 - DNA, 290 bp, Oryza sativa
  unsure (1)..(290): unsure at all n locations
agcttattaattagtgctaatctttcgtcattttaaaccaaacaaaattcgtacgtattgcgcatgtttcttactccctccgttntaaaatatttgacaccgttgactttttagcacatgtttgaccgctcgtattattctaaagtttttgtttaatatggaaactatactgtgtcatgatagtctatttaataattaattatatcgtatggatacaatcgatagttatttatagtttgtgatcagactattgttcaacgcgacttagaaagtaacggtgttaatatctt

SEQ ID NO: 2915 - DNA, 469 bp, Oryza sativa
  unsure (1)..(469): unsure at all n locations
ttgagacaattgctgttatgattgattttgtgatttgcaattgcactccttatctatccatttgcaagatggcacatctgtcaaggtgcaatcaatgccatttccttttcgccagatggaacttacttggcaaccattggacgagacggtaatttctgtccaaaaacccaatattcaagatttttgcaaatgaaaggttccccgcgttcatagcaacattgtactaacgttgttcaatcatatccaggttatttacgagtgtttgactttgcaaaggagcaactaatatttggtgggaaaagttattttggggctctattgtgttgctcttggaggtaatgccaacgcatctattgttgcactggcataagacacttattntgtctcacctcatatatttgaatccagaaatcaaatatttcgtcgaaatattaagtatgtcgctaatgaaaacatgatatacatagtt

SEQ ID NO: 2916 - DNA, 393 bp, Oryza sativa
tggcagccaccaactgccaattagttcctatttttcttcatcaaatgagctttctgcctccaatagccatcatgtaatggttcagctggatttcattcatgtgccacatgaaaagaatgaaacacattaaatagcatactatcaaacaaaatttgttggttagacctgctcaattgtcttgtggagcagtacagataggggacaatggcagcctgcaaagcttttgaccaaaggtcacctcttgcactgaggtttgttagctgctatgttgtggttagtaaaaagtttgagcagttgaaaccttgtatgataattgacaagataaaagtgaggcagcacagagagagaaagagatagaccattcacccctgctcacctgacaagataaaattg

SEQ ID NO: 2917 - DNA, 56 bp, Oryza sativa
actcagctgctgcctggagggacttagagattctcggttccgagctcctatttttt

SEQ ID NO: 2918 - DNA, 329 bp, Oryza sativa
  unsure (1)..(329): unsure at all n locations
agcttgtgcagagcatggcgtacgactccttccagnactcggcggacatcgagctcttccggcggatggcgtttgccaacgacctctccaccgctgagctcggctactccggcaaggacgacgtacgccgttcgccacgctagcagcagctccaggaccaggcccagctgagcactaacggcacatgcgctgttgtaaatttgttgtcgtaactaacacgcatgcatgtatgtaagacggggcggcagaatggtgtcatataaaaaggctttgaatagcaatcctgtttgattggggaacagagtttccttttcttcttctttaagctc

SEQ ID NO: 2919 - DNA, 300 bp, Oryza sativa
  unsure (1)..(300): unsure at all n locations
tatcagagaaatcaatntactcatggaaagcaacgattgatctaatttgtggtatcaatcttaccttaaatgtacaactatttattaatcatgaaccacaggaggtatttctattgttgaacactagaactacaaattgaatcagaatactagccttcacagtgggcttacctggcattctgcctcgacctcccacatcgaagtggaggagaaaaacaatgccacatgccaaggagggcccaccaaaaccaagcgtgagtgtcaaacaaagccattcgctcttcgatccccgccgaacca

SEQ ID NO: 2920 - DNA, 374 bp, Oryza sativa
agcttaaattgaagtggaggaggagaaggttcaagatccacctatgccaccaaggatacacaccgctctttccaaggatcacccaattgaccaagtgttgggtgatattagtaagggtgttcaaactcgatctcgtgtcgcttcgatttgtgaacactactcgtttgtttcttgtcttgagccaaaacatgtagatgaagctctttgtgatccggattggatgaatgctatgcatgaatagctcaacaactttgcaagaaacaaggtgtggactttgattgaaagacctagagaccacaatgccatatggacaaagtgggtctttaggaacaatcaagatgagaacagattggtggtgagaaacaaggcaagat

SEQ ID NO: 2921 - DNA, 361 bp, Oryza sativa
  unsure (1)..(361): unsure at all n locations
tcggtgaagcttatatacctcctggtgccctcttgatttctccgctgcatgacataatctactatttacaatcatgagtactctctttgccctttgagccccgcatcggtatagccgatgaagcaactatatgtgggacgttacgccgggctcacttgccaagtcttgttattcctgctgagctagtgtgaaaatatgacttttagaaaaggactgtatcaacgggacatctcgaggtaattcgtaacaaatgcgattgtcaagcttggcagtgcaccgcgtctgacgaggacataangcccatgggacatgtctcctccctcangcctataaaaatgccacaatagcctttcccgggcta

SEQ ID NO: 2922 - DNA, 353 bp, Oryza sativa
agcttgtagaatatttttcatagttctattcgaataagtcccgaagcttctcgccacataaacagaatgttgcaagcggatattggcgattctaaatttgccgaacccggctaagccggggagaatcggatgtaacttcttttgtagatgtccgtggatatattataagcctaatttcgagtccgtatgacaaagatatgactgttttaacgaaggtcactctaatcaggggtctatgttctttttagtgcgcggaggatacaaggcaactcacataagctatctgcagcagattatacacaaatagatagtgatttggtgggtgactgccactgtggtgaccgtggtgatga

SEQ ID NO: 2923 - DNA, 387 bp, Oryza sativa
caagctttaaccctaagagcatccttgtattttttaagcatctcttctcaatcgagtcgaaagtgatattcagcacattaccaaatatttaaaagtgtctgtcaattactaaatatttaaaggtatctgtcaatcatgatacttttttcgatgtctactggtaaatcgcatgaatttcaagtgttatagtatgtagcaaaaattgcttaaaaaaatggatgacctcacccgagttccccatcagaagcaaaccctcacctacttctccccatctctctcgctccgcttctgtgtttccagcggatgcacggccacccccacccttctccctcacctcgactcgcctcgcctcctcctcgggctcgccgccggcgagcagggcaccgt

SEQ ID NO: 2924 - DNA, 394 bp, Oryza sativa
  unsure (1)..(394): unsure at all n locations
tgctatatgacaaggataaagctcatggacctgtggttcttagacaaaaagtgtattgtgtctctctgtcacgcttagcctaacaaaggttagcggagcttgtataaaaaaacaaagtgcacgctaaaatatatatatgagaccaattaatacctaacttgtaattaaaggggatccagtaattatacggttcatgtcagaaggtattaattaagggcaccaagaacactgtatttctttgtatatatgccagggggagcaacaatatctacagtgaacattgattatgcgcaatcagccggttntctaaattaaatgctttaaaatgaaactagaagagaaagtacttagtcggatgactgatatctacgctgtaagcagactatgacagtgc

SEQ ID NO: 2925 - DNA, 442 bp, Oryza sativa
agcttcatttctagagatttgtatatacattatgttcttgagaaaaataatcaacaaaataacgggtgaaatccaatatatcctatatatttataaagctcattctctaagtgtaattaatgctatttctcttttatttcattaagccacgtcaacttaattagttctagcccttggatgattaatctatggtacaaattaattacctccttgtcttctcttatggagtcataccaccttatttttgcctttggataattatctatattatctcttttcttttccttctctcactgagcacaatcaccttagtttgctcttgaatgagcattgtatgtacaatataaattgctataaacaaaatcatccacatttgtttatacctttttctcctcaatggtcgattaaagatgaaagttatataaagtatataaagttatgt

SEQ ID NO: 2926 - DNA, 481 bp, Oryza sativa
cttcgtatttgatcatgtgaactatttgacgatgtcggccgttttggttggttttattatcatttatatatacaaagcacaaaaggagatgaaaattgaagtgacaaactgcagtgagttggattctatgcctccgatatatttatatatattgactgaccaagagtacgtcaattgctggttctaattggctacttttggcaaaagttaacgagatgccggcctcgggtaccacaaccgcattttttgtccagaacaagggaaaattcgaaaataatgttctgttgtgtggtcatttcgaggaattcacactattcaatcatgtgctgctcatatgttatcttaaccattcttcgacagaactgggatttcccacaatcgtctactttctcgatcagtcagtcaatgtttcagtgattatttgtgaccatcgtttccctctttcttggagtgctagtaatgaatggatagcatgaaatct

SEQ ID NO: 2927 - DNA, 413 bp, Oryza sativa
  unsure (1)..(413): unsure at all n locations
gctgcagctttaaacatacgatagggggaacttgctttcaatattcttaaacactgtataaaccaaccttttcaaactgtataatactaggtgataaattcatttatttggatcttaaataattaccataagagctatattctaccgtgctactagttgtacagccgcagctgtcagacaaccattgctaccgaacatccctataagctaaggccgtgcttagttcggagttttaaatatagaaaaaaaaataattatatagagtatgtgtaaattacgagacaaatctcttaagtctaattgcgccatgatttaataatgcggtgctgcagtgaatatttgctaatgacgatataattatacttaataaatntgtctcgcagtntacatgcagaataatgaatttgtttatt

SEQ ID NO: 2928 - DNA, 469 bp, Oryza sativa
  unsure (1)..(469): unsure at all n locations
tctagagctggaggatccacaagtcaacaagacataagttgtgaatttatcaccagcctcctactacagatgggtaattatccaattagtccatcttatttgggttcgacttggaggcaacccataatcccatatatgaaaactactgaattatactcctactcatttactctctgtccatatctttaaagtgggtccagtaaacctcttaatacttcagtactttattttnttttcttgtcgttactccctcctcctctttgttttttcccttcttactttggctgtgtttaattccacatcaaaattagtagtttgaagaaattgaaacaatatgacgaacaagttaanaagttgtttgtgtagaaaagttcgatgtgacggaaaaattagaagttaaagaaaaaagtgaaatctaaacagggcctttctctcagcataataaacgacatagtaagctttatatctc

SEQ ID NO: 2929 - DNA, 426 bp, Oryza sativa
  unsure (1)..(426): unsure at all n locations
ggaccctaagcgacgcagctgcagctgtgggcggaaacgtgatggtattgtgaatcatcgaagagggttggagctgtgctcgacctgcacgttgggggacgatctcaaccatcatgcatctgatggctaagaatcaacaaaagacgtccgtcttcaattcacgcgagcattctcttgtttgaggctaccctgtcaggcttcaactcgggaggaataggagaggagaacgtgcgccgagggcacaacgacgtggtgcggagccgggcgcaaggaaatgcgcggtgcggtgccggacgcgatagcgcgaggagcagtgntgtgcggttgcgcaacaagtatgcggcggcaagagatggatggggattatggttgacgtggattgcattgcatctatacctgctcgtgtgggctttttgaggctgattt

SEQ ID NO: 2930 - DNA, 456 bp, Oryza sativa
  unsure (1)..(456): unsure at all n locations
tcatataatgctgtntttgcttattaagcatgtactgttctgatcacaggacatggatcgtaaactgaggatattttctggaaatgagcacccattccatgatcgccctcttgaaccttttatgatgccacgacgccaagtgcgcgagatgcgtccccgggcaagacgcgcactgttaatggcgcagaagaaagagcaggacagagcagcagcggcatcaaccaaagatgaagaaaatgctaagaatgccaaatccgagatcactgcatagatgcgcattcagaatgtgttgtgtgggtggagattgctacaaatctacctgttgatgtttttttaaaggatccatgtatcttntatttctttgacatgtagcctgctggattcagtagacggtagaatcatataacctggaaatgagcagctcaatctgaatgtctntttgtgtcttacagttag

SEQ ID NO: 2931 - DNA, 430 bp, Oryza sativa
agcttctctctcctccctctccgggattggtgcggaatggatcggagatatacgggtttcttctcttcgtaaggtatgccctagctctttcctagtatcgatttcactcctgaactagttcgttctgcgttaaactacgggaatctattccaaatcgaaatgttccgattagtgtacatgcgcccatggtttaggcgtggacctctgtatagaatgcccatattaactcttgcgtaagatgcatttgatgcatatgaagcccttaatgcatttccggatgacatatgggataataaacaacgatatttccattatcttgaaaagatatgggataattaacaagtaacaacgacattttcttttacggaccagtcatatgagcgagcatatgatcataccatctccataacagatgcagtaaaatagcatt

SEQ ID NO: 2932 - DNA, 380 bp, Oryza sativa
agctcggctagtggcttatcttattgattctgttaccggacgtatattgcaccgtgtgactcatcatggagctcaaggccctgtacatgcagtaagtaaaagtagacttttattatttttccattgccccttccagtcactatttctgtgattctgtatgaaaatttcacactggtaatcccttttgtgatattgttttatgcttgaatctgagacagttacattctatgtttttatcatggaacgttctgtgtactttgcatttttgaaagctatatttatttaaagaagaaacatggttatttcttatatgtttcaaggttgtaagagagaactgggctggatatcattatttcaatctccgagcccacagtattgaa

SEQ ID NO: 2933 - DNA, 324 bp, Oryza sativa
  unsure (1)..(324): unsure at all n locations
cactacacatttcctctatgatcaacaaagagaactgcatttgtggggcaaatggttactgaagtgtataatgatgctacgatttctttcaaaaagataatgttgctacatttattataggaggtgcacaacgctgtactgatggtggagatgaatacaatcggtgcaaactttcaaaaatcactatagtttgttcacttgaattcgattcacccaacgacattgatctattgttgatgtaattggtagaagcatggatggtcatggtctacanagtctggttatctgaagctaatacacaaaattggatagctgctatacttg

SEQ ID NO: 2934 - DNA, 428 bp, Oryza sativa
  unsure (1)..(428): unsure at all n locations
agcttaaagatgaaatcaataacttgaattttatattgagtcccggaaaagtgaatcaagcaaattagagtctgcactagcaaagaaacacaatgactacaatgacttgaggaagcagagagatgagcttcaagaagaaaggaagtatgtatatttcagccttcttgtttgatggaagatctattactctatagattagatacttaaagaaggaaaatgttccagatcattttggaaggaggaagctgatgtgacagctgaaattgataggctaaaggatgatcttgtgaaggcacaaaagaagttggaccatgcaacacctggggtatgataattccatgttntatacctttngctaatcatataactgactgctatgtactgttcttgggattaccatggtgattctgatgcaccttacataagca

SEQ ID NO: 2935 - DNA, 295 bp, Oryza sativa
tcagcttgctcttcctgtgcattctacacaggatgaatacacaactgagcacggatttttttttgaagatacagaaaaagagtccatgtcaccagagaaggcactgcctgctgaaccacaggagccagaagagaatccatgttcccaagaacaagatgaagaagaccggcctgatgcagaacttggtgatgcacatgaagaagatcaccaagaagctgaacaagattatttgcctgtctctagtttcctgatgaacctaatattgggaaaagacaatgatgatccacagaaagat

SEQ ID NO: 2936 - DNA, 257 bp, Oryza sativa
tactcaagcctactagtatcctaagtgacactattttatgtgtgtttatccagatattttatatgtgtacacacaaaagcgcgagccagtcccgcacaaaaagacccaatgccaggggagctctctcgctcgcccgctcgcacgtgtatcggacaaactcatcgctcggttgagttcttcttcttctccttctcctactcgtgcgcgctctgcaagccttgcaaccccataactaactagctcggcgaaacggtcgg

SEQ ID NO: 2937 - DNA, 368 bp, Oryza sativa
  unsure (1)..(368): unsure at all n locations
ctgcagcatgcaactncctacaagttcaccctattatcttcatatattgtgacccacagttcaatctcacaaatgtgagttccttcaataatgctctgtacgacaacatttttgctaattaaagccaacagaactcattaaagcataaccaacctgccttgtagttcacgaaaagatatgcatcttcacttggatagggtatatatataggtactctcctctagatattaatggtttgttcttcccaggatcttattcacgggatctccgatcacatatactgggttaccaccatattataactcacatggtgctcatacccatcttctatcatgcaatgtctatcacatatcgtgatatgcccttcg

SEQ ID NO: 2938 - DNA, 235 bp, Oryza sativa
ataccactttctgggccatttgctggttggggactccatattctgggaacggttatgcggaacccgggccgggttgagtatctgtatgtcccgaacgacaagttcactatatggcccgatgcttatcccgacgtcaagataccataacacttcgcacttataatcattaaaggcatcactggcccggtgtggagtggctaaaccgattattacggagtatggcgcccaattcact

SEQ ID NO: 2939 - DNA, 300 bp, Oryza sativa
agctttattattcttgggatccggatctgttattcattcaatggaacctctagttggatattcaccacataaaagtcagaatatggttcttatgggtggttaagaaaatacattccaattacaagaacttgttttttatggagtaccctttctctttgtgggattccacctcttgcttgcttctggtccaaagatgaaatccttagtaatagatggctatattcacccctttttggaataatagacttcttttactgcaggattaaatgcgtgttatatgtttcggatattattacttac

SEQ ID NO: 2940 - DNA, 439 bp, Oryza sativa
  unsure (1)..(439): unsure at all n locations
ctccccagcccctcttcattaatggactcctgacggctactaaggagtgtggttcgttccacaaaatcctacctctatatctatctctgaggggtgtgggttttgcaaaactccatagatatgcagaagagaaatgctatccccactccgaccaagacagaacttttaccaaaagtttattgtgatctttttgttcaaataacaattaaggtgaagcagggtcaggaacaacgaatctctttatgataaacagatcccatttgcaagctcgttattacgggtagttcctacaaagaatcggactaatgacgtatacaatgcttgaattatcgacgtagatgctacatagtgngttctcatcctttagagactacgagtgtgataggagcatccgttgacaaaaggatcaccctaagatgatcatctcatggctattggg

SEQ ID NO: 2941 - DNA, 313 bp, Oryza sativa
agcgtaggagcgacactttgctaacgaggattcatgtctgacatctaaagtagacaagggataggaaccaatacatgctcaaatccaaattaaacaaagcaacaaacgactcaagtaactagccaagcatgatgatttgtatgcatggaacatttttcatgaatccaaacaaaagatactattgacactgactatgcaataacttaatgcatgaaatatatgcatgataagaatgatgcgcataaagattgcaccccatcctacctagacacatcttaatgcatattacccagcatattgccggctgactgtc

SEQ ID NO: 2942 - DNA, 416 bp, Oryza sativa
  unsure (1)..(416): unsure at all n locations
tgggtgttggcggcggcatttctcctttaagttcagctaatttcttctgtttatggtacaccttgctcttcaacttgcgaataatgcctcgaattcaatttttccgggcatgagctgcattgtctcgctccacacttactgcatccatagcactaagcatatgcaccgcatgcatcagagtagcactctcttcaccatcaggacagatatatgttccatagtcttgaccatgaggcttatgaggatgatactggaaagctgatgaatccaactcttcttcaaagtgttgtcgcaactctccaatggccaccaaagctacttctngacaagcatggcagtacgatcttcctccagcttcaaacttaagagatggaaggtgttcactatcactagccaacgtcacacgaacacgacac

SEQ ID NO: 2943 - DNA, 339 bp, Oryza sativa
gcttatgtggagtcgtggcactcaagattttgttacaaaaacagccaaagacgcgaaggtgggagttttctggggtggtgtgatgtatgagctgaaaaggtagcgagtggtgaatataggatgagggtctcccgctgagaaggtaggtggcggtggcgatagcctcatcccagtatgacggaggcataaaggcctgtataagaagggcgcgcatcggagtgttcatggtgcggagcatccgttcggctttaccatattggggggaggtgtaaaggcaagagagtcacaactgggtgccacgactagtaagaaatgaagtggtggcggtattgacaaact

SEQ ID NO: 2944 - DNA, 111 bp, Oryza sativa
aacactgtcatttgatatgttcttttaaggttgattttttaggggaaatagggcggtttgtcagttggtatcttgcgaatccttatttaccacctaggcatgctgccctta

SEQ ID NO: 2945 - DNA, 379 bp, Oryza sativa
  unsure (1)..(379): unsure at all n locations
cgcgaagccctttttttcccgcttattaagggatgggctatacgtggcgtcacaattttcataaaaaaagttaaaactttntttacacggncaattttagaacttacacattaaatttcatacagagatctatagcaatcacatagaatttactacatttttagcagaactgatcatcaatgaaagcctaaaataggattgacatgaatactctctacaagtatacagttctgagataaatcatactagtaagaactatgaacggtaaatacaggacttttgtgcacaagccacataggactataatgcataaatgcatgtatatttttcttgtaatcacacgaattttcgtctatacatgggcttaacattacnatta

SEQ ID NO: 2946 - DNA, 277 bp, Oryza sativa
acatacacctagcaagggtgacctttcgtggacttgctaaaagtggcatattctggagatgtctcaatatcaaagctttggcctcgtgtcctcaagagttgccctcttaggttgaaaacgacaagccttctctgagattagaagaaactgtcaaaaaccatctcctgtaccttgcttccctagttttggggtcattgggaacgcgcacttgcagattgctttatcctttgacactaaaaccaacacttttacttacccaaacacctttcggtaacta

SEQ ID NO: 2947 - DNA, 422 bp, Oryza sativa
agcttataaaaaaataacatataccaaatttattttattaaatcctatattaaatatattttatatattatattaatttatttggtgttgaaaatattaccatgcttttcgatattttttttacttacagaactgccagggtaatagagggagtagtcaccgaaatataaatgcttattttaagaatgacgactattttatttagcaaaaaaaaccccaagagaaacgggatgttcagatttaaaaagtcacgtagcaaattaaacaaatcaatttttttataactctccaactaacggaaatatttctcaatgttcattgacatgtggcccccaccaggccaccaacatctcctccgttacatttgttatggttgccgagtgatgtacaatagctctttgtaaatatcagacgccgtcacg

SEQ ID NO: 2948 - DNA, 423 bp, Oryza sativa
atgcagcttattactgtggaaaaatgaggccattatgataaataaaaaacaagtataaacaaaagcttattacgtactgtggggccagcaagcaatgatgttccacagtctgctatagctgaacaaccgctagcacaaaatcctgatagcagcaaaggtgtaacgatgtgtaagattatttctcatttatacagatccgatatgaaaaacaagagtcagtacctgtggtctttcctccaatcaggacatcgcccatctcaaactgcacaaagtcaatgcaaacattacatcaaatgtcgaaaacactacagaacttagcagaaacaggaccaacctgccaatatcccttctgagagactggaacatatgtatgggtgcccttgtagtggctaggatacattcctccaaacacaatttcaccac

SEQ ID NO: 2949 - DNA, 383 bp, Oryza sativa
  unsure (1)..(383): unsure at all n locations
ctcttctaagatcaatggtctcatactttatatctagtgatatgcaagggtcacttacgagtatcaactcagaaaggtcaggtcatgcattgctcaccagtgattccgatggacccaggagaatatctgnggcttcttatagtgggttcattgttgatgccaatgtaacttcgtacttgatgatgggttcattatctccaggttatattccatttgttactaatgttctacttctaggcagggaactgttcaatgtcattgattgcgaataatattctcacatacgtatcacaggtctgaagtctcatgctgtgacactatacgaggccgganagcttggtgattctcgcattgctgatctatgcaaggaccttgctagttta

SEQ ID NO: 2950 - DNA, 368 bp, Oryza sativa
  unsure (1)..(368): unsure at all n locations
agctnnttggcagtgcaccatcgatcttacctttcctgaggtaagagacgggaaaatcgtaaccgttgatcgcactgatgcgatcggatcatgtcgtgttcgtaggaaaaaaatgtgtgcgcacaaaagcgttcttgtcatcactgacgaaattggagactgaaacatcatctgattaactgtccgttgtcgtttttatatctgagctgtaaggccatcatctttcgtagaaaacttaaagcaattctcgacggctcgagtgtatttaatcgagtggtggcgccatggcggccaagctcctgaactgaagaggagtggatcgctttctgaaggagaaagggacactttgctgacagcgaccaattgat

SEQ ID NO: 2951 - DNA, 338 bp, Oryza sativa
  unsure (1)..(338): unsure at all n locations
gacgcatactgcgtttctattttgatactaaatgaggacaggggaaaattttataaacttgttctcanagaaatgccgaatggcgagaggagacaatttgcgaatagggttctcagataacttgttcttatggtttgaccatatggctcnacctacactcaaggtgcctctgataccactttgtcacgcccagatatatagttcaaatatctagactatcttgtgtttacatccctgtccaggaccagccagggtacacaaatcgacatgttatatacagtttctaacgtatataaagcgtataatactctcaaaagaggcacttagtcctcgcaccg

SEQ ID NO: 2952 - DNA, 312 bp, Oryza sativa
  unsure (1)..(312): unsure at all n locations
tattaatatattcgggcggcgatttccggtataagctatatagccaaaattaatcatatgaatttcttcatcaaccatgacaagtagggacgagagcgataatggccactggcggatcgtgatgaggagcaacgcccaatcatggaggagcacatcaaggtggctacacaagagatgttgatgagatcgtgcatcggaacccatcatggtgtgaatctcaagcctgtacctcttcctaaattctcctttgagaagataatctncgagtcgcccaactcatcccttgctattcaaaaaggtaatgagcggtat

SEQ ID NO: 2953 - DNA, 372 bp, Oryza sativa
  unsure (1)..(372): unsure at all n locations
acaaacatttcgaaggagatattntgtctgccccaatgtagacaacgatnntcgtgtatgtctaaccatctacaaaatccgctatgattngcacanaattactacccacactgaataacattactatttttacatggcaatccaaggatgggtggattactcgatggatcgacaatgtcactccatcatatcatggccagaagataacagagtcagaaacacaagtagagtatcaacgattgaaggaccacgagaatgcaatgcattctgaccgacctataaggagccgataggttaccgcatgctcgattcgtcgggatcgacaaatntgtaccgtgtatcgatagcacttcttatctatcttatcattac

SEQ ID NO: 2954 - DNA, 435 bp, Oryza sativa
  unsure (1)..(435): unsure at all n locations
atccttaagtcacctgcggcatgcaagcttcaggataaaatttgctctgtcatctggaaataaaagagatatggatgccttaactacacagaggctgatgatgtcaactctgctggaaaccatacactctgaactgaagaattctttggggatacgatttgcaaattctgcagtgctttcagttgaaatgaactcaccaaaaaaatatggaacaccaagtcttataccaaaaaaatgttgattttccacaggaaaaagcacaacacaatcacataactcanatgtatatgtcatactgtcaagtgattctccagagctctcaagattgtgattgtccacagagtgatgctcttctggcaaagaagtccaatcgtccaacaaaaagaatccaatcaacatagcgagtactttgatggtatacacagcaacattttg

SEQ ID NO: 2955 - DNA, 266 bp, Oryza sativa
  unsure (1)..(266): unsure at all n locations
gtgtgctgtttttatggnggtaatacaacttacaatgcctgcctgccccanatggaagccctaattccaatgtaaatactctgtaagttctactcattgggaatatcttctaccggattagaggtgctgtgtcctggttaattatgactgctcattcaccaatgggaatatggagtggggggtagatctagatctgtgagcctgcaaaattttcagtacataccgagtaatttttactgctgctatggcggcttctcccataacac

SEQ ID NO: 2956 - DNA, 436 bp, Oryza sativa
  unsure (1)..(436): unsure at all n locations
agcttggtcttcatctcttgcatgcttttagcgctgatttaaccatcaaggtagtttaaggccctggtgataatctccccgatgacaggagctgccacggattttcctgcaaacaccactgcagccgaagtagccatggcagcgtggagaactgctggttgctatggctgttgaagctgcagaagtagctatgagtggagataatgtagagagagagaaaacaaacacaggtgatgcttaaaccactttcctctttgaaatggattgaataaagttntatactcagtttgtgggtgttttcttctgccgtgtagngcttattcttttaattggtgtataaaaacgaagtactaatgatgtaatctggtttacagataaaaacgcttagatataatatggtattatccaactatcatgtctcttctaactggttcat

SEQ ID NO: 2957 - DNA, 389 bp, Oryza sativa
  unsure (1)..(389): unsure at all n locations
aggtgcgcgtcgacagaccatttatgagaaccccgtttggtgccttcttgtgtagatcgttgccgatcatacagtagactctggctcttcgggatattttctcagcttctgcgtcgtcctcgggcaactcttcgctgctatgaattaatgagtggggtgcgccagtcgtctgtggtctcgatatcgggaacggcgcgctctgcctcaatagccctcgagctgatgcgtggggcgaccaggctatcttcgtcgcttgcctctntcactgatggcctcggcagcatgttcagaaaggtgccaggttcaagtggctcttgtctggacgcacgccctgctagatcatccggttcgatggtgtctttgccggatacatgccggacctcgatccc

SEQ ID NO: 2958 - DNA, 382 bp, Oryza sativa
agcttgccagtgagtatggtggagaaaattgggttcttaagcaatgacatttcaagtttttcatgcacacggcacaactgaatattgtaggaactatgggaagatattttcttgctttcggttcttcttctgtatactatcttgtgttctttatcccaaaaagatgggtcaatctggagatcggtttctccttcatgcattgagcggaggattgactcaaaaagtggcgtaaatgactggagttgtgttcctttgtaagagaatttcaatcttgagaacttgtgcccgtcaccttgggaatcaacattcgttagtttgtttctcttaaaatcatgatattataattgaccaagtaaacaacattgcggtttgtaacatcctg

SEQ ID NO: 2959 - DNA, 363 bp, Oryza sativa
  unsure (1)..(363): unsure at all n locations
tatctacagaatgggatatctgaacaatggcagaggataccttctgttattgctattattgccgcagaagcatctttgacactacttgatagctctcatactcagtgtgctacaattagtaagtttttgatgcattctgcctctgtcaaccttcaggtgcgttatgtttatttacacctattaactagctttgaataatgaacacagcgtcatacttatatatactattttgtttgactgcagagcattccattatttccagcattgtttaggagtaatgctgtgcatttcaaatctgaccgcttgtggatgcttcagtngttatatgctggatcaaacntagcagatgatgctaagatatac

SEQ ID NO: 2960 - DNA, 414 bp, Oryza sativa
  unsure (1)..(414): unsure at all n locations
agcttgncacatgatattgatacatgggcttatattgggcgttgttcatctcaatccttggaagatcttaatcatcttttccaatgccctttctcggtgagatgatagaatgttttaggtattggtttgggatacctctttgacactggatagcatgatggcggatgccacagatatataccatggtcattaatttatggagaaattcttatttgggtcatggaacatctggaagcatacgaactgttgtattattgaacatactcatccttccttgttttcttggagacaacttgaacaagagagataaggatgtacttttagctagattaaactgtgatcttttttcatttttctatactggttctttcttaaggagagcatttaacactgggacttcttgcatgattcttt

SEQ ID NO: 2961 - DNA, 313 bp, Oryza sativa
  unsure (1)..(313): unsure at all n locations
ctacctggcgccagatgacggagcgtggtgctcctcaccgggagaccgcgctggccccnctntgccggttcggccggtgaccctgggtgagactctaaactcccaatctgtatgtggaaggttcgcgagaccggaagcacagaagacaccggcgatgtatacaggttcgggccgctgagaagcgtaataccctactcctggtgttttgggagatctgtgtatcanagagctataaagtatcagcccgcctctcctttgtctgggcccctaatctggagaggccagtccaagaaaaagctctctctatnatcta

SEQ ID NO: 2962 - DNA, 401 bp, Oryza sativa
  unsure (1)..(401): unsure at all n locations
acagcaacacgcacaacaggggacactgnaaatttcatggctttgattggacaggcatcaacttctttctcgtttgtcagggtagcattctttgtgatgaactggtccaaacccaccatagcaacagtgttgccacaaggaacaccttccactgactcctgcttcttgcccatccagatgacagttcgctggacattctttacgtacagatctttcttctggccaggggcataattggggcccatgatacggaccttcatgccagttgcaactctccctgagaaaacacgaccaaaagcgtagaacctccccttgtcagatgctggaatcatcctttgaacatacagcataagaggaccttctcgatcacaagttctaatggcagatgcatatatatcatc

SEQ ID NO: 2963 - DNA, 378 bp, Oryza sativa
  unsure (1)..(378): unsure at all n locations
agcttcagctccactcccacaggcagcttttctggtgtataagccaaacatcttctccttctggatcttttttcttcaactgaggttngatgattattgcaaggtgagtacatgatatactccacaagccacacagcaagtatgcaagtgcacaaggataccaaaggatggcataatatatggttcatttgcgaaagcagcatttatcaaagagttgagaaattgtaaaatagtagattaattaatcatcaatattaatcaacactgaacagcacactcatgctgcacaggcccaaccaaacctgaacaaccaaccccggtcgttggcgactcggctggtgctggcggccaacggcggagagagatgctatcgtgggg

SEQ ID NO: 2964 - DNA, 393 bp, Oryza sativa
  unsure (1)..(393): unsure at all n locations
tacatacatcggggtgcctataagggttgcaacttcatcctccaatgtgtttntttgtcatactacaatagcacctatgtattgcacactctttttgtctccaaaatttagttgtaagttgatgagagagataatgtgtgtgcggaagacagaatatatataaagttagttcatctgctaaacaaggttttataagatagttgagaatgagaactctagtgaacgctaatcttaaataatagaaaacacactanaatgagaattataagatgtataacacatctaaattagttctaaactttacacatagtgtttaagagatatatcggcgtgatattctatgagttctgtatgaataaagatatcttactattattggatgactgtcattat

SEQ ID NO: 2965 - DNA, 399 bp, Oryza sativa
agcttaatgacggattaattaggcttaatatattcatctcacggtttactgagggattccgtaattttttttgttattagactatgtttaatactttaaatgtgtattcgtatatccgaatttcgatgtgacacggcaacaaattttacccttggatctaaacacagctatatagcaccggacgaactggattattttccctgtcaatctgatcgacacacacctctcataacgtaacattattcacagagaactgaaaacacatgcaagtttgaagaagcaacatggtaccaactctcacatcacaaccacaaaccattgccccaccatggttgccttccaatacagctcaatgaaagcatcaacatgcatgctctctctctctctctctctgtgtat

SEQ ID NO: 2966 - DNA, 406 bp, Oryza sativa
  unsure (1)..(406): unsure at all n locations
gactgagaattatcttctttttgttctcatagcaatgaacaagtagatgatgattataaaatgagttttagatataatttatgtgaatggttctgtaattggtgctgttcctgcagttcttcgcggaaacagggttcccctgtcctatccggaggaacccgtccgatcactttctccggtgtgtcaacgccgacttcgacgacgtcgccgccgccatgaaaggatccatgaagctgcgagcagtatgtccagctactgaagagatgtttgtaaatgtgatanttatctgatggaactgaattccgacaattttgtgtgtttttcaagaggcagattntgatccgttactcaagtactccacgtcagagatcagagaacggctggtggcaagtacaggatctccgag

SEQ ID NO: 2967 - DNA, 448 bp, Oryza sativa
  unsure (1)..(448): unsure at all n locations
gcgatcttaagtcacctgcggcatgcaagcttctcctcatcattctaccactgtatcagctcctttacaacccactggctttctgcggtctagaagttctgctccttcaggtcactttctagcttacatgttaagctcaacactaatcagaacttgctgataatttaaccatagtcattatcattctttgtgctcgaatttatggccttacattattttttatgacccgtccattgttttctaggcattcgacaaccttccttcaccacaggatttggagctgctctgaatattgaaactctagttgccgctgcagaaagaagagatacaccgattgaggtttggtttaattttggtgtgaaaccgtgaattgcagcanaggtccacacttctcaaactatntaaaccggtttgggggcctgactgacttaagaaatgtagtgaaacc

SEQ ID NO: 2968 - DNA, 364 bp, Oryza sativa
  unsure (1)..(364): unsure at all n locations
tatataatgcacaaataaaattccgcatacatttttcagatagatcactcaagtatactgaacaaggctgcagtgtcctactgtttatggctctaaaagaaaataanatatactgatgctatattcctgggattcacagggaaagagcattcgctatactcttgctatacttgcacgtcacactnttttgccctttcaacagagcacagcatgaaagctgacctgtgggccccaccatgccactctnttactccttcctctacctgccatctatctcccttaatgggtattctctgtgatccgctcgcgccaccgactaatcaatgtgcctagcgactataataacccccaccaaatgacaaca

SEQ ID NO: 2969 - DNA, 389 bp, Oryza sativa
gcctgtgagctgcttatgtcacatcgttattcgaggatatgcactcgcaggggtctctctggtatatgcgcgtagatagttgttgaggcccggaataaaaggaataggatgtgtttccgtacagttttcttttgtttagtgactcgtgaatgttttgccaacctgtgcatttcacctaggtgccaataaacaacatgattttataatgagcgactaaagccttttatgaatatcatatgttttggattagatggatgagcattagtgttattttggaagtatcagcgaccgcacaatacttgtctgttcgcacccattaaagactaaaaacctactaaaccacgtaaatagtgatttttaattagttggagatcatctctattaattgt

SEQ ID NO: 2970 - DNA, 335 bp, Oryza sativa
agcttggtacaagtctacccttttcatcatttgcattctcttgtcttccatatcttgctattgtcgttgacccctggcctcattgtggtcctatataagagtactgttgctgaatgtgaacatatcttggatttactgttcatatttagcggtaatcaattcatgttctgcacagtcttttacacttttcctcatatttttttccattatatacaatttaatttacagtgaaactgaatatgtgaacagtttttcagctttattccagtgtttatgaattaatatttttcatcatcttctaatatttgataggcacagctggttctgtcatttgg

SEQ ID NO: 2971 - DNA, 279 bp, Oryza sativa
ctaatccatgtgtacctatgatgagtggcagctgtgttcggcatcctctcttcccaacccttctttctcgtgttacgcgcgcacgctattcatactgctaaacggtgtagtttttgcaacaagtttctatacgatagatgcttaatagaatcaaaataatctaattttggaaaaaaatatctaatactcaattaatcacgcactaatagaccgcttcgttcatcgtgtggagggaatgagtttccaactcacatacacgaacacaacatcccacatata

SEQ ID NO: 2972 - DNA, 395 bp, Oryza sativa
agcttatgcgtgttccagaattctgatgcttaactaggacaagaagagtacccttctttcaggcgcattatccgatcatcacttgatagattcctttcacgcagccatctcaagaactcgggagacatgtccttgttatctgggtttatgtcaataacaacagattcatcaacataaggggttacccgtgctccatatcctgttttgaccaatgctcgtagtccagattggaaatcagagatgtagaaatcaacagcatgtctctgcaatcatggcaaggaaaaagaaaatatgaggacacgggctaagttggtagggttgacagttagcattcttcattgaaatcccatcttgatgataatcaaattttcagttgaaaagaaactcaccttcat

SEQ ID NO: 2973 - DNA, 418 bp, Oryza sativa
  unsure (1)..(418): unsure at all n locations
tcagcttcccagcctttataatgactctgacttacgaagattttgttcttcgacaantcacctctatatctatctctgaggtgtgtgggttttgcaaaactccatagatatgcagaagagaaatgctatcctcactccgaccaagacagaactcttaccaaaagtttattgtgatcttcttgttcaaataacaattaaggtgaagcatggtcatgaacaacgaatctctttatgataaacagatccactttgcaagctcgttattacgggtagttcctactaagaatcggactaatgacgtatacaatgcttgaattatcgacgtagatgctacatagtgtgttctcatccttcagagactacgagtgtaataggagcatccgttgacanaaggatcaccctaagatgatcatctcat

SEQ ID NO: 2974 - DNA, 339 bp, Oryza sativa
  unsure (1)..(339): unsure at all n locations
agcttgaatcgaagtggaaaggttcgtaccttatcaagcacaaatcaagggcgggatcttttcgactggcaacattggaaagcgaggagttcgaccattcctggaatactgcctctctcaagcgcttttatgtctagaacgggtggcacccaaatcactgattagtaaaaatgtatatacagttgggtaagccattcggcaatatgtacgcctttcggcaagaaaaaaaagaaaaaaagaggaaaatgaaaagaanaaaaactggatgtatggctattatccaccatggaggcccgaaccagtataaaacccatgtgtcctctgcctttttttattatt

SEQ ID NO: 2975 - DNA, 239 bp, Oryza sativa
ctgccctaaatctactgaacttccattttctgtccaattgaggggtctacgggacggcagaccattgcagctgcggagccttgtatgtcaactctccttgggaaagtctagatggaaccacaaacacggcgatgtaacaagttcggccgctgataaggcgagtaccctactcctgtgctttggggatactgtgctgataaagctacaaacagctggtgagccaaagaactctaactctg

SEQ ID NO: 2976 - DNA, 399 bp, Oryza sativa
agcttcaacgtgtaacaaaatgcatgggctctgctcacaacaaagttatttgtttccgataaacagggaggcaaaactctacaactcaattataagagcaaaattaaaacgtcagagcacaataaagacgcaaggtttaaatgcaagcaaatatttattttaacaaataactaagcataggttcgaacaaaatttaggaaattaacatttcagaactaaagtaaagctttaaagtccaaatagaaaatcgaaaaagaaaaactttgtaacaaaagaaatcgaactaaaagtaccaagttgaaattcaaggatgaaaaaacaaccgtcactcgagaaacaaaaataatgttttgaagtccaaatagcatgtcaaaaagcataatagaggagaacgttcga

SEQ ID NO: 2977 - DNA, 342 bp, Oryza sativa
  unsure (1)..(342): unsure at all n locations
tgctctctctnttccttttatcatatntaaccttgttgatagtatacttgctattttntcccttaagacacccatgccaaatattaatcccctaatcttttagatatgggtacatgaattaagaaaatgaatgaccttgtcctgtagtttgaaaatgatacttcatttattaatgggggataccatgaaattagcaagggatacaagaggagggtcaggtgcatcaaattactgcagctactaatatttatagaagagtgaaaagtttaaaatgatttactcttggaattggactattggagagagtaattataatgactctatattaagctgacatttttg

SEQ ID NO: 2978 - DNA, 311 bp, Oryza sativa
ccatttgtatagaatacaaatatttactatgtgtactatactagcatggtgccaaatgaaactattctttggttctttcacgaatcgtcatgtagcaaggtgttagcacatgactggaccaaaggagggacatgtgccttccctttttatatctgtcctgtgcatatctatctgctgcgaaggaatagtagtactttttgtgttgttaagacagagtcatagcctcaatacggaacatttgattttattgcgaaattatcatggtgggagtaagttagatatgtagtgagtatatatatgtacagattcat

SEQ ID NO: 2979 - DNA, 298 bp, Oryza sativa
agcttcttccaaagcatacggctttctatatgtatatgacgatctctagacagatggatcttatatgaatcgtatgatgaagtaccacatgagtggatatataggaaaggaatccaaatctgccgaatcgctcatgttatgatcttctacatcctaggtctccgcgttccgtcatctggcttatgttcttcatgtagcattcagatcgaatgactctatgaaattacgtcgatacttctacatattatgggtaacgtaggagacatccctattttcccccgggggtcttaattaccac

SEQ ID NO: 2980 - DNA, 373 bp, Oryza sativa
ttctacacctagttatgatcttatgggctaataggcactgtatgataacactcttcttctcttgtatatggcatagtagttgtcacctgctttataatactcatggtatttcttacaattccttccttttgctgctgatgtgctcaataatctaacatatggactgcccttgtcatggactattgagtacatgatctagtagaggctgtacacctacattgcaataaacagcaaccttgtggacctgttctttgttagagtgattaaaatatgtaattcacgtactttgtgtacactattatgatgctttgtgaatttgctggatgggtgcaatactccacttctactttgtgtgacaaatcagtgctttgca

SEQ ID NO: 2981 - DNA, 452 bp, Oryza sativa
  unsure (1)..(452): unsure at all n locations
agcttaagaaacctgtgcttctgaaacatattgtgcatcacattcatcagaattaatgtttaattcattctttatggcactgtaagatgttcctactattatatgtaatattttcttttccctttaattatgatcagttttcaatgtgaattcttcatcatgcattcaagccttctattcaaatatcaggcaatagagccacttgctttgggaaggaaaaaactactcacaacttgttcaaaaaaccaagatcacctttgccaaaaaagtaccaaattcatcaagtttcttcttcaatggggtcgcttcctgaaagcaagcagcaccatcaggatgaggtcagtgtcaaaaattaagtccagagacaactcanagtagcatggaatnaaaacaatatgaaagtatatgattagaatgaagagaanaacatagtttaatttttcaattttcac

SEQ ID NO: 2982 - DNA, 432 bp, Oryza sativa
  unsure (1)..(432): unsure at all n locations
acagcctgatgcaagattttttttcgttnttcaccgctgggtgtacgattttgggtagcaaccgattggctgggctggacagctgcagccaaaaacgccacaacaatcagaacagatcagcctcaatatgctgtgacttgagacgttaatgcattaagaaaaataaagcagcacttaatcagaagttatgtgcaattaatctgaagatagcattatatagtttagaaaggatatgtcatcgaggtggggaaaaaaagcgtgaaaatccccaacgatagagcagaactggacagtgaagcatgacctggtcatcgaacatcagtttcttacgccagcaagatctcaactaaattgcaagctcaataaacaaaagaatctcctctcttggtctttacactatacaaagacanttcatttgatctaacccatcca

SEQ ID NO: 2983 - DNA, 295 bp, Oryza sativa
  unsure (1)..(295): unsure at all n locations
attgccaacacttgcagtatagggttgtacattagaattctcagaattactgttgatgatgctctnttggctagtattgcactttgcatcagctctctcggcataactgtcaagcttgtctccaatgttgcgctgtacatcaatgctcttagaatcactgctgtcagtcgttccagagctgcatgtaacactatcacttntgacatcactaatgttgagagtcccatagttcttgccatcactatattgaagccatctgtgttgtatgcactgtgcagctgttggacgcttctct

SEQ ID NO: 2984 - DNA, 338 bp, Oryza sativa
agcttggccctatgacgaaacccgacgcctatgacgaccctaatgatactaagttcaaaactacttgcgaaaagctaaggtttcttttgttttctttattttcaatagtttgtttctaaaaatggttactgatcctttctccctttttcaaaattgtagatggcagtgaacgccaacttcagctcccacggttttggtgaaggtcaccacgtcgctcagcttcgtgacctcgcccgtttccttggcttctcgtgtcccgagtacacggggtactccgtggaccgtgttccccctcactgtgagctctctgtgtacctttacccccgtggaggtataca

SEQ ID NO: 2985 - DNA, 474 bp, Oryza sativa
  unsure (1)..(474): unsure at all n locations
tcatgtctcttcattatgaaactccttcctggtttatctaactgatagctagctggcgctggcaagaccttatgaattcaaaccttgcacgtctatttcagagaatagggtcatgagtagccctgcgtttatgagagcatgagttactcgctgttcacaatatacgaactgatgacatcaaaatgaagaccaaaatacatgcctctgaatcctaaacacgcacccgcgcacacacacctccaatacattagctaagataatatgtattttctagaccaacgagcttcgaacagctagctatcactcaataactaatactggatagaaatcatcatacacattcatgtctttgaaatactggngatgacaaaattccatctactcgatttctataacacactattgttcgtgatatcggtgaagctcctacgcggaggaatcttggattgttcctatctccctgcacctcccatg

SEQ ID NO: 2986 - DNA, 318 bp, Oryza sativa
gtttggtcacggggatgcagaaatagtgcctcatgaaccattacgcgttcaagggcttatggtcttcttcgcatccgttatattggcccaagtttttttggttctcacaaagaaacagtttgaaaagggtcaattgtaccaaatgaatttctaggtgccgggatttcttaccatcaagttggtaaaaagccgcgatttattggcgattgctagaattctctatgatccattttggaaatcttttttttgtttacactattttttgtttgccagatgtcttgtctgcaataccttatttctatcatctcatgcaaaacg

SEQ ID NO: 2987 - DNA, 402 bp, Oryza sativa
  unsure (1)..(402): unsure at all n locations
gtgcaccattcgtatcataagtgtaatcctaaaatcacgttattgtgcttcctctcaattgtaatattaagaatcaacgtgctcgttaaagatgcaatggaaatgngttaaaatttcatgttcaaaattttcaaaccatacacgatgactntaaaacgatggcaattcatttcgacggctaggggtgcctgtgattttggtggtgtttgaatcccgagactaaatattatccccggtcgcatcggatgnttggacactaattataagcattaaacatcgattaatgacacaacccatttcataacctgtactaattcacgagacgaatctattgagcctaattaatccatgattagcatatgtggtgctaaagtaaacatgtgctatataaactaattgcac

SEQ ID NO: 2988 - DNA, 293 bp, Oryza sativa
atcccttgctttttctgtaagatcagccttcttaaagagattttttttaaaaaaatacgccttgacacgagcttgtcggtggaaaatttcacataatttgctttaattatgaacaatggactgggtaaagcattgacatagccaagaaatggaaattggcaccacacagatatctattgtacaacattgctagcttaaaacatatttaaacttattaacttgttggagaaatgtgcgcattcaaatgcgggtagctaaaatatgtctttctatgtaagaagattctagctcat

SEQ ID NO: 2989 - DNA, 323 bp, Oryza sativa
  unsure (1)..(323): unsure at all n locations
aatgggagaattattttcctaattctgtatgtggatgacattctactggctagtagtgatgtcagtctactgcagganacatagaaattcttgtcctcaaactctgacatgagagacctcggtgaggcttcatatngtttgggcatagagattcaccgagatagaacaaagtatgcattgtgactttctctaaagacatatatagagaaggtggtgaagaaattcaacatgtacagatgcagtgctacacctgctcctataatgaaaggcgaatagtatggggcatcgcaatgtccacatatcagtatgagctcaatgaaatg

SEQ ID NO: 2990 - DNA, 433 bp, Oryza sativa
  unsure (1)..(433): unsure at all n locations
agcttcanaatttcttcaaataagatgggatgtcatgccaaaatttctagtgaatttattgtgttgattatatacaaatcggaggtggctaaaaggttagcaacttcatcctccaatgtttttttttcatattacatttggagctatgttttgcacacttttttgtctccaaaattttgttgttagttgatgagagagaaaatttgtgtggagaagaaagaatatatagaaatttagtttatgtggtaaagaaggttttataaaaaagttgagaaggaaaatatagtgaaagttaatcttgaataatagaaaacaaagtaaaatgaaaaattaaaataagtacaacacattaatattagttaaaactttataatagaaatatataatattcgtgtaaatttcataatatttgattaataatgaatgtattatt

SEQ ID NO: 2991 - DNA, 375 bp, Oryza sativa
  unsure (1)..(375): unsure at all n locations
gctgacagacaacttaccgacctacttcatactgacctactcatccagttaaagacagttngaggtcgttcaagatcttattcctatgatttgttcttctaactgctgatcctatcctttagtggccgcattacattgctgccttacaaagganacgctctttctttcaattaaaatgtcagaacttcataactcactaaacataactcgtcatacttttttgttcctagggaatatttatgcttgactctggatactctagacttccttacgacattccgaagcctgtttggagataccccatgcagtacatcagcttccattactgggcgctgcagggtaaatatatcccactctctgacagcngaaacacac

SEQ ID NO: 2992 - DNA, 418 bp, Oryza sativa
  unsure (1)..(418): unsure at all n locations
gcttcaagcttgagatgggagaagcatatgtctatttttatatacagaggcaaaagacaggaattacaaaccaactccattatgaagtggattgctttaatgatggtattgattggctacttcaagagcttgttagtcgtttcaatgaaacatcatctgatatgcttctttgctcagctgcctttatcccatgagaatcattccatgattntaatgttgagaacttgatgagactaacagaactttatcctaatgattttaattctggggaattaagagatcttatgcatcatctttgtctctacaccgctgatgtgcgagaagatgatagattctccaacatacgaactatttgtgagctttcacaaaagttggtagagacaagggaacatctttgctatccttagttattgacttt

SEQ ID NO: 2993 - DNA, 439 bp, Oryza sativa
  unsure (1)..(439): unsure at all n locations
tcagcttgttatatagctggctgtaagctcacngtggatctgcatctcacactctctgatcagtagctgtactactgacattgtgattntcatgtgtcatggcagggtcaatgttctgatatggaatcccctctccaacagaggacatgacatcatcagtgtttgtgctatcatgatttgcctgtcgatctggctcatgattctggtactgaggagcttcctctccaacagtggacattgcatcatcagcatcagtgccattatgatggtcattatgggctgtctcatgaatgtgggaccgaatggcagcctctgcagtgctgtgacgtacatcaccagagttcttgccttgttccccttcttcttcttgtcctcttctataagcatccatctccggatgcaacccaagcccttacaatacttnatctacctacttata

SEQ ID NO: 2994 - DNA, 419 bp, Oryza sativa
  unsure (1)..(419): unsure at all n locations
gatcttaagtcgactgcggcatgaagcttctcgccttgcaaatgatggttagtctctagggccagtaccccagcatggtgtgcccgtacatggcacaccatctgtgtgaaagcatattctgtacacaaccatggngatataagtgtttaattcataatcattattagcctaatacagaaattctttactaatggggttagataggcagtagcaaacaactaaacgtatctcataattttgccaatatcttgataacaatataaccaccctcatcaagcactacatttgtctatacacctcgtttataatttaccaaacataccttcgaatactggtaactgtttgttactgtctaaattaattatgttgaggttaggataaaaagaacactctagcggtggggttaagttaaattggat

SEQ ID NO: 2995 - DNA, 496 bp, Oryza sativa
  unsure (1)..(496): unsure at all n locations
gctattcctgttaatcctacgttctgtgaccttgcctgggaaccgcagcagacttgtgggtagagacgcctggtcttgtggttagagtaagcaatcttcgtgtcctccgactgctgcataattccagctgttcgagcggcagcagatgctgctctgcgaagcgttgttggcttttcatggngcatctgctgctgttgctgttggggcagtgattgcttctgttgctgttgnggcagngattgcttcggttgttgcggttgtgcttgctgctgtttttgtggatacgattgctgctataacaatatcaaaagaagaattcaacacgaataactttagtgaatacacaaaantaaaataacaagtgttaatgacaaacaaaacctacgtgagaaataacagaggatgctgttagagaatgtgttaaggctactaatgccactatgacatatattaccattagcttcgaaggttttcacatgtcagataggataatcat

SEQ ID NO: 2996 - DNA, 492 bp, Oryza sativa
  unsure (1)..(492): unsure at all n locations
ctcaagcttagtaatgtaataatatctcattgtcatnattaattccactctttatcattggtaaatcagagaggattatagggaatagacaaatttcacccgtcttagtngagatctgttacaaatcaagaggaaactcaccatattaggtaagaaacaagataaaataaaccatatttgataccagaatattctggtcgataacctgctactaattcttcctacgcttctggtaaatcaaagggtaatctctcacattcctccaaagaagaatatagaaagaccagataacctataggctgacgcccaagattccatcctaaaaaaccatattatgactgtgcttcaactatatcaactgtacctgaactgttggatatcatagtccacgataacatcacagttccaccgctatctcaaaccgacatgaaccgtaattcatactgctctctatatcagataaacaaagaccgatcattcngtattacttct

SEQ ID NO: 2997 - DNA, 309 bp, Oryza sativa
  unsure (1)..(309): unsure at all n locations
agcttctccagatntcatctcatatttaatgtactccttcttgaaaagatactgacgaagttctttaatactggtagttccttgatgaaaattactcaaagcaatccaaatctcattggcggtttgaagatgagaaacacgatcataatccgaacgagaaatctcgctcaatagaatattgcgagctttgcaattttgttcaaactcagtttaaaaaactctagatcggttaaaatccaaagaagaaaacaaggctttgatattacttgtaggatcgaaacacaagaactaagccaactagaggggggg

SEQ ID NO: 2998 - DNA, 422 bp, Oryza sativa
  unsure (1)..(422): unsure at all n locations
atatgactaggtatggatcttngctatattgatactaccatcaaaacatgacgtgcgagaatatatgagagtaaggtggattataatgatagtaatattatgggatagaatcatcctctgtataatttcattcaccatgatgtatatactatgcacatgtgagtgaaccttctatatgaatataaagagatctacgtctcttgtgtttgcgcgtatgcatttgccgtatagacacaaaattaaataaagtaattatttgtgtaggctgatattcgtattacatcattaggatgtactggaggaaatatactatctcatctgatcatatatctttagcatctaacatgagagtctactattaaatgtctagggttcgacaacgatgatgtctcgaatgattcgtgtaaaaaatatatatagat

SEQ ID NO: 2999 - DNA, 147 bp, Oryza sativa
agcttggaagtgtgtgttgtagtgagtgttatgaggtccatatataagggtaggtatgacagctggcatatgggaaatgtccgaaatgccctccaaccgccattagggatgcatctgggacgtccacgtcaaaccccacatccaacg

SEQ ID NO: 3000 - DNA, 390 bp, Oryza sativa
  unsure (1)..(390): unsure at all n locations
ctgcctcaattcttcatgtagattactagtatattataagtgacgctcctatatgattcatattaaagagactagaaatgacgttagagctccaggttgtctcccatcatttaaccattgaagctagctcttataattgcaagcctcacttgcaatctacaatattcacatgatttcattaacccaacctatattttatttctgtaattagttgagaaattttctaatccaacatatatgtccaaataacaggtagcttatggactgaagaggtatcacctaattggttgttcttcatcagcacaacacaataaaatgccattctaagtgaatgctgtgtnttattctatcacaaaagtgcaacgntgtctgtntaataattaattaata

SEQ ID NO: 3001 - DNA, 394 bp, Oryza sativa
agcttgatgttgcgaaccactgggtccagtaccagggggtaccgcctcgggtggaccactcggtctatatgatccgagcggtcaaacttgattgttgtctccgaccaccgaagatattggggcgtatcaggctgaacagcattaatctcccgttcggtcagcttttgttttcttttagattcataagccagaggtccgccaaagatgtggttgagctccttgcgatggtcttgaaaacctgtcagggcatcatcgtcgtcgttcttcttttttgacgtgctttgatctccggcagaggccttccgtgcattcttggcgtattgttctgcaaactgtctgtagacgaagcaatctttggctgcatgattggagttggggtgatgcggacattggg

SEQ ID NO: 3002 - DNA, 453 bp, Oryza sativa
  unsure (1)..(453): unsure at all n locations
tactagctcatatattctttttttggcatggacatggtgttcatcttattgttacagcgatcctaaatgataagttagaaaataaaatttgtataggtgtatctccgtatccatgttttctgagaaataccgtatcctcgtatctgggtaacatacgatagacgtagtcccaacatatacattagcattcaggtccaacttgacgtcaatcccattcactcgcttaccgaataaaacagccttagattgtgtacacgcacgtaggaagcctcccagaatgcancgaagatggaaatcgtatagtcatcgcgcccgtgctgtgtgacatggagatgaccgatccacaggaggcaagatacaaggntccgatggtgcattagagcaactccagtgtacgagtgatatcgaaccatacttgaataccgaatcaacacactacacaacctactgtat

SEQ ID NO: 3003 - DNA, 337 bp, Oryza sativa
  unsure (1)..(337): unsure at all n locations
agcttatccagaagagaccgagttcaaagataatgcggcatggcaagntaactattaattaggaatagtttgttagtttccttttatctctaggaaagngtgtttagtgttctataaagactttatctttttcttttatctttaggaaagattctttcttgtccgacaaagacttgtatcaacccatgggtataaatatgtacacccagggtctatgtaatctatctctccacgatcaatacaattcggcgcatcgccaccttttaccttttctactttattttatcgtccggcgggacttggcacctgacccggggcttcatcagtgttcgatctc

SEQ ID NO: 3004 - DNA, 280 bp, Oryza sativa
ctagcatcagtaagcgttcgcagaggggctcttgtggtgctgggggattcgacgacaaaggtccaccaatgttcaatcgacggtgcagcattccatttgtccatttggaggtcagtatgtgtccatcattggatttctgcccaaatcctcttagtgactctacattaggccagaaagtgaaccgctgattcgtccattgtgcggcagaaggggcaaaccttttgatttcgctagcctcaattccccaatctgtcagccgtccatagcctattctgggtag

SEQ ID NO: 3005 - DNA, 275 bp, Oryza sativa
  unsure (1)..(275): unsure at all n locations
agctctgccgacatgtgggaccactgcattggngtcttcgtctgtcaatcttagagcgccggagaccgagccacacccactggcaggtgctcctcacacctaggtcacctattataccaccggacgcgccactctgcgccaaaccgagctcctgcaccaaacacgcctagcgccaatccaggatccctccatcggtcgtgcctactgcgccaagccgggctccatctccgccgaccgcgcctcttgcaccgagccggcctacgctgacatcggct

SEQ ID NO: 3006 - DNA, 357 bp, Oryza sativa
  unsure (1)..(357): unsure at all n locations
tacatcattgccgcagtcttctaatacaagctggagttcattcgtgtcgacacggcgatgcccttggcctggtgaccatcaacgcaaggtgtcatccattagcctcatcacaatgagacctattcctttgcacatctcatagaagaacactattaccaacagatcagttgtcatcctccactttgtgaccaaccngatgcatatgacagatacggatatgtttgtgcagaattcattaacatcgcaagtgtcatatactcgtatgcaagctcaaatgtgaagatccaatatacataattggtgaacaacgtggatctaaacatgccaataaatgtatatgattgctcccctaaaata

SEQ ID NO: 3007 - DNA, 540 bp, Oryza sativa
tcaactgccatctctgactgacaagggccagcgactgcctatccaactaattcggcctgcaccatgtcttagccatcttgacctgtgatcgaagccaagaattggtaaagttggagagatgccggaagccgatcatcagacacaattaactatttaccactcttacgagtgacgaattgcaattggactcacatgtcatagacacataaagtgattaagacccatatgctgtcatagactatgggtggtaaattcttaattacctcatcttaaaagtggcgaaaagttaaatgcgccgataattggtggctgaaggagagcttggtttctaattaccttgactcttaaggcctctacataccgattgaggatcctgttgtccgtgaccgctgtattgaactgctggctggactctgtgagctgcttgaagagggatgagatttccgcttggttgctcgcctgacataatgattgctgtagacacactgatattgctaaccatcggaatatgaacttaagttatatacctggatctagtca

SEQ ID NO: 3008 - DNA, 444 bp, Oryza sativa
  unsure (1)..(444): unsure at all n locations
agctttatgtcaagatgaagcaatcaatcaatacgaatcaacttggggagttattatcttcgtcttcacttcagagccgacatttaatttcagcgactccgattattacaccagagtttggagttatcaaccaatcaactcaattttgacgagttggacaacaacatctactttcctccaagtgaagcatttgcagcagctataacaccaagttctactgtcatcttcattaatcaaggggcgttgcatcagtcttctttgtgcacacgctcacatcaaggaaacttctcaagctttgatatcttctcaacagtttgatagattattgtcactgacatcatcaccatcacctctgcttcatcggccctgacatctncgctggtgctaatggatgattatgtcttcaccgacttaatatttcaccttcacgggtgacctactatg

SEQ ID NO: 3009 - DNA, 462 bp, Oryza sativa
tctagctgcgtccagtacccatgcgagtactcctactttgactcagtcccgaggtcaacttcgcaagtcattcctggtggcgtcccacggcgagctgttcgacgtgtacgtcttcttcaaggggttcacgccggagatcctcgccgtgcgcgtgtgcgccatcgacctctgcggcgccggcgacgagcggtcggcgttccgcgaggtgggcgacctcggcgaccgcgcgctccttctcggcgacgccaacgcggcgctcttgtgctcggcgagcgcgcacggtgtgaagggcaaccgcgtctacttcatgcacaacatattggaggagccggacggtgggccgctgcgcgtctacgacctctgcgacagatgcatggagaccgtgcggtcgtgccctgttgtctcggagctcatgtgcaaaccgttctgggtgatgccctccgcaccatgatgtgtcatata

SEQ ID NO: 3010 - DNA, 425 bp, Oryza sativa
ctgcagcttcattgcacgtgacagtgagtgagccttgcttcccaattgagtcttgtgaggatgaagctaaaacagtggttccactgagtatggttttacccacacaaacaagtcaggctgacaatggtcctaccacatatgctaccacaaaacaggttcccaccctaaaaaaatagcaagatcagagacaaagctactgatcaatcaatgccaaatccagatccatggggtgagtttgatgaggccgagtatataggagattctgatgatacggagaattacaatgagctggtgtcacaagatcacgcttatgatcccaattacactcctgaggcatctgatggtgatgaagagaatgatgatcctcctcatgatttataagacaatgataataggggtgcgagcctctaatccatataactgat

SEQ ID NO: 3011 - DNA, 429 bp, Oryza sativa
  unsure (1)..(429): unsure at all n locations
agcttaagtagggcatttgtataacacttgtggcttattaatcgagattaaagttggactgtaaatttcacggagatctagttgaacttgactgcgatntttttcctaatctaattataatcttttgtttgcgctgcagaagaagttgctgaggaatttgctaagagggtgccttggcgtgaactgcatcgcttgaaaaacaactagcctcaataaatttctcccaagggtttgggtgttagaaagagatgtatgtacattgtgtgctgatatggaagtaatggaaactgattactgtttggactcgattgaatgtgatgatgtccgttcaaaaaaaaaatgaatgtgatgatgataataataataataaatacgctttccattattcagcttcactgatcgtagctcgttataaatcttaatcgaatc

SEQ ID NO: 3012 - DNA, 218 bp, Oryza sativa
  unsure (1)..(218): unsure at all n locations
ttctgatccaaaccgatgcaccgcgcgcctccccggctccccgccgctcgggccgaacctaataaaaaaacgcagcctggttttttttgccgctggnttttccgattcaaaccgatttgttgcaattattttttgtcaatctgtcttttcgagaatgctagttagcgagcgcgccggcggcacgcgtttcatgcccagaagaccctgcgccggcgcgt

SEQ ID NO: 3013 - DNA, 318 bp, Oryza sativa
  unsure (1)..(318): unsure at all n locations
ctcagcttacaatctgatctaccgacatgcccacaaccactcacttattagccgcccatatnncgcgcgacaggtgagcccgatccagaccaatccctaccaaaccctacctcccgctcaacccgaaacacatggacgatctcgtccccacagaatggactgaactgagatgcacgaagcggaaaaaagaagaatggagagagcgaggcgtggggagaccttcggagccagttgaggagcgagtcccagagccccattgccgtcgccgccgtcggtgtggtggtggtggtgaccgttcccgccagccgcgcccggatc

SEQ ID NO: 3014 - DNA, 397 bp, Oryza sativa
  unsure (1)..(397): unsure at all n locations
agcttttccttgaaaacccatttgcatcctactggcttgcacccatatggacgctcaacgacttcccaagtaccattagacataatcgagtccatttcactgcgtactgcttccttccagtagtcagcgtcaggagatgaatatgcctcttctatggttcttggggtgtcatccacgaggtatacaatgtagtcatctccaaaggaatttgcaaccctttgtctcttactcttgcgagtatctacaatgttgtcctcctcaggattttcctcaggcgtttgatcattgtgttatatcggtgcaaagtgctcatggggcatgacagtttctttactaaaagtgctaggtgtatatttcataggaaantcattcttcaagaatgtaacatctctggact

SEQ ID NO: 3015 - DNA, 470 bp, Oryza sativa
  unsure (1)..(470): unsure at all n locations
cagctatggctcagatataaccacaagttcgactcagtctattttcgngtgaatatacggtcagttttagctgatgaatatgatctaggtaaatggataatgatataattttgaacttccttatatataatatgtaaacctgcttcattntctggtttcctttcaacatggtaattgatatttcaaatatgctgcaggagaaggaccattgcctagtgtaaggattgatgagacaatttgtgttctacaagaactcgctagactaataataaacatggaaacagctaatgccctcagcatgccattatatctaanagaagctttatagaagaatgagtcccatggacgggctcatttataggctttgctaccaaccttgtctgagcttgttgtctcaaggtaagaaaaaaggtttgtatccncacagttcttaagtgcgcatgcatatttacagtaccactctgtgtcat

SEQ ID NO: 3016 - DNA, 513 bp, Oryza sativa
  unsure (1)..(513): unsure at all n locations
ctgaggatttaatagtcgtgaatcctattttcaattaagccccagtacatgtcacgttgtcagtactgcgatagaatatttggcaaagacgatgttntattccactagcaatattccctctgtttcatacgtttaactacttgtgtagttgcacataatgtacagtacttcttatcgattgaataaagaaaccaatgcaatgtttcagtcccaactcccaagtggccaaccctggcttatagagctctcgaatgaagtgaaatcagcaaatcctcctgtacaaattctactacaacatccatcctataatatagtaaaacattttgataggatggtgcacaacctaatactgcctagattcgtaatattatgatgtgtcccatccaactaacatctcttatattttgagattgaggaagtatatacttcgttgcgaagagtaatataattaaacaacaaatttatcttgcttgccttcattatactagatcagatagatgaggattaattatt

SEQ ID NO: 3017 - DNA, 444 bp, Oryza sativa
  unsure (1)..(444): unsure at all n locations
agcttgtaccagttgtatgatacgctcttattgctccaatccgcacacaactctcgtaggtagagagtattgagtaccttgtttcacaaattgtgtacatcttgctttgaacagagcactacaggtaagagggggcaaacaaatattacttgaaccaaccgttcagaacgcgatttgggaacgatatgctgatcctgcgtaaagatatgaaagagcttgcaaagcaagacacaagttatgcaaaactctgttccaggattaattatggctggactgctctccttgacagcaaattgatacagatttaccaagtactacatcacccatagaacatancaaagtttagtggaatattttagtacctcctgatactttctaaagaccataaagtttctctaaaaatatatactaactctccaaaatggaatggttaacatcaacggg

SEQ ID NO: 3018 - DNA, 227 bp, Oryza sativa
aaaaacttgaaacaagattaacataaatttttgcatatatatattctcttatccggttagtaatttaaaaagtatgtactgtaaaatgaaagaggcaagtttataaagcaaagaatagaacttagtcgcggtcagtatcacttatgttgtgagccatgagagatagtcatgggagtaacccagtgggtaaccttccaggtgtgtacgttgccctggttgtaacttct

SEQ ID NO: 3019 - DNA, 238 bp, Oryza sativa
ataggtgtagaactacttctgagctgcaagtgcagatagatgtctgtctattggctcctagagcaatttctccgatgcagacttatctcttttaatactctcaaccttcgtctcctcaacctgggtgttcagagaagtgctaaatacattactacactcaatgtctgacagcacatagatatgatactgggaatatatgtactccatataagaagctgaagcaacttcattattctat

SEQ ID NO: 3020 - DNA, 52 bp, Oryza sativa
agctgtatatgtccatttgggtaagagttttattgtatgagcaatgaggtag

SEQ ID NO: 3021 - DNA, 455 bp, Oryza sativa
  unsure (1)..(455): unsure at all n locations
tcttgaaacaccagaatactnttgacaccgtatattaccatctgtagtggttgggatatgaaaataatatattcanagttgntgtgaacaaatctttcatatgatattacctactaaggggtgattntgatcttatagttgcatagcacaaccttcagtccttgacctggctgagatgcttatggagggtaatggatggtttctgtatgaagctgaaggtctccctctctgctttttagataattaagatgcatatcaataagtcacaaggttgaaattgagtcaataagttgatattgatcagcatattcaattgaccattcatggcacgtgaaagaagctgataaggctaaatcaatatatgcttctctaagaaacgaatgaatatcagtccgtggagttggaggatattgctgggctgtgagtcatattgtcaaacacatgaaatgatttat

SEQ ID NO: 3022 - DNA, 377 bp, Oryza sativa
ctatccctctctctgatttctctatcctcatctggtaccaatgagcaggaggaatgcaatactgtgcacaattcaaccttttccccgtgtggttcattccccaataagagatccattacatatacaccttgttctccttgtcttttctttaaatatgtccaaatgtgtgcgtgcgcatatgtatatatacaaacatgtacgcaatattcctagcaagtaatagtaggcggctaactaatacttatttgagatggcactggcgttgtagaccttgcttctctctcacgaatatgcatgcaagaaccgatctgtgctcaataccctcaatggttgtttaaatcttgatcgtgaatcaaaatccaaagttctaatggtat

SEQ ID NO: 3023 - DNA, 405 bp, Oryza sativa
attgacagataataaacactttttctctttcttggaccagtgagagcttaacaccaatacatgttctaagacgcctggaatatgtaatgcagagaaacatgagctctcataccagcaatatgttcgtgactgatgcctctgaaattacagattctgcgattctctatagcgtgacatagcctatcagcttcttctcggctaggtagcgcggcatcattccaactgggaaagaaaaggagaatagaatctctagatccacgccgaatgaggaccatatgtgtcagtattactgtatatcatataatccatgggaagacagcatcaatagcaatgtgcacaattgctacttgcagtgacatgatataatgtatctagagctcaacatactaactagcaccatagtct

SEQ ID NO: 3024 - DNA, 405 bp, Oryza sativa
  unsure (1)..(405): unsure at all n locations
agctnttatctcatcgnttattgccattactgtcggtgcgggaattaccctggcggtgctgattctctcagggtcgattgaatttatcccgatgcaggtgatccctatcgccgggatgattgccggtaacgccatggtagcggtggggttgtgttacaacaatttatggcaacgggtcattagcgaacagcaacagattcaggagaaactgagtcttggtgcgacgccgaagcaggcttcagcgatattgattcgcgacagtattcgcgcggctttaattccgacggtcgattcagcaaaaacgggtggcttagtgagtttaccaagaatgatgtccgggctgatatttgccgggattgatccggtgaaggcgattaaatatcagattatggtgacctttatgct

SEQ ID NO: 3025 - DNA, 365 bp, Oryza sativa
  unsure (1)..(365): unsure at all n locations
cactacaattattttttctgtatattaagacatgaaaagcagtttacggtccttaaagagataccaaaaatntagtgtgaaatatggtactttattgttatcacgtaccaagagataccaaatttacactataataatattgatacctctcatggtgatctccctcataaagagggataaattgcttctctatgagaaaggtaatgaatgaatccatcgcaccacgatatatggatacatacggctgcaaccttggtaattggctacatcatctatatgaatataatagcaataactaatacatcatctatcctgttctgcgtattgcttctttgttgtatctttcagatcttgtcaagtatttc

SEQ ID NO: 3026 - DNA, 396 bp, Oryza sativa
  unsure (1)..(396): unsure at all n locations
agctnggcgcacacgaaagaggacgagggcttataataacacacgcgtcccctacctggcgcgccagatgacggagcgtggggctcctcaccgggagaccgcgcgggcaccctttgccggttcggctgggggcgctaagtgaggttctaagccctcgatctgtggaatgtttcgcgagagagcaaatgcgcaagacacgggcgatgtagacaggttcgggccgctgagaagcgtaataccctactcctatgttctggtggatctgtgtatgaaggagttacaaagagctggagagcaagagagttcaaactctagagaccctcnttctctttttctcctctcccagctccggtcttctctttcccctctcccctcttctttttcttcttttttctc

SEQ ID NO: 3027 - DNA, 368 bp, Oryza sativa
  unsure (1)..(368): unsure at all n locations
tatcttgtcgtcctccgcctaggacctcgttgccgatggtgatccggtttgcaggaagataacggagagggagtacgggggatcacgagccaatgtcatgagattggagagtgacggaaataatgttagctatgatggcaatgttgagccgccaatgtcatcaattcgatggtagagaggagaaacatttgatatctgacatgtgggatcatgggttgtggtgtaattatatgaatgactctatgtgctgacctgcatatttgttaganatgtattttggtgaatgtgtagactatattgaacaatacaagggtctacaaccagagtataatgaatctatactatcattctgacatattcgttatctt

SEQ ID NO: 3028 - DNA, 418 bp, Oryza sativa
agcttatctatgatatgagtaattgggttatcaacacttatgaaggggatgacagcaatgagagtatatagagctgtccaagtacaaaagctccgaagcggaagcatggtcaattttctgcagctgagatgacgtctggaaataaaagatgttgaagggaagataatgagagttcttgttcaggattattccacaaaaatgatagctctttctttaactggatgtcaactctcactaatggagtaaaggtgtttgatgaaactactgctgttccacttaatcagaagttttcagcagctacaggagaggaatttccaacaaaccctgtgccacttcaaaacaactgtggtgttccgctgcaatccgttggcttcaattctctttttcaatctctctatagtcagaatgttatgataac

SEQ ID NO: 3029 - DNA, 409 bp, Oryza sativa
  unsure (1)..(409): unsure at all n locations
atcatggactgctgtataaactgagatcactgtnacttgataagcatattatacacctactacagctgaatagaggcgcaaacacacaagataccatctatgtagattcaaggtcaaacaaaatgaaatcggtttgtgcccaacaaaccttataagcatgtatcctctttaatttcttagtagtagattagtatatatggctctcctttcttctgacttgtactacaaatggaattaaatgttcaacaattaaactctccacacacattgagaacagcaaattaagcttaaaagttttcatgaacgtaaacatttgcagagccgcgaacacatgatgagaatcacatcagacagctctgaccctccactatatgagctcaccatctggcagtgctgtactgtaatacac

SEQ ID NO: 3030 - DNA, 404 bp, Oryza sativa
  unsure (1)..(404): unsure at all n locations
tgcggcatgcaagcttatttggaaagttaacataaccataatattttctgttaggtccatgggtaaaatgattatgtatgagaatgtactgccaacgaaggatttaatttggaagcttagaattcctttgaaaaacaaaatcttcctctggtatttaaagaagggagtgattctcacgaaggacaatctagcaaaaagaaattggaagggcatcactaagtgttgtttttgtaaccacaatgaaacgatacaacatctcttttttgattgtcatgtggctagatttgtttggagtaccctttntataacatttgggataaatccgcctaacagtgttgctaatatgtttgggaattggctaaaggggttacaatctatgctaaagcaccaaatctttataggga

SEQ ID NO: 3031 - DNA, 336 bp, Oryza sativa
  unsure (1)..(336): unsure at all n locations
ccttaatactcagcttcctgagatactgcgacaagacacacttaccactacattttatggtgaacaagtngagatggttatgagatgangactggattgatgaggccatgcatcatctcactaaggacgacagcaattctgggttcatttcgaagatcatttgtcgtctcaacaggatgagaacacacaatcgcatggccaatcaaataaatgatgtgataacacgtgtggtggagatgagccatcggcacataaggtataagctcgatgcaagtatctctacatctgactatacagccattgatcctcgcctctgtgcgctatatgcggatgcat

SEQ ID NO: 3032 - DNA, 430 bp, Oryza sativa
agcttggtggtgtcatcgacaatatttatagctctattaagagcatcagaaaaatatcaaccccttccatctctgaagaagataaatccttctctcgggatgcacacaggtacctagtttcatatagcattcagacatcagctggatggagcagcttatttgcaattcgtaatgaataaaaaatgtcgtgaatgagcaaacctgataatatttctgattgctacttccagcagatcagctctgcttggtggatttgaaaggaaatcatcatccacaactgtgtccacacctgcctttttgagaaacaatgcctgttgaagtgttactagcccatcatcaataacttcttcaagaggcttttggggagcatgcaagccccaataacgctttcttgctacctaaattacaaattcacaatcagataaaaact

SEQ ID NO: 3033 - DNA, 421 bp, Oryza sativa
  unsure (1)..(421): unsure at all n locations
agatcaataagttcacaagtgagctgatgaatctacaatgcttcattgtggcttgatcatcacctacttgtattagtttcttgagtgatacttctctatgtacagagtaaccgaatagaggccaagctggtgcactgatccacatctaccaccatgngcagcgtaatggctcaatcatttatcatgatgtcttcttttctttttctctctgttttttttgaaacgattgccgcactgaacctgccgaatatattataagagcgaaataaacatgtttacattatacgatttacaaccagacggataagcgacatgaaggaatacatcagcggcctactaatctgcaggaagtcacatgtttcttttcttaaacttcccgctcacatttgttcacatgcgaatcgtgaatatggaactggtc

SEQ ID NO: 3034 - DNA, 409 bp, Oryza sativa
  unsure (1)..(409): unsure at all n locations
agcttccattatgcttttctcttatgtattcacgttccaaccgntcgaatcacgtattaactgaatttaatcaactgatataaacaactacatataaacatgttcttctttaaatgatactatatgaatgcatatctctagttatctatgagttataatacctccgtctcaggtacagccgtgaaaatccgtgtccaacgtttgtttatgattgtttaaaaaaaatagtcacacataaagtactattcatattttatcatctaataacaataaaaatagtaattataaaactttttcacacaagacgaacagtcaaatgttgaagatgaatattgcaaaactacacttattttgtgacggagggagtacaactgagttgacctatagcagtattcatatntgaattatt

SEQ ID NO: 3035 - DNA, 290 bp, Oryza sativa
ctgcagatagcagggctgtggtacacaagtggtaattggtagatcatttggtagtactgccaatgtatacacatactttatagagaaaattggaatcatttgtgagccaactgagctaatgaaggaacggggccacattacctctgatcttaaggcgatagtgcgaattattccatgaatgacacaaccagacatatgacaccctgagcgtctgtaactagactaataacacctaagcactattcgtgcggtgttaacatgagctgacacacgtggcgacaacgtggtaa

SEQ ID NO: 3036 - DNA, 359 bp, Oryza sativa
agtggaaatagtccttagtatgataaaccaccatggatatttgaactccaaaactcaacagtaatagtttccccttttattccctttatgtatatgttcagtttttagattgggttgattgtatttgttaagattggaagttatatgatattttcatatctgtttcaacacaaaagcagtgtgctactacatcaatagatgaaagtggggttcaaagaatcaattatagagtacattccaaagcaacttcacaagtagtatctacttgctcagatgctctgctcctagaggcaacccaagtagcagttagccagctatgatacccaaaatattatatgattggttaatgaaaaaacaaa

SEQ ID NO: 3037 - DNA, 449 bp, Oryza sativa
  unsure (1)..(449): unsure at all n locations
tactgtatgacaccttaagagcattgaccactcctaaatgtgatactgcgataaagattgaagattggcactagatcacgcgcactttggcctaagcaaaaagtgcctaagtccctaagagaacgtgacaggccacacctgataatatgggctgcagacatattaggcctatgccaaaaaatatgccttcgacaccctgtataggatgacgcatgtcacatactcccgagtaataatcttccgggaatatagaccaagtgtagctcatatgaatagcttctgatatgaatgattatcccttatgggatactcgcaaatacatataataattgaatcccgactggcgcaagtattcaggtgatagcccttacggagaataataattggtccagtctttgagcatagaaaatagactcatgactatgaatncatggtgaatgtatccggac

SEQ ID NO: 3038 - DNA, 440 bp, Oryza sativa
  unsure (1)..(440): unsure at all n locations
gacccgcggcatgcaagcttgagtttttntttaggataatatattgctatcaagtttcctgagctgctaaacagtgtgttttgtgcaacaatttctatatagaagttttgcaaaaaaattcagcatatctatttttaaaatttaaagtaattaataattaattaatcatatattaacgatatactccctccgtttcaaaatatttgacatcgttgactttttagtacgtgtttgaccattcgtcttattcaaaaaatttaaggaatcatttattctttgtatatcattctatttattggcaaatatactttcatgtacacatataatgttatatatttcacanattttttttgaataagatgaacggtcatacacatgctaaaaagtcacggtgcaaacattttgaatggacggagtattgtttgtgttaactgagagtt

SEQ ID NO: 3039 - DNA, 233 bp, Oryza sativa
agcccaataagagccgtcaggagtgcaagaagagctgccccgtcgtcaagaccaggaatcccttcctcttcccctccacaccctcacgcggtggggcaactctaggaggcgagtggtctccccgtgccgacgcaatcgaggcgtagatcgatcccctggagaggcttcgccatttttgcgcggagtcagatcctgggagatatggcagcggtgatgttatggtggtaccctgt

SEQ ID NO: 3040 - DNA, 312 bp, Oryza sativa
  unsure (1)..(312): unsure at all n locations
taacttagcatttatattatagncacttatgccattgcagtcttcattcaatacgtagggtnatcgacactggtacatccattataatacaacatatatcgcatcatggggagcaaacggcgagttatcttgctgccaactttgggcgtcgtcgtcctggccatcgcggcagccgtcctcttgcacgccggcgaggcggccgacgtcgccaacgggcaattctcgagggcgagcgggacgcggttcacggtgggtggacagccgatctactctaacggttctacgcgtactgtctcatgtacatggctgtcg

SEQ ID NO: 3041 - DNA, 337 bp, Oryza sativa
  unsure (1)..(337): unsure at all n locations
ggcatatgagcggaattaggagcatttcctctccaggaaattctataatatggtctttgctcaaatccagcatgctgcacccatctcttggatatggagaacaaatgcaccctaaagctgaaagtattcctctggttactttngacggatagattaaacagcaaggacctgctacatagaaaacatttcaatacccaaggaaatgatagatgtgtaacttgcaactccttgaccacagaagactcattccatctggttttcacctgcagctatgctcagcaatgctggcacaacattggcattaatggggaatnttcacacaaccttcatggacatg

SEQ ID NO: 3042 - DNA, 403 bp, Oryza sativa
  unsure (1)..(403): unsure at all n locations
agctngagtgaaataacaacgaaagtattgtctggattgtgccatttcgcatgattttcaagtatccgtagcggaatgctagactccgggtattggctggattgttgccatttcgcatgattttcaagtatccgtagtgtatattttagtggaattctagattccgggataccattattagcgttcatgacgggatcctctcccaatctcacgtggctatgaacaaaaaatgacactgagaacacaatatttcatggcggccattacggcgcagagacaaccggattccgcgcgaggtaacggtgtgatggcgcggtggcggacaccaccgtcgcactgcgcagctgcccgcgccagccgaggacagcggcgctgcacggggcttggttgtcatcgctgaatc

SEQ ID NO: 3043 - DNA, 443 bp, Oryza sativa
  unsure (1)..(443): unsure at all n locations
gatggtgcgtcaccgctaaccagcacccatgganggtggatgtattgatgccttggcaaacacttcctgtacggctgcaatcaaatctgtggagctctgggtatgcttaagtatgtagcataggaatagcatatgctcaaatcagagaatgcacagttgaataatcattcaaagtcagtaccgtgctggtcctatgctagaacgtactatagacgcgagcctatacacaaatgataccacaagatagcacaactaaagcacaactctgatatatcanagcaacctcaatgataacaactcgatttctcacactttatgtgccttctctccttctctttctttattnttctttctttccttacttatatttcggtgcggctatgttttcactttttgtatgcacctttctgccgtttatttctgtttttaacaaaacacggact

SEQ ID NO: 3044 - DNA, 444 bp, Oryza sativa
  unsure (1)..(444): unsure at all n locations
agctntgtagcacaggtaaaacgagaaagctcattagcatataattaattaactattaattattaattatttgatttttttagattaacttataaaaattcaatatgttgtatgatgtacgtaagtactacatccgtccaaaatataagaaactagaaccggatgggatatttcctactactacgaatctggacagacgcctcctatccagtcttaagttttatattttggtatggagggagtactagtgttccatcattcaacaaattgaggctatgttcttttcttcaacaaaaactggataaacttttggataaaagtggcacactttntaaactgctaaacagtgcgtttcgtgcaaaaactttctatatgaaagttgttttaaaatatactaagaataattcatttttcaagttataataattaaaactcaattaatca

SEQ ID NO: 3045 - DNA, 393 bp, Oryza sativa
acttgttgcactggccgaggagcaggaagtataatttcttgtgatatgccatccgagaggataaacttgcgtggctctgttcgtcgcagtcgtacatagtgggatattattaattattgttatatatctccgctcacaaatataagagactctacttatagaattaaaacatgcttgatagaactctagctctatagaacaggcatgtagcctaccggttgcagtgacctgagtagcacctcaaggttttgagttcagatttctatatgagcgaattgtagattaggttatttgaacgctgagatcactatttgatagactaagttcctatattaaaatggctgatatatccgattgatatatagaccgaccgggtgaaatatacccttatct

SEQ ID NO: 3046 - DNA, 403 bp, Oryza sativa
  unsure (1)..(403): unsure at all n locations
agcttatntatttctcttcatttctatcacattaagatggactttacccaggatgagaatggatcagttattaaatcttggatggaaatttcttttacctatttccctgcgcaatctcttattaacaacttcttcccaacttggttcactataaaataagataatacaataacagtaagaatattttcaacacaaaagtcctctcaaacaagagaaagaaacatacctttttcataaatatttcgaatatgttccctatggtaactgggttcatgagttatggtcaacaaacaatacgcgcagcaaggtacattggtcaaagtttcataattaccttatcccacacaaatcgtttacctataacgattcactacccctatgaaaaatcaattacatcggagcg

SEQ ID NO: 3047 - DNA, 412 bp, Oryza sativa
  unsure (1)..(412): unsure at all n locations
ctcaagctctatagcaacctgtatgaaacatgttagatacaatgtttgtatctcaaatgttactggccagaccgagggataaacggttcaatatatggataatgtcatttttgactttccaccatccgcaagattttctcgcatcaggatccaatggttgtccttccactggaactggtcgctccagtgagtttaagaacaatatcattcaagtattgaagacatttggatcanatagttgctttgagattctagctgcagaaaatacatggcatattgagtatctgacaaataatggataacatattaaggcaaagaacttacataaatggatgaccagataactttgcatatcagcttgatcaagtcagctacttaattggagggtggaatcggacacgattcttatata

SEQ ID NO: 3048 - DNA, 438 bp, Oryza sativa
aagcttttctttccttaagcacctgtgtggacgatattctatcagctacaacttctcctagaatcagaatcttcccaaatagtctagcttttgtccagattctaaaaagttgtagtcgtaaaatctaaaaaatgaactagaaaccgaaaatttgaaaacctagtttctccagattctcagaggatagctacaaccagctttcttggaatcataaggtccttcaaataggctctcaatctctcaaatttttacctgattcctaatgcatcttagtgaaagcctccttctgctatagtgctataagcctagcacttgctctgcataggactcgttttgggtgtcagggcataacattttacagtctataagagaacagtgcagcttcagtagaaatgtcaccacctcaaaagccaaaaagcataggaaagatgataaatc

SEQ ID NO: 3049 - DNA, 386 bp, Oryza sativa
  unsure (1)..(386): unsure at all n locations
agcttcanggcaataccatgttatataatgaggagtgaactgggtgtatcccttcttctcaagaatgtgtgcagttcctctaaagctcttaacaaaggccatttgcatatcacatttcggaccacattcatcgttactggttgtccagaattcatactctacacgctcatcaggatgtggaagagattctctccagtccagaaggacgctaaccatatcaccattttcagcagatttttttaggtcatcgcccaatttcttcgttataagcacagagggaatagtgatgttttcaggtgctctgttccagcatcatctgggttatccattgtgattaaaggctccgacttgtcattcacaacaagaactgctgcagcccagcattt

SEQ ID NO: 3050 - DNA, 407 bp, Oryza sativa
  unsure (1)..(407): unsure at all n locations
ctaagctttttggagacaacagagcacaatcgttgttgattcttattggcatacatcgacatagatgctntcatgagcgacctaaccgaagtcttagttcgaaaacccgtaatattgcaaaaccgtatccataccataattccccagcgaactggaaacgagttcccacaggagatttacagccagtggcatctccaaacgcaccagtaatcgcagtatgtctatgtagatacactacaatcttcgagaacacctgaaattggtcaaataacgctctaaacaaacctagatcggatccatcaccaaaacacgccacggagaaacgaaccccacgatatctgtcggtgcattaccatactgtggcgcagttgttacctcactcgaactctctgcggttgatgagatgc

SEQ ID NO: 3051 - DNA, 347 bp, Oryza sativa
  unsure (1)..(347): unsure at all n locations
gcttcctccgcanagaacgccgtatgacttctactatggatttgntctgttntaatattgtactattgggttctaaatctaaccttcccatgtgcttcggaattgctccctccatctcataatataaagaattttaagtttttgcttgcaacgtttgatcactcgtcttattcaatttttttttgaaattattatttattttatttgtaacttactttattatctacagtactttcagcataactttttggtttttatatttgcaaaaaaaatttaaataagacgagtggtcaaacgctgcaagtaaaaaattaaaatcccttatattgtgggatggatggagtaca

SEQ ID NO: 3052 - DNA, 515 bp, Oryza sativa
  unsure (1)..(515): unsure at all n locations
atgtctgattcaatgtnaaattggttttgcatacgcgatattctctcaattatcacacctantactcaccttgtntngcacgcatgatataaggtcaagcaaatttgtttgttcgaatgcaattaagctaagtggtgcttcttgtagccacatccttcgatcaatcatgcatgttacagatgatggagacatgatcgagctcagacagcgacgccggcgagatgcggtgcccggaggccgacggcgccttgccggcgatcgagatgttcattngttcagaatatattgatggttcctgtccatattcttctgaaacttggcactcgtttcattagcgatggatgggaatatggacacgaactctcgagtgttcttgtcacgccaagtccgtggctgctatgagtggcatattaatgcaactgtcattatatgatctactggcacacccatcgtntgntctcgaatatctctagaatatgattgcgctgaataatatcatattattattatatcac

SEQ ID NO: 3053 - DNA, 435 bp, Oryza sativa
  unsure (1)..(435): unsure at all n locations
agcttccaatcaatntgcattggactgtgtttctctaaccaatccatgcccagaatgacctcataacagcccaacggtaacaccttaagattagtgctgaaggactccccttgtacccaccaatgacaattaggaaactcctgacaacattgcaagataccaccatccgcgattttcaccttcagaggagtcagcgagctgcgcacaccctgcagtttattagctaacttctcactgataaagctgtgagagcttcctgaattaaccaacatcaagacctcatgtcgttggatcaatccttacaaacgcaccatacgagaagactcaataccaagtacagcttctcgagaaatggccaataactcaccatcatctgattcaacagggggctagtagatgactccactttctcaggaacctcatcagaaaaaagct

SEQ ID NO: 3054 - DNA, 363 bp, Oryza sativa
gaatacatagattcatgtaacttacatggtttataagtcgatgaggttctgttagttctgggcaagttgaaagacgactcacatctttgttcaagattaaacacgggtatgattctcctagcaccaacaccaataaatagtcacaggagaatatgatggttagttcagcatatacaagaagtcatgattaagatggagaaatgttaacggtgaagtgtcattcaagacatatacagaggtatatatcgaatatctatgtcttagttcaacaagacacacaattgctaaactgaattagtactacatgaatcaaaacggatatatagagaagcatatagctcaatccaattgtacaagtgatct

SEQ ID NO: 3055 - DNA, 389 bp, Oryza sativa
  unsure (1)..(389): unsure at all n locations
gcttgtaacggattggcaatattcaaattagcgcctatcgctgtattgaatcatattatcaaatcatagccggtccgaggttgggctttggatttcattggtcaaatttatccttcgtcatcaaaagggcattggatcgtgctaattgcaatggattacttcactaagtggaccgaatccatgccgctcgagaatattacttgtgcggaggtaattgactttattttgaaacatattgttcatagattcggtattcctcaaacgttaaaggagcttctttatgtccaaggaaatgagaagttttgccgaatcttatgatattaagttgttaagttcttctctttactacgctcangctaatggataagtngagtcgagtaataaaacat

SEQ ID NO: 3056 - DNA, 397 bp, Oryza sativa
  unsure (1)..(397): unsure at all n locations
agctngttaggagagagatttcttcatttcttctgcatctatgagctaatctctacaaacaaataatactccaagtacatgtggaaatatattattctaaaacatatatgcattgtaaggatgatattgttatagttctaaaataccaacttactgcattcaaggctatatagaattgtttttttttactggaaggactgcagggctttgcctggcactgtattttcattaaagaagggaaatatttacatggctatatagcattgttgatagctgaaaaattaaggtgctgaaaatcaagtgtctatactttataaaagtaagaaaacaaaaggtaatggagcttgngggcacacaacctaatacagtaaaattaatatagacgtcaatctatgca

SEQ ID NO: 3057 - DNA, 245 bp, Oryza sativa
  unsure (1)..(245): unsure at all n locations
tcagntatagtggcctcatagaagttattgtcatctggccatcttgtataaattttccggttaatcaatgaagttggatccgcggatggcacagcgagtggtgtattctgtaatgcataanaaaagaactcatgatattactactatgggaatgcaacaaacatgacttgtcgtattcaaaacacaccgtcctaatcttctgccctttgttcttgaaatggccccactctgttatgaaggaactg

SEQ ID NO: 3058 - DNA, 402 bp, Oryza sativa
  unsure (1)..(402): unsure at all n locations
ccccggatcttaactcacctgagctgcagctgcctgtcgcttgttttttatataaaactaaaatgtanggatctatgaagaaatcgcttgacttcatcactgagaatctttggagacttcatcactgagaatctttggattcaatgatcagatgatgtacacgttgtagttgaccgctaccagtacaatagtaagattcctgtaattatagattcgcatgaggtttgcagatgctcaatccttttctccaatgatacaacattacacatgttttggtgatagaccatgataatacatattataagaataaggctctgcatttctgattttggaaacctttgcttgcaattggttggacgtcactcaatctttatataatatcactggttaattacaattgat

SEQ ID NO: 3059 - DNA, 422 bp, Oryza sativa
  unsure (1)..(422): unsure at all n locations
agcttgtcaatttcgtagcaaacacacatagtctccagcataagcactgcaaaccattcctctcacttgggcggtctcatgctggaggctcgatatactcggtccattcccacgaggacagggcggctacaaattcctgttcgtggcgatcgacaaattcaccaaatggaccgaagcaacacccacgggggaaatcagggccgataacgccatcaaattcattaaagggatattttgcagatatggattgcctcaccgcatcttaacggataacggctcccagttcatcagcgccgatttccagattactcgcatcgactaggagtcaagatctgcatcgcctcagtttctcaccctcagagcaacggacaggtcgagagggccaaatgtatagtactacaanggatcaaaacccgagtcta

SEQ ID NO: 3060 - DNA, 369 bp, Oryza sativa
  unsure (1)..(369): unsure at all n locations
tactaactggccaaggaatggggagaatcctgggtctgtgctccttattactgtgtgtgctacntgcatacgtacactaaccgcagttaaactattataggtaaatttctgccatgatgggaaagtaaaatctgcgagaggacggaagcacaagggaggggatgagaggaatatacacacatgcgcacatgtacagtccccggcatgctgcctctgatttatagcgtatatctctgaacaattactgctgttgctaaagcgtagcagcagcatcagtcagcatctaaccataaagagaggcgagagagagagagaagcagctaaagcacagcagaagctgcccgtgatgagtgcagtgtggactactac

SEQ ID NO: 3061 - DNA, 442 bp, Oryza sativa
  unsure (1)..(442): unsure at all n locations
agctngaggccacaagctaggggcctagatatgcaaattttgctacagaacatcgcgtcttcgtggttttagacactgtgagaagtcacttttatggaagacactaacaaaagttggatatttactggtggacaccgtaacccattaaaataataattttcggttggaaaggggagagaaatcatgtaaaatattagaaatacccctagactcatatgtcagctctccatctctcttcactctctgtcctctcttcctcattgcttggatgtagagccggtgcagcgtctgctccaacggcgtcaagaccagcgccaccacggtgttcacggcggagtgcaaggcgatgacgagaacgagagggacgacggcgatttcttgcgcggcggaggtcggtggatccaacggcatatatatgtgtaaatggcggtgggtgatggga

SEQ ID NO: 3062 - DNA, 367 bp, Oryza sativa
  unsure (1)..(367): unsure at all n locations
cagtggaatggttttgataatagaaaatctattcaccgaatgcctangacggctactacatataaatacacgtggaaggggtgggcaattagctatagcagcatgtgctgtatcgaaactgattgaaaagaagtaaatcggcacttaagataccatctgggaggtccgttgtatcccatactgcttacaacagtcggacaagtgggtaatgttggtgtgaaccaaacaagtttgggtagagccgcgtctaagtgttggctacgtaaacgccccgtagtatgaggggtagttatgaaccctgtggaccacccccatgggggcggtgaatggatagccctcattggtagagtaagacccacaacctctt

SEQ ID NO: 3063 - DNA, 312 bp, Oryza sativa
tagagcacctgagctgcagcttggggaatattgggtttctgtttgaacattaacagatggcatatatttacacgaacacatctagagaccgtgaaaatcagaagatacaagaacttgaggacgcggacgcccgagtcgccttcgctcaggcgactcgggcggcgacccaggccaccgccaccgccgatctatccccctcttctctacctcgccgccgtctgagcaaaccgccagcaaagccagcagcttgctaggatggcagcggcggggctcttggcggcggacaccctagatccggcgcgggcggatctg

SEQ ID NO: 3064 - DNA, 363 bp, Oryza sativa
  unsure (1)..(363): unsure at all n locations
agcttgtcaccggccatcttccgtcgccgtctgtcgtctcgtaagtgttggtaaggaccgtcgccttgcgctctttctcccggtgtcctcccttttatcgtcgctccgtagtttgccggtgatcgtcgttcctgtgttcgttatccggagatctcgcttggctgtcttatcattgccacgtctacctaaaccctagatcaaattcaatctaatccgttgcttgtctagcattgtcatcgtttccgtgtgttgccgccgggtcgccgtcgtcatctctccctctccaatcgctttgcttcggtgagacttctatctctgttccctcggnttaggttttaatctctcgtttgtgtcatcgagtag

SEQ ID NO: 3065 - DNA, 319 bp, Oryza sativa
cgatattatacatattgtatggcatctgtagtgtaccagacgctattaacccatactaatgattagaatataatatattagacacattgctgagcaaagtttttcgatctacggatgatttgatgaaaactaatccactccactccctctgtgaaatgaccatacatatgcgctgtctaagagtagtatattaatacacccctatttgcatgatgcgaccatgagctaaatcccaagtttagatcctcataatccacacataagtatggcaatccgatgatgcgctccaactaattgcgtcataatcattctcctaact

SEQ ID NO: 3066 - DNA, 415 bp, Oryza sativa
agcttcaactagaagcacagagcattccttacaccactcattcagatgctcctgtagggggtgaggaaagatctgtcttcagaaaagatgtagcgggatatctgtgtatctaaccctgtcttttcaagtcggccgactgctaattttcttttacctgactaatgcagggtggtagtcacagaaacttctatttcaccattagagatcaccttcagctgggaaaagaacttgatttgtttgattcttatgcacctgctgaggtataactgccacaaatcaatgtctaacataactttgcagtaaagttgttcaataccacagttatatttgaactggacagaagccattacctgaacactaactcatagatgatctacaattgtagctcctatatgagccgctgtacctctttcac

SEQ ID NO: 3067 - DNA, 453 bp, Oryza sativa
  unsure (1)..(453): unsure at all n locations
tctagacagtatactagtatttggagaacctcaatgaccaatgaacgagcggcctgagttaacacaaatacccatgatgtanactcatgcatgcantatcaatatacctaatgttactgtaggcatacgtcgcatatacgttatccaaggctactatgtgggattttagaggtaaacatcacataaatataagtgctgcctatactatatgtgtgtccttttaaaagacccttagaactatactccctgttcgacaatacctattattttggacaatgacatgattctcgaaacatagtttgtgtgggatttctattgtatgcacacaataaaaaatattagattcgtaaatatttaagactaactatatatgttattgcttcaaagatatcaatgtatgaactaaatcttcctaaacaccaaaccacaaaaaatatttcgttttgatcaaat

SEQ ID NO: 3068 - DNA, 406 bp, Oryza sativa
  unsure (1)..(406): unsure at all n locations
ctggcatcgagctatttgtcgttgacctcccctacaggatcggcaccgcagtagagtttaaccaccaaattccggatggattggtgtgggtcctctacgcctaggacaccagaatatcgaaccatgaaccaggaaaggcatgagagaaatattggctagtaattgtgaagccccaattcttgactggaagggacaccaaaggcctctgccctccctctctatctatccaagagatggaagggcagagcttttttttggtttttcatcttttatcaaagagttgaacaatgaagatagatggcaagtgcctgatcgatttgatcaggtcgtgtaggaacaaggttcaaatcgntcgttcgttaggatgcctcaactgcatacatcactgcactttcacttgacacct

SEQ ID NO: 3069 - DNA, 358 bp, Oryza sativa
  unsure (1)..(358): unsure at all n locations
tgcattattagaatcacacacttaactagcttggcctctgtgtgcgtgccaaaccgactgacctacccagtagtcgcactaatttccgtaggtcgtactaccctgattccttgtcgctccacccttgtggtacctccgtgatcgtgctctctgagcgcgtataccaaatatcccacatacaccgttgtttgtcgaatacttgggagatgtgtttgtgaagcctttaaaacccgacatgtggtgtcggtgtgtttgagaatagaatgaatngtgaaaactcgcgatgcgggggttgtgcctatgagcactgtccgtattccatataagaccgatcctgtggaactcattaacatatcaa

SEQ ID NO: 3070 - DNA, 403 bp, Oryza sativa
  unsure (1)..(403): unsure at all n locations
agcttctaaaagaagtgcattgttcactgaaccggagcaataatatcaggagaatccttgaatgctgctttgaaacattgaaatagacaataaccaatgcttcacagctacccaacctaaccaaaacatgcacaaggtattccaaaaggcttcgtttccccagacggaaaagctttgtttgcaggtcttacaggatgtgaacagaatcacgggcggctgccctgagtcctaatgttacaagagcagataatatagtatgacaagggttggtgggctgcctcatgttatttacagatgtttcagaataagtgctctcgtaaaccacacacatcacctagatgaagcaattaaataatgtcnacgatccaattggaagctgaaaaatcttcacctcttttttctt

SEQ ID NO: 3071 - DNA, 436 bp, Oryza sativa
ctcagctgaaccgtcttaggtggtttatactactataagggatgtttgctgctatcatacaatgtatgcttgtttgaggtactgaggaagacagaatattagggtttcacttactgctgacatgtggtcatctaatcaaaacctacgttacatgtgcataacttgtcacttcattgacaatgaatggaatatgcataacatgatcataagattcactcaagtgcgtaccccacatgatagtttagctctcttcaatgaaattatatagcgcatgcaagattggcagatagaaagtaagctgttcttattacagtagacattgcatctactaatgattctatggttgtggaattgaaaggaatctcttggtaaacttgctatgctctgatacgagagctatttatatctgggggcagctacatcttaatctattgtt

SEQ ID NO: 3072 - DNA, 138 bp, Oryza sativa
agcggtgttcagcgagcagcttcgggattgctggcgctgttagtcaaccctaagattatgaatcgagcaaggggaagccggtcaggtcagcgcggagacattcgttgccatgctggttgaaacgcagcggtgtgatgg

SEQ ID NO: 3073 - DNA, 340 bp, Oryza sativa
  unsure (1)..(340): unsure at all n locations
gtcagctncactcttgcagtatcactctagcaatgcaacatcaggtcaatagttgacgcctcttgatggtggcatttatcgttggtgatgcctcctcttcctgcgaggaactggctnttaatggagaaaactgaggcaacagtgacacaagcagcgtggtccttgctgtcttcaccggaagggcagccccgcctccctggtgcgcctctactcctcattcaccaacttttcctgtaacgtggccgccaattctttcaggtcaggccttaactcttcgattatcacggagaaaggtgttgtcagtgtggatgtgctgctgattgagccggcgatgaaactc

SEQ ID NO: 3074 - DNA, 405 bp, Oryza sativa
agcttcaacatagaccagccaggaaacaatttagtgctcacaaccccagttagttgatcttgatcatggagatgtacatagcataatacatatatatagaaatatgtgtgtgtgtgtgtacagccatatgtacaggtcattctattttgttttgcttcctgagatcacttgatgcgtcatcatatatagacacttgtaagatgtgcagctggacatgtacaagccaagtgataaaactatgtaccaaacactactacctaatgagccaacctctcaagtaataagcacctttttgatgtggggttgacgtaggactaagatgttcaaaattcttatgatcataatttcgtatttacgtatgtgcgggatgcgctttagtagaaatttagtaagattactcgtatt

SEQ ID NO: 3075 - DNA, 192 bp, Oryza sativa
  unsure (1)..(192): unsure at all n locations
gccttagcaacaagacagagaattctcatgatctggattntggatcttgttatatatgctgaccatttactagaatgaatacatgctgcatgcagcttggaagcagtttgtcctaccgagttcttggtgatctggagttggcagccatggatgatcagctgggtggcggtgtgtggtcactgtcattctgct

SEQ ID NO: 3076 - DNA, 441 bp, Oryza sativa
  unsure (1)..(441): unsure at all n locations
agcttgacgttccaggcattctgacacaaattagcttatagaggaaattaccaatccactctccatttatcagctgttgttagaaataatgagcatgcactcaattcaaatgagtggtccagagctaaaatgaccatctttttgtgacattttgtgagccgtaaaatgacaatctttctgggaatgaggaagtattttctattataatgcatatattcactaccctcttgaataaagtaatacaccctcttgaaaataattgtcttcaaaaataactttattcactattttctattgtaatatatataaaaatatcaacaaatatataatttttattggagtacattntaagattaatctatacatattattggttctatgtttaaaaggaaaaattttaaaagttattcatagtcaaaagttttataaattgatatcaat

SEQ ID NO: 3077 - DNA, 308 bp, Oryza sativa
agtactcatgtagttccagataatatatatgcaggctacaagctaagccaagcagtttaagcaatctgcagcctgcatggccggccgggcatgctcaatttgggaggttagacctgatgatctatgcaagaactctgccaaatgtatttaaatcgtgatgcttgcatgtagcatgccttacaagacactccacctctttttcatgaaaggaacaagcctctgcatgcatgccgcgcgcgctatgtctaatatccgtatatacatacggccggacaccactatgagtatatcacagctaggaggagtat

SEQ ID NO: 3078 - DNA, 381 bp, Oryza sativa
  unsure (1)..(381): unsure at all n locations
cctttgcgagcatgcgcgctttcatgataaaattaaaccctgaaaaatgcaccttcggagtaccgtcagggaagctgcttggatttatggtgtctcatagaggcatacaagccaacctggagaaaatcaacgccatcctcaacatgaaaccgccgagctcccataaagatgtccaaaagctgactggttgcatggcggcgctcatccggttcgtttcatgactcggcgagcggnggatgcccttcttcaagctgttaaagaaaacagacaatntccagtggggacccgaagcgcagaaagcctttgagacttcaagatacttctcaccactccacctgtgttggcttaccacatcncaagagccgctattgttgatgtatc

SEQ ID NO: 3079 - DNA, 377 bp, Oryza sativa
agctttcatgacaaggcatttccaaagcctacacaggtttaccatatgccgacgagaggggtcccagaccaacaacaggttaggtcccagaccatactgtgccaagaagaccaggggtcctccccgacaccaccccggcgaatccacttgtctctcggcatcaaggctcccctgattagctaattactcagccaggggtgtcccattccacccatgtggttgtactattatatgctcggatgtaattccgaaggaatcggcccttaaatgcgaccgcacaagcttcccgcccaggaatggtcttgtgtcgcgaagtttatttttaaagctcattttctttcacaaggcaccgacccaggcgtcgggtttcccaatcg

SEQ ID NO: 3080 - DNA, 514 bp, Oryza sativa
  unsure (1)..(514): unsure at all n locations
natcattctacatttatggaatagaacanataatattattacagtattctttgtcaagctagtggtctgtgcatatgctcagtcctataatgtgctaccctaagtcaatagtaccatgtattcaagatataaatatgcgctatgcctttattttccgagctcagtcaatattaccttgtaacatctcttgatcacgccctgtgggtctgtgcttctgctcagtcctataatgtgctaccctaagtcaatgttacctctgattctgtaatattaatatgagctatgcctctattttccgagctcactgtgtcaagactaccgcgttgttcctatccagtaaataagtgaaacagtttattgctcatgtgtgcatgattcccattctatcagattgatgcttcatctganggcccttggttatggttgcaagaaaaaaattataatgaattatacaagaattgctaagggactacatttcttctatagcatgaacataatggctacagatattaat

SEQ ID NO: 3081 - DNA, 472 bp, Oryza sativa
  unsure (1)..(472): unsure at all n locations
gctatataaggctntactgggttatcgtcttgacaattataagactgtatatcacgcggtgcaagggtatcactactatgccagcccaaatcatgatcttcaccaactnggatttggttctctcgcgaaaatcgcgagttgcatagatgagaaccatgataagcaagatcccgaataagataacagagaccgaggaaaccacaagagtgaagactagtagagtctccgtctttgtcattctttgctccgttttcactcaatgattcattcgaatttcccgaccaaaaattctatatgtctattcataaggccgtcgtgctaagtgctacaagatctagtgcactggaactcgtggttatggacccgaatctcttattatggaacatatgcttnttcaagtgataacccccatatatgagagaatgataggtgctgtcgtcttttcttgtggataagaagcctcgtccttatg

SEQ ID NO: 3082 - DNA, 375 bp, Oryza sativa
  unsure (1)..(375): unsure at all n locations
aaacttttaagaaatcaaagactttactagaactatcaagcacagcataaatacaccagtattgtacaaattgagccttcatttgttacattcatactcagtcagaatcagtcctttcatcatcagagttattgttgctcggctgaaggtctgtgttgcggaattgctctacaacatcacttgcaatcttgtcagccgcattttgagcattgctgataagatcaagagcggcttcttcacttgtcccgtctgcaaagccatcaatggcgtcaatttcaattcttgggtacaaggatttggtcatcgccaatgccatgctagctcccatacttccagctntcttgatattcttgaagtatacatccggtgcaactc

SEQ ID NO: 3083 - DNA, 403 bp, Oryza sativa
  unsure (1)..(403): unsure at all n locations
ctagctattgttgtatgaatcancaatatgataatntgcatatataacatgttatgtcctaatgtaacctctagaccatggaggaccaagtgcacagaaactgctcacgggtctatggaagtggacangcgtgtcaaccgaagccagttgtccacaagcgggccccactatatgcaatgcgcgcaaccacgtggcactgacgtgagctccacacgtgcacaccatgacaacacgggtggcaaccgatgccagcagcacggtgatcaaagccctctataaacggtggtgaatagcaatgccacatagagagaagccgcgacgagaggagaggaactagcatgtgtagaatagagcggtgacgaactcgacatggagaggatggctagggggacatatacacatg

SEQ ID NO: 3084 - DNA, 449 bp, Oryza sativa
  unsure (1)..(449): unsure at all n locations
agcttcatggagatgtaaccaggcatgcaaattctaactcgaccaagatgacaggaggcggctgcagtatttgggcaataaaaatggcagtttcaagtttcaaccatgttctgcagctgagggctttggtggtgttttcttttcctttaagtatctttaaaagggatacaagtagtaaccaccagttaatgaaatcccagcaattatgtcaaaaaaaattgaaatcccagcaaaactaagctcttttggctctagttcctaccgggcatgctcccgtagaaaacaacattacgtcaaacttgggggcaaagcactcattcattttcaatatcgatcgtttaaattaattgttcgtcacacatacaccatcttgttcagtaatgatggctcacatngtccgtaatcccttgctaactacatnattgactcctcattttatactcaacaat

SEQ ID NO: 3085 - DNA, 173 bp, Oryza sativa
tcttaagaatatacaattacataggggttgatctctgaatacagaaatacaatatgtcacctaacagttataccggtaattagtgtatttcaactgataagtttattgttttaacacttcttgaagttcccaactacctacatttaaactcctagtcctaatgcttggcccgc

SEQ ID NO: 3086 - DNA, 325 bp, Oryza sativa
  unsure (1)..(325): unsure at all n locations
agcttatcaagatgtatgagtgtctcaatggacagggcaattngcgagaggttttcaaacacaacattcaagaacttttccactaccatgatctcttcgatcagaatactgagggtggaaagtgtgacaagcccatgaggtggagagtgaattctttgatggacttgctgtcgttgaactcgattgcatcacacttccttcagtagtttctacgccttggatttccagacgtggtcgatgccattccatataattcaacttgatcgcatctcaggctctcttcgtggcagcaaagggacgccatcatctctaccggcatggcacg

SEQ ID NO: 3087 - DNA, 425 bp, Oryza sativa
  unsure (1)..(425): unsure at all n locations
tactcagctcaggtctagntacctactgctactgcatgttcttatgccatcattgctgatgcgacgctaccacgatcgagcgttattacaatttattgtcaggttcagtgccagagatcttggctggcgtgtccaacctcactgttcttcagctatccacacacaagtgtcaaggatggtgtcctcccatcatcttccagcacaagaagttgagaacaatngatctttctaagattcctggcatatctcgtaatctgccaaatttctcacaagacagtagcttggagaatttgtccgtcagtagaacaaacttcacatgtatgattccgagctccatcagcaatctcagatctctgaagaagatgggcattggtgcaagtggtttctctggaacactgccctcttcgttaggtagctatctatac

SEQ ID NO: 3088 - DNA, 341 bp, Oryza sativa
agcttcagtacttcgatgtttccaaggatcgcaattgggcgaggggtgtccgcagtaccaagtatccaggtgttccttacaccttcttctctcagaggcaagggtgcaaagttaccttgtaccaagatgctcatgtcccaaacaacttcattccaaagattccgcttgccgatggcaagaattatgaaccccacagatgctgggaggatatctttgatgctataagcaatgctcaacatttgatttacatcactggctggtctgtatacactgagatcaccttggttagggactccaatcgtccaaaacctggaggggatgtcacccttggggagttgctc

SEQ ID NO: 3089 - DNA, 382 bp, Oryza sativa
acactcgatggaatggttgtgttgttatgagactggcagcagctatatgtgtacacaaatggatgccttaaactgattcaaggtctccaatgtggaaatgtcttgttattacagtgaccaatgcagttggtaacttttttatgcatttaagggtacgggaaattgtagctcacttgagaacttaggcttctttatatgttgtcttcatgtttgatgaacaacctgacaatatggtacactggcagtggtgaagggtgagctggcgactgtattggtaatagttgtcgcaagtactgaattcttgtaaacctcaacaataatgcactgtattacttctttttgtgatcttaatgcattcacccattcatgcaagttgaatttg

SEQ ID NO: 3090 - DNA, 532 bp, Oryza sativa
  unsure (1)..(532): unsure at all n locations
ctcagcttcagcatgctagattgctcntcactatacagatgctcaatattccactataattgctatcagaggcttacctaagctagatgcacctgctgctccatttcagagacttggaatacccctaaaacatcctgtctctcccagctctgatgagcatgagaagaagagaccaagaaataagaccaaaagaccactgcctgtcaagaaatggaggaaagcaaactcaattaaggaatcatcgttggatggaaagtcaagggttcttcacagctncaacaaatacagctgtgaaggcgcgccacacgttttttgtttgggatatgacatgcgtgattatttaattcatgtttcagtataatttcagatatgggcagccacctatttcatacactcagttcaataagtgtaccttctattcacaaaacacatgggtctacggagtcttanaacatgcgtcgataactcaagatgttatacattctataaacgcgaaatcttcatccatgttacttgactactaattctcagg

SEQ ID NO: 3091 - DNA, 397 bp, Oryza sativa
agcttgagtgtgtgcgcattttgagctgtctctacctagtagttaataagaacgcgcatatatttgtgtatgtttcttgttttctactaacaattgcagggatacgcaagataattggggatagctgtgctcaacatcgacatcttcgtcgagacatgaggagggatcaacatgaccattatgaggtaagtgatgatgttctatgtaagatcaaatctgcactgccttatttcgagggaaattatgatcctcgtgcttacattaattgggagctagcggttgatagtgaatttcaaaatcatgtcttgtcggagaaacaaaaggttatgtgtgcctctagtgtttaattaaacatgcttctaatgattggaaacatctttgtaggcataacaaaata

SEQ ID NO: 3092 - DNA, 410 bp, Oryza sativa
agccttgatcttctcatatgcaggaaactgtatagcaacatgactgataccagccaaggcagggacaagtccactttataaaaaagaaaaagaaaaatatcagcccgcgcacaaaacatattatcatcaaacggtgtaaaatcttgcatctgtggacttccatggaaagctacctgtacagtccacgaatgccttcttcatgtgctattctcttcaaagcagcaagtgtacctttgtacgggatcaccccagctcgtatcccttgggtctacaaaagggaaaaggatacagatgatgatatgactcacaataaaatctttgaatcaatttgtctgaatatagcatgtagatgttgactgcttaatatggacagggtaaagatctaaaagaaattcagcatatttataagt

SEQ ID NO: 3093 - DNA, 365 bp, Oryza sativa
catgcaagctagatgcttggatggagatttgctgttgtgtggggcaagggcgagggagtgggggtatatttttgactagagccgagcgtggcaccgcacatactgcctatagctggaaacgtagtggagtgaacgggtcaaaacagtagctttccaacgagagacgacgaaagctcgggcacggcttcaccttcctcccaccgatcgacggcggagataggcgccattacttcttcttcttcagcgtgtgaaacgatcgaaacagcgaggcccccacagtcgtgcaggcactgtacggcacctaaatactgccttctggaccctcgcgaagaccacggttaaaaaaattgtctggtcacatttgt

SEQ ID NO: 3094 - DNA, 396 bp, Oryza sativa
  unsure (1)..(396): unsure at all n locations
agctagtgccctcttttggagctgttctttacaataggtcccatcatccttgtcatactgatccttaggagctcatatccaagttgtccacttgtggttttggatgatctcatcagaatcggctactaattagtactccacgttngacttggtctggcctatgtatatctctggtaccgactgtttctattgggaacaagtcgcgtcttgcacatggtatggagcaagtgttcctttcatgtgcgaataaacctacatgtctatgtactgaaaatgcaatttttgtagggtggcatgaatttccaggacaaacatggtttgttataggctatctcactgagaatttataccagcctctgtatttattagctatatttctggaaatggatctgtaac

SEQ ID NO: 3095 - DNA, 361 bp, Oryza sativa
  unsure (1)..(361): unsure at all n locations
ttataagcatatatggatccatgtatgtgctatatatatgcgtcaaaatttatatgtatattagtgaatctagactaatgatggagaagccaaaatgtcttataatgtggaacggagggagtactatattagtagagcttgaaaaagaggctgcacattagatcttgtaataacttcgactctaatcgaagacaaaaagaaagatattgaccatccgatcatggtagacctaaattatgatggtgtagatcgattgatatggtcatatagaaaataagactttacctatgaagctatatgttgtatatgataggcttgttcactntgatgccactttcaaccctaccaaatttgacatgac

SEQ ID NO: 3096 - DNA, 224 bp, Oryza sativa
actcctaaggatatcctccggacaaacccacgagatgtaactcacttctattggtcatacccacttgtctcttgtgttaggacttgtgaaaactcatcacactctggttgactatcccacaagatgcaccttcatgcatacgatctaactattgtgcaagaacttacactatctcgtttcatagacccctcttgataagacaacgtctatctagcagattcggt

SEQ ID NO: 3097 - DNA, 235 bp, Oryza sativa
ctggaaacgccatcttagaagacgcagcagcagctaatcgagacgagacgcagatttacttaagagaattgatacagacgagaagagaactagccagcatacctccttctagaagaaaataaaccctgaacagtgcactatcagagtaccgcgaggaagctgcttggctatatgagattccaaatgggcatgcaaacctacccggaaaataataacgccatcctcaacatgaaaa

SEQ ID NO: 3098 - DNA, 309 bp, Oryza sativa
  unsure (1)..(309): unsure at all n locations
gcttaataccacaacacaggagtagcgtgttacgctatctagaggcccgaacttgnataatcccttgtctgtcacctcgttgcgaaccatctagttagctagatcccaggccaaagatacgctcttgaacatctcgtcttattccctggccgaactcacaaggggggggctcacgttctccccatagagaggatcagctcctcgacattctatccgccacacatgaggatgtataaatccgccgtgaacacctctgcgatgcgcgcagagatgattgtctgtgaaatgcggggcatgtggccccgtgac

SEQ ID NO: 3099 - DNA, 441 bp, Oryza sativa
  unsure (1)..(441): unsure at all n locations
ntgtcattaanattgtgcattanttcctatatctccttatttctcatcttatttttcatggctaatttagtctgtagctagctgcacaaatggcttattttccaacgttggatacatttgacattaacatgaattaacccatgaactataattgggtaatttgagcacacaaaatagatcacataatattatctgacattaacatgaaggtttaatgtcatatggcaatgctgtgaaggattaatgtcaaacattaacatgaattaatccatgaactataattgggtcatttgagcacacaaaatatatcacataattgctaacgtagcacacataaactgctgcagtacacaggacataaatataagttgcatagcacacataatagttcacatgatattgcattcagatagctcaataagtcacataangtcacatgaa

SEQ ID NO: 3100 - DNA, 411 bp, Oryza sativa
  unsure (1)..(411): unsure at all n locations
tagcatcttnccatgttattcccactcacgtgcctagaaattgcccacttacttctacctgagagccaangttagcgacacaattatgatgctgcaggtcccacaacaatactgctaatacatcgttgtgcaccatacacatatactgagaaaaaggcatgatcctagacattctccccagcattataacaagcttgtttaagtaaaataatgaggaaatagttgctaactgacctcagcataagcttctttgcctactgaactatcaagagatgtccgagcttgaaaaactaagttatatccctcagctgtgcactgcaacacattntcaactatgttattaattgaaaaagagctgtgtcaaacaaccaacaatctaagatacttacaagttccttgagagcagcaata

SEQ ID NO: 3101 - DNA, 421 bp, Oryza sativa
gcttgagctacaatataagaggcgctattgttctatattatatactacaattagggagagagtagagtagaggaagtccgaggaaatccggagttggcggtaatccttttcttattactttcactctggtaagtactctgctttaatcgaaatatcattgggagttaataatacttatactgtgagagttacctcttggttagttcctaatcaacttatggggtcactgatcactataatccaataaaatatagtggttgctttagtgttcagctaacattaaagtagttattaaacttcgcagacgtggtatctgggtagctaattttccgcatttgcttcatataccacagtatgtttgacgtaagtcgtatacgtggtgatagccctcaaaacactaaagtcatccctatctggctac

SEQ ID NO: 3102 - DNA, 395 bp, Oryza sativa
tgggacaagcttcgaccgcaggaggaggggatgtcacggcggcagcatctgtattctggagttcaaagcagaagccagtggcccagcctgtgaatcggcctataagggagaagcagcccaactcccgtttccctgcaagtgtgtggacccagtagtaattggctaggcaactgtcagtgagtgagagagactgtgtagttcgatgctatataagccggcacgattgagaggaaggggatcaaatcatgtaatcaaacatactcaaattcaattccatctctgtcctgttcaattctgttatgatcttctccttcttcttcttcctcaagccatctctctcaatctctttccttctctactcgaccgaatctctcctacgaattcgagaccgtgac

SEQ ID NO: 3103 - DNA, 432 bp, Oryza sativa
  unsure (1)..(432): unsure at all n locations
tatcgataccagctatgaccttgagaagtccttggaacacagcatatagatgtgattagacacctccaatgacccacaactgctcgttccttcaccaatcatcgatgcctacaccactccatctcattttcagaatgcccgtagcaaaaatgcagataaatagtgacatgaaccaaaggctggcgatattagtaagctgcagaatggaacaaaaggaggaaaagtaagggtcaggtcattggtcttctacaatttcacaccacacagaattacgagcagaataagcgttacctctggagtgataaaatttcctgtcagcaaacagatggcacgcatgtacagtaagccaatagtggaatggatgtccaccgatacacgatggaattaatgtangaaatctttcaaacattcaatccacctcatagcctacca

SEQ ID NO: 3104 - DNA, 370 bp, Oryza sativa
tttgatctgagacatgaagcaatcggacctatacaaccacactggcaaatgcgcggtccatcaaccatatagagcgttggcaccatggacactggcgcatctttccagggcaagtttctaagctcagctcaagaagaaattgtgaaagtggatgcatactgttagctcattaggactctgctcaaagaatcacttgcagactaaccacgttgtcactctagcatggagagccttcagtaccacgggataggtaaaagaagcgcggatgcaataggtgctgcatggatcatagcctggcacctgcactatttataaacagaaacaactcgtcagaacacacacaacaagactcgagcacaatagactccat

SEQ ID NO: 3105 - DNA, 434 bp, Oryza sativa
  unsure (1)..(434): unsure at all n locations
agcttatactntctttatatatcatgttctcatctgcattntaaaaactcaaaagntcgatttttaaactagatctgagaactcgtaatgaatatttgagcccctaaatgaccttgaaagaataaacattaactacaaagtggtagatatatatcatcaagacatacagttttcatatanaatttgtcatcatccaagttcagatttaaaaattatggatcaaagtcttcaaggctccagccagggttcctacgtagccacttcaccacggatcgaatcgggtagttttggctgttgtgatagagatttggtcagaatccaagaagttggagtggcttgccttgggaaaatggcctggagctaaaaccgtgttattaatacgtgtttgcaaaatacaaactaccgaagacaggatttctagtaacatctacaat

SEQ ID NO: 3106 - DNA, 457 bp, Oryza sativa
  unsure (1)..(457): unsure at all n locations
tcaccacaatatcgtgagttatacttgtgaagatggatgacttatctcattcccaatagagagtgatatttggacatacctacgaggctcgtatcaatataagtcaaagaaaagtctactcctcgctcttggcacgcctgctcttatatactccctccgttcctctctagatgacaccattgaccacttttcttttcccaaaatacttgacactgcatagttgatgacaaacattcttccaatattacccctataggcccagccaacatatgaagaaacgagaaatatctggacactggagtgcagatttggaggcatccaacttgtccacactccacagtatcaccggaataaagagtacttaatcaacgggcgcatgtagtactaatttaactagggaacatcttacagccttngtaagtgtgcatggctaatgggtgacatatatatatatata

SEQ ID NO: 3107 - DNA, 256 bp, Oryza sativa
  unsure (1)..(256): unsure at all n locations
tatgcaaacacacaacaaacagtgagattattgatcacacgcgtagacactnttgacatgagtattatacctaccaatcaacaaaatgtttctatcttttcatacattgatgtgaacctgaactgagatgaacgattcatagaacagatagatgtatacattgtctctcacctgatccggtgctgatgggcgcgcgccgtctgcgcgctggtcgcctacgtgtacgcctcgacgacgccgctagacgcgctgaaca

SEQ ID NO: 3108 - DNA, 336 bp, Oryza sativa
  unsure (1)..(336): unsure at all n locations
ngccacagaatatgatgacctgcgcactcacgatcagcgcatgttttattatctatggatgcataacacaggttgacgagcatgccgacgaacccaactcttgctgaagtggcagaggactatcaggtgatcttctcggccatactatacaaacgaccagacgcagagatgggtgacaccttcatcgaatgactatactaacatgctggttaaccttactgagaagagactaccaaatgctttcgagacaactctgtgcgtggcaaccagatgcgcactaacactaactaactcaagaaactacagcaacggatgctcacctacaagagaactgaa

SEQ ID NO: 3109 - DNA, 472 bp, Oryza sativa
  unsure (1)..(472): unsure at all n locations
actaagcttcttggatatatatcatcaccttctggttnggtttacattaataaatatcgtcgtagcattagcacggatatattattagtgtgtcgttaaatcgatgtctaacagtagcatgcaactaaacattaacttttttgcttataagtaatagaagaagaaaacattaagctttgttatatgaaaatacactactataaaactggcttgaccgcatcatactgtaactagaagtgttatacgtacgctcttgtcgctgtcagttttaaagaggactagctttcagctccaaaagctattttggtagtggtgatggtattaagcgttagtacgggtatataaatagtggttaacaatgttcgttaaatcgatgtctaacagtagcatgcaactaattaaacattaattttttgcttacaagctatagaagaanaaacataagctttttatatgaaatacaacactacta

SEQ ID NO: 3110 - DNA, 455 bp, Oryza sativa
  unsure (1)..(455): unsure at all n locations
agcttatagttagcttatagcgcactattgttcttgctcttatcataagataatctcgcgcaatatcacattgtntgattcgctccctaacctaatgcatttatatgaacaccgcattcattccctctgatctaaaacaaccccgccacccactatccaatcaacgtagcagcccaaaccagctcagacgacagaaacacgcgagccgtcgcgatccagtgacaccaggcaaaaaaaactagtccttcgatctgagcaccgccaaaaaccagatccaacatgagcggatagcacgacgcgcataagcgagcgcggtagagatcacgattcacgaggctagatcacacagatccgggagggagagaggggcctctgatgcnggcagcgactggcgcctatagcgagagatataaagagagagactcacgttcttgaactggaggagcccgagctcg

SEQ ID NO: 3111 - DNA, 328 bp, Oryza sativa
ctcatagagaataccatagcttcatatttcattactcctaaccccagcagaagcatccttatgatattaatccctgcggctactgcagccaggaaaggagcatagcctcctgagctgtataaagcatcaatatgtgagaaccaatatggcgatttatgttgaccagagaaaattacactttcttacctgataagaggccgtaagagcaagaataccctaccgatcgctatatgcgacaagtttctattgagtttctgcatgccaaccaactggaatctatcagtctggagcatcatcgtattgaagcagactcaattgacaaactact

SEQ ID NO: 3112 - DNA, 408 bp, Oryza sativa
gcttctcgattcttggtcttgaccatgtttctaggccaaccccgagaagatacgagctatttatcgtatgcgcccccacagcaaacttatggatgtgcagcgcgtcaccggttgcatggccgccctaagtcgtttcatatcaaggctgggagagaaggcgctacccttatttaagctcctcaagcgctcggggccgtttacttggacggaggaagctgaacgtgccctcactcagatgaaggcatatctcagctctcccccggctctagtcgccccggagccaaatgagcccctactgctctacttagcggcgaccccacacgtaggtatcgcatcgcttgttgtggagcgcgatgaagacaatcctcattccgcgcgctcgcaccctgtgctgatatggccccggag

SEQ ID NO: 3113 - DNA, 382 bp, Oryza sativa
  unsure (1)..(382): unsure at all n locations
taatggggaatacctgatgcnattgggatgtgccacaacttagtaactcatccaaaggaccagaactttctcagaggagacatgccaatttcttttggcaatctaaatagcctaaccatactaaatatatctcataacaacttatcaggcaccatcccagtagcactaggctatctacccctactaagcaagctggacctttcttacaacaacctccaaggagaaataccaacagtgggagtattcagaaatgtgacatctgcttatctcgatggcaattcaagacnttgtggaggagtgacagaatctcatatgctctcatgccctcaagtttctaatagaataaaaagggattctgatataacacagagggactacaatc

SEQ ID NO: 3114 - DNA, 435 bp, Oryza sativa
  unsure (1)..(435): unsure at all n locations
agcttcatcacacatatacaattctatttgttataagttngatgtactgaacaacttatataatccaactagaaatttattaagtgatcctctagattcctggggaagttaacaagctaccttagtgttccatggaatcgtgattgttcccttcaggggcaggcccaggattttaagattgggtattcgaaatggaaagggggtaaaaaaatttttttacaacatgagcacaatatttggtacgtataatcaacaatatggcgacaaaactcgatccggtttctgaacgaacacgctacttagcctcgcaaatcgcagcaccacgtctcatctggttatcaaccgtgccgaaacccggttaatctcgccgagaaggctaatccctacatgcgaatcgaagacacaagcagaacgagatagattgaacacaattgc

SEQ ID NO: 3115 - DNA, 376 bp, Oryza sativa
  unsure (1)..(376): unsure at all n locations
nttcaaatcctatgaaattcttatggaatggcacattacatgtggattttggagggaaattagcaagagctccaacctcttggaaaatntcctttgagtctatctctctcatccgattcctgcgtttntcctgcgctccaatcaaacgaccattcctgtgttnttcctgtgttttgcaatcctctggtttacactntaattcctgtcagaatcctgtgtttttcctattccaatgttntttctaccctgtgattcaaaggggcccttaacctatcaattacagaaacctgtagatgtatagaagcctcgaaaattcagaatatcaatggatgctagtgttacacaaaccaaatccagatcacatagaactaacgaa

SEQ ID NO: 3116 - DNA, 410 bp, Oryza sativa
  unsure (1)..(410): unsure at all n locations
agaggctgtaagttcctcanatgaagttgtggtttagaaagtacatcatctnttctggtgtctgtgtgctaagtggttattgtttgcagcaatctcgcagganaccagttcactggaaatttaccctactcgattntctcgatgtctaatcttaagtatttgtgagtatctttgcaaacatcaagttgattntgcttttaaatttgtataatttggtagagctaaatgttttctctctgtatgtgcagaaatctaaatcataaccaattgcaaggaaatataactgatgtattttccagcctctatagcttgacaacactgtgagtacttttgtgtgcgtggattgtagacgggtcttaacttgtgtattgaaaatccttctntggtgtcatatcctaatgctatatcac

SEQ ID NO: 3117 - DNA, 384 bp, Oryza sativa
  unsure (1)..(384): unsure at all n locations
gcttacctttttctgtgctcggtttgtcactggcctaaccggagggattactttgcgcgcggtaacttcaattgctttgtttgcatgcaattctgtgatccgatcagaccaacattgtagatgtaaggactgaacaaatgaaaatctaagcgttggggggttagtgatgtacaactcagataaaattctctagtgtttgcataagtgaattgctgtttgtgtgtttaagtgcagataattatgtctgtacagccagaaccagacttacctcangtcttccactgtggcaattcgagttntaccttttccttcataaaccatatctgaaattggctgtttgctgtgtatcctgctttggcaacgagcttgtgccaaatgcttggt

SEQ ID NO: 3118 - DNA, 488 bp, Oryza sativa
  unsure (1)..(488): unsure at all n locations
tactaagctctcttattaaaaaacatatttattcttgagaggaagtactccctccgtcccattctgtaccaggatggttntatatgggacggagggagtatatgatagtaagtgtttagctatcaagtactactatgcacagatttctagagctgcatataatgaagtaatctgaactgtacagatggagcatggattacaaagaagcatgctcgcaaagaaacagctctgataattaccaccatgagacacgccatggacttgtgtcgcgcgaccaggatgagcagcaacgacaatatccatgccagcttggtaccagccgtgcagctgtagctgaccaccatctaatccttctgttntagcagtggacgggaccttcagccattntacacattaatgaagagtggtctacagtatgcctgtatctgctagatgactttatagctagcactgcacagcagagacatgtctagttatatgtatattga

SEQ ID NO: 3119 - DNA, 530 bp, Oryza sativa
  unsure (1)..(530): unsure at all n locations
ctctttgatcagtaagtatccatatttcatagaatctcttgcagtaattctatattaagaatctgctaaacntattgctctctctctatatatatgtgtcaagtgctcgtgatgacatctcatatgcatacctggtgagttacagaaaccttcggaagaaacttccactgactaattggctctgatattatctggaaacaaaatattgcttacttctagctgcatgtaggtaagatctttgactgaggacatccgagatgtcagaatccataaggttgagactggtctggagacaatatctggccgtactcatgctgtataggtatattctctccacactatagctactttatctgccgctcgtcctggctgctcagattgtgatgaagctattccatgtgttatacctttcttctatctactggcttgagcaattatttatttaatccatatctttttgaagtgtatgtaaactatataacttaacctttctcataagcatcactaacacactaacataagactcgcta

SEQ ID NO: 3120 - DNA, 406 bp, Oryza sativa
caccacttcaccttggcaaacatagatattttattcttaaatcaatgggagaaaccagtatcagatcaatattatataatctcctctccttatctatcactagtcgctgccatgtgggccaaggctgcaatgtgggatcccattgtcagcctcacattcgggcccacggttcataacccgcgcgccacgcgtgtgaactcctcctctcctcctccaccggcgaccgcatataagccgatcggccgaccaaccttctctctctcgccctatgctcgtttcgcggaagaaccgaggaacctcgcctcggattcgaccggaacggaggtgccatctccggcgccggcgagagaagtcctcgacgctgtcgcaatccaatgagccccattttcattcaatatgcgttctg

SEQ ID NO: 3121 - DNA, 449 bp, Oryza sativa
  unsure (1)..(449): unsure at all n locations
cttggtgctgngcgattggngaatggctccaacaaataatggtagtgcttctgtattagattgttacatggacagaattattggagcctaccattttgctcccttacaatattaattaagctgtataagtagtttactacaccacgagatcgaggtccacgttccaaataatgcacgtctgtatcagcttaaccgtggccacaaaaccagaaaatatgattttatcctacgtacaacacctactacagctatatgtgttggtacgcctcggcctcagcagtcagcccagccatgcgctatatatatatgtatctcctggtgaatcctggtctctcactctctctgctccgggccaaagcacattggacacacaggtcgagtgacagactgacgcagatagctagctagagagagatcgagatggaagaagagccaagcatgagttcacc

SEQ ID NO: 3122 - DNA, 430 bp, Oryza sativa
  unsure (1)..(430): unsure at all n locations
gcggcatgcagctntcgctcgctggcgcgcaggaggatctggttttgttcgcgtcccgtagcgagcagctgactggtgccgctttggctggcactccaccgtctttgngttgagggtcaaccagagggatgaacagatcaaaagaaagtcgtttctttaactccgatgctgaaccagctgctgcgcgcagcagctatttttggtgcgggtaaacgcatatgtgctgtgtggccgaagctttcagcacaaccgtgtatgtgtaactctccgtattagtagagtcagaacagaacgacgttttgtgatcatttacacaccgtttggttatttaccaacttatcttgaattatgattctcgatcaggtcgatcaaattgctcggtatttctcatctcttgatgatcatatactaatatgttgatgccattcca

SEQ ID NO: 3123 - DNA, 352 bp, Oryza sativa
cttcctttctgtcctagagatgaagatggtcggtgtaacttcttatgtgtatacatacacaatattgattgacagcttatgtaaagctggactcattgaacaagcccagtggttgtttgaggagatgaggagtgtgggctgctccccaactgtggtgacatatactgcacttattcatgcttacctcaaagctaagcaggtacctcaggctaatgatatttttcaccgaatggttgatgctggctgtctgtcaaatgatgttacttatggtgcattggtagatggtctctgtaaaacacgcaacatcagtaaagcttttgaagtctatgccgatataattggaacttctgat

SEQ ID NO: 3124 - DNA, 450 bp, Oryza sativa
  unsure (1)..(450): unsure at all n locations
agctntagctctcttatgtgaggatgtgttgtattatcttgaagacatccatcatcggctggaggcatcatctctagaaaggttggtggcagactgcggatcaatcatgacttggctacatgaagttcaagctttggtcccagaagaactagccgacgtactcactccaactgcttattatgaacaacatcaattcaaggtggagaatgccaagctgagattatccgaacgtcgggagcgctaagacatcgaagcctcaatccaggccaattggcaacttgctcataaagagaagatcaagcttgatcagctatctgagggcccgatcatagccaatattgatcagctcgaagctcgcaagattgaactcttggcacaacttcaagaatgaacgccgagctggatttggaacacaatagctatccgatcttcacaagttgcgaagaacaa

SEQ ID NO: 3125 - DNA, 401 bp, Oryza sativa
  unsure (1)..(401): unsure at all n locations
taagatagaccttatccccacagagaagtggccgtcagaccttctnttgtcagcctgactcttcatgcgctattgtgctcgggtgagttgctggtgcaaaatctcattcatttgtgccctctcttgcagccagacctgcacatcaggaattgtactacttcccacatccaccactccaaaatgagttggtttcctggcaaanaggacttcatatggcgattntccaagaacaatatggaaggaggtgttgtaccaatgctgtgcttgagacaaccaactataccatttgtgtggagaggaatggacagtacatctaagaaatgcttccaagcattgattgagcctctcagtttgtccatctgtctgaaggtgtatgaagaactcatgttaagcttgacatc

SEQ ID NO: 3126 - DNA, 453 bp, Oryza sativa
  unsure (1)..(453): unsure at all n locations
tgcacatatatttcacgccanaattggaagtttggttgaaattggtatgatgtgacgaanaagntgaaagtatgtgtgtgtaagaaaagtttgatgtgatggaaaagttggaagatcgaagaaaaattttggaactaaactcggccttatatagactttacgcctttacttgccaggaaaatgctctctgttgtacctgngcacattntataggtgtatgctataaaattgtgcacatcttatgagtgtgttaagttcacgctcaaaatggaaatttggttgaaattgaaacgacgtgatgaanaagttaaaagtttatgtatgtagaanaagtttatgtgacgacaaagttaaaatattgaagaaaaagtttggaaataaactcgcgctaggtatctacatatgtgaaagcaacaagctttctcnaaaagccaggtcatgtgaataataata

SEQ ID NO: 3127 - DNA, 473 bp, Oryza sativa
  unsure (1)..(473): unsure at all n locations
ttagcttatatganatacaagcagtcttattggcacaatcttgtactttttatgggctaaatttggaggtgacaatacaatgtatttntcatgccatggctactgaatcttcttagaagaaactttattccttctttactaggttcaaatgtaactgtcatctctgcacatgaggagaaagcttctttaatctggaatgcttttaagattaaagcttctttaatctggaatactttcagaacatgcctttcaatctccctgatctctttgaaccacaggatangttagaattactaacagagtcttttctatccaatgaaatttataatctcgtgaaagggcggcctattgatagagcccctagcccagatggtgttaatgtgctcttcattataagatgttggcctattatcagacaaaattacaatagcctgtgttcagaatctattctgggctctcaattagactctctg

SEQ ID NO: 3128 - DNA, 444 bp, Oryza sativa
  unsure (1)..(444): unsure at all n locations
agcttgaacctctgctcgtgccgagtgattgtttatatgagacaacgacttggttgtcgatcacgatttgctactatgctgcttatctcacagatacaggtgcacagtatatgtgctctctcttaaattaaataatttttggcgcggtggcttacccttaccccagagtaccacgagacactgcttctccttgccttgagcgggtgaaagacagaacagcgatgaaagcaccaatcacccgatctttattcaactcctgttccggaagttatcacatgattttgataaacaaaaccaagttcctcaagtgattcactcagtctctctaagtgtatcaaaatgaattcctcaccacaatgtgccttgatgattcctactctgaacgtttgatatgcggcgctcggtanggatcaatcatggcatacttgcatttacacttattac

SEQ ID NO: 3129 - DNA, 310 bp, Oryza sativa
  unsure (1)..(310): unsure at all n locations
ctatcctagtgattnntgatgtgaataaatgaaccaacttttcctttcaactgaaccgctatatattagtgatgtgggtaaggatgagaatttcacaaatttgagaagtttagcagatctatctatgatgcttgtcaaaacaaacaaggtttctcgctagaccttgtttacagacttctcaaattggtgttagttctccctgttgcaactgctggtgttgagagggttttctcttcaatgaactatatcaaaaacaagttaagaagcaagatgggacaagaaatattgaatgattgcttggntacattca

SEQ ID NO: 3130 - DNA, 354 bp, Oryza sativa
ggagaagcaacttagaaagatattcccagtcacactcgttctatctaagagtctatcgtctccccaggcaaggtcacccgaagggaacacttctctacggataccgattctccagacgcctatgcaagatgcaggctaaaaacgagaacaaaccgaagaggtttctcctatagggtgctcagcataaacacatcgtctagaacaaacgtgtaggaatacttaaggaagattacttcatattaaacagataaacttacatacggttttcccttcgggaaacccgaaagtaggtacaagcaagctgttcttaccttacacagcgttattacacaactcattgcttcaatatactat

SEQ ID NO: 3131 - DNA, 458 bp, Oryza sativa
  unsure (1)..(458): unsure at all n locations
agctntatgttcggcgcagtactaatactgtaacttatgagcaagaattgctctatcaatcaccatctactttagacatatcttctgaaacttttttcaaatccaaaagtccagtatcttcctacaaattagtgaattaggaggagctctttgtgccgaaaaagaaagagcagggcaatatttcaaacttgcattcgaactgcgaaatatttatacaaaggaggagagatcaagataatgcagcagggttggttatctaattggctagtcaaacatgaggtggttcatagatctttgggcttcgatcatcgaggaatagagactttgcaaataaaagcagaggattgggattccattgctgtcattntatatgtatatggttacaattatttacgttcccaatgtgcttatgacagtgcacccggtggatctttagctagcgtgtatcatcttacgag

SEQ ID NO: 3132 - DNA, 509 bp, Oryza sativa
  unsure (1)..(509): unsure at all n locations
tgacttgctgcatcaaanactaaatcacaagcttctgataaataacgggtggttctagcgagatttgtaatatgagtacctttacgctctgccgagatgtaaggggccattntaggattccatttcttaataccatgaccaaaatgaactcccgcttctatcatctctttcaaattgatgttccaatatcttcttgtcattntttccacacnttcctttgattttttctttnttttcatcctacctttccattacgaaatttctttcttttcgaagattaagaaagagccgaaatagcttgaaataaataataattgttccgatggaaccttctacatggtataagcataaccttaattgaataactaaacttctttntaaattaaaataaaaatagaaaatctaacctcttagcgttctaaggtcaaaaatctaagttaaagtaaaaaatctgctntatgtatccttaaatcatatanatggngtaaatggtgaatctgatgtctcat

SEQ ID NO: 3133 - DNA, 451 bp, Oryza sativa
  unsure (1)..(451): unsure at all n locations
agcttcttaactgttggtaccagaaaaatattctctggtttagtagcatcagctgcaatgagggctcgctgtcattatgttaataaaaagtggctcagtggtatgttaacgaatcggtcgattactaaaactagactttctcaatttacagacttaatagcacaagaaaagatggaaaaattccaccatctcccaaaaagagatgtggcaatcttgaagagaaaattatctaccttgcaaagatatctcggcgggatcaaatatatgacgaggttgcctgacattgtgatcgtcctcgatcagcaaaaagagtatatagctcttcgggaatgtgccattctggggattcctactatttctttagccgatacanattgtgacccagatctcgcgaatatatcgattccagccaacgatgacactatgacttcaattcgaatgagtcttaaca

SEQ ID NO: 3134 - DNA, 159 bp, Oryza sativa
tcaaatcaaatttgattctgggcatagggatatacccctataaactttatgacgtcatgccctataaaaatctctccaatcaacgtgaacttgcttggttggatgtctagtgcgccttagctagtgcaactcttcaacagcaagatcttcccgatatct

SEQ ID NO: 3135 - DNA, 426 bp, Oryza sativa
  unsure (1)..(426): unsure at all n locations
tggagggctcccgacgtggctgatcctcacgggctggtgatccggttttgttttgtttgtgtgtaaagcgtacccncctctgcagaggttaacaaactggtcgaacagccgtgcccacggtcatgggcggatgtgaggtgattcctancgtagttttgtttgactactgcttgtgaaattgctgttgtgaaaaggagttcgatgtttgaaaaatctgcagctgatggggtcagctaggcccgggtggccgtttgaaaagttgttggcccgggtggccgtttgaaaagttgttggcccgggtggccgtatgataagctgttggccggatgccaaccctggttcaagatctaaagattgatacattgcacatactccgaccggacgagacgcactgtctcatccgtgtcgtttgagaagcactcactt

SEQ ID NO: 3136 - DNA, 479 bp, Oryza sativa
  unsure (1)..(479): unsure at all n locations
atgtcccttctaattgngaaatttgctcctttgccacaaagatgttatgccttctcactnttgccttggaactagtacccagtatccaccaccagctgctggttgtagacaacatctaagaaaatctttcctagatcatgctaaattaacatatataaggaatgaatgaccctttcattcagtgctatctgataatattttctgttgttaatcaatcggntcagttatgatcttttgtgctgatttgtccctccttgttatgcagatgttctacaagcaggccaagaaaaccaactcttgttgtacaatcctgtaatagaaactctggtatagagttctgcagtagcacactatgttggcattntctttgctgcaagtctgcgattaatgtcatagcatcctggtgtccgaggtgtaaacaaagttagcgggtaacatatgccacagggctaccctacgtaattntttggaagtaacac

SEQ ID NO: 3137 - DNA, 443 bp, Oryza sativa
agcttaaacatactacaagcggctgactattatctactccctcgtatcacgttataagaggtattaaaagtcaaactatgttaagttggactaagtttatatacaaatctcttaatatttataatactaaatcactgtcatcaaactaataattgaatatggtttcataataaatctatcttgggttaaaaatattactacttttttctataaatttggtcaaacttaaagcattttgactttcaccaaagtcaaaacgtcttataacctgaaacggagggagcatttgttgagaatctggcaattaggtgtttcaattcttgcttctaattatatcttgaatatataacaaacatttcagaatcgtgtgggaatctaaaagtttgacaaatgaaaatctgaagctgtaggactacaagctctctaaatagagcctataacaa

SEQ ID NO: 3138 - DNA, 493 bp, Oryza sativa
gcttcaaccttcaagccacgacgtactatgctctgtacatgtgggaagcgtttatctctccagtccttccacctttatgtttgtacaaaccagagaagcttgcgtttgctaagaaccgtgtaaaccatattcaacctgctgaactcatagatttctaccctccttaaccccatttcttgaaggatacgatagtactgtgcattccgatcatggtattcacttgagcggagagcatgagtcactccttccaatgcgtcgacaaatggacaagcaaagtcataagttggatagaccttgtattttgagccaatacgatgatggtgatcagtggtgcaacggtagtatacaggatctcgaagtgatttgttagggtcctgctgtcaagttaccctgacacaacactgcataccgctttcagttcattgatcatctctctcacaatgacaaatatcctgacagtatatttctacattagatacacaccatcattctc

SEQ ID NO: 3139 - DNA, 328 bp, Oryza sativa
agcttgaatattctgctacgagaccatttttttttatacggattctatgcatcatggtaggtcaaaccagtactcttttctgtaccatgattagaaaattgtgttgcatcccatgtctcctgaagatattttgcgtgatgattgtgctaacgctgccaaatctaaagtgagagtgattaaaaagcccaatctgatggcaagaaacctgagacaatcaatttgaaacccagatgcttacttgctactaaatctgatattaatgagttgattgcatcaccttcagttgcctatgctttggtatgccaagatgctttgatctcacttcacg

SEQ ID NO: 3140 - DNA, 511 bp, Oryza sativa
  unsure (1)..(511): unsure at all n locations
gcttgtgccttgtctcatcaactgtacactgctagctggtccatggtcnatgtctactctagatgatatgcttgtagcaatgccttattattatnnttttaataatgaatgactacatagtttttctatataatgaatgcatgattaattaagatgtaccactccatccacaaatataacttgtccatgttttataaccaaaattgttggtntactgatatatctaatggtataagcaaaattctattttataatttaatgggttgtatctnttatactaccacttcgatcaactagtatcaaaatagtatttttttcaccgatagtacaacccannaatcaatggtgagatttcacacttttaccggtgataatacaagcaatacttattagagatcacttgtaatgtattcgatcaaaagggcacaatcataatatagaaatcttattttatagatggggtagatataagtaagttaaccttgaattgttctgaatgtattgcattcaa

SEQ ID NO: 3141 - DNA, 347 bp, Oryza sativa
ttcctttgcacatatcaaagttggctcacttcgctgacaaaagtcaaaactggaaaaacacattaaatagccctttctagttttgtgcctcttcaaatgtgtcctgtaattttgatatctggccaaaatgctatgttgctgctatgagcacattactatcatggttgaaaaccaatgtcgaagtgcatgctccttaacttcgttgtgctatgctagaaacaaaactcagcccttggatcagacttgattttggctaagctatgatatcctatcatatattactcaactactatatttctggcaatgtcagaacctgcctgattgaccacttaggcactttctatttt

SEQ ID NO: 3142 - DNA, 452 bp, Oryza sativa
ctgccgcttccccatggtcgccgaacctcgaagtttcctctgtgggtattgcagcgccaagccgaaggccgtccaccccttctccgccggtattcgccgtaaagttgccgccaccgtcatcccgatctcgtcgcccttcggagctcatcaccggccgctgttttcatcgcccgtcgccatgtaagtgccggtaaggaccgtgctgatcttctcttcgcgttggtgtcctcagtgtccgccgtcgtgccgccgtttgccatcgtcgtaaccatccagtgctcgccggcaccgtgtcgacgtggctgtccttgtggcgtccacgtcagcgccacgtgttgtcatgtggccactatcctaaaccctagatcggatttgatctctgatcatggtcaactctagtcaatctaatcctagtcatccatcttatggacctctctgtgaactgagtctat

SEQ ID NO: 3143 - DNA, 439 bp, Oryza sativa
gcttcttgagcagagcagcatagtaatgtttatactgaacaagatggataacatttagcatcccccataccgtatgggttgttcctgtcccacgcggcccttgcactaatgtgaaaggccagggctcttgtttcttcacagctccgttgcttgtgccagcagctgtatgcattgcagcccaatgaatcgctgatagctgaggcccgttgaaagtacgatgcagatgatcagcaaaatttggagtgaaacaatcaggcatagcaggtggctgctcttcatacttggggaagtgctctggacttggctgaagaatagcattgtgcatctgatggaaagatttttgttaaaacaactggaaaagaatttaacaaagaaagcacaatatataaaatgcattacctgaacattgagtctgcggaatgcatgcaaagacacatat

SEQ ID NO: 3144 - DNA, 289 bp, Oryza sativa
tcttattatgtatggataaaaagagacttgtgtctcaatctgacctaagagatgacaactcattggtagtgcaccgacttcctaggatggtttgtcgctcttggctcctatacccatttcacttggttaactagcttcccaagccttcttttgttcatcactcggactgccagagtctcactgccctataacatggcaaactgcttccactcgggaagcctaatctatgatccctcaggcatctcgaatcatacagatccatttctaaccactcaggtcagccatgaca

SEQ ID NO: 3145 - DNA, 447 bp, Oryza sativa
  unsure (1)..(447): unsure at all n locations
agctntgaaagccaaaacattaccttggttcttaattttgcgatggtttgaacaggctgagaaggctgctgaagaaatgctcttgtggaagattagcataagctccactgctgtgctttcatgttgaagtccctgtctgatggtgttccaaatttctgaggacaattcttgcaaagactntggcttcgatagaagcggtcgtggctgctgctgctgcgcgcaagactcgagctgcccctgctttctgcaggagacccgcatggtgcactgcgtgccgacctccagggattgtgaactgcattatgttgggagtattctcattagatctataagtatgttttgctggatggtaaatcattttgcatcaaatagaagagcagatggaagtcctcttgtgtgaatgtctgagtattttgtgtgcgcacgtgtgtttgagagataaaaaca

SEQ ID NO: 3146 - DNA, 504 bp, Oryza sativa
  unsure (1)..(504): unsure at all n locations
gcttgtacgtcgagcacttgtaccaacaatccgtctgcttgtcaaccagtattatagggggtgtaaattttgtacatgtgaaatcggttgtacttttattcagcactaaataaaaagcatgtaagcggttgggcgcatatcctggttctgcagcactgaataaatgtcattctggttgttttcttaaggaacccgccgcactaatgaaattgtaaaattggtacatgttttttttttcttaaggcttgttcctacggtatgtgctcccttcttttccaatacataactntcgaagattccagctagttttatattgctcgttcatcactangatgaacgaaagtggaagggtaagaaagacacgagctgngagctgcagaccatggtggtcaatcaagagagggtagggttttagctccttgtattactagttagtaaaataactaacagataactaactcgatggatgagaagcttnttctttgacttacttgactgacatat

SEQ ID NO: 3147 - DNA, 382 bp, Oryza sativa
  unsure (1)..(382): unsure at all n locations
agcttactgacaaagccgatgtctttgctaatgttgtcgtccacttggcactgataactggaaagctgccggttcagacatcagagtcttacatggacagcacgttagttggatgggtcattttctaacaataagaagttctggaatcttgacataattcattccttgacatctaatacatgtccttcactccaataaatgtagttcatagaggaactttgatgtctagcctgatagaacatttctgaattagcttcttcatagcaaacccttgatttcacaagctatggaagaaggccactttgatatccttgtcgatncggatattggagatgattatgatgaatacaaaatgatgcgaatgattgaatgtgccgccgct

SEQ ID NO: 3148 - DNA, 184 bp, Oryza sativa
ctcacaagcccaccggaagcgaaataagcagggggcacaagggcaaacataacgaaagtttgcagaatacacataaacgcactagagcccaagccatgtcgaaagacgatcctagagctacacactatcattaaacaaagccgagaacacgtacgaacctgccttaacccaaggtctacgatga

SEQ ID NO: 3149 - DNA, 431 bp, Oryza sativa
agcttggagtgtgtgtgaatgagggagattatattgatatttatagtgtggaggtgacttgagagaatggagatgctaatgaatattctccatagaatccacatagcatattcatccttctcttgccaagtgtctcttttgatgacggtttccaccggtattaacggtcacaaccgtcatacgatgagaagtacaactatcatgccgaagtagggctggattgggccagctggtggttctgtccaactgtggccggctcccctggcccatatccttcttcaaaatgctaacatgtgggccccactctatggaacatcatgttttggctcaaaatgattgcacattatatatgctgtagctcaaaaccttgtgggtccatcagcacaaaatatattcgtattcttcatgctcattctttcccatacttggta

SEQ ID NO: 3150 - DNA, 400 bp, Oryza sativa
  unsure (1)..(400): unsure at all n locations
tattgtaagcagcgcaactttaggagggtctatgaagttcttgattctatgggttctcanggctgtcatccaaatgttatcacttacaccatgatcatgacatcgntagcaaagtgcgaaaggtttgaagaagccttgagtgtgtctcatagaatgaagtcatctggttgtaagcctgatacactattctacaactccttgatcaaccttcttggtaaatcaggccatttgttcgaggcttcccaagtatttcgagtggaaatgccaatgaatggtgtgtcccataatctggctacctataacaccatgatttcaatcttttgctactacggtcgagatgatgatgctctcaatgtgctgaaagaaatggaacacaatcttgtagcctgacttcatcata

SEQ ID NO: 3151 - DNA, 430 bp, Oryza sativa
  unsure (1)..(430): unsure at all n locations
agcttaatccgatagagcatatgatagattttaatgtttanactgataaagcatgatcgagtaacaatttacaccagccagttcaaccaaaaaaagtttaagccgatggagcgatgatcaatatacaatttacatatgtcgagaattttgtggtctactcatcatacgtaaaatcgcaatcagtttacacaaaagcttaaactaatgaagcgggattggataaacaatttatcagcctcatcttttcacttatgcttatacttattagccaaaatttaaatttccaactttaaatttgaagttgattatagggtttttttcattggagtttatttttcagtttttacttttagatcgctaagaacacgtatataaaacgtatattcaccaaataattctcttttgtaatataccatgtgacttattcaca

SEQ ID NO: 3152 - DNA, 418 bp, Oryza sativa
  unsure (1)..(418): unsure at all n locations
atactcagcttgcaacaagaagaatcaagacccataccaagagaccatgccaatagctttattcatatgattctttcagaanaccaaagaaggcaattcatcananactatattcatcatcttgaaagataacattagtagtcataagaactgaagtcaaagaagcacctcanaagtgtactttgggcaagaggaaaaagaacaacattgatcacactacacanacattacatgagtcctggccatctcccatctagatcaggcttcttgacaaagatcgagttgtactctggtcgtgacatctgcaggtaaattcattcattcaatagttaaagaagacataactccagcccacaaaagacctataagactatgatccanagtacacttgatgtcaagggttaacanaatggacatg

SEQ ID NO: 3153 - DNA, 436 bp, Oryza sativa
  unsure (1)..(436): unsure at all n locations
gtatgttattgtgcggcgaccattgtttatgatagagaagttgtttttgatggtaggactaatacatataaatttatgttcgatggtaaaagagttgttttgcattctatgactccagccactgctttgaaagatgatcttgctagacttcaatgtgaaaagaaagcgaaaagtgaaaatcaaattattgctaaacatcctgctccaactagtaaaatagaaccatgtaccacaaagaatgaaattaagttgaagggtgctttgttggcttctaaatataatatttgtgcactagatgagccagattcttgttgctatgctctantttgccaagattctatactcatattggctactgctcctagtactttatattncttgccacccgctattactaaccttntgcaggaatatgaggatgtgtttcacgatgaga

SEQ ID NO: 3154 - DNA, 433 bp, Oryza sativa
  unsure (1)..(433): unsure at all n locations
cggagaatggaagactngagaggaataatgtaatgttgatatattgttttgtctttattgaacttatcatgcatacattgcatagtgttcaggcttaacagaaatgcactatggttgggcggattgactatagggtatcactgcgtcgagatcctatatgcagctcactgtagaacacatatcagttaagtttactacgactgtacatgcagtactgcagagaatctgtatccgggtatcactattatatgctctattttcctcgagagggtgagatgtgctaattgaagtggctctataaaaggggtggatgtctgttgagtaagacgcggcgactataggaggggagtggaacgaaaggcaacggtaatgaatgcaaagtatttacgtattatcttggagaacggatctanacgatagatatgagatatac

SEQ ID NO: 3155 - DNA, 463 bp, Oryza sativa
  unsure (1)..(463): unsure at all n locations
cacacaacgctaccaacgcaagcactacatatcattcctctcactttgtcgntctcgnggaggaggcttgacttactctgtcccgtcccacgacgacagggcggctacaaattcctgttcatggctatcgaccaattcaccaaatggattgaggcaacacccacagggcaaatcaaggccgacaacgccatcaagttcattaaggggatattntgccgatatggattggctcaccgcatcatacggataactgctcccaattcatcagcgctgactncaaagactactgcatcggactgggagtcgagatatgcttcgttccgtttctcaccctatagaacgggcagcttgagagagcaactgtatagactacaacgtataagagtcgtgttacgaccgctatgcacatacaagaatggtcgaaagctctcttgtctatgcccggccacacaccacacgtcac

SEQ ID NO: 3156 - DNA, 73 bp, Oryza sativa
  unsure (1)..(73): unsure at all n locations
ctaagctatcctacaataacccctanaaacttaataaatgatccttntcacgtcgccaatatcgttgggcgtc

SEQ ID NO: 3157 - DNA, 440 bp, Oryza sativa
agcttgacaagtcagaaactgtgggaggttgtttctattgtctggtggctagcattatgtctctctcttttttcaattatgtgctaaaactattttttctgccagttacttattcattttaattcttattgtaataggtgaattatttggattctctgaattatggtatgcgattagtactgaaacatgttccatgaataaaagtatggaaagggtcaatgatcaaaaaaatttcaaagtttgataaaatcagcaaaggtgtctatggcaaaagaccagttaaagatctttctgagtgctgttacaaaatggctaacttataaatctatttcttattttttaaaaaatataaatgtctcatgtttaaattatatgttatctctctctcttttacattggaagtgatgattgtaaagaaaatgcttctgttaaacctattg

SEQ ID NO: 3158 - DNA, 321 bp, Oryza sativa
  unsure (1)..(321): unsure at all n locations
atgctggtggactatgaaaagtntgatctcattaaactgctactacgcaaccgactcaagattgtntggtgtacccgtttagcaagggctgaagatcaggaacagcggaagaagattgaggaagatatgatgggtaacccaactttaactccgatattggagcagctacatgcaacgagggcatctgctaaggagaggcagaagaatctatagaaaagtatcatggatgaggccaagaggcttactataagcgaaaacactggcattgatggtgcgagggatcgtatggcagttgaccgggatatggagagtggatggttg

SEQ ID NO: 3159 - DNA, 397 bp, Oryza sativa
agcttctcgggttcttggtctctgcccgtttcatcgaggccaaccccgagaagatacgagctatatagcggatgcgcccccccagcaagcttagggatgtgcaatgcgtcaccggttgcatggccgccctaagtcggttcatatcgaggctgggagagaaggcgctacccttatttaagctcctcaaacgctccgggccgtttacttggacggaggaggctgaacgtgccctcactcaggtgaaggcgtatctcagctctcccccagttctggtcgccccggagccaaatgaacccttgctactctacttagcggcgaccccgcaagtggttagtgcggcgttggtcgtggagcgcgatgaggacaatcctcattccgcgcacccccaccttgtgca

SEQ ID NO: 3160 - DNA, 396 bp, Oryza sativa
  unsure (1)..(396): unsure at all n locations
aactcaagctggcaatctccatgctgacgtattacacagcggatcgatgttctctctttgcatactcagnagnnagccgcgtgggtggcctagtcaataccatggtttccatctaacagtctcaccaccttgtagtacatgatgcactccttgacaatctcagggctcatgccaggttttgggacaccagtggacctagcaacctcctcagcctcttcatgcagcaggggttgaacattaaaaggattagcagacatagcgacatcgctcaatccggcaatcttctgcaaatcggacccgatccaaggcccaaacctgacctgtgatgtccacagtacccttttgctcgagagtcccattattgcaggaacaccgcactcctgcacatctatgtag

SEQ ID NO: 3161 - DNA, 438 bp, Oryza sativa
  unsure (1)..(438): unsure at all n locations
agcttactacccagtattaaactagtaattattgtgggaagaggtagtagttactacctggtgtttgcgctattgccggcaacaaccaaataaaatatgaagattcttactggaccaaagtaaaggagggttgggatggatgaatattttntaagtggaccctaccttgtttaccactatactccatataagctttgtaagaagtgtacatcttactgcctcctgatcatgggacccaccttactatctactctttttgtcccaaaaaaaagtcaatcttagtatggatgggacacttcctaggacaacatgtccaaattcgntattctatgatttatctatgctaagggttggtttttacgacggaggaagtacttgagtaatatacattgagcatgccctaagacttagcgaatataataaagatgttgagtaaat

SEQ ID NO: 3162 - DNA, 455 bp, Oryza sativa
  unsure (1)..(455): unsure at all n locations
actcagcttnatacacgaccctctcctcctttccagactccaatccgtttactactgggccggcctggcgcggtggtcaccatcgtccggtgcttcgacttgccgctgggggtagtaggagtagctaggtttgtttgactgttcgtatgtccgtcccctgcaacagatgtctgttgcgtcgctaggttggggtcgcaattaaactctctcggnggacgggactttgttcccgntattaattctatcgtctttgcttttatcgtgtcgtctatctaatctaatctacgtagcccgaaaccccccaacattgccagcgcccagtgggccacatcacgtgtgtgggttgcgtgggttgggctggcaaatactacaccgtgggctttcacctttgcagagcactactggtctatgggttctgttccgttctgttctggcgctcctctctacgggtgatc

SEQ ID NO: 3163 - DNA, 369 bp, Oryza sativa
atccttaatcacctgagcatgcacttcagtcttaaagcagaaaagaatttctttgtgctattacttgtagagtaattaagtaataacaccactagttccagttcaagcacatctctaaacaagagaaaattaatcacgcatacaccatgtcctgctcaaatgctgtagtccgaccattgctggatgaaggaggtgtggtccatggattcacccggcatgtagtcgcccttcttcccgccgagcagtctcggcagattccccaccgtcgaggtcctcggcggcacgtcgatgagcaccagcgacccggccccgatcttggccccggcgcctatcctgacattgccgatgatcgtcgcgcctgcgccaatg

SEQ ID NO: 3164 - DNA, 498 bp, Oryza sativa
tataaaactaagcttggcatcctgtgagagttgagcagtccttggtcagacttctcaactttcccaagtaacatgtaacggatggtcttactaaattcaccaatgtacccaaggccaacatctgatagagccccaggtcttacataaaatgcgaacctccggagcttggtgcagcctctcagtaaagcacgcaccccattgtcaaggggtgattctgttatatttgcttctctatcaagcaggacaagccggaaatcgttaagactgctgctgtatgtaccgatggcttctagagcagcatttgtaatgtcagtgacatgcactgcccagtattctaaatgagggcagccttgagctacagccatcaaccccacctgtgtaaccataccatgttcatcctcaagaacctcttgatcatcatcttctctctctactcgaaatctctgtaatttcttgcagggttgtgcaacaacttctaacccacgatcccctatgaca

SEQ ID NO: 3165 - DNA, 451 bp, Oryza sativa
  unsure (1)..(451): unsure at all n locations
atcctcagagacacctgcggcagcaagcttggaaactgaattctgagttccatttattcataatattctccacaattctctcgagatctttcatggcatcacatatcctttcttttctgtatcagggaagcatgtgcacactctttctcatgcggcttctgggtatcataaaattcttgaggaaaaccgtaagctatacaaccaaatacaagatcttagaggtacccttttttgttccttatgatataagtaatggaggattgtacaatgtacatgcatctttcatggtgcaacacaacatgctaatacatcttgtntcttctttgccagggaatattagagtatattgtcgagtaccacctttcttacctggaaaggtaagttcctcaagcagtgtcgctggacttgaagatagaactatcactgtcatgactccatccaaacatggaaa

SEQ ID NO: 3166 - DNA, 284 bp, Oryza sativa
  unsure (1)..(284): unsure at all n locations
tctcttactgaagaggggaaagantgagcatgaatgagctcatctccatttctctttttgccacaccggggatgcacaattaatgcnaaggagtacacggcgataataatatacaggttaagtcttgcagtaaacagcatttaaaagccacttatttgcccacagccattcttgtaagacgatcctagagctacacagtattattaatcaagggcgtgaaccctcacgaacctgccttaatccaaggcctacgaagattccgaccgaactggcaacccgaccct

SEQ ID NO: 3167 - DNA, 368 bp, Oryza sativa
  unsure (1)..(368): unsure at all n locations
tatgtgctacagtatcagaaaccagcanagtatctatctcagttctttctaagcggngtgagattatactgngtcagttnttatctgatgaaaatgatctacgtaaatggataatgatatacatttgaacttccttatatataatatgtaaacctgcttcattttctggtttcctttcaacatggtaatngatatttcaaatatgctgcangagaaagaccattgcctagtgtaaggattgatgagacaatctgtgttctacaagaactcgctagactaataataaacatggaaacagctaatgccctcagcatgccattatatctataagaaagcttagagaagaatgagtcccatggacgggctca

SEQ ID NO: 3168 - DNA, 399 bp, Oryza sativa
agcttctatcattatgccatactgaatttgttgtggttcgacgtggaatgagattattttgagcctccgcaacgaccgtcattcgcactttctttagcacagccaggactgtgctaacccactccatggatgggaccagatactgattctcgaccgcaggaggattagaacctgttgttttacaacttctcgcatcgtattattgacctcttttccgcggatccctgtaaggagtactctcacgctcattggggatacgatgactgcaaagagcaacattaattccttcgagatcctggacagagtgcccatcaccacattgatgctgatctacgcgacgtcgaagacgatgacgctcatctccatattgctgtgacttatgacgacaggatctttctt

SEQ ID NO: 3169 - DNA, 312 bp, Oryza sativa
ctttcctaaccttgagcataaatgcaatcatacatgtgtgcatgcatctatactaatataaaaaggaggagttgtctccttgcaatcctacaggtgaaatcaacttacttaatcccatcgtccatccgccatctcatctgatctcatccattgatcctcctcgttgtaggaaatcaccaccaatcccaccgattcctctccaccgctctttccgcccgcgcgatgagtcctccgcgtgaatcctgccacctcctcgctccgctcgaatccccgctgctgccgcagtgcaccactggaccagcgccaatcccc

SEQ ID NO: 3170 - DNA, 451 bp, Oryza sativa
  unsure (1)..(451): unsure at all n locations
agcttctntatagntggtctgctatgtgatctttctaaaatgctatcaactctaggttgtacgcattatatattgccaagcagtcggtatatcacttggatcatattattcggggattcacaccgcatatgctatatgttgatgtcaagtcacttggttgattacaattatcaaaaccactcggttggttagattatttattccttgactatatgtttggttggttcaattaaccacatagttgggggctacacctattaggtgcatctattcgatgcacctgactntatttttcagccctccacagtcttcaaatttggtaaaagtacccgggagaccatggcgaagatgattgaagcactcggctttggagtaatctagctcgagagacgaatatattttcgactgtgaaggtctcaggggctactgtggagattatgggtaccccata

SEQ ID NO: 3171 - DNA, 516 bp, Oryza sativa
  unsure (1)..(516): unsure at all n locations
tcttacctgaatacccaatgatggtctggtcacaataaaattgacttatcggacctttttctttgtacaaagctatttccaatttgccatatttggtttctatctacaaagtagttagctggatcttaatggagtccaggctccaatgctgatgatgttcctggccataataacattgacttacctgacaatatatgagagttgcacacagctattgccatacacaaagaatcacattctgctcacgttgataatatgaggaagcatatcttggatggaattcatctttccccatcatgtcaattatgatgggatatttctgtatntgtaactcttgtgatgagaatattttggtgagtgctgactgtgtaatatatgtttctcatagatggctttngaactatacggtatgttggctggaaatgtgagtccaacgacaggtganaatgttnaaccggcttactgtggtgatgaagaagccttnttgatgaaagtgtgactccatatacaaagtca

SEQ ID NO: 3172 - DNA, 403 bp, Oryza sativa
  unsure (1)..(403): unsure at all n locations
atcttaagtcaccgcngctgcacttaacttgccgtgaaatattttgggggttatggctcggtggaaaaattcaaaaaaaataaaaaaagttgaactcctttcattggaaaatttgtggcggtctactttgatgatatcttgaattacagcaagtctatgggtgaacattctaatcatttacgtgctgtttttaatgctcttcgtgatgcacgtttatttggtaaccttgagaagtgcaccttttgcacagatcgagtttcttttcttggctatgttgtaactccgcaggggattgatgttgatcaagccaacgttgaggcaattcagagttggccgactcctataacggtctcacaagtgcggagctttctaagactcgcggngttctatcgccgctttgtgc

SEQ ID NO: 3173 - DNA, 488 bp, Oryza sativa
  unsure (1)..(488): unsure at all n locations
tactaagctgaggaagcttcccctccacctcaacatcatcgagggatgcttttctattttgttcaaggngaccatgacacggcacttctcttcatcacgatcatgaggaatctgggcatacaaaggggcagtctcgaatcctattggtaaggacatcatacgcagctcctggacaaatccctcaataccgaacaagtgctcangcttgaagcgtggcatctaaagacaagtgaaaggagggagttaagacatttatccaattaatagcacaaggttttggattaaattgaataacagtagaaaatcgaagtgaaaggttaataaagtaaactaagataagttggaacagctgaaaacaggatcacatatttatgcacttttgaatacaggcttaaataaaagcaatataanagagagtttataatcaacatgctaagttattatattgcacatgattaataaaataatgttgtaaactttgctgaatg

SEQ ID NO: 3174 - DNA, 435 bp, Oryza sativa
  unsure (1)..(435): unsure at all n locations
gctagctgccctgacacaccatcaaggatgccgggtacatgacccaaatttttattctgancgctttgctcaggggcacacaagatgtatactagattaaattctattcatcttgtctctatatatgcatagatttaagtagtatttcaacttctaagaaatgtcatcttgccatcattgtagactttatttcaagaaatactaacggaaaaagaaagatactattcaattggagattatgcacaaagacaatttctattaagtatatattgctaaaatatatcatggagtgtaagtttaccggtttattttatcgcttaacttataagatttcacacggggcctncaaatttcatgggacggccctgagttcattaaagagactgttaatattatgtaattctggtcaagtcaagatatatggaataatatcta

SEQ ID NO: 3175 - DNA, 443 bp, Oryza sativa
  unsure (1)..(443): unsure at all n locations
agcttcactccctctacagcattngaaactttcatcaattattttcggccaatgaaactccactttcctaagcaacctaattatcttacgggccgattgatgaattccacaaatcccttcatgtactactctcctagcaactttagattgatcattatctaagtaatacaccatctatttttcggtgatataatatttgagcgcttaccgccgaatcttccgatcaaccttaagtggaggatctttcaaatatctaatcaaaggaattctccaagctatttctaactcataggcacaaatgtccgaattcacaattaattcggccttttaatcaattataacgtgcccctcagcctcctgtctgggatcggtcagacccgccgtgcaatgccggtcagaccacaccttgtctatggttttgccacttcgttcaaacttttgaa

SEQ ID NO: 3176 - DNA, 398 bp, Oryza sativa
  unsure (1)..(398): unsure at all n locations
acctcgtgtcacatcctgatttntgnttcaggatctataaattattatataaatattattagaatttatattaaatgttcttaatttactagtgaagttaaatgtgggaaatcaaatttcctaaatataaagcatggctggatttaattcttattaaattctccatggttaattctactatctggaattttctcggatttttcagagctcaatttctatttntaatcatataaagaacatttcagtaattatccacatattaaattaattattaaatggtctgattataatcttgttcagtactttgagtgtctaagtattttcacgatttttcttgaaattatttgagcattgaaagtatttttaacaattcaaggatcatttcagtgattaattta

SEQ ID NO: 3177 - DNA, 344 bp, Oryza sativa
catgcaagctatactttatacgcagctcggtttcttgtatcaaccgcaccttagctcgtgttccacacatatatagataaatattaaccttaccactgttcaacagagagaagttcaccgcgccgatgctgtaggataccagttgcaaagcgtacgtacgaaatgttaggcaagtgctaggcgaggcaatagatagtgaacacgtacgattgtcctatgtcgcaattggaagacaggctcaaaattcgcagcgatgtgcatgtgcagggtaccgtgcgagtacaggcaccggagcctctctgtcaagtcgacgagagaagtcgctgacccaacgagcttaccat

SEQ ID NO: 3178 - DNA, 402 bp, Oryza sativa
  unsure (1)..(402): unsure at all n locations
atatcattataatttgttgtgccttctccggnggtattcttattatggtttaccagctattcataaagcagattcttccaagaagcatgccattatcaactatctcctaaggaattcagcaaatccattcatccacgataaagtgagtatgctctatgtttggatggcttgggtatcttttagttatgctaagatattctacctctggtaggcattgttatggtgggttgcagactcgtacttcttgatccctttcctcgtctatgcagnattntgtatagctttggtcaatgacaacagtgcaattctggtgatacaggatggtgcaaccctaatgcattatgcagnccaaacagcatgcagtcagaccatatagactctcttgctgtacaatgttgacat

SEQ ID NO: 3179 - DNA, 239 bp, Oryza sativa
  unsure (1)..(239): unsure at all n locations
agctngctatgagtgagccgactccacctttaatatgacagcatagagacttggcgacgtccatcgtctgatttccacaatcggctgattccaaccgagataactctaaccgggagacccgggcttaccaatattactgtaacagtgggctggagctgaagcggcgggctggagtccatgtcacgctgctcgccgattttctcttaccaccaccacccgtaccactcggcggttggcat

SEQ ID NO: 3180 - DNA, 447 bp, Oryza sativa
ctcagctatctaccaatgtgtcaagcacaagacagatccccaaatttctattttcttcattattcgtgcatatggatggcttccacaagcacgatgacattcatcaaatattagcaagctcactgcactcattgtcagaaaagcatgccgcagagcatccaacagtatcttgggcgtcataacaacgatctgaaacacaaaaggcatgcatcgctcaaatgtcagcgtaaacacgtatttccgatccaagttagcaatggcatgcgtaagcccaattcagtagctgtaattaagtccgataggtactaacatagcatggatctaagacattgaaccccacaagtacagaacttcagctactttgaacaaagtggcgtaggactgcaatatccctcagattcgaccagcatctctatctatgaaatgacaacacatgaaagaaaatta

SEQ ID NO: 3181 - DNA, 447 bp, Oryza sativa
  unsure (1)..(447): unsure at all n locations
agcttactgtntgacaccttataagatgtattgtacctactcctacaaagttgagtagctgcggtattaaaggattttcatgtattgggcacttgatcactcccactgtggcctaagcaataactgcctaaattcctaagagaacgtgacctgccacacctgagaatagggctgagacatatatgcctacgccaataaatatgccttcgacaccctttaaaggatgacgcatgtaacatactcccgaataataaatcttccgggtcatatagaccacgtgtagctcatatgaatagcttctgatatgaatgattatcccttatgggatactccaatataaatatgataattgaatcccgactggcgccagtattccgttgatagtccttacggtgaataataattggtccattcttcgagcatagaatatatactcatgactatgaa

SEQ ID NO: 3182 - DNA, 401 bp, Oryza sativa
  unsure (1)..(401): unsure at all n locations
cactctcaccttgcctattttctatttactggaatnatatnggaaacccgctcagcatatcggcatggtcagtatttcgccaaggcataaattggccaaccttactcaaagtatgtgttgagcaaatcacaaaatgcgaaagctgtcagcgacatggccgaagccaaactgcaccacagtatgacctacagccaatcgcgccaatctggccattcgcgacatggggcttaaatatcattggtccattctcagtggcgcgaaatcgnttgccgattcngngtgccgaaggagttcatcactgacactggcnnaggaagttgactctgaaaattcatagaaatgtgcgagggactaatatttgcaaatcaagttcgcctctgtcgcgcacccacagtcgaatg

SEQ ID NO: 3183 - DNA, 389 bp, Oryza sativa
  unsure (1)..(389): unsure at all n locations
ctgcagctgataccatattaaccagccatttttattttctgaagaaatcattcttacggggtttaaagttgccaatcaaaccacccactagttatatgacgatggctacatacgcacttatatattggcatttaattaattatatgcactaatatgcagtagtactgtaagtgtacagttaatgtttaatttggttgtatggagatcatctacctaccataataagtacgtatcatgaaaactagtatggaacaaaatagttagttagcctatccttcacaaaataaattgtgcgagaaaccatctgagttttgcacacaagctctgaaaaaaaatttngatattcgccagcattctttgatgagaataacatatcaacatagacatga

SEQ ID NO: 3184 - DNA, 485 bp, Oryza sativa
  unsure (1)..(485): unsure at all n locations
atttcttcaaaaagagggaggcatgccaaatttctattgttttatnttggtgattacatacaaatcggaggtgcctaaaaggtttgcaacttcatcctccaatgttntttttgtcatattacatttgcagctatgttttgcacacttttttgtctccaaaatttagttgtaagttgatgagggaagaaaattgtgtggggaagaaagaatatatagaaatttagttgatttgctaaagaaggttttataaaatagttgagaaggaaaactatagtgaaagctaatcttgaatactagaaaacaaactaaaatgaanattaaaagaagtaanacacattataattagtttaatactttagaaatagtaaataagaattatttggtgtaatattctatgatctttgtatgaataaagatatgtcattattgtatgactcttgaaacagtntgaaatatctttataatattgatgactgtcatattga

SEQ ID NO: 3185 - DNA, 410 bp, Oryza sativa
  unsure (1)..(410): unsure at all n locations
tatcacatcacctcaattggtttagcattnggatcattgatctattatttctcttctcttatatacacgagcttaatacttctagcatcggaggatctaagataaatgtaattatttgtaaagcacatgaagtcaatttgttaatttggctacaaagcaaattcagtttgtaccacacttttactttttatatcatacaaaatattgctagcaatctcaaactaaacaataacactttcagataagcatatctaatcaggcaagagataacaggaattaccttttcttagtgagtacttgctgtctaactggttgatcacagcaaggctgaactgtgcatatttactccatccatgaggctgttcatttgcgtcagcaatatctaagtacatcgaaagggactgtacact

SEQ ID NO: 3186 - DNA, 282 bp, Oryza sativa
cgcgcgcgctatctcggcgcactttagactgtctgacgcccatattggttctgttgggtctgggatattcagcgctcatgcgtcgtcagctgccatcctgccacgtatagaacttgggtccaaacttttctatgagagaatatacgcacgaatttatacgattaaaatgttatataaaattgtccatggagagcggtgattttaaggatttggagtattccatatcctacaaaaactactatgagtctcatcggttagcctaataactctaaataagagcta

SEQ ID NO: 3187 - DNA, 452 bp, Oryza sativa
agcttggctgtagctcagaacaatgattcttcttcacatacatatgcctctcttttaggagcatctctttctagaagcgcatctccagatcctgagcttgttaggagggtccccagaccttgcctccctccaattggtgtgaaagtcagtgctgatgataagaagaacaatggtggttcatcttcctttcgtcgaagttcgtctgctattggcgaatctgataatcagatagctgctttatctgggatgaatttatcatcatctggagcagctagtggacagcaaactgtgacccagtctgagctctaccaggatgttgataatgtccgtaagtttctatttgatcgtcagggtgatcaatcaaatggcaaccagcaacactcttatatgaaacatccagaacaatgagcatattaagcacctgatggttactctgccaactcgcctaattc

SEQ ID NO: 3188 - DNA, 372 bp, Oryza sativa
tgcccgcaggtacaccgaacacgcacttatcggtgttcatttttatgctggcggagcggagactctcaaaagattccgctagatccgagagtaaggtctcttggttgcgcgtctttaccaccaagtcatcaacataagcctcaacattacgtcctatttggctacccaaagaaattcgagtagtacgttgaaaagtaggacctgcattctttaacccgaagggcattgtcgtataacaataagttcctatgggggtaatgaatagcagtttttcctcatcctccctagccatgcgaatctgatggtaaccagagtatgcatctagaatacacaaaaggtcgcaccccgctgtggagtcgacaatctgatcta

SEQ ID NO: 3189 - DNA, 432 bp, Oryza sativa
  unsure (1)..(432): unsure at all n locations
agcttgaacacacatgttcgacgtgttcattctctggtgagccggtctatnttatactgtactattattatattgcagaagtaacaggagtatgttttctttccattcctagtagcttgcttccctgataacacaaggactccacagttcacaccatgcgaacatgttccatgctgtcgactgcaacatcaaattccacgatctgttttcaatactgtctacttactgtaagcaggtcatggcagtatacagccattgttggctctgtggtgcacaataattgatggctacaaaacggctgcaatagtctcttgcgggaagtaaataaaatcccaactagctgtgacttgtaacactgcggtggatgatacaaaccagaggcattaaggtaaagatttacaagccacaccggtaacatatcagctgaactga

SEQ ID NO: 3190 - DNA, 374 bp, Oryza sativa
  unsure (1)..(374): unsure at all n locations
acagctctcaatgatgcggtcgacctggtccggcgatgtagagcgtgtcaattccacgccaagcaaatccatcagccggcccaggccctgcagaccataccactttcgtggccatttgctgtctggggactcgatatcctgggaccgtttatgcgggccccgggcgggtttgagtatctgtatgtcgcgatcgacaagttcactaagtggcccgaggcttatccggtcgtcaagatcgataagcactccgcacttaagttcattaagggcatcacggcccggttgggagtgcctaaccgtattattacggataatggcacccaattcactagtgaactcttcngcgactactgcgaagacatgggcatcaagct

SEQ ID NO: 3191 - DNA, 520 bp, Oryza sativa
  unsure (1)..(520): unsure at all n locations
tgacactagtcatcgcggtgtngtacatcagcgcatgcctgacacgttcttatatatgatgccaataggggcgaagtatgcgtaaggccatgtttagattccaccattntttcaccctgtcacatcaaacgtttaaacacctgtacgtagtattaaatatatgctacaaaataactaattgcacatattgcgactaatatgtgagacgcgatttttaagtctaattgctccatgatntgacaatgtagtgctacagtaaatatttgctaatgacggattaattatgcttaataaattcgtctcgcagtttactgacggattctgtaattatatttttattggtatccgaatgccctataagacatcctatataataccttaagtgacacgctaaaacgttacactcccggatctaacactctctaaatgggttgtgattgcaagcaagatttctacagtctaccaagctgagaataaagccaactatatatcatctatctataatgagtaagctatgtag

SEQ ID NO: 3192 - DNA, 117 bp, Oryza sativa
cgtagttcaagcgtcttctcacgttgtattatgactattattctcacaggtcacactgcgattagtgcagtgacaaacttataacgtagagaaaatcctctgtgtaccctcgaaagt

SEQ ID NO: 3193 - DNA, 218 bp, Oryza sativa
  unsure (1)..(218): unsure at all n locations
aatagcgngcatcgggacacccaaaggccaggccaccatatgtttcacaacaccctcggcagcctcgaaaacaccggctgccgaagcgggcgggcaaccccccatccaagcacctaccagggagaccgaaaagacctggcaacccggggggcgcccagcgaacaaagaaccccggcgagcacccccccaaagcggaagggcacatacaaccgacgaga

SEQ ID NO: 3194 - DNA, 220 bp, Oryza sativa
atatgcctcagcttctaagctgtctttatctctccttcccttggtgtgtgtgaggactagtgatcacagatcagcactatgtaaaagagttctatggaagcctagcttatgttctctgaaactataatgttgaatcactggtcatctagttggtcagttagagtcattactctctgactacgttttagctcggctattgtcgccgcaatccatgcgagct

SEQ ID NO: 3195 - DNA, 456 bp, Oryza sativa
  unsure (1)..(456): unsure at all n locations
agnnctgtgngcgtttgttcttatctgtgtcttgccagatngaattcttgaattgcatgtcttgttgttggatctggggtgtgtttagttcacactaaaattagaagtttggttgaaattagaacaatgtaacggacaaagttgaaagtttatgtatgtaggaaagtcttgatgtgatgaaaaagttgaaagttcgaagaaaaaatttagaactaaacacggtcgtaatgccaccttgcgactgaccataggcagaactgttcaagctctcttaaatgatactaggatgatgcttagaaaccactccagtgtacaagccgtgattatacagcagggaaaataacagactttcacacaacagaaacgccgaagctgatcccaaaatgcattttcacatacagatcgcaaacatggtaaatcgctctcagattcttactaaatggtgggaagttagta

SEQ ID NO: 3196 - DNA, 455 bp, Oryza sativa
  unsure (1)..(455): unsure at all n locations
tggtgagctntgcttacctcttgtactcgacgtccacggctgttatctctgtgagcgacgcggccatgccggcgcgggccatggcggcgaacgccgggctgctcataacgaggccggtgcggttcgtcctggcgcggtccgtgacgacgacacgggcgcccgcgttgctgcacagcttcttgttcttgcatctcacctgcagcagcgaatcggtcaggatggggaagccatggacatggcatatgcagctaagctagatgcctatcttcgggtgtgttctccttctcgatcgagcttgattacctggtagcacgcgccgcagccgacgccgtcccggttcagcgcggagcccgcggcggcgaggaatccgcctgcgttgaatgtcgcggtcgccgtgccatacccgcaagaaccggctgtgccacgccagaacaaacgaacagaatcaatcagtc

SEQ ID NO: 3197 - DNA, 307 bp, Oryza sativa
agcttcatccatccaggaccaaactttatttagttatactggcttactcccttgcaattgctgaccatgagttcttccaatgatccctcactaccaacggactctcaccactcagtgctgtcagcaattcccttgcaatcattaatggagaaagaagaataaaccctggcacccaaagcctccatgaaaagcccacttgaagtacttctggtatggaattcagctttcgagacatcaacttcttgcagtagttatgcaagcaataccagcatatttgtttttgagcagaagcttaaggctatatcct

SEQ ID NO: 3198 - DNA, 430 bp, Oryza sativa
  unsure (1)..(430): unsure at all n locations
ctttaaatcgatgtcttcatgaacatgcattccatgctatatctatgatggtgcatgatattaggcctcctttagatcgatcggaggaattctaaaggaaaattaattggagatttccctacgattggaggtctcggttactacagaattgatcgagttactattcatgcatccttcgaactggagggaaaaggtaaagaaaatntatggcatgtttaggtcgcgaaaagaaaatttttagatgtcacatcggatagttgattggatgtcggaaggcctttctgaacacgaatgannaaactaatntcataactcgcctggaaaccgcgaaacgaatcttttgagcctaattaagcagtcattggcacatgtgggttactggagcacttttatgtagtttttatttatctatatttaatgcttcatgcat

SEQ ID NO: 3199 - DNA, 287 bp, Oryza sativa
gatactgtagaggcgagttatgacctgacgattgcagcactgaacagcattggggaggatcgggtcaacgatcgtgagcttaagctactgctaaagaagaaacatgccctcatttgttatgcatggggtgatccatgcccctggatgcacatctctcaagtataggagcacattttttggtagctctcatagatgctacctattgaaactgataattatcttcgattatatggttcatatataccatactgcatcactgctaagaaataaacacggatagccttatg

SEQ ID NO: 3200 - DNA, 465 bp, Oryza sativa
  unsure (1)..(465): unsure at all n locations
actcagcttcggtgactcttactgcacagggaggagagcangaatgtcttatgtgtgtagcggaaacggaacccatacagctctccaggatttggatcctgaagtttcagaagtgagtttgcttcacacaatatctttgaagagtagcacagaagcagcatctgatgcctccagctctggccatatggaagtactntctgaccctcgcggtttctcctgcaagaaggatggttctcaacaagagctactggattcatcaaccgcatatctcctgcagcttgcctgatggattgctggataatgtgagacctctgagccattagcacctcatatgtcataggggcaccatttagaccttcacgaggtgcggaagcagcatgagtgagagcaacaatggcattgaaccatatagatgagcccagaacagaagtaatggtctttagaagaggcaaatcattgagatca

SEQ ID NO: 3201 - DNA, 401 bp, Oryza sativa
tcttctcatagaacaacactcagaggctatcacctgtttcacccgaccaatttcacatgtacacaagtatttcaaagaacacagacttgctccttttatggcaaacaagacaagctcggagcttatgtgacgacctccgaccatatatgtacacatacatactggtcttcaggaacacatatatatcgaatgagcattctatgaattgctcgtactgagtacaaaaatgactctcatatttcgtttgagcatatacattccataccttgccagctgagactgctttatatatatgtgggacactccgacactagacagtgtcttctcattataccgatatcatatgcactctcctatccactaattgaattcagcaacagacatgtcctggagtgtcataa

SEQ ID NO: 3202 - DNA, 255 bp, Oryza sativa
  unsure (1)..(255): unsure at all n locations
atactcaactcatcctttaataaaggccaatacgaaaactcctatatgatttttatccttatcaattcgcacataacatcctctgattcaaaggggccctaacaatacgaaaaacacactgatttgataggaatgtaaatgtaaaatatatgattgcaaaacacaaaacanatacaggaatggtcgcttgattggaccgcaggataaacgcccgaattagaggagagataaagactcacgcctcctttgattaaa

SEQ ID NO: 3203 - DNA, 357 bp, Oryza sativa
tgcaagctggcgatgacgggaggagcagcctgtttctctgtctgagatcaaaacacaacggtgagctctgtggtgatggcgactacgcgcttccctgtgtcttccgtgcaagggaatcggctgcctggcttgctctttgacttgcagagcctaaagaggtggcgtgtcaggagggcatcacctgatgcgtgctgcaacagtggcttgagcatctgtcggtgtcggacagagaaggcgatcacggcgacagcgcgtccatcgatggcatatacagggagaggtggcggccgattgaggacaagtacgggactctattcatatctaccggagagagagatcatgcttgcacgcaatgaa

SEQ ID NO: 3204 - DNA, 387 bp, Oryza sativa
  unsure (1)..(387): unsure at all n locations
ntctattgctgattggtgtaacagtacagatggaacaataaataccatttctaactctctgcacactaaatatgataagtactgtgagaagtcgaatatggctctcggtgttgcatgcttccttgatccacgttacaaaacaagttcaatagagtactatagtatgaagatatatggtttagaagctgcacaaaaacttgatgagttcaatggggttatcacaaaattggttgatgtttatgctactagtgcgtgtgcaacatcaaagaagaaaggtgctgaaatgcatgtgcatcaacttcaaatacaatctgatcctgttcataatactgatgagtttgatgatatctttaatgagaatgacagtagccatgatcatgagcaaca

SEQ ID NO: 3205 - DNA, 393 bp, Oryza sativa
agctagaaaagcgaggatatgagcaatatttatacccaactacacccgtgattgtggatccatgtacataattaagattgccgattctatggccgttaaacacaacaaagttgccttcaaaaatcctatgaacactgatgccaccaacatattcatatccccagcattcaagagtgcctaaaacaataataacttctttcattctaagaacatggtgaacaatttgaagcggcctgacaatgccatcattagttctaatatgaacataaccaatgctacaaatgtcaattggagacctatcaccaatcacggggaagtatcctgtgcaataccactatacagcgggagaatacaatatgcgttgtagaccatcggatataaatagacagcata

SEQ ID NO: 3206 - DNA, 401 bp, Oryza sativa
  unsure (1)..(401): unsure at all n locations
gcgctcacataattgtgaattcatataggacccttgtcttttagtaatcagatgctccaaacaacttcatattcttgccttccctatgtatggtacgcacttcacagtgaagatattttatggtgcgctcattgaagaatttctgngccgaaaagcattgttctaacacatgatatggcatggactaactttctccctgatcatacacaggctgctaaacttcatataatactccaaaaatatatccatcagttgtgtgcaaggcatgtgtatatctatgtattaagatgatgctatcttgaaagtatcgatgctaatcacatacatccaattttaggacttcttactctaactttattacttttggattcttgaagtacatttagcaacttttgacataa

SEQ ID NO: 3207 - DNA, 446 bp, Oryza sativa
agcttcaactgatgagacatcaacatatttctacttatcgaagtaagaaaaaatatgtgacatcaatagaatatatacataaatattttgatttaatacaaagaaacatgtaaaacatatatgggatgaaacatggaaaaaatgacaaaaaaatatgccaatccaaatctaggtccttcttactctccgatggctggatctaagattccttcgatgaactcgtgcctatgacgacccagtgctccttaccttcgatgatcttgccttcctcattgccggagtccacagcaacggccatctccttcattgctggttcgccacgatggggtcatcctcctcctcctcttcactggagacctcctagatgtcttcttactctgcccgccacaacagtcgttctacccgtcactatcgccaccaggcagccatggaaacaacaataccat

SEQ ID NO: 3208 - DNA, 409 bp, Oryza sativa
  unsure (1)..(409): unsure at all n locations
tctgttcctcacgtacaagaacttgtccggtgtcctcatgctcggcatggtcaataagccatcgccgccgccgccgccgacgcattccaccttctcctccttcctccggcaacctctcgagacgtcgtggctgctgtcgacggngacgaagccgtcgaggcacttgcacgtcggagtcgccgtggcgccgatgccgtcgcagtagccgaagggcccgcacgaggcgtacttgtcacagccggtggggaaccgggagaagacggtccacgacgacgtgttgccgtcccagctctggaaggtgagctcgccggtgtagtccagcgtcatgcgcatcggcggcgagccgtcggcgacggtcagcttgaaggagtagccgtcggccatgtcgccgtcgatcgtctgatacagc

SEQ ID NO: 3209 - DNA, 419 bp, Oryza sativa
tactaactctaaattggactctgcaccagatttccatgcagactattattttctctgtcagcaagaaaaactcaacgattctagtaatgtataatgctcgggaaaacataccaaccaacgagagtctcgatcctccaccagactctcttgtatgtccagtccttcataaatctaacagcgaagagttataaataaaattcataagatgcattcgtgcagccataatacttctgcacataaactagagacagtatacgtgaaaaataatctaaagctagctttatgtaacagaacagacgtatgagatcacatactcaaagttgctccaattgttgccagctactatgattacatgaccatcaaggtaatcacaccgatgaaatatgcttagcactggtgccctttgagcactgaccacc

SEQ ID NO: 3210 - DNA, 424 bp, Oryza sativa
  unsure (1)..(424): unsure at all n locations
tctgtcttganngctgccaaacaacaaatttaacacgcgagagggatttatatatcagcgctttgaagaagaatatatggcctatcgagaataaaggtactctatacttaaatatgatatgaccctgttttcaagagcttatctntgaaacagttatttgttttaaaaaaagaaaaacaatagtacatcaaacagccaattaatcgacacggtacagcgcatgacaatgagttttttttcttgcacgttcattgcttatgcttcccagatgcctaccaaacaggcagtgcctgtattacagtagaactgtaaaagggttggtcaacttattagatccatgataaacattatttcaagcccatgtataatcacatagattatcatttaacataaatattgaccatattggggtacaagattggta

SEQ ID NO: 3211 - DNA, 278 bp, Oryza sativa
aagctgaaactgcaaccatgcatgtattgttgagcactctgaactgagaaacacggagtctcttccatgctgacatttatctattacaccatatatatttaatctatcggattggtcaaaggctcacagacatggaaacctgcactagagctttgcattcctgaaaacaatctgaactgacagactgtaattcaccgccttttcttatctcccctatcattcttgccacgtgctccttgagctgtagacgaccatactctggcgtgagctggtacgaa

SEQ ID NO: 3212 - DNA, 290 bp, Oryza sativa
  unsure (1)..(290): unsure at all n locations
tncggagcgtactgtggggcgcgcgcgctatctcggtgcacgtgagactgtctgtctcatatttggttcgggtgggtcggatatattctgagctcatgcgtcgtgagctgtcagcctgccacgtatgcagcttgggtccaaacttttcgatgagagaatctacgcacgaatttatacgattaacaggttatataaaatcttccatggagagctgtngatttaaggattaggagttttccatatgctcacagaactactatgagtctcattggttagcctaataactcaaa

SEQ ID NO: 3213 - DNA, 424 bp, Oryza sativa
  unsure (1)..(424): unsure at all n locations
ctaagctttggtactctgttattttcgacatatatcatttcatggttcctctctaatgtttatccatttacagctcatcgttcaataggatccgtaggccagatatgttgtcttcttgtcgcttgtaagtagcccgtggtctttattccatgaagtatttatgcgttgcttccaaaagcaaggaaacatggcaacattctcaaccctcttgtggctctcaaaatggtgctttaaccgctattttccttattgtgatagttcagatttacaaaacctcttaataaattagcccaggtcaaaataattcacactaaaatttgtgttattctttacaaaatggtcaaattttatcaacgagaccgctgagagcagtaaccaanactgtgcataatactntggtattgcaagttgagagtcacgtata

SEQ ID NO: 3214 - DNA, 339 bp, Oryza sativa
tactcagctttatctcttaatagtgcattaaatttgaatttattcgatccattatttttctatttgaatgtacaacagaacgagcccaatattgattatattcggacattatgtgatattggaattattctagacccacacgtcacagagacacgcctcacatgtattcagtaaaattgggctataaataatattctcatataaaattaaatgcccaataatttattatttcttctatgaagtttagcacaagaattcatcaaacaattggcgagtagtagccaacgttcttcccaagtcaacctccccacaccgaactctcaccaatctcgaggcgca

SEQ ID NO: 3215 - DNA, 410 bp, Oryza sativa
  unsure (1)..(410): unsure at all n locations
agcttcgttncaagagaaggatggaatgttattttctgcttcaagaccaaaaccaactcaggagtctatcctaaagaggctatcctcgcaaaaggtccctgcaagcgactggacctggtaactgttccggggccacctgtcaaataatgaattgagacttgttatgatgtgctatttatgtcggctggagagatatagagagagagagaattacttttgagcaatgtacaaacaactttcccgcaaatcaatttcaatctctcctccagttactctgaaactttctgatcttcctctccgttctttctctcgattacgtgctatctcttccgctatcttcaaatctctcccaaacgaatgaatcgcagttgataaaatcgagttactgactagacttccgcggttttggg

SEQ ID NO: 3216 - DNA, 409 bp, Oryza sativa
gcagctgcagcttatcataatgacagctgcaaactatttatattatgtgaccccttggacaaaaacgatgctcgtcaatatcttagcagacgtaatactgcatacttcagttggggacatgtcaatggaacttgttaatgagaacaacgaccggcccaggaaatttgatactgaaactcgttctcgcgcagcaactatattgttgaagaaacagcagacggctgccatacatggtttgaagatttgacgtacaattaaagtcaacaaaccattagtggtagaagctatctatgccaatggttacataagctcaaagatgatacggcgaagcagtacaaaaattctcgggtatatgttacacttgtatatggtgcctccatatatattcataaaggcatttacaaaacct

SEQ ID NO: 3217 - DNA, 416 bp, Oryza sativa
  unsure (1)..(416): unsure at all n locations
nntgacagactacanctgtgtatggngaatatcaccgaaaactatctattgtgccttctttccatctcaatgcagttggagcggttggaactcacgcactgcagtactgtaaaatgcttgaaaataccatgcctgcagcgtcttacctacctagatgttatgacttgcaccgggctgcaagttatacagagcaaagcttcaaatctctccagtattcgctttgaaggtgatctctatgtacaattgtcacttggtgaaccactgcancataagcaattgtacaagttatgtaatgatgctgtctcttatgctcgtactgagctgtcatccagcatgccacatcttgaaaggcttattatacattctgacactgaggtatatatacttttcagaacttatttaaaatgagcgcatat

SEQ ID NO: 3218 - DNA, 348 bp, Oryza sativa
  unsure (1)..(348): unsure at all n locations
agctngacttggtgtgaggaggctggtatatctatgtctgccctgctaaaccaagggaaggggcttctttgacatatacccatggacaattcagggcatagtgtccttgctctctgcaatcgtgacaaaaggggacatcctcttctggcattggaagctcattgacctgngtggcaaatgctcgatcaaacacatactgactctggtcttgacttccaactaatggtagctgtgaactaagcagcatgcttggaatggaccaagggtgtgccctggttaactctcttgaggccagtggtagattgaggtgacaactgaattacttgaagcatactcgctgacattctt

SEQ ID NO: 3219 - DNA, 328 bp, Oryza sativa
ctagctagtttttttcttggtgttaatatcctgcgtggctgtactgccgcttgcacctgcaccggtacaagtgctacttcaacggagccttgaccaacctctaatgccagcctcctgttgtttttgatgggtggaagcaagacatgaaccaaagttaagtgaaatgaaatgaataacaacacaattatgccttacctcctagtgattggtgcaggactgcttggttgcgttgcatgcacttgtgattctgcaactgcttcttttgctacagctgctcttgttcttggagtattcgcttgaacatcaactgcagcagctcttggttctt

SEQ ID NO: 3220 - DNA, 433 bp, Oryza sativa
  unsure (1)..(433): unsure at all n locations
gcaagcttncattgtattggtgatgctgaatttataatntctgtgatttcatatgaacattagcagtctggttcaacttttcttgcaattaatgggcgngaatgaaatacttaatcgagatcaaaactatgcancnnattattatcagattttaaaacatncaacttccatattgccaggccttcaagatggattgctgcctaaccaactatgatgcatttgttgttggtggatccgaggatggttacatattcttctgcgagttagtggatgcacctgttgtttcaagctttcgagctcatagttctgtggtatttcctttgtttgcctaaatctggccaaaccattattactgantaaacgacattttctcttgtgttctgtcatttttgctttaaccctgtcatatactatatatatatatattttctat

SEQ ID NO: 3221 - DNA, 392 bp, Oryza sativa
  unsure (1)..(392): unsure at all n locations
ngactattgagtgatgttattcatatttganaaagtatcagagagattatattntctatggtgaaacttgataactgtaggaactagccttagtggcatgttctattattgtggttgggaacttgagatccttggttgagaattggagctacgtgtatcagtgctcaactacatctgcattatattgttctgcatatggctgtgttcggtttaagtgggtgggaacaaatctcccgtgcacggaaaacggagcgcgttattagcgtgtgattaagtaagtattagctatcttttaagaaaatgaatcaatatgaatgtttaagcaactttcatatagatacgttttgcanaagacgtaacgtttatcagtttgaaaaacatacacacgaaat

SEQ ID NO: 3222 - DNA, 446 bp, Oryza sativa
  unsure (1)..(446): unsure at all n locations
tatgttgatgatgtagtcgtcaagaccaagcagaaggatgacctgattgtggatttataagaaactcttacaagcattcgtgctttcaagatgaaactaaacccggaaaagtgcatcttctgagtaccgtcagggaaattgcttggatttatggtatctcaaagaggcatacaggccaacccggagaaaatcaacgccatcctcaacatgaaaccgccaagctcccaaaaagacgtccaaaagctgactggttgcatggtggcgctcagccggttcgtctcacgactcggcgagcggnggatgcccttcttcaagctgttgaagaagactgacaatttccagtggggacccgaagcacagaaagcctttgaagacttcaagaaacttctcaccactccaccagttttggcctcgccacatcctgcagagccgctactggtatatgt

SEQ ID NO: 3223 - DNA, 448 bp, Oryza sativa
agcttctctggtccttcacgaaccggagcttatagtgctgaaatccacaatgctaaaataggaataaggcttgctattattagaaatgcccaaaaaatatcatattcgtgaagcagaaacataaatgtactcccattaatgtggaataggcggaactgaattagtcaattcaagtcagcattgtcaatttatacagaatttctctcttttcctcggtgaaacaaggatcggtttttctcaaaccaaagggcttagtttagcctttgtttcctctttgccacgtcttctttaaagattcatccaatggaatcccgaccccctttctttttgatttcctttctatttaggtatggtggagacataattcttatagaaacaaaactctctcgcttcactttgtctcattttctctagaatctctagaaaaaggaatataaacgaaaatact

SEQ ID NO: 3224 - DNA, 243 bp, Oryza sativa
  unsure (1)..(243): unsure at all n locations
tactaagctcggtaatatctatctggtaagaatcttcaacaccttgtgcatcctcatccaatgttntcattctgccatgatacccaccatatccatcgntcccataaaataagagacaaaactaaacaaaataaatgtggttccttggtcttccaaccaagtgagtcattattgctttactcgtgtctttgtttttctttttgtgtccaataaagagtcccaagtacaaaaacaagtgtgggg

SEQ ID NO: 3225 - DNA, 355 bp, Oryza sativa
gatcctctaagacacctgcggcatgcaagcttatgagtaccaacacgcatgacaatttgttgtgcttcgacctgcatacatcatacgatggcgtccgatcaacttgcaccaacttactcaacttctcaaaatctctgtcgtaatcctctgcgtcattaatgtcttgcaacattgttgatagacattgagtgtacgaatctatggtctcttcccctaacggagaaggttcatacatgccttatcgagctgcggcggtgttttctacatgcagatccaacatcttttgagcttgaacatccgtcgcctcttgctctccatgcttagtccagtacgtatatctcttcgtgaaatcatt

SEQ ID NO: 3226 - DNA, 492 bp, Oryza sativa
  unsure (1)..(492): unsure at all n locations
ctaagcttacgaaggcacatgttcccgaggtgatcgtggcacanaataagagagtgtttcattctntgcaacatgggaccagaacagttacagagtatcttcacgagttcaaccgcctcgcgcgctacgcccctgaggacgtacacaccgatgccgagaggcaggatatgttttttgttggtcttgatgatgaattgaccaaccagctgatctccagagattatgaggactttgagaagcttgtggacaatgctatctgttaggaagagcagcgcaacaaaatggatcgcaaaaggaaggcagctcaattcacgactttccacgggatcagtcagaagcctcacttcatgacaggacatcaaggtggaccttccaccatgattatccggcagcaccgtccctaccactcaggcaggttcataatacctacacagtggtagcacaactcagtgagcagacagcctaacccacttcaagtcactatgactcagc

SEQ ID NO: 3227 - DNA, 426 bp, Oryza sativa
agcttctctctcgttctttagcgcgtagtttgatagatttgacctcaccccatttcatcttacttatgactcggacgcgtctcctccacctaagcgaagcgaaggcagaggttggtgacgattggcgcgaagtaagtaaacgttcttgaggtctttccattctggaagttttggtcgcctagtctcatgaagagaaggaaaatcttcgcaggatggcgcgggcaaaggtggcgcaaggtaggattgatgctgcttccagtgcgtcccccgcggcgacctcgacaggagtcgtggtcgctaccaaggaccaggaggcggcaccgagtagccctgtcgtcagccttgtgactaaccagagccggtccaccgatgccctcacctgggggagctccaaacggagatggagcacatcctacataccggtgc

SEQ ID NO: 3228 - DNA, 447 bp, Oryza sativa
  unsure (1)..(447): unsure at all n locations
tgtggtgtactcacgcacggtctcgcggtaccaatcaccattctactctcgctaccttggacctgaaaacagaaatacaaacactctccacaccaccgctactatatgcaactgaaatgcacttcatcggcattcgatggggtttgtatctatctccatacttgataagatactaagcccagcccgtcttatggtgtgttcgacacctccttttctcaacactcctcccttgtttttcgcgcgcactctgttcaaactactaaacggagtattntntgcaacaaagttatatacaaaagttgcttaaaaaaatcacaataatctattnttgaagaagttagctaatacttatataatcacatgctaatggaccgctctgttttccgtgcgcaatgttagtgttgtgaaccagctatgccgaacacacccttaatacggatctatagt

SEQ ID NO: 3229 - DNA, 455 bp, Oryza sativa
ctgtctgcatcctagatactacctccgtatcaggatataagactttcttgcattgcctatattcatatagatgtggatgaatctaggcacacatatatgtctaaattcattaacatatatatgaatgtgggcaatgctagaaagttatatcatatgaaacggaggaagtagctcccaatatccctgcacttctaaaatatctgttcttctgagtgctgacaccatccgttccgtggttttgcagtgaacacctgtttgcacatggggaacaacacgccaagcttcatggccccggctcgcccgggtgacctgctgcagatcatcagtaagccggcgcagccgccggcgatgtcgccgatgcctctcctgacaggctcggacgtggcggagccgccgctgctcgccgcatgaacagctcatgcgccgtctcttgcgagcaagatgcacgctcatgc

SEQ ID NO: 3230 - DNA, 437 bp, Oryza sativa
  unsure (1)..(437): unsure at all n locations
agcttcagcatgtcgagcagggccttaatatttgtttgctgactatggaggaggaggaggaacatcataatattttctaatttgtgtagatgccgcacccacggcctcctcttaattgacatccttattctctataactttatctggaactaaaacaagcactcgctgtgctcttcccttgaatttgttttcggttttcaactgcatgtatctggaattattttcccccagatgtaaggaagcatcttccgatgtgttttcctagctacaacgtaaccagatctagttgctcgatgtcttgaaggatctcacattctccctctgtcgcaattgcggtttgttgctgctggcagtgggatttatgattgatattccaccaaggggctntttctgtacgctcgtgtatatgctgtggtgcctatgacatccattttctg

SEQ ID NO: 3231 - DNA, 332 bp, Oryza sativa
  unsure (1)..(332): unsure at all n locations
aatcattgtatatgctctatgaactgaaacagcttgtgatcctttgcaaaggaataagccctacgatagagagctgagctgatcttatcattccatagatcatggatggagattgttcgtgttgatctatgatggatggnggaataaaaattgaatcaatatggattctttgatctatgttgcagatagggattagaggctgctcgaaggggccgggttcgctcgaagtatcggctacaagatagcgtatgtctcttttntaatcgtggggagcacaaatgacgctaggtcattggtgccagataattgatgcaatctgcaccttttccgtg

SEQ ID NO: 3232 - DNA, 418 bp, Oryza sativa
agcttagctagacaaactgctgaagcgagttagctaagcatgcctagttatctctataggataatttatggtagggcaagttgcaatagtgcattgtgatgtgttgtcgggggaaggatttttctttattctgccttgttaaaagtatatattaccagtatataattatatggaagcaattttgttgacaaatatactgattccgttctaattagacaatctcaaacacttatgtgtatagtagtacgctgaaatttaaaggcgactctctctatctataatatagcaatttacgaccggatgagagtaaatttacgactatgaatccaaatatagtgctagaatacatctcatccggtattaggttagtacgtatattataggatagaggtagtacgtcgcaagtatgacaagtaaa

SEQ ID NO: 3233 - DNA, 520 bp, Oryza sativa
  unsure (1)..(520): unsure at all n locations
tctcttccggtacctcgctactccattgatttacagattacatattattattctgtttggcttgcaatatgaaatacaaacaagagcagtatatgttaagaaaaagaattctcttagcttgtttgcaacactagcttttcttctttgtggntccatttatctcatccagtgctgcatgtagtcaggtatagttgcctctataatagctattttattgtattttctgcattattcttgaccaatatgaactcttcatatgaaaaaaagggtgtatacttgacttcttttattgcttttcagttacctaatttgatttactctgatgctgctatatttgaatattatctcgaatctgcacggtgatttgctaacgaaactctgtgaanaacatgcattacantgatttgtgagcacgttgtcgatgagatgctcatatttacttgtgaacaaggaatatgtcaaagaagatcctttctgaagcctctgaccaaanatctactgggaatacaaacttatgtca

SEQ ID NO: 3234 - DNA, 450 bp, Oryza sativa
gcttaattattataattcgcgaatctctttattctgcattaaacttccgatgatcatatcttggtcatacaaactctgaatcgacccgttcaagtctcctaatgtgtgttataaccttaagaaccctgcgctttctttttatgtgttgatattgcttctttataggcttttagctttgcttgtgtgctacgcgtaacttctgtcgttccggaggttcccgaagccgggttcgtggtagtcccctaatgttctgaaggcccgttatcttttagcaaggcaagtcacatcatccttgaacatatagaatcccaagttgtaaaaatattgttggattcaattattgcattatcgctttatgtaaattcccgcgttatcactgttttatttagccatgcctatatcacctcttgtatgacattattaattgtattgttattattacctgtgtca

SEQ ID NO: 3235 - DNA, 417 bp, Oryza sativa
  unsure (1)..(417): unsure at all n locations
ctttatcattctggcatcgagctattttgccgcacgacctttcttactgtatcgtctccgcagtacagtctaaccaccaaactcgggatggataggtgtgtgtcctctacgcctatgacaccagaatatcgaaccatgaacgaggaaaggcatgagagaaatattggctagtaattgtgaagccncaattcttgactggaagggacaccaaaggcctctgccctccctctctatctatccaagagatggaagggcagagcttttctttggttgtttcatctttgtatcaaagagttgaacaatgaatatagatggcacgtgcctgatcgattngatcacgtcgtgtaagaacagaggttcacatcgttcgtacattatgatgcctcagctgtatacattactgcactttcacttgac

SEQ ID NO: 3236 - DNA, 444 bp, Oryza sativa
  unsure (1)..(444): unsure at all n locations
agcttntacataattacatatatccacctttttcatntgtatcaagctgaaactgaaaccatgcatgtattagtcagttactctggactggattacacggagtcttttccatatgcattttatttcttacaccatatatattttatttatttgattggccaaagtctcacagacatgtaatcatgcactaaagttttgcagtcctgataacaatctgaatttcttgattgtaattcaacgcctttccttttctcccctatctttcttgccacgtgcttcttgaactgtaaacgtccttactctggcgtgagctcatctgaaaatctcaatgaaattgtgatgatagtgacgagttatcctgctgaatcacttctaacagacgggcatttcctgatctaacatgctatttcctgaagattgagtgtcaattgttttcaaactgta

SEQ ID NO: 3237 - DNA, 354 bp, Oryza sativa
  unsure (1)..(354): unsure at all n locations
ntaggatatagtgngttatatcagtatagacgatatatattataagaactaattgttncattaaatctcattcttactagaagagattatcattnttgaaacggcatatgagagaaaatcatctattcccaaccagagtaaagagtcacacatgcaagtaccataaaacatagaattaacgagggcattcggtgccaattctcggatttccatcaaagttggctgcaatcctgccggcgtctgcgaacacgggcacacaccgcacaggttcgttgtaagaggcatcgaaaacgcgcangttgacaagcctggtggcgtctggcactggcccggtgaaagcgttgtgatccaagc

SEQ ID NO: 3238 - DNA, 399 bp, Oryza sativa
  unsure (1)..(399): unsure at all n locations
ttgcatcctccactcanatctagagcctatcttgtgagattgagtgattagatgagagtgtaggagtgttttggagatggcttgacgattatatctgtttgagcactttggataccttgtgggctgtcacttgggcttattactcttggagatcttctcctagacggttaggtgtcgcctgtgagcttccaaagatcttgtggatgtcccgggaaagtttgtgaaggttntcctcacctccgcaaggaaacgaggtaagtgagtaaagattcttgtgctgagttntcagaggttgtactaggtagagcaacttgcacttgtggtcttttctagaaggaattntgagttggatcttggtggtcactcaattctagaaaatgacctataagtgttgagttg

SEQ ID NO: 3239 - DNA, 382 bp, Oryza sativa
  unsure (1)..(382): unsure at all n locations
ctactggtcgctggattgttngatatgccagagctagtggctaccattcaaccatccaaagctctaacagccacgagctgtgtactatagtactccgtacagcgacatggtcgatttgtgttcatggcgacgatcctggtattcagcctttcggtcacccggacgccactgaagattcttatatcatcggaaaacgatagtcctctacgtagtaaaaggactgcagtaactacggtaatttccttgctgacagaaaccctcgcaacgtgcttttcgtcagcgagtggtgtaattntgcatttggcgaaattaatcactccgtggaattcagaagaaaaatacagagatcattgagattactggagacagggattgttcattc

SEQ ID NO: 3240 - DNA, 320 bp, Oryza sativa
agcttgtcgttcgtcttgggaacgaccaccgtggtcgccagccactccggatggatgacctcgcggatgaatccggcctccagaagtcgcgccacctcctcgcggatgaaggcttgacgttccggggcctggcgccgcactttctgccggaccggccttgcgcccggccgtacggcgagacggtgctcaatcacctccctggggaacccgggcatatccgccggtctccatgcgaagacgtcagcgtttgcccgcacgaaagagacgagcgcgtcttcctatttgccatccagaagaccaccgatccgtgtggtcttgga

SEQ ID NO: 3241 - DNA, 277 bp, Oryza sativa
  unsure (1)..(277): unsure at all n locations
ctggaattctttatcatcgaanatntatcaatccttggaggccttggaattcattatcttctttaattatcttcagcttggaggctcacatggctttggctgagatggactgatccttctaagccttgggaaaaattggatttgccctacaacaaggctgatgtacagctctttcatgcctgcacaaagatcaccctangtaatggggagaagactctttcctataaagacaactggatcgaatgcctgtgtccaaaagacatctcaccataccttt

SEQ ID NO: 3242 - DNA, 430 bp, Oryza sativa
  unsure (1)..(430): unsure at all n locations
agcttaaagtggatagtntcagagaccaatccactgacattggactgtgattcattagccaatccattcccaagatcatgtcatagctggttataggtaaaacccttagagttgtctgaaatttatgaccctgcacttgccattcacagattggaataattgctccacaacacaatgtctctccattcgccactcggactgacaaccttctagagagaggctgtattcctgtcaatccttcaactatctgtgaactaatgaagctgacagaactgtcggaatccactaaaaccaataactccttaccctgtaattgccccaacattcgcatggttccatctggntcagtcccttgtactgcttgtaacgaaatggccataagttccctagtcaaagaaccattctgtccagcattctctgattcaacatg

SEQ ID NO: 3243 - DNA, 355 bp, Oryza sativa
  unsure (1)..(355): unsure at all n locations
gcttgagttattacattagcatatcagcttcagatgagatgacaatagcaatatatatatgtttattggacaatccatcatgaattatattccaggtcaatgatgcagtagcatactagcatgtgtgcacaagtgagatttccacagaataatggaatctgtagttagtactaatactagtatgcgtgtaactgtataacagtaaaatttgctaaatcattttcaggtcaatgcggtgaaaatactctgtcanacattctcttggactagtggactcgctcaactctgtgcagataaataaagtactggatgctggagattagattaataatcagatgagacaaaccacctgcac

SEQ ID NO: 3244 - DNA, 408 bp, Oryza sativa
  unsure (1)..(408): unsure at all n locations
catgctagcttggccactgcattgttctattaattttctgtgtgttatatatgnggcgtgtgaacccactctacctaagtatatacagctagatatatagctcgatctggctaaataggctcaccggccaattaattaagtgtgttctctttattgacttgtccgaacacaactacattgtatgtccagttgaaaacagtacgtggccatcgtgccttgcaccaaagtatatattgctgggtatttggtgttctctccacgctcgtatatataggagtcatatcacaagctagtgtgtatctcaccttgcacatttgatgttatctgatgccacagagtttgaactacaacattgccactattgaggcatttcataacaaaaagctgcttttatcaaaattattcatt

SEQ ID NO: 3245 - DNA, 412 bp, Oryza sativa
  unsure (1)..(412): unsure at all n locations
cagctngacgctcacatcctatanataaatcatggatatcttgantagtatagagctctttatgttggcatacaaacataattaagaacactggtctatattctctgaaccactatcatatggcatataatgacctntatagcattaatgaatttgtcggattactccatccgcatattctgcccctctgatgacacccttctggactctgtctgagtcatcaacgcttaaagatattatagttgaacaaaagtgaaaattaacagacactttaaaactcgattcacttgtccatacccgtagcattgtattttgacgctgaaactccctacacagagactctaagttctctataactgcgatatctgcaagagaccaaacacaatccacacatgaatacatgatacatgtt

SEQ ID NO: 3246 - DNA, 359 bp, Oryza sativa
  unsure (1)..(359): unsure at all n locations
agcttgctttaatagatttatctccttaatctaatatagcatgaatctgactattggcgacttgataatatccataggccgattccaagactctgaaaccgatattgactgtatgccgatgatgacttcggngcttactaaatttcactgttaacaacaccctaaaaaataattgtgttttgatacttgaattatacaagtgccattcactttgtctctagtcttcgctttttagttagcaactatagactcacaacacctaataagtggtgtgttgatttgcgagtcaattaaatatactactttaatcacaactctttaattgagcttaattacctatatataatatatagattgca

SEQ ID NO: 3247 - DNA, 410 bp, Oryza sativa
  unsure (1)..(410): unsure at all n locations
agtactacacataacatatgacaagcctgaaccaatatntgagctcaaactttgatgacgtgttttcacctctctattatctgaacctaaaactaaactaatctatctagtaacatactcgtggtaatgctacggtggcatttggtaatacaaatgttgtatatccacgtcactgaaaatatgcttttcattgtttgcgtaatataaaatgttgtacataaaaaactcggagtccatttacaaatagaatgaatcactgaaaacaggagcactcttaccaaacattagctaagcatcacaatataaaaaccaaggtaatgctgatttcatctaactttattctttttgtttgaatatacaactcaataatagatcagtctctttttactatgaggtggttggtcctccat

SEQ ID NO: 3248 - DNA, 382 bp, Oryza sativa
gacccggatccttaagtcacctgaagatgcaagcttgattcaaaacagagttgttagtttaaaacagttgtagaaattcatcaatattaaccaatcaatgtgcaacgctacaccaagttgcaacaggcccaaccaaccacctgaactaaaccagttcattaagctaaactatgggtgagactaatcactgtgaatctgggtgatcgcccataaccgcgggcacggttattcaaatagttttactctggtcagaggtgtacaactgtacccacaagacacgattccacacatgtcgtcatgccccgaagtaccaccatggcactacaaagggggaaatcgtgacatgacccttcttataacccgcccctaaccattcacacca

SEQ ID NO: 3249 - DNA, 366 bp, Oryza sativa
  unsure (1)..(366): unsure at all n locations
agcacctgcagctgcagctatgccgagtgagaagtgtaactctttctggttctcagacaagnaagagagaattggggatcctattgccttccctcttgccccaaccacccaatatcctcacggatgtccgccactaactatattctcggtattttcaatagcttgtgcccacggtttttgagtgaggctcgtcttaagctatgaacagtttttcctataaccaatggaaaatacggtggatttatctcctctctcgaaaaaaaaaattgcggactactattttaactgactttggcactgatatttatccttatggagactaggagaatactcgctctttacacttggcttcctttttgaagataa

SEQ ID NO: 3250 - DNA, 407 bp, Oryza sativa
  unsure (1)..(407): unsure at all n locations
agctngccgtcagttagcagaatggcgtttccagaatattcatatcccggcgttatccgtgaacttgtcggcgctgcactttcgcagtaatcaactgcctaatcaggtgtctgatgcaatgcacgcctggggtattgacggccaccagctgacggtagaaatcacggaaagcatgatgatggaacacgataccgaaatctttaagcgcattcagatcctgcgtgatatgggcgtgggcttatcggtagatgattttggtacgggctttttcggattatcccgcttagtcagtcttcccgtaacggaaatcaaaattgacaaaaagtttgtcgatcgttgtctgaccgaaaaacgcatccttgtcttacttgaagccattaccagcatggggcaaagcctcaatttaa

SEQ ID NO: 3251 - DNA, 379 bp, Oryza sativa
  unsure (1)..(379): unsure at all n locations
gcttccttcacctttggttcgncttccatatccacattctgatcgaacgatcgaatttatcttcgtccatcgtacttatttcagattattcttcatccgcatactgtcagcttggcccgcaggatccatcgattgctgtgaagaaatgatcaaccggtgcttctgctgcgtaaccggcggcgactctgatccggagccggctgccaccagtagtcgtcggaggtacgtattactgcagtaccatgcatgtagaagccatcagaattagttcttgatactttgatagcatcgatcggttgaggtgatcattcggtgtgatgtgttgtttgccatcggagagagagttcttgatagcaccgatcgatcggctgaggtgatc

SEQ ID NO: 3252 - DNA, 320 bp, Oryza sativa
  unsure (1)..(320): unsure at all n locations
ctgcatcatggcaggaacgaatgcattntagtccgaacttatgctttctaatccctatatgtntcaactcgcatcgctctttccaccataggcagttccatgataggatccaccgaatacactatctcttaaaaatattctgaagaacacagtctccatggtcactgcatcccaattcccaatcaccaaccgttaaaatacacacaccattctttctatcttaacaaacagcagttccattatcagaggccacaagtgttcttaagttggctctatcaacttgatgtaattgtctgagatcaataaaagcttcatttatc

SEQ ID NO: 3253 - DNA, 362 bp, Oryza sativa
agcaccgagctgcagctcaatctgagagctgatgggatatctgattatatgtagctcacatacaccttgtcagatatgctgcgctgacgggatcaggactgtaattgactagccattataggggttgaatttaatgggtctcttatgaaagagaatgactctaatgggcgacttgggttattttattcctcacaaaaagtatacctaccagagaagtggtgcattatattataggcttgctggctgttgccttagctgccccttcagccaaaatcgaaatttaatggatgctggctagatgcgttcaaactgatatgcataaggatgaaaaggagatgtactgttgcgtctactaccgggct

SEQ ID NO: 3254 - DNA, 238 bp, Oryza sativa
  unsure (1)..(238): unsure at all n locations
catgcttcaactgccggtctatgaagccgcacaacccctagatcgaggccatcggcgcccgcgctgcctcgttcgccagtgctntgctccactgctccttgctccgagcacggccacgcagcttcgcccgccaccacagcggagaggagataggacgaaattgttgttacttcgtgtgggcttcggtggtttttcttntatgttattgtcgacatcagcgcactcacctaaaccgctt

SEQ ID NO: 3255 - DNA, 430 bp, Oryza sativa
  unsure (1)..(430): unsure at all n locations
taaaactaagctttaatatgggagggaggatgagggagtagtcaaaatgtaaacagcatgtcagcaacagcttacaatcttatctatcgtgaaacagaggtgtaccagcacatgcatcatccacccagacccagagtgtcccagttaactctagaaaccagaattaattacgccagctaattcgtggctcaacagcaaataaatgaccaattagtctggaagggtagcaagtggcaacggtggcgaggtttagaaaagactgataatgcacgtacgtacgccagtattacatgatctgcaactgccacttanactacgaaattgtaccatgccagatntactgacagcgaatcacttttttttctctatggagtagtgctaatataaataacgttaattaatgttgcgtcgagagtaattaagcatgtct

SEQ ID NO: 3256 - DNA, 388 bp, Oryza sativa
  unsure (1)..(388): unsure at all n locations
agctngagactattgtggtgtcattaccgtggatacacaacagcgacagacaccgaatctactcttgccattggaaggattagatggattaacgctacaatatgtagcatcgggatgaaatgttcaagagagtaacgaagagtcgttgggttccggatgcggtcgggcccattgtgattcangtaaaaaatgcaagtaaattttcaaaagttgaaaagaaatattattataaaacagattattcgtataagcttgagtgcatcacatcatccattgtgattcaggtatattggcttttggtgaacagttcagttcaattgcattctaaacggcttaaaggcttgctgcttgtatggcccaacagaagtaatgaaaagtctaatctact

SEQ ID NO: 3257 - DNA, 246 bp, Oryza sativa
  unsure (1)..(246): unsure at all n locations
ctaatttatggcatctttaataggatnatatggtacagatacatcgccataaaatgtgctgcgacatatactatgcatggtttcaaataatacgtttcatgtttccaaatatgagacggatctgtatttaatattacatacctagtttgcgaaagaaaaagtcgcttttccatataggcaagtttcactcttcaccattatgatatcattattcatacctcaccatgcaatcatcgaagtttctat

SEQ ID NO: 3258 - DNA, 434 bp, Oryza sativa
  unsure (1)..(434): unsure at all n locations
agcttatcataaagggcttctacaaggggttttattctgtctttgagcataaagataaagatcggatagattcgaaccgcaattgcaaaggtaatcactactatgccagcccaaatcatgatcttcaccaacttggatttggttctctcgcgaaaatcgcgagttgcagagatgagaaccatgaaaagcaagatcccgaataagaaaacagaaaccgaggaaaccacaagagtgaagactagtagagtctcgtcttttgtcattctttgctcctttttcactcaatgattcattcgaatttcccgaccaaaaattctatatgtctattcatagggcctcgntgctaagtgctacaagatctagtgcactggaactcgtggttatggacccgaatcctttagtatggaacattgtcttttccaagtaaaacccct

SEQ ID NO: 3259 - DNA, 338 bp, Oryza sativa
  unsure (1)..(338): unsure at all n locations
gcttcctggatctgnngaagttctctttcacggtattgggatccgatgatctgatttccttgatcgctacttatgggcgtgcgctcaaaggatacatacagggattcccanacaaaaaggggaattcgtagtcactctttcctgtcgcgtaaaaaaaaggctttacgcgagagcaatatagcgtgggatacatctatctcttctgagcaacctcttttggattcttaagaccacccttgcagtaggataccgcctgctttgggttctctattatattatctccttcgagggaattttaggatccgtcacgctatatttagtctatattggctttcact

SEQ ID NO: 3260 - DNA, 300 bp, Oryza sativa
  unsure (1)..(300): unsure at all n locations
agcttgcagccttaccntattcattgcatatagcatcaaatccagatcaaagaatcagaaacagatcaagtattcagattgctaagaaaaaaatacgtgaattattccagttagaacatgctctaaggatcaaatcatagggagaaaaaaaaaagaaacaccccactacgcaccaactattgacgggaagaacaggacggcatcatggctcatggatcatcatcaaccaggaaaggggacaagatcaaggcctatggactatgagaggcgatacctatactgctcgaggaagcggtcgtc

SEQ ID NO: 3261 - DNA, 386 bp, Oryza sativa
  unsure (1)..(386): unsure at all n locations
ntggcgggcaccgacgcgctcgacaccttcacgcggccgtccaggcgctctgtcgcgagcgtggggtggttgttaaccatcgtggggacgaggaaatacgcattcccgagggacctaaccaggacgtcgtcgctggtcatgatgcgcgtgatcctagtcaccaggaggaaccgcacgacatgctccagctgttcgttcgggacggtgaggatgacctcctctccggtgttcaccaacgatcgtagcagctgatggtccgtgccgctgctgaacacgcgcacatgcttggtctacttagactgaacaatcttggcgaacactgacgatgagttctccggcgaagggatcgtgctggtgccacaaaaatccctgctcatcattggagt

SEQ ID NO: 3262 - DNA, 434 bp, Oryza sativa
  unsure (1)..(434): unsure at all n locations
agcttcaagctggcaattgttggctaatactcctgacatgaatccggacaggtacaaggatcgtgaaaagacatgcgaatggatgaaccgatgcagtgaaattctctctgctatactccagagtccagaatgtgatatgctgaactgatcagaatcagacctaggcctggtttaagtcgtgtttgggaaaagttcgggaagaagttgatagtttggaaaaaaaaagttaggagttatatgtgcgtacgaaagtcttggatgtgatgtgatgtaatggaaagttgggatttggagggaagtttggtgtccttaggctgngtttagatcctaactttggattcaaacttccaactttttatatcacatcaacctgtcatacacacacaaattttcagtcacatcgtaccaatttcaacccaaacttctaactttgg

SEQ ID NO: 3263 - DNA, 364 bp, Oryza sativa
  unsure (1)..(364): unsure at all n locations
tgcgagtggcagtctgtgcgctgngaatgacaatatatgaaatgaggtgttatggttagaaatatggcgcacgactcttaatatgatccaatgtgttacgatttgcatgatttgttacgtgcttatccgtcaaatagcatataaacattctcaaaacaaaaggatgatatactatntttatttatactttatccatctttaaataacgacattctccttcaattcgtttgtttcataatatatttatcaccaccacacttttattagcagaaatttaattttgaccctactctccgtagctatacttgtgaacataaatcaatctctaccatagagcagacttctaagtgctcttatatttgat

SEQ ID NO: 3264 - DNA, 394 bp, Oryza sativa
agtacaggccttcacagattcatcgtgtagtctatgaccgagatgcaatttttcttggaattggtagttatgggtctgttcttcagtgcaaaattggtgagaagactgttgctgtaaagaatcccaatatcagagacagccgcaaacctctgccaagcatgcgagagtttaatcaagaggcaagtataaagatatattctgcaatatatcttttatatttctactaatctaagttcatttatagtagctccatgcaaaataaaatgttcattccatagcaattgctgacaaaagttaacatggaggattacagctgtctctttgatccctcaatccattgaattcagatcaatgcaattgctattgtgagtttttgactgcgcaatacaattgc

SEQ ID NO: 3265 - DNA, 342 bp, Oryza sativa
  unsure (1)..(342): unsure at all n locations
cctgcagcatgcagctgaatgctagtatggttggtcggactttagtnttacttaacttgttgagctgctaaaagacctgtgccagaggggaacaatntaccgctgacgacatatgaagcacagcacgtattatgttctgtgggcctggaggtctgaagaaatcattcatgttcgaacgactgcattttgtattacaaggaatacgctgacttgaatgtctaccctatctgtggggcatcaagatacaaacgagcacagagtgaacgtgaaggaagtaagtcaaagaggggaggcccaccaaaggtggtgtagtatctcccaattgcggagcgcatgaagaga

SEQ ID NO: 3266 - DNA, 290 bp, Oryza sativa
  unsure (1)..(290): unsure at all n locations
agctgtaatcaatcaaaaatcaataattcaaatggattatgaaataagataactacaaaaagcctcataatagagaagatttataagaatcttcgtccaagcttcactggaattgggtttatatcttacaagatatgggcttctaaattttggaatctacattanatacgagaattacgaaaatttactgttgaagggcccacctgtcaatcttccttctttttctttcttttctctctcctctcacgtcttcttctctctttttcttctcttccagccgacaacagaga

SEQ ID NO: 3267 - DNA, 420 bp, Oryza sativa
  unsure (1)..(420): unsure at all n locations
agcttancaagagtgagttctggatgttctaagtctaattctcggcgcacgtgatatctgccanaggagacgctgtggatcccgaaacagtgaccgccgtcaccgattggaagcaacccaagacagtcactcaaattcgcagtttcttaggtttggcaggatactaccggaggttcatcgagaacttctccaaaatcgctcaacccatgacacagttgttgaagaaagaagagaaatatttgtggagcccgcaatgcgagaaggcgtttcaaactctcaaggaaaagctggtttcctctgcagtgttaatcttgccagatactcgcaaggatttcatggtgtactgtgatgcttcgcgccaaggattgaggtgcgtgctcatgcaggatggtcatgtggtagcctatgcctcacgtcagc

SEQ ID NO: 3268 - DNA, 461 bp, Oryza sativa
  unsure (1)..(461): unsure at all n locations
tctattcgattgttaagaagggtgacntcactttattgtacttatatgttgaatatagaattatatatactagtatttgttacagattctagagtcctaatttataaattataattaagctctataagtatatctatctattattatatactagaagtccattanacttcctacaaacgctctcaagccgccacgtggcgctctataatatagagaaaatcctagagattctaagaaaaaattaaaacatctacccgtcgatgttcacttaaattggtggggcaatattatacactggtagatgagantgatcttaacacacaccaaatactatggggtccatctctctccttcttccacgcatatgtacggtacgatacttccttncttttcttttcaattgtgtcttctttttttcatgtatataaggggaatatatatgattttagataatcgatcat

SEQ ID NO: 3269 - DNA, 382 bp, Oryza sativa
agctgatcctagcgacgacgagctcgttggcggctacctgctcctgcgcctccagggccagcccctcccgctcgaggcggatcccctgagcgcgcggccgcggaatcttgccgcggatcacggccgcggcgacgaggccttcttcttggcggaggcgcaagccaagaacgcgaacggaaagctgcagaggagcaccgacgaggggcaaagcatgtgcgtggacagcgggaggctccgcgtccctgatgacagtcgcggcggcggcggattggctttctcgcacttcttgccgctgacgcgcgcgatcgttccctctgcagcaccgtctccccgctgctgcacctccacgccgctgtccccgccgaagcttctcgcggatcac

SEQ ID NO: 3270 - DNA, 389 bp, Oryza sativa
  unsure (1)..(389): unsure at all n locations
gctgcaagcttcaaaatgctattatcttattattaatatcttaaaaaaatgcttcactgtttatactgatttcttcgcaggacagcactttatggatgctatcctgtggatggtagcgagggtggctaatctatatgccttccctttatgaacgaacctgaataacttagaaaggaagagctctcctccatttgaaagtgacaacaatcttgttaaatgctcttttgtttggatgatcaatgtcggcatctgagaaaactgcattgggatgcccaacaaaggaattctccttcgactactttatttctctactttttgatgctttgacgtccaggagtatccatcaattgacttcattattaatgatgcacgacatgactangtttttc

SEQ ID NO: 3271 - DNA, 314 bp, Oryza sativa
ctttcccatccctttattggtgtgctgtttgcagtctggctacatgcttatatcgccctcactacttctgccggtaccgcggatcatgattcatgatagaggcaaggagatagcatatgggagaaaatgttctgggattcttctaacagagagacttatcttggatgatcaatagacgaagacttgctgtcctcaagctcaaggccactagtatcactgtatcaggagtctgatacatgcagtgatgctgtagatggactctaagctagcagcagcgtagaagatggtgtagatacgtgcctatatgatttatg

SEQ ID NO: 3272 - DNA, 359 bp, Oryza sativa
  unsure (1)..(359): unsure at all n locations
naagcttcgtgcagcgggcgatgagttatgcttatcctcgtccgccattagccatagtattaaaacactggaacaacgtcttaaaattcgcttattcaatcggacaacccgaagcgtatcgttaacggaagcgggttctaatctctatgaacgattgcgcccagctntcgacgaaattcagatcatgttagatgagatgaatgattttcgtctgacaccgacaggaacgctcaaaatcaatgccgcccgggtagctgcacgtatatttttaatgtctttactggttggttcacacgtgaatatcctgatattaaagtcgagctcacaactgacgactttcttgtcgatatcgtccaaca

SEQ ID NO: 3273 - DNA, 423 bp, Oryza sativa
  unsure (1)..(423): unsure at all n locations
tcgacggtggtccgccttatgttcaaagtgattgcctttcttccgtcttggtggtntgtatcacggaatcgacgatgacccatgtacgcaaccttcctacagtgcttaagatacgtactttctgtttcatctatacagtgagtgcaagtcttagaccacttattagactgccccgataggttgctaggtgtaggccaatcgctgattggtacgaacagcagcgctcgtagggtaaactcctcatgtttgtcctcgtcccacacggtgacaccttctttttccacaacagtttcagatcttcgaccagtggtcttaggtacacatcgatgtctgtaccaggttgcttgtggccttgaataataatcngcatcattatgtactatctcttcatgcatagccagcggggagggtagagatacacat

SEQ ID NO: 3274 - DNA, 390 bp, Oryza sativa
  unsure (1)..(390): unsure at all n locations
agcttgcttacgccctagtgatggcttctttcaagctccaacactactntcagggccacaaagtcacggtgccatcgcagtatcttttgggcgaagagctccggggcaaggaaattactggccggctcaacaagtgggcagcggagttatctcccttcgacttgcattttgtcgcccgcactgccatcaagtcccaagtcctagctgacttcgtggccgaatggacaccgacattcgcccttgaaccctagcctgtcgaacaaccttgggtgatgtactccgacggctcatggtcacacaagggggcaggcgttgcggcagtgctcacttcgtcagggggcgtgtcgaataatacactgcaaggctaaagttcgacacatccaacaacac

SEQ ID NO: 3275 - DNA, 374 bp, Oryza sativa
actcagcttcgtccatgctcacccaagtcaagcgcacaggctctcaacatattctctattatttggtagactcgctcggtctggccatctgtttgtggatggtaagcagtgctgaatttatacgggttcccaattcttcttgtaatatctgccagaactatgaagtgaattggcttcctcgatcagacacgatcttcttaggtacaccatgtaaacacatgattcttgctagatagaggtctgctaatttcttccctgagtaggtagtgtgcaccggaatgaagtgagccactttggtgagtctgtcaacgactacctcaatagaatcatgccccgatgacgtcctgtgcaaaccggtgatgaaatccattccg

SEQ ID NO: 3276 - DNA, 424 bp, Oryza sativa
  unsure (1)..(424): unsure at all n locations
agcttcaagacacccncggactaaccggttccataaccctggactgttcagcctcctccaaaaaagtaaaggatcaaagccactaagtgcaatctcaacgcatatgctctagtgtagcctattgacacctcattgccaagttgccacccatcttatctttagtacaacaaactagaaaacaaattaatcaaacatttcgatcggcgataaaacctcgatagacaaatagactagctntaccgtcttccgtcattcgccttacactgtcaaattttaatccatggtgatcattcctgacatactcatcatgtgggcctaattcaaactatctcacgcaaataaaatggctagtggacaattagcgtgtgtctttaattaccacaatcaacgatacgggcgtatatacttangaggcacaacctaa

SEQ ID NO: 3277 - DNA, 399 bp, Oryza sativa
gatgagaatatactcgaacttcttctcataacgaaattagacggaaatcgtaagactattggtgaaaactcccttccttgaaatctggcctgtactacactcatataaaacccgaaaatgttgcactgaaaacaatatttaataatcccgagtcatacagaatatggcatgatagggtaggacatccaggtctatggatgatgagaagaatcatctcaacttcaaatggctataatttacgacctaacgatttcccaaaccaagaagattttgtttgcactgattgtgcaacatggaaattaatcgttagaccctctaatctaaaggtgaacgcagaatcaccagtattctttgcacaaatacagggagacatatgtggaccaattaatcccatgtccg

SEQ ID NO: 3278 - DNA, 385 bp, Oryza sativa
ttggactcttgaataacacgttgcacaagaaataaaagaaagttataaaatcaacttgctaaagtaatttattgctgcaagattatactgaacaacattcgtaagctcttgctggaaaatgagccattagtacagcaatagatgtacagtactaataacaggagctaatcaaattattaccaattccaaaccaggagctaatcaaattattaccaattatagcatcatttactacggtgatgtcacgcccggaatttctatccaaaattccacacgcttacatgtgtgtgaaccctcgtccaagagtcagccgaggcacacaataacaaattgatcataggagacaattattactctatttattgagcgtatacaatgtcattac

SEQ ID NO: 3279 - DNA, 405 bp, Oryza sativa
  unsure (1)..(405): unsure at all n locations
tgcgccgnggccaccggcggtagccatcctcgctgcgatgctacagcgatcatgcagtttgatgaagatgtggctccctgcctgctagaggggttcgagagtgaacangcgagttcataccacacacttgtctaattctggattatagtagatggctgtggccctattatctgtgattggccgtgcagcaaaggtcccaaatgatgaacttgttatgatgaacaaacccaatgttttatcgtgcttatgctaccttaaaaagatcaattaatgctttccacatagaatgcgcaatggcatttctcatatctatatatttagtttttggcccttactacatttgttgacttaagctccgatcgactgatanattgattgcttattgagtatttatattagcaatat

SEQ ID NO: 3280 - DNA, 419 bp, Oryza sativa
  unsure (1)..(419): unsure at all n locations
agcttataccatatttccattgtaanaaatataccttgagaagaaaatggactataaaccttgttaaacttgaacatccgatgtccatcctttccttgttaaatggagttgagatcaaaagctcaccattttcaccaatgtaatcaacagtggttgatgttttatcttgaccaggaagaaatggtcttacacgacaatacacccttatattacctaaaagaggcagatattgaaatggacatcaataggtgcattctgaagctataaaaaatttgagcagtaacaaaccttttagttcttgcacttcattgaacaacttctgattntcagcaagaactntgtggtagttttcagcagcatcaaccaaacactttaaaccagagcctgcaaaagttgaagcaacacaatgtttaaatata

SEQ ID NO: 3281 - DNA, 354 bp, Oryza sativa
  unsure (1)..(354): unsure at all n locations
tgagatgaattatgtaaatgaccaggcacaagaggtatgactatttgcattattcttctttatacatgttatagatcttatattacaatataaatattaatttgcagtcaatgttgaagtacaacgatgattatggcttcactgatttgcaaagatcagaaaatgatgtaatatataacaaataaaanaaatatttctgtaatgcatatgatatatatataataatttattggatgttctgtagtttgggcagcacaattttcaggtaaaagaagagccaacaaatgaaagtagtgatgattatgaaaagaacaatcatctgcaaacacagaaagagagatcaaacatgagatc

SEQ ID NO: 3282 - DNA, 434 bp, Oryza sativa
  unsure (1)..(434): unsure at all n locations
agctngcaagataagttgaaacagttggaaataaagtcacaaattctgtacttttgaacaacaggttccaaaagaaagaaaattataaattcaacatgctaaatttatttgattgcagcaagattaaataaaacaatattgtaaaacttttgctggtaattgagccattagtacagtaatagatgtacagtactaataacactggaataaattttgaatgagaaccaataaaaaaattatgaagtgcatgtgctattagtttggtttaattaaaagagaaggggaggagaacagttctacttttccaatatttttagagggcttctatggataaccatttggcataacctagggtcaagggggctctgataccaacttgtcacgcccggaatttctatccaaaattccaaacgcttacatgtgtgtgaaccctc

SEQ ID NO: 3283 - DNA, 196 bp, Oryza sativa
  unsure (1)..(196): unsure at all n locations
tcaacgacagganatagtctaacgtgttagggtttatggttagagtttttgggaggtgtgtggagatcgctaagcttacatgcatggccgtaggaggcagcggtgaacgcaaatgacgagtatggcactagagttgcaaggatggaggaggatgatgggccggagttggttatggttggcgggagggggtggatat

SEQ ID NO: 3284 - DNA, 345 bp, Oryza sativa
  unsure (1)..(345): unsure at all n locations
acctgcngcatgcaagcttgctctgccaattggtgatctatcttctcatctttctccttctctctggagtcaaaaccatcctgagcatccaccctccggggaatggcttcgtcccattgttctcctttatcttgacacgacgaggttgagcttgcactgcccacacctttgaaaatgagcttgcacacaacccctgtactctgcatcggcttcaccttattgatcttcctctcaaatggtttcagaggtgaacaacgcagctctgcggagaattggaaaggttgaaaacctgtggccagtttcctatcacactccttatctgagtggccaattaaaccacatatg

SEQ ID NO: 3285 - DNA, 306 bp, Oryza sativa
gctttcccgacccctgatacacatgagatcgtagtctcttcgcacttatcttacggcggctttgctcttccgaccttcaaatgtcttcggcggatcttgaattctatggaatcagcttgcatcacctaaatccgaattccatagtgcatatcgccaatttcagccatgtatgcgaagccttattgaggatcataccttactatgccatatatccgcggatctttatcctctagctccaaccagacaagaacaaaccttgcgtttcggcgtggaggattccactgagggaacttgaccaaaatattt

SEQ ID NO: 3286 - DNA, 407 bp, Oryza sativa
  unsure (1)..(407): unsure at all n locations
gcacctgcggcatgcaagcttgcttagttcagcttatagcacgttttattggtttgagtgggtgagtntagactctggagaagcacgcaatgtacactagcatagtatgtctacttcattcttatgagtaaaccatgcaatgtgtgttgtaggaacaaacgaccagagttcactgcatggttgtctgaagtcaagcaggtatatttggttaattattctatatatgtcctttgcagttaagacaacgctattgattgcccccaaaggaaccactatattatctttgtattgctctgctttaagtgaaaatattatatataggtgtaatgctgccaaacgaacatttgagccttattactttgtctcaagagaagaaaacaatatcataataatagatgaatactact

SEQ ID NO: 3287 - DNA, 393 bp, Oryza sativa
  unsure (1)..(393): unsure at all n locations
tatagntaagngcaagttaaaaacttaataaaanactgatggaatnttctttccagagaagaagatngaagctatagctactactgcatgcgtaccttgtctgcgagaggcatcctttcataaggggaatcacattcaaagtactgaaaacatggccctccattcattgacctcgggctgtcatacctcgctaatgatgttggtgcatactgaccattccagttatctgccgcactgcaccagccgtagttgttcgcatcatacaagttattgccgaccattatctcgctgtcaccacgctcagttcagacaaaaagaaccatgntaaactctcaaactcttcatgcatctgatggccaattatacacaaagaaactgacatatatatactta

SEQ ID NO: 3288 - DNA, 437 bp, Oryza sativa
  unsure (1)..(437): unsure at all n locations
agcttaaatntcatttcttgtcctatctggcataagacaattgttaactgtgaagtgtgtatagatgtttagccttgtggttaccatgtctcatcaaattntaatataacaggaatgggaattagagggtgcttattagtacatcagtttatgcagatggtcgaagtacccgaattcgaagacgatggacagaaggcaatgtgttcgttggactgaacgatttgtcattttcaagcctagggaatggcgagttagctggctatattcggcatcgacagcttgtcctgtggtctacacgattactcgtagcatctctctcccaacacagagtcacacgtctgattttttttttagaacagtcacacgtctgattgatccctattcaggagcagggagtagctatttttaagataatgaaatactgtttcattcatcat

SEQ ID NO: 3289 - DNA, 329 bp, Oryza sativa
  unsure (1)..(329): unsure at all n locations
gcttgcaaagctctgatgctatgtatttgagctccgttattgctgntgttttgtgggcggggagaaatctgcccttattcataatggccctactttttgctagactattcccgtctaatgggttctctcttttcttataacctgtgctattgttactttaattaacaaataaataacaggccttatgctggatattttttaaaaaataaggacaaagaaaccatctatccatgcatcaattttaagtaacaggccactaggtcaaagcacgacaactgattgctggaaaattgggataacgccccctgccccaattacaggtttgacgt

SEQ ID NO: 3290 - DNA, 438 bp, Oryza sativa
  unsure (1)..(438): unsure at all n locations
ctgcagcttataaaagagtgttntctcttaaggatgatacaccatcatcctggtgcatcttaatataagcatgacatacatatttttcttgaaagtttcacctttactatgcaaaatggaactgtaatgttggctaatatttacagattgtgtccaactcatctgaagtgctgacaagttattgcttaccatcgtctcattgtcaataccaaatccgaggtaaccaggattttcaacttacttcacttgaatatattttgtgcagtaagtgatagaacaataacaaccttcacatgaaccttttcattctaaatggtgattatattggacataatttcttcttgtgctatcctttgtgacgtgattaatcaagtagatgatgttatttatggtgtgataaataagagtgacatatatgcacgttaaaataatntatta

SEQ ID NO: 3291 - DNA, 356 bp, Oryza sativa
  unsure (1)..(356): unsure at all n locations
ntntactntggttattntgagaaccatcggctggtggttaatatctgtttgcatccaacggatctaattntcccatgacgtggcacatctaggtgatgaacaactttagttntttcattactttagatatctcttcaattttgcatcaaatttgaattctattcgaaccattattttctatttgaaatgtacaacaaaacgagtccaatattgattatattcggacatcgtgtgatatttgaatatttctgggcccacacgtcatagacacatctctaatgtaattagtaaaattgngttgcaaataatattcacgtataaaattaaatgcccaacaatttatttatttttctatg

SEQ ID NO: 3292 - DNA, 291 bp, Oryza sativa
  unsure (1)..(291): unsure at all n locations
acgtgtaccaatgatagtacattcccctgcgaggaatataaaggcatctcaaatatgcccggaagttaaccttagaattgaagaagtngactttctagtcaaaccgagagtcctagactcacaaagcttggacatcatcctagggatggattgcgtggctaagcacaaaggacagatacattgtgccgaaaggtccattaccttgcaaggacctggaggaaagcaagtctgttctaccacttacacccctactcgaagtaggtctatcctaacctatatataagtcacctc

SEQ ID NO: 3293 - DNA, 408 bp, Oryza sativa
gctctaaaaccagactcgattagttgtgatcatcaacagattaggctatatcgaacagcttctgagtatttgtactaaacctcgcgcattgaattgtgaaacatatcgatggttgagtttattattctgatgggatatgcagcagaagaaccaactgcaggataagataaggaagcaacttcgggaagttcaattatcaccatcttcatacgacacggcatgggtagccatggtgccagtgcatggctctcatcaaactacacgctctccgcaatgtatcgagtggatactgcaaaaccaacatgatgatggatcttgtggcacaaacctgcctaggtccgttgtcaacacagacattcttttgtgacatatgcatgtgttgttgctctgaacagatggaatactgga

SEQ ID NO: 3294 - DNA, 235 bp, Oryza sativa
aacccagctggcgcgggctgagaaagggagagaaccgcggaccgttttttaaagtattctactgaccgccgctggaaacaccgtccgacagatccgccgctggaaacaccgctgccgcacctcaccggattcgcaacgtgagccgtgatgccaccccaccgccggacggacccggggaacggctgacgccatcgcgccgactcctttgctgcggcatgggagaaacaagagaagc

SEQ ID NO: 3295 - DNA, 400 bp, Oryza sativa
  unsure (1)..(400): unsure at all n locations
agctntgttcgattagtcttttttttttgtttaaagcaaaanaacaaacttctaaaaaacaaacaacacaaaacgagcactataccgaagaacaaaaaaccactacttcaactcaatttatgttgggttggtagctcaagtgccccctacccccctcgcattctttcatatgatattgcattgtgttcttatgtttttatggaagaaactggtagtgttggattaatattatcatttcagcaagttgaatgtctacatagtgccaaaattgtattcactcgaaacttcatttaacaattactccctctgttcctctatatatggcagctatgagtngtgcatgcttcccaacgtagagaaactgcaataccaggaaaaaatctacggaaaatgatagata

SEQ ID NO: 3296 - DNA, 472 bp, Oryza sativa
catgtaacttgtctattaagggtttttatctctatggagggaatactgtgaactacgcgtattggaagctaaagtgttttatccaacaggaggatgccttattatataatggtatatagatggacaatctgtgttttttatatcaactacgaggttacacaaatcgttttaactaggtgattcaccgcgctttgctgcgtgagacactaagcaattcttagtatattttcttcgacaatcaaattaggagtaaaaagagaacaacgtgaaacatcatggtttatgagtacttatcatgaatcaaacaaacgatacacgagtttaatgtgaacatattgataatatatgttcatattatagaatgatatatcatttgtaaagatttggcaatgatgtaaggatgaaattaatatgcttcatgtgattcgacaataataaatatatatatatgctcctcgctgaataaatgaat

SEQ ID NO: 3297 - DNA, 366 bp, Oryza sativa
  unsure (1)..(366): unsure at all n locations
agctngactgtcctgggaggcttacgctctaacttgtcgaccaattcttcgtggcgaatccctctggtgaatgcggcgatgataacatcgtcggtgatgtcggagatcttgttacgttgttcaaaaaatcgccggatgtaatctcgaagggattctccggacttctgaacaacgttgtagagatcgaattgtgtgccgggacgctctaaggtgccttggaagttggcgatgaagtggtcgcgtaattcggcccaagatccaattgtaccacggtgcaatccatggagcccagatcgggcggaatacgcttaagccactggtaaatagatcgccatggccttgctgtctccttctgttgtgcggatt

SEQ ID NO: 3298 - DNA, 485 bp, Oryza sativa
  unsure (1)..(485): unsure at all n locations
agcttataagaccaatcaagcatctctaaaagagacttccgacctgctacctctaatcgtcttctccttagtgacgggntgcgactatggtgcattaccgaggcacgaacggatacagaacaagatntaatgagaaactcatctctntcttacttattcagtcctcctactcttctctttctctctattctttctctttcatctctccttctatcaatggtaatccagcgaggtangaaggactcgagtcccccgcacccacgctggatccgccctgcgaggcaccaactatatgcatgaagcacgtattatacatatatggtggaccatcatgtggagggcagntagaggctggcttgggtgacatagtgggccgattggccatccttatgcagtctgcactcttgtctctgtagtgattacgtagatgatgtgacttacatggtcgataactcatgagtgatcgatagtggttgacaatatca

SEQ ID NO: 3299 - DNA, 396 bp, Oryza sativa
  unsure (1)..(396): unsure at all n locations
gacccgcgatcctcttagtcacctgcngcatgcaagcttgtcgtatgccaagttctcttatctttacagttaccaggctagtctggtataggcaccctttgtagtattgtatggacggaggtgtcttactctactcttctgggatcagacaggggaatgccacgaatttggtacagaagttttaaatgatgcataacagaaagtccgagctgtctaggaaagattgagaatcgtgcaatcttgacagaaaagctatgcagacaaccgccgaagggagctcgctttctaagcaagggatttatgtgtatctccgtgtcactccgctcataggattacaccactttcaaaccacaggaaagttgcgtccacgctctcggggaccatataggatttcaa

SEQ ID NO: 3300 - DNA, 332 bp, Oryza sativa
  unsure (1)..(332): unsure at all n locations
tgattactgtgaacntatttaatatgggattgtatctttatcttgcgtatagaccttcatccctttgttggtctagtggcggtcggtcacgcttaacggcggccagtccggtgttagccttctcctgtgcttgtgtgttggcgatgtctgcatgtgggtggtggtatagattttttctttttcctgggtacgaacctccagggttgtaatctcgtaatttttccttctctatcaatcgaacttcgcaccgtcttgtgcgaagtcgtcaaaaaaaaaaccttcatcctatccaattgaatattgtaagtcgttcaaagttgacatagtggcaa

SEQ ID NO: 3301 - DNA, 282 bp, Oryza sativa
agacctcaaacagccatactggctggaggcgaaccttgcgagcagacgaagcagaacccggactcgacgagaacagacagcacttaaacacctgagacacaagagcactggaacttgggaactaacgacaaaacgacatgcacaatagagccaaaaacgtcaaaaaagggacgacaagacccaagaccacaaacaatagaaggaaacaccacaagctgcacagcctcaacaacaagaactggaacccaggtgcacctgcagaaataaaaaaaaactgccgca

SEQ ID NO: 3302 - DNA, 408 bp, Oryza sativa
  unsure (1)..(408): unsure at all n locations
gcttgcgataagatagaatcaaatgtgtgacttcgctcggaaaaaaagaactcatgtgagacaacacaggttaaactgataccgctaatctccttggtgtcccataagagcgtactttcccatggctcagtcttcgtttctccaatatttgaattaaagatttctccagctggaggatgtcaaagattcaaaggtgaaaaaagcaaaagtcattccacctagaattgaagtataaattccataaaaaaacaaatatgaccaaaaggtgacatcattttgccaatgttatgttcaaaattcttctcatcttataagggtgaaggaggaagtttggtttacctgtttggntgcttctatcacatcatgaggtggcaactcttctgttcctatttcaagaacaaatgctcg

SEQ ID NO: 3303 - DNA, 347 bp, Oryza sativa
  unsure (1)..(347): unsure at all n locations
gaaaggaatgtattgttgaccganggntcatattatctttcttggatagttcaaactaaaannctggattgtgctagacaagcttgataaggaatgcactgttgaccgatgatttcgaaaggagtntgtgctctgtaggctacagtagtttgatatacttctgccagctttttattggaccacgtggtgcacgtaatttttcgatgtgggaggaacatacgtgctcttgatccgtctggatagatctgtacgtcttgatccgtctggatagatccgtacgtcacgctgctgaataagggaataaggatgaagcaatacgggttcacacacaagctggcatctagctg

SEQ ID NO: 3304 - DNA, 271 bp, Oryza sativa
gacttgactgtctctagacgcggcgctcttagaaagatgtttgagctcacaacgtagtgctggcactttatatcagccttgtttgactgacgtcaatcggcatatagctcgcactgctgcggctatcagcgtaagcgacgtacacttatatgatcttaaaacaccgaaagaaggaaatcgtcattgcgggcttgaggacgacaatacacgacgaagctatcgcgacacattgaggagctagggaaatagtcacgacgctttttaaactgga

SEQ ID NO: 3305 - DNA, 305 bp, Oryza sativa
catgatacctgcaattgcagcagtatatattacagacacctttaggtcttaccaatggaaatggcgtttgcaagttgcaaaccgcaatgacagagcgacaaaatgcctaccactacatgaacaagaggagatgatatcttgttatgtgcggacttgcatttgtgtgtgtctaacataaggaacgcaaagagcgcacagaacaagctcacacagagcttccccagaaagaggatgacatctccaatgacgttaacctgtccaatgcgcagtatgttatttatgatcaaaccagttgcaagaacaga

SEQ ID NO: 3306 - DNA, 424 bp, Oryza sativa
cagagtcacctgcggcatgcaagcttccatcgtttttgtccagtgaagctcattccctcttgaaaggagtaagtttcttaatgcattcgatcacagtatcaaattcctatgttgtgtttcttatctgaaaaagatggcaatccgttgtccatttcagctgctccacaaagaaggtggcaagcggctaggaagcggtccgggcggcagcgatgagataaagaggcacaaatggctcaaaccgatcaactggaggaagctggaggcccggcagatccagccgagcttccgacccaacgtgagcgggctcacctgcatcgccaacttcgacgagtgctggaccagcatgccggtgctggactcgccggtggccacccctgtcgccggcggcgccggccacagcagcttcgccgggttcacctacgtc

SEQ ID NO: 3307 - DNA, 499 bp, Oryza sativa
  unsure (1)..(499): unsure at all n locations
cttcaataatcttgtntatctcaatataaccattattatgttaagctatatacatcgttctaatagagaatattccattctgatgataattctatctagagctatcagaggattgattcaattgaatatgtacaatataagcacacaattcatgccaatatgcaagagtctgaccaactaatgatctcctaaaggaaacattgagtggaacagatctcataacattagcaatagtagaacttttccttcggacaatagagtataaagatggatatttgtctttaaaagccaagtttcctagccatttatctttccagaaacttatttgttttccattatttataatccaagaacccatatctagggatctttgacctttatgagacctgacaaaaatgagaatcgccttgttcttataacttgcgcataactataaattattcatttacaagttctaatgataagctgtggtctcttcctctccataagtctaacatgg

SEQ ID NO: 3308 - DNA, 295 bp, Oryza sativa
atccaaaaccctggtgtcctctatatgataccccttattacaagaaaagataatatcatgagaatgcacaagtggtgtatggtgagcacggtgcaattcctcgactacgcccccaaagagtttgatagtgcataagggtattttaaggctggcatttggttgctatagatcggcgtgcactctaaaatgttagtataatgtaccatctgttctatacacacaattagctaaatcacagattaacaaacattatctgggcccacaactgttgtatggcactctgtgtcaaaaagac

SEQ ID NO: 3309 - DNA, 366 bp, Oryza sativa
tgtgcctaatgatgctcttcttcattgctgtatcaacatgatgatggttgtggagaccatgctttctcctgaaacagccaatagtgacgacattgagaagatgtcaaagaatgccatggacgcgtggaaggaattcaagaccaagtatgagcatgccaaggggtcaactgaatccagcacctgactgaccagtattatgcttgctgtcagacaaatctttcttgtgagtgctgacaactcttgtgatgaatctgtcttacccacttagttgcttgtgaagtttgccccaatctttgtgacgtaaatggtctcgattctcattatgcatacctattatacaacctacaattattaccaacatatcta

SEQ ID NO: 3310 - DNA, 432 bp, Oryza sativa
  unsure (1)..(432): unsure at all n locations
tctgagtcacctgacgcatgcangcttgccaactgatgtgaatgtgatcattcattatgntgtatatctcatgaacacaccatccaacttgtgttagtactttgtatatacttgatgctagcatttgcatgagtaccgaagtctattccagcatgacaaggtgtagatcattaggcttacattatcaaaattaacgctattcaaacggtcattttaaatttgaaaataagtcctaacgtatgccatatagaagtaggagtatgtatcttatatatcagttgaattttcagactacgaactagtacaaaagtatttgctattgttatagccatacatagaatctgcttggtagagctccaacccctaaatgtagctcaggagttacgttatagtgaagttgttaatggctaaacccaactctctagttatttt

SEQ ID NO: 3311 - DNA, 345 bp, Oryza sativa
  unsure (1)..(345): unsure at all n locations
tcagcncgcacagctagctcacacacagcaatataacttgctaagccaacaacttatatcggcaccttattttgtatgcgacgtccaggatactagctacttatgtatacaacagaaccgtattgtacctgcgggcttctggagaatatccaatgaggtaataagatattgattgccaacataatgccgcaactaaagaggctggaatctttatgataaaagcaggtattgcataagcccatccaggatataagtagtgatctctgtgtatgtataagactggaagtctgctaattgacatgaccagctcatggattccattgaccatcaacacgatgagtgcat

SEQ ID NO: 3312 - DNA, 377 bp, Oryza sativa
  unsure (1)..(377): unsure at all n locations
aactcagcttacgctatctgaacaccgatctgctcggangcttctgagtttttactctactagcttnnggatgcctttgccacgctaaanaactgcagattacggcgcgtccaatcgaaattcgccaggtaatgtgaaccgcgctatggtcgcttcttgtgcgtgtgtgaggtgtccgaagtactaagagctngcaaagtcagttaactgcttctgtactagcggcaaatgtccaatttgccaattcgattgtgtttgtccagaataggttgctaacaatttccggtgactctatccggcagaaacaatttactggtaattctctgaagtttctgaagtctgaaccatctcttttctgacggggacactctctgttc

SEQ ID NO: 3313 - DNA, 363 bp, Oryza sativa
  unsure (1)..(363): unsure at all n locations
acctgctgcatgccagcttcaccttacgagcgcttaaatatgctctntcattccatattgacgcccaaactctactacaataaagttagatatctgatgaccacttttagaaacggctcctttaacattcggattttacgattaataactctccctacccataacaaattcaggtgccatttgtggtgtctaatgatcccatgaatatattatgagaaaatgtactctatgcaaagaatctaaagttatatgcaaagaagtccaattccagtatttaaactggtaaaacgtattctaaagagcttaaagaaagaaatatgagagatatatgtctggatctatctccggtatgaatggtatgac

SEQ ID NO: 3314 - DNA, 320 bp, Oryza sativa
  unsure (1)..(320): unsure at all n locations
tcacatatgcanggnngaggacaccggaaacaaatattgattacatttttgctgcaccaaaaagagaacactngagtgacatatagcttgccccatgcaacttagaacttatggtgcattcaaatatgcttatgaactgagctctttagcctcacgctaaacataccaagttatgaccgtataattaattaattaattaagtattaactaatataaatgaaagataaaattatccgacttctattattacaatatgtatatataatacttacacaatgtagtttaggaaatcgtactcacggatacgagttagctattaa

SEQ ID NO: 3315 - DNA, 417 bp, Oryza sativa
  unsure (1)..(417): unsure at all n locations
gcacctgcggcatgcangcttatctcctacgcttcaggaatggatcattcagaacatcaccatcggcttgcgttcgtctgccgccggctggtgtctccgcctgcacggctggccaattatgccgcccgttgttgggcgttacagttttaacgacccggcgcctcgtttgcacgcgactggtgtctacccctgcacggctggcctattatgcccgccgttgttgggcgtctacatttataccgaccggccaactcgtctggcaccgactggtgttctcccctgcacggattgcctattatgccgccgtatgatgggcgtttacgtctataccgaccggaccgctcgtatgctgcgactggtgtcttcgctgcacgctggcctattatgctgcgtctgttggcgtatacatattaacta

SEQ ID NO: 3316 - DNA, 339 bp, Oryza sativa
  unsure (1)..(339): unsure at all n locations
gctgcagctgtgtctactgatacagcacctttacttggtttatacgctcacaactttcacttgcgaacggtgataaatgggcaagattataaagtgcttcatggcttaagcattgctgatgatcaacttctctgttcagatttatgtggatgatatcactccttggtatgtaaactctcgctttggttgggcagtttgctgatactatgcacagggaattngaaatgagcctgaggtgtgatgtatcgtactttttgggatggcaaatcacgcatataacctaacgcacatttgtgcatcaaatgaatactccaagggacttttagacggtcaagctgg

SEQ ID NO: 3317 - DNA, 251 bp, Oryza sativa
  unsure (1)..(251): unsure at all n locations
gctttacttttgatcaaaagaccaatcaatgaaggcgcttttcaacccatatcacatcctcttcccttacactggacgcctgtctatnagagaagggcttcccatttttaacccaataaatggtgaggaaggaggttcctttgggggacccccggaagagatcagtgagacgggtgggctgactcaaggataacacgggtacaccacgggcggggtcaatcctctcgcacagcttcaagggagggcttact

SEQ ID NO: 3318 - DNA, 442 bp, Oryza sativa
  unsure (1)..(442): unsure at all n locations
tagtgaccttagaaactaagcttntatcattctggcatcgagctatnttgccgcaggacctcccctacagtatcgtcaccgcagtagagattaaccaccacattcgggatggattggtgtggttcctctacgcctaggacaccagaatatcgaaccatgaacgaggaaaggcatgagagaaatattggctagtaattgtgaagccccaattcttgactggaagggacaccaaaggcctctgccctccctctctatctatccaagagatggaagggcagagctttcttctggttntttcatcttttcatcaaagagttgaacaatgaagatagatggcgagtgcctgatcgattngatcaagtcgtgtaggaacaaggttcacatcgttcgttcgttaggatgcctcagctggatacatcactgcacttccacttgacaccta

SEQ ID NO: 3319 - DNA, 434 bp, Oryza sativa
  unsure (1)..(434): unsure at all n locations
agcttctggtatactcctaaaataacttcatatgggtattttacaggattgacttcagatatatgaggaaccaagccaggtcgatcaatctcctgaaaaatgagacatacaagatctataaatagaactccttaataaagcccagaggcctagctcagcatgatgcagtaatttgcatttgaaaaaaaatcataaagcttctgtaaatagaatacagatgaggatgaaatattccacccaggtgaccaagatacccttgtacaaattgttttttgccagataggataccatgaattcaagtcggatttccgacacccattctgtattttgaggtagatttcatatgtctaattttttttacattggacatgaaactgactnggattccaacacgtgtgtctgcatctaggtaaactcgttaatcaacatacact

SEQ ID NO: 3320 - DNA, 334 bp, Oryza sativa
  unsure (1)..(334): unsure at all n locations
ttaagtctaatagaggaaattcttccacaatgtatagtgcaccctttatatgttatcttgaattaactgcataagcaaanatgatgcagtgagtatctttcttttatctgtatggattaggtaatgacacaatttgcaaatccaactaggattgcattatgttctttctgtttagcttatgccctccagtaaaagaatccctgaatcttattagtttagttgtctgttttttgtacgttattctcagaataagaagagaaacacatgcttctacacaccctcctaatttgcatgctctatagaagtgaactatgaagttgatgtagttcgctgg

SEQ ID NO: 3321 - DNA, 287 bp, Oryza sativa
  unsure (1)..(287): unsure at all n locations
tgcaagctgcttgagaggggtatcgaaccgactatccgattaatggccggatcgatcgaagntctggtactatgctcacggcggaacgatcaacccacgtgatggctccttggtcttcatggatcagatacgcgaggctgcgcgtcaactaacggacgcagtggaagcctatattcatggcacgttccgacccgacagagagaaggaccaactgtcactcgccctgcagactccagagcattcatgacgaacatgagggaaaggggtgattccttacaagaatggat

SEQ ID NO: 3322 - DNA, 349 bp, Oryza sativa
  unsure (1)..(349): unsure at all n locations
tgatatgatgcagttctttatggacttanggcttaattcatactccgtaatatagttcatagtttcatatagtaccagttggttccgtaatgtgaagaccacaataccacatgataatgtttgaatactaccggagtgccgcacaacgagaggaagacaaatagaaaactattgactttagctgactcttctgatatagaaaataacgaaccgaactctgaaaataaaaagaacgaacaaaactgacattcctgatataagatattcagcaaactagggcgaggggaggttcatcgtgtaagaatatacctgcgggagacaaactagttagggagggtctatctgacgt

SEQ ID NO: 3323 - DNA, 357 bp, Oryza sativa
  unsure (1)..(357): unsure at all n locations
gaagaattaatctanaccctctctctctgacgtttcttctgttctacggngtgcccttctgcctgtgcacttctttcttactttgatcaatcttaatgtcgccgtgcctcgctgccatggggactgcggcctatggcgccagtcaaccacaactacaacctccgatcactgtcagggcatgcagatatgttctgaattgttttatagtagctgatatatgactagattctattgttacggcntacagtaaatttatatacatatattctaccactttgatgctagatactgcacaatacctattattgtttttagttagactacatggctgtaaataatacgtgaatttagtatgga

SEQ ID NO: 3324 - DNA, 425 bp, Oryza sativa
  unsure (1)..(425): unsure at all n locations
ctcagctaacactagtgcctgtgactgagagagagagagagagagagnattggtttatttgacatcttttcagtccaaacatcttttaaaaagaaagtacgagcgtgttagaaattaaacataaaatcttatagttgaaaccacacactctttgtcattgcactaccaagtgcatcttgtgactgtgatcaaacacacaacagggaatgtcacataaaacattatcacattcgatcagtcttcagaaaaaaaagtttaaaaaataagaggaaattcctacnttttaaaagggcccatcgaatatatatattcttataaaatatagacaccgttgtgtttcacggggattcgatggtttgccactcttataggatgagtatggtccacatgtattgacttaaaggatcatacatgacattgtcatg

SEQ ID NO: 3325 - DNA, 381 bp, Oryza sativa
agctttgcagaacaaagtgtcttgcatctcttgtatattattactacataaactcggaattgagacagaaatatatgggttaaagcctcacatgctaaccgtatacttgttactacacataagtagaagcgttactacataataggtgcatgttaccacttccaagtagatatgttactgcatgaaaatgcagtgtactatgtcattttacgagcgaagttcaaagggggcatagtaagttgtagtgctttagcaacgctgataatgtagagtgtttgaaaatttatacttagtaaacctgtactgatgatatacccctgtactgtaatacacatttgtactgatgtgaggggtaagtccaatgtcatcttgaaagaatat

SEQ ID NO: 3326 - DNA, 365 bp, Oryza sativa
  unsure (1)..(365): unsure at all n locations
tagtaaaatatttatggnttagccttacattctggtaggccggngtgtatgatgntcggataactcagaggaacttcctatntaccccgacatggtagtgtatgtgactaaatctgtccaatacaacggtattgtgccacgtgggtgggttcccgttgtgtccgccaccacggcgtttagtataatgcgtgggcccgccacttaacggttctaggtcatataacgtgtatggcttatgatggagtaacacgtatcgtgctggtgtaggctaaatcatgaatcttggaaaagctntgttgcgtgtaataaatcgggtacttatgtatcgcgtgccatgctcttgcatgagtattatattccatcat

SEQ ID NO: 3327 - DNA, 428 bp, Oryza sativa
acccggaccctagcgactgagctgcagctgcaggtctggattgacctgtgtgttgtacacgcgtgaggcattcagttcttcttggttatcttttctcatccatgatgcgcttctggaagtctgaaaccattcgtggcatgccttgtttcactgagagttttggctcccaatggataagaaatttggccttcgatatgtcaggttttcttatgtgtggatcacctgccacattgggtttgaactcaacacaagcacttgtgtcaattgtctcttttactacctaccgaagtagcaggcccatgattgtcttgtgatagttttatgccccggcatgaactctaatcattgttcttctacgattgcaggatagctggatttaattattaggcctgaccttggcagctttacttggatatattcaggattct

SEQ ID NO: 3328 - DNA, 313 bp, Oryza sativa
agcttgctgcaacatcaccggagacaaatttccaacagaagcaagcaagaagcatctcactgattcaccatcattcgtcgccaatcaatccccaaatcatggccgcccaagcccagggattcaattcacctatgcaacaaatataacagtagacagagaaagcaaattgattaagcacagatcaaacaaatgaaataactgagaacaagtattatgcaaataaatcaagatggagcagctagctatgtacatggtccgatgcatgcaccgtatatatacctgaggacggagcccctgggcagcttctttctgt

SEQ ID NO: 3329 - DNA, 446 bp, Oryza sativa
  unsure (1)..(446): unsure at all n locations
cagctnctntaatgctgcgagttctgatggaaggggaaatcctatactctaactctttaaaatgtttttatatttatcgccataaatgtaaagggtacaatgtgttgaacgttgtgcatgaaacatacaaacaaagtatctgttccaaaatgtaataacgtaaagtttccagtgctgactaataacgccaacaaaaaagattatattgtgccagtatgtgtaggcccaccaactctcgagcacgcctgagttattcatgtactctctcgtgactggttgttatagaaacccactcataacaccttaatcctcgcgttaaatcatgtgtccctcacctcattaatcatatgaggaaaaatggtggatatgataaattctttgaacactaattttggttccagtaattctttacttaacttcatgggtacaaataatatggtaagcta

SEQ ID NO: 3330 - DNA, 329 bp, Oryza sativa
agcttggcatacaattgatgtttctgcatctatcccaacaccagacggagatggtgctgatggtcttcctctgattgggagtatatcagaatgccatctatgaaaaccacaacaaacttatccaagtattccatgaacactctgttcatttagatcatgaagaaggcacgtgcatttggtagaccgaacgacatcaccgtgaattcatacaacccgtatcgcgtggtgaacgccgtcttaaggatatctttctcaccgatacgtaattggggatatcccgaaccaacatccatcttggagaatatagtggcacctttaacttgatcgaa

SEQ ID NO: 3331 - DNA, 374 bp, Oryza sativa
  unsure (1)..(374): unsure at all n locations
tgcaactaacaacatcaaatttgtgcattatatatatatatggatgctttgtatgaactcacaccttctatacctaagtgcagtacagatagctttatagaacctccatgatgatcactttatatattgtaatactactaattaaactctgatcgatacacatggaacacgggagataactcaccgtgtcattattcttcgggattggaagttttcaggtgacttaaattgctaggaattttagttagcctcaacctcacaattcccaataggggccaggtagaagaggtagcttacatgcgatggtgacaatggcagttntctacagcaatgatgacaccccatctncagtggagatatatatatatatatat

SEQ ID NO: 3332 - DNA, 445 bp, Oryza sativa
  unsure (1)..(445): unsure at all n locations
tgangcatgcacagctttgtgtaactgacatgtctaatatgttctatgttttgtatagatttgaattagcaatttcctctttggtttgcattttggttgatgcttttcactcagcttaaagggtctaaaatgttggagggcatggggttttctgtggttaacccatctttgtagtgcttatatggcataattggcagcttatgttggtaaagagttaccccctctggtcacaaaaacttcttgttttaagcattgacatcggctttgaaaggaaacattgactacttatccctctgttccaaaatataaacatttcttgttcagatacatatccagacatttctatattttgggaccgagggagtgtattacaatatttataaaaactcaacaatattntaacctcttgagaacattttccataacaaacttacacatgactttt

SEQ ID NO: 3333 - DNA, 441 bp, Oryza sativa
caagctttgacaggtaaaaacgtgataaggtttggtcgccctaatggaatcaagaacccagaaccccttgaataccattcgtaaacatctaatattgtaaaagagatgtttttagtctaacaagatcgcttatcgaacgcgaaatttacggtgattcctgaccggcattgtttgaagccatggattccgctttcttcctttttttgcctaatcctgagtcggctcttgtatgctctaggggtgtacggtgagtttgataatgtggagagatcgtcactcacaccgtcacacgtacgttcacggtgtgtagcagcgtacaccctccgtaccaacaaaaaaaaaatccttttgtccatatcaatctccaaaagttctttctctaagcggagggtgtaagtgagtgtgatcgtacctgtgagtgaatggatgcagttcgtaaaa

SEQ ID NO: 3334 - DNA, 367 bp, Oryza sativa
  unsure (1)..(367): unsure at all n locations
agcaaacaaccaaacgtgccctaatatctaaaaatggtttataatatgagaatggcaagtcatttggtacaaaacttgagtcctagaacgaatgttatatagacagatagaacaattctttctataaataattaatcattattattttgatacacttatctttatatagggcagatgaagcactataacaatatnaatcccctgccacaattgatgcgcctctcgtaatcatgctactggtttgttcaggcaatctcaggatcaatgggacctgctcttaggaatgctccacacatctgacgagatatggagaagactcacctcattccacttgttacttagaactgcgagcatcatcatatttcct

SEQ ID NO: 3335 - DNA, 438 bp, Oryza sativa
  unsure (1)..(438): unsure at all n locations
agctngtataaattatgtcacgcaatgtgctatgtctntacctgctttatcactccatattggatatttattccttgaacaaacaaaaccattatcccatatatcttagtagataattgggtgccagactatatatatatatatattgctaaatgcattgtcaaaataaaaatatttcattgatggttgctagcatcactgaaccgatggaaaaaccacccaaggttatttgcatagggatgagaccatacatgtagaggtcttataattacaggatgtaagagtaagcacactctttctattctttcccgcgcttttgttgtatttgaaattgtggaacggtttttttgtcgctttcgatggaggttgtcaatctattntagtatagtttaaggatatcacacacaccaccttataatataggttactttccaatat

SEQ ID NO: 3336 - DNA, 328 bp, Oryza sativa
actcagctgctggggggatgacaccatgagcaagaatgggcgtggttggccacataggagggagatggttacagattatatcatgcatgaatgtaaaatgcttcactagttagtgaacaaacagacgattgacaaatagctagcccctacaaatagatattgcttactttgagttttaagaccgcgactaatcagttacatgaccttacatgtcgtgtaaattgtacaccttatatgtgaagacaatgttaacagctaaatctggtaagattctttagtggatcacgttaacgaaagagcacaatcaatcgattgaaacttatccaga

SEQ ID NO: 3337 - DNA, 315 bp, Oryza sativa
  unsure (1)..(315): unsure at all n locations
agcttgacgtgtataggcactgaatttttatctgttngctgatcctattccttgggtcaattatgtgtttcatcatccgatttgatgatggtctcactgctattgtgttgctcgcttgttttctgagttggggttaatcggggattgttgctgctgcaatttgtattccggcgatgttgtcgggtgtgaggacccgccggtgccccgtaccctccgtggggacggggacggtggagaacctgcccccaattgccgtgattgggagggtgactggccattcccttcaatgccgttgcaggaccggggggtgaaacc

SEQ ID NO: 3338 - DNA, 322 bp, Oryza sativa
  unsure (1)..(322): unsure at all n locations
ctcagcttactggagtgagtgcaacctttgttataaacaagctgcaactttcctgttttanattgtgatatactttgctatcgccgcctactgtatgaatctaatggagaggcgctctgtcgaccgtctgctagcgaatggccactgctgtgatggacagccagttctgcagcctcgtcaaggtgtctgcggcggtgagggcggcaatgttctacgcccgcctcgcctgctgaagcctttgtcccggcgctccctcgctcgccgcgcttcttcccgtagtcacgctcttctgcgtggtccacttctccttctacaccaccac

SEQ ID NO: 3339 - DNA, 278 bp, Oryza sativa
tatctggagtgagatctatgagacagtgtgtgagccacagaggggttgtatctatgctccttatatcatgaagatgattgaggccaagactgggattcgttatttcaaggacaatcaatacaagcctctccgtccacatgctcccactacttcagctactcctaccaccagagtgacaagtgctgtcacctcagctgctccttctttctctgctgcacctcagcgttctgagtcttcttctcccataaagaaagctctcaaggctatctcttgcatgt

SEQ ID NO: 3340 - DNA, 423 bp, Oryza sativa
  unsure (1)..(423): unsure at all n locations
atcacattagtacacttatcaatttattatcatgcattgaataatgctnccatggctatgctgggtaacagaacggagagagtacaacataactacatgaaatttcgatagatgctttgctactagtctaatgaatggcatactaccttgcaacctagtttaaatgggcgtgtggtttgcatcttataaactaagagtatcgcgtgcatatgtctaagctctttaaaccgtataattgttgcataatctttctaaataacttatcaacttncttatctaatctaccatctacaaattagtatactgctatgatacgtccacttaatcttgtagctcctatgtaattttgtacaaggtgctatatattatctaacaatatgtcgtttgggaaaactgaacaattatgttagccctttattacta

SEQ ID NO: 3341 - DNA, 415 bp, Oryza sativa
agcactgagctgcagctgcagtcggcccttagtcttgttttatgacaccaggtccttgctgcctcggaagttgtcctcgtcggctcgtgattcttgtcgaaaagacaagaactggccgcgttagaatccttctcgggcgcagacgttgtcgacgttccgttcttcgctcttgcgggaggatcctccgacatggagtcgaccggggtcgtatccacgtcgttctcactcccggtgattactgggccagtcgagatcagcatcatggtgtagaccgggaagacgatttcgccgacttgagtccacaccagcatcgttgaagttgaagctctttggttgatgctggggttgacgttgtcgtctacgaggcttgaagtcatagtagtagaaccttaagcaccaagtccccctacctggt

SEQ ID NO: 3342 - DNA, 422 bp, Oryza sativa
agcttgcccaggctgtaaaatatttctgattagctactaagcaggcaattaatgcggacaatgatgttattatgccagaaagagctgaacttttccaaaagcagttacaaaccacaataaaaaccatattttaatccttcttgttaggagttcataatatctcatgaatcaggaagctcttaaacaaaagtccatgttgtaccatttgtatgtgagttttgcgtctgtggtattccatcacaaatacatggacatagtacatgttttctccctctccctctctatttttgtggtattttcactgtatctttcatcttgtgttgatgcaggacattcttgtttggtgacattaactatatttctgtagatcttgctttagtaatactcctggtagaaatttgtctgagtgaaaatatgtccta

SEQ ID NO: 3343 - DNA, 469 bp, Oryza sativa
  unsure (1)..(469): unsure at all n locations
tgaagtatcatcggaggcatcaaaatcttgtagagctcacgcatatgcatattcacttagcatgtatttggtttaagggttgagatggatcggatagggttgaacttatgtttcagcatatttgactagagaacatgtgggatgggatggtctctgatagggaatattcctctggtgaaccaatccaacccattattntttcttgctgacatgttgaccatctcttatcatgtcgttggtttaagggttgggatggatcggattgtgttgaacctattcttcagtgtgtttggttggaggacagatggaacatgatgattgctaaagggaaattccactaagactgagttattttgttctcaaaccggcaaccaatccaaccttttttttcttgtgactgcggcatctctaaaagtccacacctattctatgcaacaataatagacattcattaaaacagataatcacc

SEQ ID NO: 3344 - DNA, 339 bp, Oryza sativa
  unsure (1)..(339): unsure at all n locations
atcttagnttaagactttcagaaacaactaagtgagtgcttctcaacgacaccgacgagaaagtgcgtttcattcggtcggagcagtgaaattgtaaggattgaatcttgtctgtacgagaggcttcctgccaaatcgtcaccgacacccgctgtaccaacaaccacacgcgagagagctcctgccaatcgctcaccaactccagctgtatcaacagccacacgtcaagcacatcggcacgaaaggctccctgctaatctgtcaccaacaccggctgtaccaacagccacaagccatacactgaacagaattctcactcaacagcagttcacaatagta

SEQ ID NO: 3345 - DNA, 318 bp, Oryza sativa
  unsure (1)..(318): unsure at all n locations
ctctaccagatcattttgccagattaagatctcatattctaatcacctttgcaggctgcagattgtggttggaaatggtcatctgtctgtctgtctgtctgtctgtctgtgtgtgtgtgatgcatgcagtatatgcaaattaagctcggacaatgttccatgtaatatgtacagtaccatatatatacatgtgaggtgagattgatttcgctnttttgagaggattgaggctaggccagcacagctgttgacgcatcatgtatgaatacggtggagaagtgagagaaattctctgctgggtgttttttctttaattat

SEQ ID NO: 3346 - DNA, 241 bp, Oryza sativa
  unsure (1)..(241): unsure at all n locations
gtatcttaactgtgactcctgatcctaataacactctngtctgatcaccttgagcgatggttttaccataccctgcaggccatcaacacaaagtctttctactattattactctctttcatctatacttttgactgatactcaactttcacagtatgcaactggctggctgacatataccctaaacttcctcctctgacttaaagaacttttcctggttttcatttacttagatgccaagc

SEQ ID NO: 3347 - DNA, 408 bp, Oryza sativa
  unsure (1)..(408): unsure at all n locations
tcagaatgatatgagttagagccatcttatttaattggatgagacagagttagcttcgtgacatagcanaaggtgtccatttgccaaaaggaaanaaaaagaataacaactttctaacaaaatttgatcaaaatccaacatttatatgaacatccccaacatctatagtacgagggcttcctcttcaatttgatgagacaaagttgtctacgtgacaaagcanaagggtgtctctttgccaaccaaataagcaactntatcaccggaagcaaccgactccagctttcccgcccggtttttcctttggacatgaagctaggacatcttttccatgaaatccagtctaaagttcacataanagggggaaaaaggtaattaagcanacatataagtgtatatatatgagag

SEQ ID NO: 3348 - DNA, 346 bp, Oryza sativa
agttctgtcattctgtactacaaatattacttctgttgcatgttccaccatgctgatatagtagcatcttttgtttccatcaaaatttatcaaagcaaatccaggctagtcctacaaatgtatgtgtttcacaaatcataattattatggcttggaaacttgtcaaggagtcctgtttctgttctcttcactgatgttcatctgctagagtttgctgcaaaaaagctcgataaaaggcttttacaccttggtgcagaaccaatcatacaggtaggcttgggagatgatcaacacccttcatggcatgtttaattccgttacttcttcatttgctgttgaatccata

SEQ ID NO: 3349 - DNA, 486 bp, Oryza sativa
tatgaggcagcccgcaacgttgccggtgaaggtccttccaccttcttcattgaagaatcttcccattctgttgatgatgatgatgatgatggtgatgagggtgacaccgatgcagctgctgaggatgctcccactgatgttgatgagggtgacaccgctgctcagtccgatgagtctcatctctccggcgatacagagattgttccctctgatggagatgagtgatcctcttcttctcttcatagtttctcgcctttttggtgccttgatgccaaagggggagaaattgtgaattgaagggggtcatttaaatccttatcctttttgctgccttgactgttgtctagtcatttgaccggaagttccgggtcctatgatccggaggtccggccagcagatttctctctatatctctctctattggacatgaatcgattctatttggttgatgtattgctgtagatgcttattatcttatgcagaagt

SEQ ID NO: 3350 - DNA, 409 bp, Oryza sativa
agcttcatgaacagttgtatgttgtccatttcatgatatccatctcattcacggaccaaccactaattgatctctaataaaaagatgaggaattgccatacattttcatgctaaattgcaatctggaaccacttaacctcttctgaaacactatgatggactgaaattttactccctatgttgaatttttaggcacctctagatttcatcttgttgattgaaacgcacacacaataaactatgcaaaatttgtatacaccatttctggctatcaacttccatgctttacattcacatccatgcaattcagttgcaaacaacactatttcgcatggagagaactatatttaatgcagattattgcgttattactacaagtagtttggttttaccttcctttgatagctct

SEQ ID NO: 3351 - DNA, 351 bp, Oryza sativa
caagtcccgttagcgagaatggaatccattctactacggacagcctccttccacgtagctgcatcaagagatgcatatgcttctaaaattgacttacgagtgtcatccacgaggtacacagtgaaatcatcaccaaaagacttagccgccctttgtctcttactccttccaagagcttcactgacatgctcctcagagacaagctcatgtgtatgatcaagttgatctaggggtgtgatcgaactgggaattattcagaagggtggttcgaccactatgtgatccttcattgggaaaagctctcatagaaggaccatcaccagaactcatatatgaccaacatgcatgtac

SEQ ID NO: 3352 - DNA, 374 bp, Oryza sativa
  unsure (1)..(374): unsure at all n locations
ctctcatagaatttgtattcatgatttcattacgagactgttccgcacttttgttttccgggtttttttttacgccctaaaagataactaaatgtacctaaaatattcttaattaaaattttgaatggaaaatccacttttattgtagtttacatgctcatatcaagaacataagggcttgattgtatgtaaggatggactcgaaatacgtgaagaaacaagataactttaagaactattgaagggcgcaggctaatcaagtttaacagtctaaatctatcaatggcatggagtaacccaatcatatacaattgatgagactttnggttttcgatcatcatgagtttggacagtgcttactcttcatcctttac

SEQ ID NO: 3353 - DNA, 292 bp, Oryza sativa
  unsure (1)..(292): unsure at all n locations
caaccgtgctgaccttcagctgtgagacagaccttctgcctgtgatgacttggagaacgacgactccaaatgctaaaacatcactcttctcagtgaatcggcccgtaatggcgtactcacgggcaaggtattccattgctgcgctggcctttanggtcgataagaaacatcatcacaaggagcttgtgcagtcctgtgaccgacaagcgtagctgtatagtggtggtccgagaacgatcctcaccggccgatatgttctagtgcactactgatgcttgttnctttcttactg

SEQ ID NO: 3354 - DNA, 358 bp, Oryza sativa
gcttcttccttggctgccattgggtaaactgagggcgcgccgctttccttccctgctcccggagaagcagaggggggcgccattggcccctctccgcatagtagttgtgaagctgcgagtggcgccactcttgaaggactgtgttgaggacatggttagatttctacggctttccttggaccggcgtgccggcgaacacccggccttggggcggctaagaggttatgcggcggcggtggttccgggattcttatggcgagagtgactgagccggcggccgaaggaggagaggtggcgcgcctaattgggctcgacgcgactgacaagaggaagggattcgcgcggcggagagggggat

SEQ ID NO: 3355 - DNA, 309 bp, Oryza sativa
ttactttctacatcctctgcaataataagcagaggcctctgcttctgttttagcagaaattatgggccatcagattgcatagaatattatattgcaaaatgaggtcataacaacaaaatatcagctacactaataaaaaataccttcagagctaactccaacactttcaccacagcatgaagggtggacactttcttgtcatgtatcaagatcagtggatcgtctagttcctgtaacagatgaaatatattacaaccaagataatttctgttaaagaagtatattaacatcagcagaaatacttacaca

SEQ ID NO: 3356 - DNA, 367 bp, Oryza sativa
  unsure (1)..(367): unsure at all n locations
taccgganagcagctgtgccagatggttgntgagcgcgccgacatcttctgaaatcgacatttcattgtcgttgagaatcaccagcatatcaggacggatatcgcccgcgtgattcatcgcttcaaacgccatgcctgcggtaatcgcgccatcgccaatgacacagactgtgcggcgattattgccttctttatcggcagcaaccgcaataccaattccggcactgatggaggttgatgaatgcccgacgcttaatacgtcatattcgctttcgccgcgccacgggaacgggtgcagaccgtctttctgacggatggtgccgatattgtcgcggcgtacggtcaaaattatatgcggataagcctg

SEQ ID NO: 3357 - DNA, 341 bp, Oryza sativa
gcttctagctttcaccttctgagggagaaagttcgggccattggaccccatgagagagctagctcgctcttcattttctccatttttttttcacgtttgaatggagggaagggactgatgacgagggttaggaattcttcccgtttgatgcggccgccggccaatgggtacgtacgaaccttggagcctggtaaaatggaaatgctgcaccggccatgacgacgagtcgacgagacgggcatgaattggcaaattgcgtggtggtgagcacgacttgtgccaggatggccgtgcaaaatctggggtgattgtctccgtaaccattggattctcttttttta

SEQ ID NO: 3358 - DNA, 420 bp, Oryza sativa
cgagtatgtatgccaaatattatcaatgccaatgtctctaaagaaaatatctctagaataaatcatcacattgaccattgacattagccgaattactcgtaagcaaaactttcatggtgcaataaatatgaaatctatatcttttatggtcatccataataacacatatgatatggctttgaataaatatccaagagtcatgagccaaatcatacttcaaacaaattatatgccaacctaccaattctactacctagaactggcatttgcaacatgtatgcataatatggatttgataagcaaaacacacatgtgctagatagtaagcaatgttctaacatggcatatgcatataatatgatgatgaacacaataatactataccttgccttagcatcctacatacggcggctcaaagat

SEQ ID NO: 3359 - DNA, 377 bp, Oryza sativa
  unsure (1)..(377): unsure at all n locations
gcttgtggatctcaagctttctgtgtggctctcttgcattgatgcatgcggatgtcagactttatggggcactgttttatacgccctccaatatgttctataatatatgattcggntggtttttatgtgtggtttgactattcttcttattaaagaacaactctataaatgtgatttggtttgttcttacttattttattataaaaaaactattacatatttacacgaaatctttaagtaaaacatatgatcaaatattgcgaanatgtcaacggcatcgtacataatgaaactgaggtagtatacatgcacgttgatacactgctttatgcacgttgatcaggtacggaacacaaggactgtaaatcgtactggac

SEQ ID NO: 3360 - DNA, 443 bp, Oryza sativa
  unsure (1)..(443): unsure at all n locations
gcttagcaccattcacttatcctgcaatgcatgggatatatggatccaattctgtgttgctctttatcctcgtcttggttgcaccatctattatgttttgccgcgacaatatgtcaaggcctctgcctaatccaactttgtcatggaggcaaatgccacactcttaccggcttttcttggaggcagcccaagtctggatcttcatccagccaaatgacatgaactgtactggatcttgttgtgttcccctgttgcagcacagtgcctgttagcactgatgcattgcacatttgcactgattcattgcactgcttcagctgcaaatctgaacaagtctgaacctgttcaaagtgtaggcagtatgctcgtctgcgaccaacatgaacaaaggctctgcacattgntttcaatgatagactcatggcaactgattgcccatttga

SEQ ID NO: 3361 - DNA, 130 bp, Oryza sativa
actgaacggacaagcacgcgccacacagggtttggcttacaacgggcggattgaagaagcgggacaactgccgcgtacgagatcccaaacagccttatccagttggtgagtctccgaatctaactttcaa

SEQ ID NO: 3362 - DNA, 274 bp, Oryza sativa
  unsure (1)..(274): unsure at all n locations
tttggaacctttgaaatttggtgcatctagatntatccggctgctcatgtatggaatggacaccacataaattggtctgtcttacaaaacttcaacatttgaacttatcacactactgcacagggactcccagatcatctatgccatctcagggggctgcaagatactttgatcggacttaccgaactgcggtatttatatttagctcagggcctaacacctgtgttcaattacctagctgatagcctcagatacattgtatgcattatcacac

SEQ ID NO: 3363 - DNA, 372 bp, Oryza sativa
  unsure (1)..(372): unsure at all n locations
tgatctactgcgagaaggtactgtagtaaggaaatttaattggcagtaaagcttcattttctgaactgtccttgtgcccattgataatgccattaacgtagaaaaaatagcatttcggatagcattttagttaaatcgtgagcacttatctagtcttgggccgnggccctttcatttctttgcttaaagttaacgaagaaagatgcttctcgggtaatatttaataatgcactattcagtggataaggtgcactntttagatggagaagatagtgtttttgtcactgatttgagttgaaaatggtgcaatttgaaccaacttgtggcataagaaaacccttttgccaacctccatccatgtgttatcaatca

SEQ ID NO: 3364 - DNA, 276 bp, Oryza sativa
cgattgtcgtcttgaatattaccatcagtcgataacaggactctgaagccaatactgattctagatcgaggacgacttcggcgcttactaaattacactgggaacactatgtacctattttccaaggcccgacatcattaattgtcaagaaatctttagaatgcatatgctatagtaggggcctattgaagagaatgagagggtttatttttacacaccgacttgaacaagcatgttcttaattcacatcatcacgtacatacccaattatccatt

SEQ ID NO: 3365 - DNA, 286 bp, Oryza sativa
ctcatagatcttcctacacatggacattgctgcctcattttcagccaacttgatctccatctgagcaaacataacattacacttattaattatggaaaatatttttccaaaaatctgagtttcacaatatgtacattccaatattataaaacataacctcaataatgaaggccctcatagtatatctgcaatctatattaattcatcgactatataagaggcatgcagatattctttcctaaggttcatagttcatactgagtgtgcctacactgttaccatgcta

SEQ ID NO: 3366 - DNA, 169 bp, Oryza sativa
ttgcccgccgatatcccgtcaaaactaatacgacggggagattgtttcaacccaattaggataagcagcatggctgaaggagacccctcgtgcccgaggcatcgagagaatggcaaaagcccgtgcaggaagcctgccgttaactctgaaaagtcactgccgcagggag

SEQ ID NO: 3367 - DNA, 449 bp, Oryza sativa
  unsure (1)..(449): unsure at all n locations
aactcaactcatgagtccaacaccatgacactactgggttttattgcatcatcaacaacggatctggaatcttccccaactactaaacttctataatctctgtcgntgcgctctgcgacttcaatgtcatgcaacattgtagatagacattgagtgtccaaatctatggtctctccacctaaaggagaaggtacaaacatgccttctcgagttgcggcggcggtctctacatcctgatccaacactacttcagctgcgacatcaggcgcctcttgctctccatgctgtgtccaacaggtataattcttcatgacatcatttcatatccaatgagcatgcacttcataccttgtcttcgatcaatctgtcattctacacgccctacatgggcacaacatgtgcatgctcatactactntattagtcatatacccacatgtgacaaatcag

SEQ ID NO: 3368 - DNA, 52 bp, Oryza sativa
atcataaacaattgccatggtaaatccgtggtaaacatattgccatattgca

SEQ ID NO: 3369 - DNA, 389 bp, Oryza sativa
tccttcatttgcgccatcattgttaccactactgtctaggacacgagtagaccagcaactattggcaagtgacttgggatttttatttagcattactatctgtcattggattgtgtaccactcacatatatttagccttcctagctccacatattacttctggacagcacatgttcttgatccctacaatcgctgactacgccttccaggtatccattgcttggtaagggcttggtaaggttcttcatattgctgagagtagttgagaggcaccactgcacctgcctggtagattattatggataaccttcacatttgttgttgttttggtggttcaatggcaggtgacgatgatgagaggactgcccaggactttgctgactgtgtca

SEQ ID NO: 3370 - DNA, 381 bp, Oryza sativa
  unsure (1)..(381): unsure at all n locations
tgaatggacaagacatcacnggcaagaagagatagcacatatatacatctttgtgatgagctctccactatgacaaaacatcaaatttatctctattatgaaccaacagggatggttcagccttatatttatccaagtcacttgcatcacttccactatccacacttaaggcgtagacataattcatgaaatcagaatctgcttcttctatggtatgaatttcttttggttcagcattgacagtagatgttggtgcaatattaatcttataaaaagaagcatattcttgataaaattgattaacaacaccngtaaacttttccatatgaacatgatatgattgcctcccatacagnctcatcatcttatactctactacct

SEQ ID NO: 3371 - DNA, 296 bp, Oryza sativa
  unsure (1)..(296): unsure at all n locations
cgggcagtgccactgtcccatctaagaccggcccccaaatggggtggtgagagcacggatgaatcgacgcgcgcacgctgaaagggagattctgagcacacgtggaggaatcgagtgggaggggagatgggcanaggcgatgcgaggcgaggccaacaaagaaaagctgcgtgcttgcgttgcctttgagcgtgaggtgaggtgtacaacgggtgcctttttccctgcgtgaggaanagaanaggataataaaatcagagagacaagctggcaaagtgaactggagtgatttgctg

SEQ ID NO: 3372 - DNA, 449 bp, Oryza sativa
tctctcgaacttctgtcctgtagacatttatcatctcttcggctctggactttagtttagacaagcatggctattaaaaccaatcagctaaagcagatgacaccatcgagtttttaatgctgcatatcactatagaatacgaggaaacttacagttatggagatgccacccagacctctatgattgcctacaacaacattccaccctctgcttgccatagaatagaccaagtggcttacatactgcaacagacagcttgatcattgttagaacaattacggaaggtagcccaaatacctacaattgatcttatggaagaatccagattgtgttaaaccacagtttggatagaaatcatacggactacagcgcagtagaatcactaggtatcaggtatacaacacaagaggcggaatcatcctaagaaacgcatacaaaccacatctttc

SEQ ID NO: 3373 - DNA, 305 bp, Oryza sativa
  unsure (1)..(305): unsure at all n locations
agatacattgccatggacgcatgctctgatgcagtacatggaaatggaagaaactatcgtcatgtttttaattaggtgcctcttagcattgcaactcagatgcaaaagtcatctctaatatgattctgtatatgccccggaacgccggaattgttggtttggccatgctgtttgtttgtagggaaagttgcaactaaaaggcatctagatacacccagttcanaatttgcacctgtaaactgtaaaatgttccaagcctatgtcatcatcttccttgtctattatgcatttctatactttagcat

SEQ ID NO: 3374 - DNA, 275 bp, Oryza sativa
  unsure (1)..(275): unsure at all n locations
gctttgtgtttgtatgcctcctgatgatgtctttggacacttttgaattaccttatctcttggggctttcaacaacaagtaggtgcttactgatcatggcgcacaatatgcataagtagaatccaatagaattttgggtggtggatggcggcttcctccttgtcatccacccttcctttggaattcttcagacaagaggacgatcagctngccatggaaaaagtctgtcagtgaatgcgccccactgatcattggctgcagtgaactgaatgggt

SEQ ID NO: 3375 - DNA, 150 bp, Oryza sativa
  unsure (1)..(150): unsure at all n locations
ccactcatgaattcatgattgacgatcacttctttcggccgaatggtactattntgacttctgtggttctcctttaagcttgaggaaagaaggatagagtgatgacggtgacaccttgacagagaaacattgcggnttaatgcttacttt

SEQ ID NO: 3376 - DNA, 384 bp, Oryza sativa
  unsure (1)..(384): unsure at all n locations
cagcaatgaggcnaattactgtaatctgcttctttaaacaatctgttttgatctcactgccaagcttcgaagccggagactcgttctggaaacgaaatatctaaagtatagctctgaagtataacgtatataaggcttatcagaaattagctgccccaccaccaaagaatgtccacaagattgatacattagctttaccataagatccaatagattataatctgcctctgcgtgctgtggcatctgattaaatattcattatataacgtcgacatgttccttctcaacaaatgaatgccatgatattgttagagtttcaacacaacagcgcagttttgaagacacaagatggctttgacaaccatattacctcgctaatgacat

SEQ ID NO: 3377 - DNA, 444 bp, Oryza sativa
  unsure (1)..(444): unsure at all n locations
agcttcagctgctcctagcagcggcccattatatggtcttggaagtntgtttcctggccttggtggtacaggaactgctggtaccaggccatctggtctttttgggtctggatttccagaattggatcaaatgcagcagcagttaagccaaaaccccaacttaatgagggaaataatgaatatgccaatgatgcagaatctcatgaataaccctgatttaattcgtaacatgatcatgaacaatcctcaaatgcgtgatatcatcgaccggaatccagatcttgctcatgttctcaatgatccaagtgttctccgccagacccttgaagcagccagaaaccctgaaatcatgagggagatgatgcggaacacagacagagcaatgagcaacattgagtcttctcctgaagggtttaatatgctccgacgcatgtatgaaactgt

SEQ ID NO: 3378 - DNA, 183 bp, Oryza sativa
  unsure (1)..(183): unsure at all n locations
agtgcgtctaaccgtgtctcggccgatttttgctgtttcttgaacgtgangagggagggagcgcaggggagaagaggggcgctaggaggaggggtgatggngaagaggggcgcctatggaggagagggggcacggcgggacggggatctcctccttcgccataaccttggtgctctcggaata

SEQ ID NO: 3379 - DNA, 480 bp, Oryza sativa
  unsure (1)..(480): unsure at all n locations
agcttcttatgataatatgcctcgtttgttatccaccattgcccagaggaataataatacttactatgacctacatacatttacatcggttgaagatcgaacaaagagtgtgctgcaaagagcctttntctcattgggtgcttgcatcaatgcttttgtgcattgtcgacctgttctatgcatagatggaacttttatgacaggtaaataccgaggtcagatattgacagcaattgggtgtgatgggaacaaccaggttctacctatggctttcgcatttgtagagagtgagaacactgaaagctggtactggttcctagagagagtgcacattgcagtggtgcgtatgaggcccaacgtttgccttatacatgatcgtcatgccggtatgttgcgggctattgactacttgcagaacggttgngatgagaagggacttccagctaagtggcctgatgttcggagtcggtggtgcatgcg

SEQ ID NO: 3380 - DNA, 156 bp, Oryza sativa
tttaagcatactctggtccatcaatccatgcttggagatgagaaaactcgttatacccatagactatggttacacaagccttgggtaaaaatgcagtctattttacgactctcgattttttggagcaatagactatgtgagtatgcatacttgtgt

SEQ ID NO: 3381 - DNA, 475 bp, Oryza sativa
  unsure (1)..(475): unsure at all n locations
acctgcngcatgcaagcttgattactgcagagattgtggaactttgtgctaaaatcagtgaacccncacttgattgggttcctgctttcttgcccagaaaattggaagggtgtactaatcaaaagtgagttcttttttaatgatttttgctccggtgccttaacggagacatcacggtttttcgctgaacaaccggngaggtggatacatcaccaacctaataacaaagatgagagcataagggaaaaaagatgctaggtattgttctttgcttggtcgaagaacactatcagaagagtctggacatctatgaaaacgattgcttaacattcactcaataaaacattgtattaaaaataatatattcactcgagaacaacagactgtgggcttgttcttttcttcagggtagcctgcgtgcgtgcgtgtgtgtgttgtgttgcccaagntattcagagttcagacaatgagacac

SEQ ID NO: 3382 - DNA, 434 bp, Oryza sativa
  unsure (1)..(434): unsure at all n locations
agcctgtatcggcagccttaccctaagtgttttgagagagttcctcttcccaatcggttcaaagttccggacttctccaaattttcgggacaagatggtgtgtcaacttatgagcacattagccgattattggctcagtgtggtgaagcatcggctgtagactctctgaaggttaggttatttcggttatctttatctggatcggctnttacttggttntcctctttgccatatgggtcgatcaatagttcgaccgatttggagaagcaattccacagctatttctacagtgaggttcatgagatgaaattatctgacttgacagcgattaagcagcggcatgatgaacctgtgcacgagtatattcagatattcaaggagatgaggaacaaatgcttcagcttgagtttaactgatgcccagttagccgatct

SEQ ID NO: 3383 - DNA, 318 bp, Oryza sativa
  unsure (1)..(318): unsure at all n locations
ctaagcttatgaatttgactaattttagacccctgcatcatggtaaaacaatttatttatgtagcataactacgttctgaaanctgtagacagctgcattcatctttctgtgtagcccaaagcatgcatgataaaatatgcaccttttcacagtagcttatcaacatacctagtagtctccacgaattttggctgaaagtttgagtctttgcatcatggcataaaaattcatatggcactgcatagtcccaatctgaaaacagtagtcaacctgggttgttaatttgtgtagtctaaactattaatgataaaatcttg

SEQ ID NO: 3384 - DNA, 97 bp, Oryza sativa
ttgcggacagatcacgcgtgagaaacacaaaatgagcggcctatccttgtgaagcatgaaaacacctatctcaaatgtacactatttaagacaaaaa

SEQ ID NO: 3385 - DNA, 439 bp, Oryza sativa
  unsure (1)..(439): unsure at all n locations
agcttatctgatatgactaaattctctctatacccacactgatctntttctccagaaatatccagagactccatgtcaacagaactaaccttctttgctttcttgcgcttcttctgttgagaagtatggccaactgactgtgtctcctccaagatgcttttgctggatttctccaatatacttgtttcaataccactttcatcatgtcttactttcgtagattctcctgcacaggcaacatgttcagaagaattaaccatatctcccatggttggatctttatagtccttatgtacaaggtcatcaatccctttatcagcaactgaattagtagntgcctgggcatcactcacaaactgaacatgtttagtaccacactgatctntntctccagcaatattcagagacgccattgtcacagaacttacatctcttgttt

SEQ ID NO: 3386 - DNA, 320 bp, Oryza sativa
  unsure (1)..(320): unsure at all n locations
acagaaactcaagntaaccacaattcactatctntactccatccaaggcggcatgaaagggagctagatctttatcacgagatccgcacccgaaacaaactcgccgcagcacatgcacgcgacgcgcatngnccacacaccgccgcagaaacgctcgcaattgagggggaacccaaaaaaaaagagaaaaagaaatcttaaaaagaacccaagaaaacgctaacacaaaacctcaaaccaaacaccaccgcaagaaaagaaaaagaagaagattcccacaacactgcaacgagccgaatacccccaagaaacctcggaca

SEQ ID NO: 3387 - DNA, 421 bp, Oryza sativa
agcttcttgcgctccagtgtatccttgatcatgctcacaactgaggtgatggtatcttgtgctactatatgtggattatccaaaggggatgttgatgaacttgaaggagatacaaatgttggagtctgactgggtgtattgctcattggtgcactgttcacagtacttgcgtttgtcagatcttgtctcagtttgttagctgtttcaattgtttcagttgttattgagggcatgttactttgcatcgccgcatatctcttcctgcaaataatggaaaattttgtagatattgagctaagaacatggaatcgagctatggatagtagtgcgtaatcgctcatagaactggaaattcctgcctgagttctgaagatctgcttctagtcattggttgagtactatgaaaccaggccttcatatg

SEQ ID NO: 3388 - DNA, 336 bp, Oryza sativa
  unsure (1)..(336): unsure at all n locations
tgtaccatggcgagcgtatctccttgctaccgntaacgcctcttgatataaaacttgttgatcttaagagacaacagcgagagagtgagaaacactcgagtgagaccaccaaacatagtgagcaagagatgccaaagccaaataataccccagagcagcatgctgcgccaactgagtctttatcattttgntaaaactcagctggttttggaaagcagaagcgaagacttctagcttaacatttatgttctctaggactntatcatttaaggcagnncttttggttatagcatccgaagtttagcttgccanagactaagtccttcaaggagggct

SEQ ID NO: 3389 - DNA, 180 bp, Oryza sativa
gcgaaaagaccgtcaccatcttatttacttttttatgcggtaacgctacgaacctctaccctacgcgctaaacctcccgggataaaagcccgcgcttcacagtggctcatggaagcctacgttttttccttgggtttcccgtagggcctgcactttagcatgtacacccacccccttgcc

SEQ ID NO: 3390 - DNA, 467 bp, Oryza sativa
  unsure (1)..(467): unsure at all n locations
agcttgaatcaacaatcaaaattcatgattttatacgatttataatacaacattntaacaagcacatangttgaagaacaaacactaaacacatatacctattgcattgatcactctttctcaaataaccttttagcacaaaataaccaagagaattttttttaactctttcttttcttgagcctttttgctcataattttctctttntattcagggtacgtccctgtcgtcaagactgtttccagggattcggcacccattattttgctcacatcgaatacgtccttgtcgtcaagactgtttccaaggattcggtattcatttttttcatagttttattctcttttgcacaatgagcaattaaagctatgtgaggaataacaagtcaataaagcatatatataaagcatttatagatcaaaccatatggtagcatcaacattgcataattgcttaattcaagtat

SEQ ID NO: 3391 - DNA, 290 bp, Oryza sativa
ctcagcatcttaaggattagactgcatacatatcaagaaatgcaagggcatttaacaagtatactgtatcaaaaaattcagcatcttatcatcatcaattgaacatatgaggcaagaaggcatgctctagcatctaaacagaacacaaaggtagaaagatactaaatagagaagtagtatgttggacagcaaaatataaaacgataactagtacttgatttgttacctcatattcatgttgattcgaggtgcttgcttcttgattaatagtttcttatggcctatcatct

SEQ ID NO: 3392 - DNA, 369 bp, Oryza sativa
  unsure (1)..(369): unsure at all n locations
caagcttatcagagttcgttaaaataatcttttagtacctgcttccctacagcttaacaagtgcagcaagaggagtcgacggagtcccgggattaggtcctgatctggatggagatgaggcaaggattgactgcagcttcagctctggacttggagcanatccacaggcgctgcagccacagatcgacgcggcaacatcttcgagtccaccattggagcanaccctagccacaggagagcatcaatatgaaggggattcgaggggagaaacctacatgggtggatttgaatgatctggagtggggaagaggaagaggctggatggatttgaacgatttggagtggggaacacgaacatgctggatggat

SEQ ID NO: 3393 - DNA, 320 bp, Oryza sativa
  unsure (1)..(320): unsure at all n locations
aagattcagacagaaagcacacaaagagaatgagacaagaaacatgctaacaggaatatctaatattcttctctagatgcctttgtttaccacatgtacaaaaactaccatactacatgacattattggagcaattggtaatgtggtggattntagtatgtaatcaacacgccatcacttggcaggaccaggtgctaaaactgattccttcatattacaagagaaaggcaatgatacgcaacacttttgtggtttcctgaaaactattgcagaagagtgtgctaaaatcgaactccaaataaacaggagatccagaaatg

SEQ ID NO: 3394 - DNA, 422 bp, Oryza sativa
  unsure (1)..(422): unsure at all n locations
aagactcatatatgagcttaaacgacacaccgcacagaccgatcggcctaaaaacagcacgagaagtcggacacctttccctacgaataagagtaatactagaatcattcataccttccggaaatcggcctgaaacacaaaagtcatgaaccgtttgagcgacgtcagaattaagccaaggccaagaaactctataaaaaccaacattaaggccatcaggtccaggagaccgataagattgcgccgcttgcagcacactgtaccatcaaattacacttctctcgatctgcgggcatatagcagggaatgttccatttgccacgccatgcgctcctagctctagaatgagaggaggggcattaacaacggcgtcctgtnttgcgaggagcctaaacagccacgtacagaacacagcgaagctc

SEQ ID NO: 3395 - DNA, 472 bp, Oryza sativa
  unsure (1)..(472): unsure at all n locations
agcttgtgcaaaaccaatatagaaatcttgtttactccaatggaataggttcctagtttagccttctagtaaaagaagagaatccattatcgttttcagatgactgaaaataaaatatatcttgagatgcttagtcaatgtggtagtgtggtactaatgtgctctcaaaaagatcatgttgaccttccaaaaagaaaattaatgattgtcattttatctgtgcaagacaatgctgttcatttcatatcttcttcgatcgatggacagatagaggaaacctctttgcttcgttgttaactgctcatatgaaagtgacctcactaattgtaatccaaaatttccattggacagcataaccatgtccaccagggcatagggagggacatgattcangcacttgcagcaagaaaatacttacagattcatccgcctgatcgtttctgcccatatgcatgtcgtacttctgtcagct

SEQ ID NO: 3396 - DNA, 274 bp, Oryza sativa
gactaacatctgagatatgaaatatatgacatccatgtccttcaaaagagaggctggtaccagcctcagtcccatcttgggcagttaacaagcaactgatagcatgctggagaaacaatgattcaccttcaatgcaaatacattgtatgtcaaacatgcttctatcttggaaagtaagcactgctaattgagcacatgttcaaattgcgttataactgacagcaatacaatgttgcgctaatgcaatacatgtcatgaatagcgattttatgac

SEQ ID NO: 3397 - DNA, 439 bp, Oryza sativa
agcttctggtgatgtgtggattagagactttaactctagtctctatatcaatgtttagatactaatttagagtattaaatatatactacttacgaaactaataacatacataaaagctaattcgcgagataagattttcaaacctaattaatccataattagagaatatttactataggatcacataggctaatcatggattaattagactcagtagattcggctcgtgaatgagtctaagagtatggatgagtttattaataatctacggttaatattgataattagtgtctatacatctgatgtggtagggactacaaaggttttagtcgcatctacatagagtcttaagaagcagctgtttagttatcagcttgtgacttctagcttatctctagattctataattatagccttcttaaaatctagataacaacta

SEQ ID NO: 3398 - DNA, 185 bp, Oryza sativa
tctttgctcgaacggcaacacagtacagctgtgcattattctaactgtgttccccttcctcctcgttagaaagcagctatgcagattggtgcttcacatgctagtatctctgaatcctttcgcgtggtcgcgcgtagacataatcattcttaaatgaactggaggacttctctataactttgatt

SEQ ID NO: 3399 - DNA, 80 bp, Oryza sativa
tatttctaaggtcgaattctcttaaaagaggatgcatgtcaaacagcactcttttgaatggcgttggcacccaaatagca

SEQ ID NO: 3400 - DNA, 422 bp, Oryza sativa
acctgcggcatgcaagcttagtcttgtcgctgtccctctttctttctaatcggatgtaacatgttcacctatcatctatgtaacatcctggtccaattagaatttatcttgtgtgacccatgagagctgtgtgcgcatgtttagtaccaccttactggtttagcaagggtggaaccaacttataatgcttcttccctccaaccatacaactctcgggttaacccttttacactaatcgagtatgaaagtgtaagtgggcccacacgtcatatgggctggttacgcggttttagagagagtgttgttacaacctaacaagtggagcagggtagatgaagtcttcgtcccaactgccaatgggccctctcgttagccacttatgctgataaagggtgtgccacatttggtgagcaaagagcatg

SEQ ID NO: 3401 - DNA, 296 bp, Oryza sativa
  unsure (1)..(296): unsure at all n locations
agcatgctcaatccagcacgcttntggatctcggcgtangacgaggtcgttgacccatagtgatcgggcccggacgtgacgctgatggtagcgccgcacgctctgctggtagcgcgcggctcggagggccgcgcgccgacttctctctttcaagtagtcgaggtcatctctgcgaagctgatcttgatcagtctcgcaatacatgtgagcccgaggagaccctatgggaactctgatgggagaaccgcttccgcccttagacaaggaagaaaggcgtttcccggttgctcggtttg

SEQ ID NO: 3402 - DNA, 201 bp, Oryza sativa
ttcactcggatcatgttatttggaggaatcacaccgcatatgctatatattgatatcaagtcacttggctgagtacgataatacaaaccactctgttgggcggagtatttattacttgactataggcttggtttgttcacataaccacattgtcgggggcgtacacctattatgtgcatttagttggtgcacctgacgtta

SEQ ID NO: 3403 - DNA, 345 bp, Oryza sativa
  unsure (1)..(345): unsure at all n locations
agcttagttctaaacttctatgtgttcttggctctagttantcattcattgcgtataaacaaggcaagcaactagcatataattaaaattggttataatatatcttctatgatatactaactttctataaacacattgtaaactgacatcatacacaatcgtttttcttattatagtctcttatataacgaatagagcgagatactacttctttaaatattctttattaaacaataaataagatgccgtgtatttgcgtgaatttcctttcttgatgtataaacatgacacatatatgtttattagattttatatacaaagtttaatatatataaaaaggttttt

SEQ ID NO: 3404 - DNA, 146 bp, Oryza sativa
accactctttttcgttttgaaaaaacagatgttaacaattgttaccacacactctaaatttgatggggattataaaaactaccttaataactcaacactgaataaggggaagcctaatagtagaatttttaataattgtagacaca

SEQ ID NO: 3405 - DNA, 443 bp, Oryza sativa
  unsure (1)..(443): unsure at all n locations
ctaagcttctatacactagattaatattgggctaatgactcgngtcttttcgtggtccctgtataagcaaagtcaatgagctagatcaaacgatagctacgtaggagaaaagggatattgacatggcgtcaaatgaatatatttgatcttctattttctaataatatatgaatagagtaaacacataatacataaaaatatatttatgataaatttagtaacatccttttaccgtatcagtattttctacaatagagagtgagtaacttttgaaattctacacacacatgaagttgtttttattttagaaaatgtaagtctaatttaactatcacataatctatacctttaatttatctatacctttgtataggggtttcaatgacatgagcctaattngaatataactcgaaatagcatatatttntacaacttaaagcact

SEQ ID NO: 3406 - DNA, 425 bp, Oryza sativa
agcttgaaccttatccatcactctctcttttcactactagtctactactactctagctagctactctctctctccaacccatcgtgtgatcaaaatatgtgtctacgactacctctgatcgactatagtgaaccaatgggggttaaatatactggcctccctggctatgtatagatactatgcaatctagatcttatcttgggtttatgagctatcaatggctctatctctaagagttaagagcacttctaccaatgtgctatgcttgcgcggcttttgcggatatatggaggttgcacgagatatctataaagtgtaacgcatatatcccatggatatcaaaacgtacatatcatttatgatcaccattattctgtatcttgatatagatgtacatatagctcgaagatattataccgataaat

SEQ ID NO: 3407 - DNA, 459 bp, Oryza sativa
  unsure (1)..(459): unsure at all n locations
tggctgggggccgcaccctctctattttcgcattgtctcgggatttgcttctacgncctcggaagagacntagaaaccgagaaagttgcccgccggcacaccgaacacacacttatcggggttcagccttacgcgtgtggacctgagactattgaaagtttcggccaggtcctgcagcaacgtgtcctggtggcgcatctttaccaccaggtcatcaacatacgcctctacattgcgccctatctgattactcaaagtaatacgagtcatgcgctgaacagtagggcatgcatttttcaacccataaggcatagttgtataacaaaaggtgcccacaggagtaatgaaggcagtttttcctcatcttcctagccatgcgaatctggtggacccagagttgcatttagaaacacaaaggtccaccccgcatggagtcgctatctgatctatgtgtgtaga

SEQ ID NO: 3408 - DNA, 447 bp, Oryza sativa
  unsure (1)..(447): unsure at all n locations
ataatttgttcaggcttatnntatttggatacaaaccggcatggcaatcgttttgatcttgcangtgccagacctacatatatttgtagcaatcaatttcatatctcaccaggctgatgggtatggctacccactggtctgagcatgcatccatggagctgtcagcaatcatgcacgtgattttcttttatatttataggcagagaagtgatactcttctttttagaaacagagagcattataaacagagaaactgatctccaatttccattctcttccaatatttgtattataaatattaaaatttaaatcatataagaatttgctganatgcatatgtaaactctgctttatagctctagagaaaactacttattttatttcatacaaccacaaatgtgtggttcagaaatgaaaacacatccaaagttatatgtaacacattct

SEQ ID NO: 3409 - DNA, 401 bp, Oryza sativa
  unsure (1)..(401): unsure at all n locations
atccattagaaaccgggactaaacatgatctttagtcccgggtggtggctacaacggacatacgtgatatttagtcccggntggtgttatcaaccgggactaaagatcctggcgatcttagccccggttggtcccccctttatatatgtcttcttcctcctccagcccgagcaagcttcaaaatttctcaaagaaagaggggaggtcatgccaaaactacttgtgaaatttttttagtgattatatacaaatcggaagtgtctaaaaggttagtaacttcatcctccaatgtatcttgttggtatattactcttggagttatgtctcacacattaattgtctccacaactttgttgtaagttgatgagagagatacattgtgtggggaagaagaatatata

SEQ ID NO: 3410 - DNA, 333 bp, Oryza sativa
agcttaataggtctgtgagcgatataattctggcctctatggcgggcataacctgtgccttgtccacgtctaacccgtctacacgaaaggactcaaataccatctcccggcgatgccaatgaactcgcctgtcatcgtaagacgcctcacatggctatgtccaatactcgtaccatactcagattacgcataccataggttgtatgagaaaaagaaccatatctagaccacttccccatatgacgctccatctgcttttctttatactctctaagacaattcggcgatgcaaactataatcgccggagttcactgactcacagattgctgccc

SEQ ID NO: 3411 - DNA, 435 bp, Oryza sativa
agctttgatcttctcatatgcaggaaacttttattatcatgactgataccagccaaggcagggacaagtccactttataaaaaagaaaaagaaaaatatcagccagcgcacaaaacatattatcatcaaacggtgtaacaccttgcatctgtggacttccatggaaagctacctgtacagtccacgaatgccttcttcatgtgctattcctttcaaagcagcaagtgtacctttgtacgggatcaccccagctcgtataccttgggtctacataagggaaaaggatacagatgatgatatgacttataatacaagctttgaatcaattcgtctgagtatagcatgtagatgttgactgcatactatggacaggtaatagatctaaaagaaattcatcatatctataagtgagcataactaatgatagctccattc

SEQ ID NO: 3412 - DNA, 402 bp, Oryza sativa
  unsure (1)..(402): unsure at all n locations
tactcaagcctatggatgcagactccattcttagagattcanatggatctacaataccnattattattcttagngatgatgacgaangntcacttacgagtatcaactcagaaaggtcaggtcatgcattgctcaccagtgattccgatggacccaggagaatatctggggcttcttatgtgggtttcattgttgatgccaatgtaacttcgtacttgatgatgggttcattatctccaaggtatattccaattgttactaattttctacttctaggcagggaactgttcaatgtcattgattggtaataatattctcacatacgtatcacaggtctgaagtctcatgctgtgacactatacgaggccggaaagcttggtgaatcttgcattgctgatctat

SEQ ID NO: 3413 - DNA, 474 bp, Oryza sativa
  unsure (1)..(474): unsure at all n locations
agcttctttctcctgagttccaaccgtctattcatgaattgattcggtatcttccatcgaatcggcaaattttgatgttctctgcaacattccctgtgactgtcaaggagttcaaggacaaatatctccctaaaccctatgtcattaaccttatggatgaacttacattgaagggaattacacagttttatgcttttgttgaagagaggcagaaagtccactgtcttaatactctnttttccaaggttttcccaatagcccttactaactgagcttttaaccatgatttcattntgatgtcatcataatctttagttaatacatccaatttcgtttcaatacagctgcaaattaatcaatcgataatattctgtaactcggtaaatcgtggtgaactattggcaaagaagatcacagagcttggttattctcgcttctatatccatgcctaaatgttgcaagaacatcggaaca

SEQ ID NO: 3414 - DNA, 370 bp, Oryza sativa
  unsure (1)..(370): unsure at all n locations
ttacatcggngtcaccgctgcacccagagaaactcattggcaactcaattcaaacgccatgcatctattgctgtggacacgttgctaaacatgctgaaggaactacacggatggtttgttcacctgaaaacccaaaccctgatgccgtcggctacgagcttaccgatgatggggagagtcaagaagggagaatctctccacttgccgatcacagagctagtacaaacacaccgtcacaatacgagtctgtcaactcaaagcttaaaagactcaaaatagaacagaggttgcacacacttattagttgcacctgcagtggcgtcagttgtaaccgatattggtcaagctggtaagcaacacctcctgcacg

SEQ ID NO: 3415 - DNA, 212 bp, Oryza sativa
cagggaaaggaacgccaccgccggcgggggccaaggtcatcaccatgacaaaagagacccataacaggaggaagaaaaaggaacccgcgcaagaacagaccaaaacagcaagcgagagcagacacccggccaagcacgcataatagccacaaacaaccagaaatcacgaaaaaagcaaagaagagcacgccaactcgctagaaagaacaacg

SEQ ID NO: 3416 - DNA, 216 bp, Oryza sativa
cccacttttccttgcaggccgcacaaattgtattgtcgggcaatttttttttgttaacaatatctatatgtttgagggtattaatttttcttgcatgccacacaaaactcaaggcaatctgacgatgacatatatgtatttaaaagttttacgacacgaaactgttatacgccttttagcaattccatttatatttcgatcgtacgtgtgtaagtt

SEQ ID NO: 3417 - DNA, 391 bp, Oryza sativa
agcttgcccgtggcctgaatgttcttgttctcaacagatggatcgtgcaagaatctggttgtttcttggtgataaacaagaacaacattatgagggccagagggacaaggcttatgcttgatcgagggtgatgacggtcgttcagtctcatgaagatggataataggttcagaagaaacggacaaagatacaaacaatatcaccttctcgaacggctcatggttgggacgagccttcttttttgctggaataattcagggtgttctcataatcatcataaagatcacccctgaattggaatggaatttccgaaggatgaaattcttcttcctcacgctccagcattcggaatgaggattcggcagttgagtcgggttccgactccacgtgc

SEQ ID NO: 3418 - DNA, 468 bp, Oryza sativa
  unsure (1)..(468): unsure at all n locations
cagctcaagtatntttaatatttcaattcttctatctaatacagcttacagtcttatatttattttcccnccgttcttttctcatggccctgtgacgctcgtgtgttacgcatttgtttggtccctcggtggtaagagcccaacctctctctcatctacaggaacgttttctcgctaagtgtgggggctaagatttctagccctattccggccttaagatgagcgccgggtgccgtctaagcccgggacccactgtgctggctcttccgtagcggctagctttggtcccgccggctggttacggcgcctagcctggctcaactgtggacagggatcgctggctctagagtatttcggctctcacactcgagcgaaagtagtcgtgcatgtaaaagagagagatattggaaggatgccaccgaaaggaaagagcataccaaatgtgtaacgtggggacacatgctcgtg

SEQ ID NO: 3419 - DNA, 236 bp, Oryza sativa
  unsure (1)..(236): unsure at all n locations
gcttagggatgtgcaatgcgtcaccggttgcatggccgccctaagacggnncatanctagtgctggggagaaggcgctaccnctatttaagctcctcaaacgctccgggccgtttacttggacggaggaagctgaacgtgccctcactcagttgaaggcgtatcttagctctctcccagttctgtgtcgcccggagccaaatgaacccttgctactctacttatcggtgaccccgc

SEQ ID NO: 3420 - DNA, 392 bp, Oryza sativa
  unsure (1)..(392): unsure at all n locations
agctngtcaatatatcagcaacggccatttggcgcatatctctatatagaatcctatcatcanaccatgaccgttccgaggaagggctttggatttcattggtcatatttatccttcattatcaaaacggcattagttcgcgctagttgcaatggattacctcataaatgggccgaagccgtgccgctcgacaatattacttgtacgaatgtaattgactttattttgaagcatattgttcatagattcggtattccttaaactttgatcgaggagcttcttttatgtctaatgaggcgagaggttctgccgaattctatgatattaagttgttgagatcttttctctactacgctcgggctaatggataagccgagtctagtaataaaaca

SEQ ID NO: 3421 - DNA, 396 bp, Oryza sativa
accatgtagaaatcgaactatgagcaagttaattataccatgtagatgcaaagtttgacataataaagggaaaacaacttcaacttaagcaaatcatacccccggccttcccgcattgattcaataaagcggccgattatgttccattgttggtctagcatcctcacctgagaatttcgtaaagatgggcatctcaaattcttgcggctatgggtccgaatctacgtgtccaggatacggcctgtgatatatattcatagctactttggattctatttcactactattccacaaaacattttcactatcgttcccaacatccacatgaccgatttgtgactctgtcttatgagacaatactatcttactttcacttggaacaatccgaccgttatt

SEQ ID NO: 3422 - DNA, 285 bp, Oryza sativa
  unsure (1)..(285): unsure at all n locations
tggggggtttgttgacggtcgntatcgatcagtttcgaccgncaatatttcnttatttggagtgttctagngangcgcgcaacgcatatatgggctagaataataatatttcactagcatcacgcttactaaccctttgcagagaatgaccataaagtgggggagaatcgacatcaacaccagcggataatcaataacgcggatgctgagaaccacacgtacgcacgaatgggccacgaactcagtagtgacccgacaaaccgggccgagattacaagtctacga

SEQ ID NO: 3423 - DNA, 370 bp, Oryza sativa
cgctcttatatttctaactgataaaaaatcttgattgttctggatatatgaaaaataagttctttcatctttctctaataaatatgttaataaatatgccaacgatatgatggacatcacatatcagttcagagatttcggcatatacaatgtactgcctctatttctgaatgtatgccattagataatatgtatacatcatccccgtcaacatgggtaacataactaataaataacatttaaatttacaaattaatatatatgtacttataggaatttgactaatatttggatatgactctatttttccttcattatacatttttaggccaacatctaggtacttatgagttttctagttccataattt

SEQ ID NO: 3424 - DNA, 447 bp, Oryza sativa
agcatgtggatacacctcaatagtgctgtatgccatgaatcatgagcagaatgcagagtgacctggatgctactcaatccgacatttgataggattgcgaccaagactcgctcatcatcgagttcatacaaccatatggtattgagacgctgggctgtccaatcgttcagggattgcattttccgggacctgctcatgggtggcctgaggagggacctgcgcggaggctcgcgactgggactcctgttcctcttgttgttggactaggaatctgctcatacgttcgagcagctgcacagcctttctcttccccctatcggtgccgttcaaagccagcttctcgaacgggaccatgatcccgcactcctgcgcacgagctaaatgcacaagacggcgctctccactgcacagatgtaacatgacagccgcagcattctctcgatctct

SEQ ID NO: 3425 - DNA, 310 bp, Oryza sativa
agaggttcctccatatggaacgtacactattatgcctgtatgaccccatcagtataatgcactctttttgtaagtagcctaataagtagaggatttgacaccttactcagcggaactgggatacatgtaacatgccttaggttttaattgcaccatggacggctgcacttttgtggaaaaacaatgagttgcgtggagactcagaatggttggtgcttttcaaaccactagtccggcgtaatgatctttaagtgtcagaatacgataaaccttccgtggtgtttttctccggtagggactggttaaacgg

SEQ ID NO: 3426 - DNA, 382 bp, Oryza sativa
cttggctaatcttatcctggtgtatcttgtctttcgcacaaattgatctaccttgtaaacttattaaaaactgctgttcatatatgctagtactacatgtaaagctagcttactagctagctgatgctgcatatatattgatacagtaatatacagcaactctattagtgttagcagcagcagcacagaaagcaagggaaaagggaaagggcacacagttgggaatcatggacagggccagctctccatgccacagtgccgaaaaaaaaagttcccaaaaaaatgtatatgcacagttgttctggaatgaaatggagattaatttcattatctctgcctgaaggagtcgcgcgttgtatatttaggaattttgttggagcac

SEQ ID NO: 3427 - DNA, 292 bp, Oryza sativa
  unsure (1)..(292): unsure at all n locations
aaaaaacatttactactgcacangtttttcttacaccggnatcggaacggcttaccgtcaaatagatcaccgaaatgcccatattaacccactatttagttcaaagagatatgaccaggatttaaaattagtaaaatttgctgaattctgatgttatacattaccatgttactgcagctggagttgttttaccgccgagttctctaaacttaactcagctttcttctttgtttttttcttccctacataaccaactgctgatgcgtggaacaaaaccttttctttaaatatg

SEQ ID NO: 3428 - DNA, 422 bp, Oryza sativa
agcttcatcaccttccttgctcactcttttctgctgctgccggtgattgaggcatatctcccaatgtgtacgtctcaaattatttcaagaaagaagcaatctttcatacatggagtgaggagatatatgggatcgggatctcaggatcttacacaacgctgagtgcccaagttttttatattccagatccatctaagttaagggtgaaaaagggtcgacgccaaactagacgcatcagaaatgatatggatgagtcataagcaggtgggaggactctacgctgcagcaagtgtggtctgcgcggccatacttacaagatatgcccgaagaatgcagaagttccaagcggcgcaaatgctagtccatctggacaggcaagtgatggtaggcgaccacctggtgaatgaacaacaagcaggcgc

SEQ ID NO: 3429 - DNA, 288 bp, Oryza sativa
tgccatcccttgatctctcactcccagctggtaagagcaacagataatttctcaccaaccaatttgttgggatcaggatcatttgggtctgtgtaccaaggagaaataaataatcaagctggtgaaagtaaagatataactgtgaaaagtgctaaacttcaaacccctggcgcactcaaaagtttcatagccgaatgcgaagcactgcgaaacctatggcatcggaaccttgtaaaataattacagcttgctcaagcattgataacagtggcaatgacttcaaaacaa

SEQ ID NO: 3430 - DNA, 466 bp, Oryza sativa
tgagcagcaacttgagcacgattctggacttatttattaattcacataatcggctaaaaaagaaaatcgaactgctagttgaacttgaaagatgcaatgctgagctagccttataagagcaaaagcttgcagatctacccagagccattgaagcacaaaaatccaagttgaagactataatccagcacttagtcgaactgaacaagactgtgaaaccaattccatgcacagatgcagccgatgcccaagcaattgaagaggtagaacaaatcagacaaagggcaatatcggctattcataagcatgtaataggctgaacaagttgtgtaatatgaaactccctgttgtgtaatataaactttgtttatgaaaatccatagtttcaactatatgttcgccccctaatcttgaatggataacaatcatcacaacattacaatcggctaagacatagggtcaaaacaca

SEQ ID NO: 3431 - DNA, 293 bp, Oryza sativa
  unsure (1)..(293): unsure at all n locations
agcttgtggtgactttgtcattattaagtatttacttntaaaggtggntatacggatagggtatgtatatatgtatgcatctggtaagtgggctcgtatgtaattgaacgtgcgtggttgtattgcgttttgttcttttccaaaaaaagaacttatgaatcttgtactattgtctgtcttaattcattaattcattcctttgacgacaattatgcatatatttgccaacttccggtggcgggtctctaattcaatttaatagttatggcatatttctcttctgttggtgtgta

SEQ ID NO: 3432 - DNA, 465 bp, Oryza sativa
  unsure (1)..(465): unsure at all n locations
agctngcatcatcaattgttgttccctcttgaagttagagatgattttccccccttcattctttgatgtaatgttgcatctaccaatccatttagcccaggaagctattgctggtggacctgtccagtatcggtggatgtatcccattgaaaggtttttgcgaaggttgaagtcttttgtaaaaaacaaagctcgccctgaaggatcaaacaagaatcctgcaaggagttgaaacaagaatattttgcaagaatgtgtaaatttttgttctatgtaccttcaaggagttgaaacaagaatcaatcgaccaagtcgaatcgaggacgtgcagagtgacaacagcagtacaaaatttcagatatttggtactggtggcaagccactccttggtaacaaatactgccagatggatatgaatgagttggagaaagctcggatatattgtttaaagattatgaagaaata

SEQ ID NO: 3433 - DNA, 104 bp, Oryza sativa
  unsure (1)..(104): unsure at all n locations
gggatataaacgagcnaaggcaggtaagatgggctgaaaccctgatgaaaccctaatcggcagccaaaagcaggctanagatatggattctatcctcgcctttc

SEQ ID NO: 3434 - DNA, 462 bp, Oryza sativa
  unsure (1)..(462): unsure at all n locations
agcttgtcatgttaaaatagctacatgttttgcatgctcgatgctggacaaagaacttaatgaatactgctntacatttatgctagtatggaatatctactgatgaacaaagtgaaatcacttcctaactttctttctctcaatcatagatattgtggcaagttaatcaattcggatggattaattcatttaaatagcagattcaatgtgacacatctgaactgataatccactctaatataaagcatattctagcagtcagccgatgctagttntcccatttagtcacagcaactaaagcaaattctataattagggtaattctgctgtctacatgtatttattgaattgcataggttatttgccctagaagtggagttaacttaaaactttgataaacacaaaagagaatagggaaattaatattaatcatacccaagtacaactgatgtagtgatattc

SEQ ID NO: 3435 - DNA, 393 bp, Oryza sativa
  unsure (1)..(393): unsure at all n locations
atactaagctcgaaatatcgctgtgagagtttgctacacatgaaagattattgtttcttatatcaagtaacatcgtagccactccaaatcacggaattactaaactgtgggagttnttgttcaagcatctaaaatagttcacgatttccacaaagaatataatttatttctgaacaaactgtttcctgctcctgcatacagttaagcatgccattgggagacttctacatgattctgattgaatatgtactaattgcatggtcaaactttaccttgaacatgttcaaagtgctccatgacattagcctctaagtatactgcttgaatctctattgacacacagcttatgacctatatgtataattctcaagtacaagaatccgagtgaaatgc

SEQ ID NO: 3436 - DNA, 465 bp, Oryza sativa
agcttctccaagcttcatctcatattttatgtatgcggcgcaccggcggtcagaccggcggcatcgtggcagtctgaccggcggcataatggcagtcagaccgactgcggtgacatgcggcagatactgatctcggcggtcagaccgaagatacaatctcagtcataacgacgggaaccaggcggtcagaccggcgcatctacttcggtcagaccgcgatccatttgaattgagggtaattcttattttccgctaaaagtttcggcttttgggtataccaaccattcacttttgggtataccaaccattcaccctccctctggttggcttatgtgttgtgattcgatcctacatataagacgatgacgtgcatggatgaggaagctaagatgtacgggagcatatctgaccatagtcggtccaaaatgatttgcgatattctgggagaatttgatgtcttcagta

SEQ ID NO: 3437 - DNA, 329 bp, Oryza sativa
agagaggacctctcggcgagagggcctgaacctacctaaacctttgctcatgacctatttactttaactcccatacacaaccccttttcttattaccgatttctagaatcgacagatagctatcatggtacgtataggtaaacatgagcaagaaatactatatcagccaacaacatcacaagcaagttgtacatggcaattagtcctggttaacatataactcgcatacctggcttatttttgtatacatataactcgtcgtagacctaacaataagcctgcatacatataaatctggcttaggaaacttttcttattaaaaaaacata

SEQ ID NO: 3438 - DNA, 364 bp, Oryza sativa
  unsure (1)..(364): unsure at all n locations
agcttgccggcgaacgattgtgcgacattttaactgagggctccangacgatgcgggcattgcggctaactcaccggtgaccaaagcaacggttgatgatcaacggactgctactgcgactgctactaggaagaatcggttgcgacctacttcgaccgtggctgtgcttcggctgtctacagcgacggcgaatgggctggacgaggactgcggtgacttggcgaccacgatggtgatccttctgagcgactacgacaactctaactgtggttgctcactgttgaagcggctgcgaccactgccgcgctaggttacacggtgcttgggctttttcgactgctagagactaatgcaatggtggcgg

SEQ ID NO: 3439 - DNA, 441 bp, Oryza sativa
agctcggaagtgtgtgtcgaagtgagtaaagtgaagtctttatatagaggtaggtatgacggttagcgaaagggaaatgtccgaacttgcccgcaaccgccatcaaggagtgatctcgaatgtccatgccaaaacctgagatcaacggtgatcaccagggttctgccgaacttgggccatgccccccaggcctggcctttggcccatgtcctcccctgatcctcctctatccattcctcggtattttgggctgattctctggtattttgatgaagttcacaacccatccttgtgttgatacaagattctcctcactttagtctagatttcctcccaacttcggggtttatcacctgcatacaaatatacaccaacacttgtggaatatgtgagattaagcacctatcactatgttggatgtttattatctggactttatgc

SEQ ID NO: 3440 - DNA, 303 bp, Oryza sativa
  unsure (1)..(303): unsure at all n locations
ctaagctgcgcttgtatacacaatgggatcaggaancattncatgngtttatattgctatactngnnnncnagngcatggctgttttgttcatatcgcgtacgctagctctccattagaaagctatactggctgttntgttcatatccttggaatttaacatgttctatggtagttctctgaactacattacctcggtctggttgaacccttgttttttaatgtattactgtttagttgtaattcttaacacaaactgtgttacactccaggtgcttctctccttagctttaccatcataatc

SEQ ID NO: 3441 - DNA, 426 bp, Oryza sativa
  unsure (1)..(426): unsure at all n locations
atataaataataggtgaacaacatggatctacaacatgcacaataaatgtatatgattngctccccctaaatatatgcatacaaataaatatacaagagatgcaagtgtatgcataattagagaatgaccaatgggggtgtatcctgtacacatagagaaagcatatgtagtaatgatgtagaccaacataaaacacatacattcatgatctccatgttcttaatggaaatgagactaaataagatacgactcgagtaaacgttagtctcacacttatataacaataacatggaaatcatatatatgaacctatcaaaaagtaggagataagaagtggtacataacgctttatctccatgcagtttatccttatcatgattaagggccatcaccaaagaatgcatatctaccacatctcatcatcg

SEQ ID NO: 3442 - DNA, 459 bp, Oryza sativa
agcttaaacgagtggatgcataatgtgttgtttctcatatgaactcctgcaacgtagattgttcagtctccactctaaacatctccaatccaacacccaaacaccctaaggaaagtctctaattactttggtccgatagcatcctgtgaaggctacagcgtatcctactaatcaggtccccaaatttcagagaacctactaatcacatccccataatttatagaagtacagaaacgaattaatgcatcaatctactgtctagaactcatatcacgcgacaggcatcacatcacattgatccgatcaacgatcgatcggaacgcgaagcgcgcgcgcgcgcgcacactcatcggaatcttcgagcacccaaacgcgcggtagatcccgcaaccgagccaccatataataccctagggtgttccggcggatagaccttgacggaccagcctagagcccgca

SEQ ID NO: 3443 - DNA, 424 bp, Oryza sativa
  unsure (1)..(424): unsure at all n locations
cggacaagtatacgttggccggcgtatatcctcttctactcatggtaacagaaattctggtgccaatgcattagaggtcaangtatctccttggatgaatgaagcagttggaactgagactattcgtacttgcgtcaacactcatgttcatttctggcaggttgcgcttaaattcgaacatcgaaccagcaaagggtgcagctatggagctccctatgaatgggcagtctacaagaaagtatttcttcttctggctctctactgtgaaagtattctttgtgaataccaaactactttgataccgttacattgatacttatgataaacttcttttgcagactcttagtggaatcatggtgtcccacggtacactactaagaagcatggcggtttacatcatgtaatggagctgaactgatttttt

SEQ ID NO: 3444 - DNA, 462 bp, Oryza sativa
  unsure (1)..(462): unsure at all n locations
atatgacggcaatttgtttgtgattatcatatatatgatgctatgggatatgctcttgggcatatactcctcctgctctgttggtcgctttgcttgcatgcattactttgccatccgaccattcgcttactgtcacaatgccctccgcaataacctctttaatggccaaaccaacctgctagggtctgaaacacactacaactaagccgtgatttgcaagccaaacaagttccacttcacttttcatcccaaccaccttatcccatcgatccacagaccacaatgaatctctctccaattgcctntgtcccagccgattcaagcgtaactacgacataattctcgccaaaagaaagttattaccacataattgccagcaaggcatattcttcctctctacttgctagctagctagcttggtcatattcatttcatctcattggttgtctgtaaatatgatat

SEQ ID NO: 3445 - DNA, 326 bp, Oryza sativa
  unsure (1)..(326): unsure at all n locations
atctacgctgatgtatattgcaagaacagtgttatgactatagntcaataggttatttgcaagatattattagggttctatntggaggccagaatcaatattatggaagagaaatatctcttgaatctgaaaggtatactgatatttatggaaattgtgaaacaatttggtatgccagtgcagaataatattaagcatcccacaaaaaatttcaatcaggaatgatcttttttgttttttcttcatacctcgtggtaatttgatgcaaatggtttctattgagtaaattgcatcttgcactgtgtagattggtttgagtttcactt

SEQ ID NO: 3446 - DNA, 313 bp, Oryza sativa
tgaaatatcacaagagaacatatccgcacgctaactgattccagaactcacaaaattaagcagcatctcgttatcactcttcaaggaaaagactgaatgaaggatcgaatagctagaactaagccaactagaggagactgaatacgtgtagtatccaaaaaccgaaatttgatgacgatcgaccgaccggattagatgcaccggtctgatcgctggatgagctcaggactgaccagtataagaactccggtctaaccgcccaatgccgcatagaacgccatcaccgccgcattctcgacggccaaccatgacg

SEQ ID NO: 3447 - DNA, 237 bp, Oryza sativa
agacacctccaaagcgcgcggaccaaaaacaggccgggcgaccacgggaacagaagcgagcgccccgaaacaaggacacccgaggcagcccccaacagaaacgaagacccaagagagaggacccgccgaaagcaacaaaggagggcaacaaaacagagcagcagacgcaggggagaaagggaacaggccacccgacagaaaaccccagggaacacagcgggacaacccagggccaaa

SEQ ID NO: 3448 - DNA, 441 bp, Oryza sativa
agctttggaagatcattctgctgtatggtggtattgtcgcacgagtcaataagaggaacagattgtcacacatgtacaattgtacggcatctcaaatgtactctaatggaacttacttactttcaatgtttacggctgctctgttaatgattacacttttcacatgctgggcacaaccacctttgtttgataaacagtggcattccttttgccaaaacattgtcctaactttaaaggtcatttgctatgtaggttcctggttttaattaaggttgtgagatagaatgactcaccgtgatagaatggattaatcgcacagcatgtacatatataggtcacgctcttttataacccctctatagctctatatcacaaatcctgggataaatagtgtgcctctatactcacagccctcattctacccctaatagtgctcgcaat

SEQ ID NO: 3449 - DNA, 407 bp, Oryza sativa
agctttgacgtacgaccgatctgattttgtattcatctctggatcatgcgttgataagttgctcctgcgttctttaatccaaaaggcatggtgatgtatcagtaggcccctaagggcgtgatgaatgaagtctttaagcaatcggattcctttagtcggatatgatgatatcctgagtagcaatccaaaaaactgagtagctcgcagctggccgttgaatcaactacctggtcaatgtgaggtaacccaaaggaatctttggggcaagacttgttgaggtcggtgtaatcaacacacatgcgccactgccccgtcttcttccgaaccatgactgggttggccagccactcgggatgaaggacttccttgagaagcctgtgctacagcttggtcattcctccttgatc

SEQ ID NO: 3450 - DNA, 218 bp, Oryza sativa
  unsure (1)..(218): unsure at all n locations
tcttatactcctctatcctctcccccaagaatcggagcaaacccgtgagtattttatccgaatcgaactcgtttttgagtttatctccaaaaccgagtttttgatttcccggatcgatntctttgcggaggagtccgatctcttcaatccaaggctatatataggaccccctagatcttctcttttggttaccccttctcccgtctctcctgtgcacc

SEQ ID NO: 3451 - DNA, 382 bp, Oryza sativa
  unsure (1)..(382): unsure at all n locations
agcttcgcagatccctcataacttttgtttgctctcaacatccncttcgccaagaccttggacaacatgcagatacctcgcacagaatcgaaacagaataatgcgccctttcattggagcattccaaggttatctgctacgccactcggccagatcactctttcggtcaccttcggtactcgggagaacttccgcacagaaaacgtctgcttcgaagttgctgatttcgagacagggtatcatgccaaactctggtgcccggcgtagccaaatttatggctctccccactatacctacatgatgatgaagatgcctggtcctcgaggagtcatatccctgcgaagtgcatcaaacaagctcgcacatgcgacaaggaaagct

SEQ ID NO: 3452 - DNA, 256 bp, Oryza sativa
atagccccgaggaagaagaaatatcctttggatgctctgagcaagaacaatgcggcttatcatactgtatgattgggaaaccatccccaccgccttcattaaatggctgtgagaaaagaccccgaatgaaagcgctgttgattaacctttgcaccatctctgcgccccacacaagaagcagaggtgagagagggtctccttgtctgagccccctcttgcacttaaaagagaaccttggcccccatttagaacacca

SEQ ID NO: 3453 - DNA, 59 bp, Oryza sativa
gacagccctagcgacagaccttgtgggcgccatatctcaaaataacgcgcgcgcgccat

SEQ ID NO: 3454 - DNA, 233 bp, Oryza sativa
ttccaagaatgcccggtcattatatgaatctttatttataatcgatgcctatttggcgcaagcatgcttaacacgtgacaacgaccatactacctaacaggaatgtaacaaatgaccactaaccgtagtcaccttaaaagaaacggtatcaaacgataaatatccatgtgttctaggcatgcaaacccaacaacaaatcatattgcattggtacgagatagataccaccaacg

SEQ ID NO: 3455 - DNA, 361 bp, Oryza sativa
  unsure (1)..(361): unsure at all n locations
agctntattaccgaatatatttggtgatcttctgcagatcccaggggagtgcccatgccgaccggtcccggtcgacggcgatcccgatcaccaccgcctggattgtccccatcaagcatgcgagcatcgtcgagaagtacttagatgggaactccttgttcactttggcctgcattatattattgcacgtttgaggtttcagcaaagatcagtatacatacatggaaactacttcacaaatagcactacagtctattgatcatcgatgttgccaatatggatggacgctgtacctgaacgatgaaccagaatgcgtagctgatgcaactgccgcataagaagagcgtcccgatgagcatgt

SEQ ID NO: 3456 - DNA, 328 bp, Oryza sativa
  unsure (1)..(328): unsure at all n locations
catgaatcaagaaggcaagaaatgtctcatcacaacaaccttttctcatttactagcctaatgcccgcgctttgctatggaaaaaataaaaatatattattatattgatttaataaaaaaatatttttcacaaaatgctctacccatctttttgccacacggaatattcacatcaaatttattttccacgcggctattcatatggagttgagttttgaatattaaatataaagggccaattgcagaattataatgggagcacgtggggtgacggactcactgtcaccaccactatactnttaaaggggataaaaatgattatttgtat

SEQ ID NO: 3457 - DNA, 469 bp, Oryza sativa
  unsure (1)..(469): unsure at all n locations
agcttccaccttgccacatatcaaatcatatatggagatgattaatnttgttataacatgaaaagaaaattaaatgtgtgatgcagtgagagaataattaagtaccatggattgtgtttttctcaacactaattagctctatttaaattgaaaccgagagttgattacataataattataatgtatctgtgttatgtcgtatttggattttgtactatttgttcgtataggtgaaaggaatcattatgttataaatatgagcgcaatattgacgaatattaatagaactcttactacgacaagggtgataaagggagtttaaggccctctctttttttcccgattccatattttggaatnttgtttgcatgctttctaagtttctaaatagtgccttctttaaattaacaacattcntaacttttagaagtcaattcattcatttataccctcaaaaaaaatatcacat

SEQ ID NO: 3458 - DNA, 494 bp, Oryza sativa
  unsure (1)..(494): unsure at all n locations
acaattggtatattatctatgtttcatcanaagataccgttcgatttatattccagagnacttttctatgaccatatgttaactgtgagcaaattaatgacaggaatttacagtcaaagctctcttttagacagtcaaattacacctaatagaaaaaagagagttattaccttagtaactttacatgtggaacatgcgaggaactggcagtcaagtgtgcctgtccaaggaactagacgaccactagtagccattaacgtgccagaattgaagcaacgccctacagccactactctagaagacttgcaatcaaagctcgtatttaatggacgaagagcactgtacttgacactgactagagcaatgtngtaatgtagaatgcaatgctctaactatccttctctgcattggtgntaagaaacactttaatctgcaaataatacagtgatcagatttaacagcccctagaaaacatcgacacaaacaatgacaca

SEQ ID NO: 3459 - DNA, 141 bp, Oryza sativa
  unsure (1)..(141): unsure at all n locations
gcttctatggatgcgcaangtgtgacgcttactcaactgaaaanangacatttattgtttcccgtctgatcagccagccagcctgctccgactgataaaacacagcactacttactaacctcagatttgagagtgcagcat

SEQ ID NO: 3460 - DNA, 435 bp, Oryza sativa
  unsure (1)..(435): unsure at all n locations
agcttaagattcaggataataaccatatattctcatctcacagaagcttgngaaaaaaagatcagggtatcttatctttttaatctcaccattctaaagatcatcctaggataagactgtagaacctgaatgcaatgtgcattatgaaatggctctaaatgtatcatatcagctaactgaattatgtctctccagcaaaaagatcccttattgaaaaccatataaggaactttagttctataataagaagcccaaatcagcctaacccaaggcaaatcctgtgcagtataaaaatntatgcaaatgtttaagaagtagagccacattatgaatgtacaagttcaatacacctagaccccatttgtccttggacctgctacaaatgcctttctttcattatcgaaagttctttctactcatctgatccgcacaatg

SEQ ID NO: 3461 - DNA, 406 bp, Oryza sativa
  unsure (1)..(406): unsure at all n locations
actcaagctttatggcctgaaagaaatggacacntngccttgtttctggttctgntgttttntgaatcattgaggcacgagtatttaaatgggtattagttttcacgctctcgccacggagaagaccaagtgaccacatcagtgagcgggcgagctgacgaccttgcttggcgctgctcatctgatacatttgatctcaatggccgcgcatttgagaactccnagaatagggcagtggtgtcaacagaaagggacaagccgattcctcgttttgatgtaaacaactttcttaaaactctgatttgtgcatcaggagaaaaacagatacagagatgtgcttatcaataatcagattctattctgaatcctgtgtatcgctgtcgtctgagtttcgnttaaacagcat

SEQ ID NO: 3462 - DNA, 268 bp, Oryza sativa
  unsure (1)..(268): unsure at all n locations
caagctatgcgaaacttaggtgaaggactaatcgttgtttggagaagccattagcaccacacttaattcttagtcggcgtcggcgttcgtgtcgcagtagtaagccaccggcgatgcgatcaccgtgcagcagtggcaatggatttcgcccttatgttccntccaacacgacttacgatcgattgattgagaggttggattcgtctaacccggaaatcgacgccaccaacgaacaggtagcattctcttcattaatatgtgaccaatg

SEQ ID NO: 3463 - DNA, 165 bp, Oryza sativa
  unsure (1)..(165): unsure at all n locations
actaagctcgacaggtgggggcgaacggaactgcattattcaccaaccagttctttgtnttgacagacctctctcagagcgtgtccctaagtaagtcgcaaccttgctcaatttcatttaagaaactcggttgccaactaagcttaacctaacctcctttggact

SEQ ID NO: 3464 - DNA, 440 bp, Oryza sativa
  unsure (1)..(440): unsure at all n locations
agcttccgttgcacgtattgaaatatttttgtcgtgccgngcgtcatggagatgattaggtcagtcaagtggatgctgttagtagcctgtctccggctagcagcattattcacgtgattagaggatcagcaattcagcgttaggatttactaatacacacgtatgcggaaaaggcaattgcagatttacagtcttaacagatacttgcatatttggatgtgacctgagattgtctatcctaatttctgccctgcggcctgcgcccctactaactttgtgctcactgtcctacgctcctgcgagatcagatgttgaagtttatcttgtaatctttgtttcttggctttcatatgtcgtagtgtcacggtgtcagttgcatgcatagaagcgtgttaagtacaagcaattatcggacatggtgagtttgatcatcgattcat

SEQ ID NO: 3465 - DNA, 224 bp, Oryza sativa
  unsure (1)..(224): unsure at all n locations
tttgtttcaaaccaaaactgtcatatacactgttcaaactaccaaaatattggtagggcacgtcttggcactaatccaaaacggcccatagtgcatgttaaggttatttgcaagattaatattttccttctgaaaaagganggaatacgctatttgtgccgttgaatagggattataaattatttaatcatttagcgcaaaagaacaaacctcccaactgccat

SEQ ID NO: 3466 - DNA, 231 bp, Oryza sativa
  unsure (1)..(231): unsure at all n locations
gctgagcgtgagggagcgtggcatcancggtgtgtttgtcatccgctgttatttctgtggacggngagctccgtctaacttgagctccaggtctgcccatgtagaaacagtggtggccaagcgagccccgttaacctgagctcacccaccttacctgttcgagagaagaggaacatctgtgatgatatctggctaaccccctcaagctccggtgataatgcgtatggagat

SEQ ID NO: 3467 - DNA, 365 bp, Oryza sativa
ctttattttggatgtctgctcaatatgcgagaacaactaattatgttactgtagaatacaccagcgtaacgtatcgaaaagtgagtaacatgatacgttactgcaaaacttatagtctgttactacacctctcggcagtaacatcatgctgaaaattccacgaacagagaatgtgtaacagtaacagcggtattaatgcttgtctagagctaaaacctttaactcaattttatttatctaagacgtttgcaccataatgttcataacaaagtggctataagaactaaatccatcatgactatcttctgacatcgctaatggggaaatcaggcattctactacacattgaccgtcgtgttactgca

SEQ ID NO: 3468 - DNA, 318 bp, Oryza sativa
caaaatggaccgaaaagaatacgcagctcagatcagctcttctcacgggaacaatcagaagccttgcgttctgacgggacagctatgtgggccttccaccctgatcgtctatcagcaccgtccctatcacccgagtaacttcgacaacgactacaacggtggcagtcacaacaacagttagtagcacaaccacaactcaacttcaccctcaataatggcaccagctcagtcagatccgccagctgggtcagctcagtcagaacagtccaagaaaggggctgtaggatagccaataccctgcctcaactgtggcaagca

SEQ ID NO: 3469 - DNA, 199 bp, Oryza sativa
cttatatactacgggagcgtcttgtctatgctagcaatatattatatcaatctagaaattattatatgagctaagctcttctaagtcttttgggatggcgatggaactatagattccctggtcctaacaagttttatttggaattatttggagctaccacgcgtatatatacttaattaaatagatttggtaaccacta

SEQ ID NO: 3470 - DNA, 55 bp, Oryza sativa
aagatactaagctccgaggagagagggggcaaaccctaggctgcgagggcgagac

SEQ ID NO: 3471 - DNA, 425 bp, Oryza sativa
  unsure (1)..(425): unsure at all n locations
atgagctgtancatgatatggattgttcctagtaaatctgcaagtatattgttaaaacaattgatatgttcatcaactattcgtaaaaatgtattattagatcgctatatagctgattaaaggaaaaaaaacaagactcgtatgattgtctagaaaccaagtgcaacccaaaccatgcaatggccctttacaagaacaagtgtttgcaaaatgtagcagcttgcacacagtatcccatagtaattntggaccttttcctaatataaatatccaaaaagaatcacttgtacaaacctctttggttgcttatgagtatcaaatgatctgaataagttcagcagaaattgagtgagcccttgttctgtctgatcataaaacagcttatacagtaaaacacgagctgtntgagattctcttgaatcatc

SEQ ID NO: 3472 - DNA, 286 bp, Oryza sativa
  unsure (1)..(286): unsure at all n locations
catacagcagaacgagtgcagatcaatgggcaattaaactaaatagacggcacaatagaatccaaaacaggaacaattcataaatcatataggcacgtatctacaccatcttctacgctgctgctagctttgagtccatctacagcatcactgcatgtataccaatcctgatacagtgatactagtgggcttgaacttgatgacagcaagtctttttctattgatcatccaagataaatctctcttgtaaagaatccagaacattntttccatatgctttctcttg

SEQ ID NO: 3473 - DNA, 135 bp, Oryza sativa
  unsure (1)..(135): unsure at all n locations
ctaagcttacgaaccttaagaaacccggatcgacgatatccggaaccgtatttatctcaacattcaanaaccaagcaaaggaccaaagagggatcctattagactagataatagtaccattagatagatctcaaa

SEQ ID NO: 3474 - DNA, 373 bp, Oryza sativa
  unsure (1)..(373): unsure at all n locations
agcttcatcaccttccttgctcacatcttcttgctgctgccggngattggggcatatctcccaatgtgtacgtctcaaattatttcaggaaagaagcaatctttcatacatggagtgaggagatatatgggttcgggatctcacgatcttacacaatgctgagtgcctcaagtctttatgttccagatccatctaagttaacggtgaaaaagggtcgacgccaaactagacgcatcataaatgatatggatgagtcataagtatgtgggaggactntacgctgtatcaagtgtgatctgcgcggccatacttacaagaaatgcccgaagaatgcaaaagttccaagctgcgcagatgctagtccatctggaca

SEQ ID NO: 3475 - DNA, 231 bp, Oryza sativa
  unsure (1)..(231): unsure at all n locations
actgaagaccggatctgggngttctctctcttttttggtttattggcttgggtcatttgcaattttcatagttactatttgatattttggtacttctttgggtgaatcgctgattggctatagattggaacatcatattatggatatatgcatttgctttatttgtttctgccatcttgctcactggattgatatgtgctagctgtgtactgactgaaccttgcagtttta

SEQ ID NO: 3476 - DNA, 464 bp, Oryza sativa
  unsure (1)..(464): unsure at all n locations
agctatgccgaaggcgcactacaagaaatgnttactngncngagagacgaacaggaggagcataccctagaaccagcgaaactctgcttccagctaaagcagaggagtgtgtacctccagctccncagctaatcaaccttgatccagcattgtttgttttgtatcagcaaagcttcgaaatattaggtaatgaagattaacagcccaggagaaacaactgcagcatcactgttaatctgttatcacattggatgattagaagatctgttctgaactagntggacgatccaaccaaccaagaccaatgccaacatcacagacacagggactgctcaaacttgcaaatctacagtgaatatagacgataacaacacaatggagagctgcataagttgtggtttggacatgaacaccactgacaacagatatctgatgaatatggtagaaggcattagcaatgacat

SEQ ID NO: 3477 - DNA, 405 bp, Oryza sativa
agcttcagccccgtgggtggatattgtttcaccaatgatgtcgcgaactccacagggctagccatgagtgggaatgctagcacaacttggtcagtgccccgtttgacgccggatccagacatcgaacacttagcatgcgtcaccttgtggtggtcaagattgttgatgtaagtggcaccgattgcgttcccagcagctaccaactccatataggccactacagtggtggcggacgttaccactgctgccacagtgagatcaggctcgacggtaggaccggagcatttcgttgaacacatggtgggtgtgacctctggtgagtccttggtgacgacacatgatgcgtggccctgtgcttgttgttcctatctcccagcagctgtggacagaatcctcataatgtga

SEQ ID NO: 3478 - DNA, 126 bp, Oryza sativa
accaatcaaaagcacacgacaaaccgaaaattgggcgacacaaagaacgagcgaaaaatcagcacgcgataccaacacactcgctcgggaccgctcgaagaaattacggccaacaaagcaagcggc

SEQ ID NO: 3479 - DNA, 278 bp, Oryza sativa
tggagaagacaccggcctgcactactaaaaggatcaggactaatatttgctcaggactataaccttttcttcggattattttcaccaaccttaagtcctcacattaagagggcgttatctgaacctactatatactcgtgaatatcatatatgagaagatgctcatctgtttctgaacctaaaacaaacacacgatgcaaattagattaaccagttgtacgagctgatcgatcacgctgatcttctgcactaattgtgaagatataactttaacttct

SEQ ID NO: 3480 - DNA, 421 bp, Oryza sativa
gaaatgatatggcacgtatttcttctatctatttgtgaagatatacgctttttctaaattggcttactcattgtgaattactctgtcccttactgctctcttgggtagtatttgcttcaatactttacattatttctactgcaggggattcccttttgaaatactggaggtcggctggactatgtacagatggtaagtgtgaagatattcatattggtgtataacatcttgagcatacagtctcatccttgttatgttcgtacgaaaggctgacttttcatgtgagtgagaaatctgctattattatttatttgattgcgtactgttgaaatctatcatatgggctactttgtgcacaccaatgctgaatacaacacacatattaagggatttttgttcttacaatagtctcctttaacct

SEQ ID NO: 3481 - DNA, 332 bp, Oryza sativa
  unsure (1)..(332): unsure at all n locations
acggcncaaaagnangggggcacggaaannngcacangaannnggcaaagaacanaacagnagaagaccnaagcccccancaacanaccccaccnccatcgacactaggncggccacgaacttcttgaattcagccatgtgggtgatcaccgaatcctcctccttcatcttcagagtgaacagcttcatcttcatctgcatcttactgggtagatccttggacatacagatcgattccagcttcagccatagttctgcagaagtttctcttgcaacactcctgcaaatatcattatgaagatgcaactgaattagggcgagcgccttctgat

SEQ ID NO: 3482 - DNA, 466 bp, Oryza sativa
  unsure (1)..(466): unsure at all n locations
actcagctntttggtaggatgtaatacatggatgttgagaaaaccaaggaacccatctattatctatatccaacaaggatctgccaaacccagcatacggtgacattatcaaccgtgactaactgcaacatcgttactatttagcgagtcgtatatatgtttcttgctctacccaatgtatgggagcgttgtggtcctggacccccttgattatgaacacaagacgtacagacaatttctaaccatcttacaatagtaggtgattctaatcgatgcgtgtctacttttcatgaattataattgaacctccacctttatactaactaatatcgaaatcctacggtgcgtacaattactgcaaggtanagggtggagaacaacttgcaacaagggagaagttgtagtgcatcatactggccggaatacttcgacacttatatatttaaattctttcacttacatgtta

SEQ ID NO: 3483 - DNA, 489 bp, Oryza sativa
  unsure (1)..(489): unsure at all n locations
tggagatatcatccctgctgatgcccgtctncttgagggtgatccgttaaagattgatcacgtgactgcaatcgcgataatctcctgattggtttggtcatataagtttactatttctatcttttgagttctgacctatgatttggttctattgtgcagtctgcgcttaccggtgagtcccttccggtgacacaaggccctggagatggagtgtactctggctccacatgcaagcagggtgaaatcgatgctgttgtcattgcaaccggtgtgcacacgttcttcggcaaggccgcacatcttgtcgattcgacaaaccaagttggccatttccagaaggcaagcttctagtttctgttttcagtactcgcctactgtcttgtattttgcaagttataatgtgatagcatctgtttcctgtcaggtttgactgcatcgggaactctgatctgtaattgtattgaatggtgagagatatgtatgtcccat

SEQ ID NO: 3484 - DNA, 444 bp, Oryza sativa
atgcatctgcatacacttggatactcttctttggatcaagcgacattatatgggtgctgttttaatcgcttttcacgtttgaaactctgttccattcttctgaccacctgcactttacatcttttctgaagcagtcgcgccatgggcttagccatcttggagaaattctctattaattctcgataataacctgtgaggcctacgaaactgcggatctctgaaactgcctttggttggttcagttggttctgattcacataactggatcacggcactcctcctgtgagatgacgtgaccagaacttccttctacgacccaattacactgctaacttagatacagtgatgtctcgtactctctttcaaacaaaagtcttcatgctctttggcggagtgagagatgctcataagacacccaacatgttcgattcataaccctatgtc

SEQ ID NO: 3485 - DNA, 405 bp, Oryza sativa
  unsure (1)..(405): unsure at all n locations
atcacccatcatttcctctctctccttttctactgtcttcattgatgctgctatattgaaattgcattttgatattggttctttgacaactgtggagcagcttgccaagacaaaggcagctcatctgctgaagtatcctgatgcgaagatactgtggatcgagtgccctacatatctttgcattgttgctcttaatataacaaacgccagtcgtgtagcttcagattatntatattgcagtatatcaagaacatagctatacgatgtttggtagagatataactagctttatgatagcagctctcaatcatttgtatagatgggtagcaagcagcagcactgtgtctggccattcacaagtggaacatgaatatttactcaatgcaagatctatattgtctctct

SEQ ID NO: 3486 - DNA, 272 bp, Oryza sativa
aaactattgactggcttttataagtatgccatctaaatgagccaacacaatgacccattctggtcaccataccaaaaaatgggcttatctatatataccataaaccggcatcaaagattttatccaaaaaaagggacaaacctttacgaaactattacatcaaaccacatatggctttttttggtaacacaaaggtattagaaattaaaagccagtctgcaacaagaagcctctaaaacataaaattggtgaagacctttagcatatataag

SEQ ID NO: 3487 - DNA, 320 bp, Oryza sativa
tgagtaggagggctaaagtcgagccaaataggcacattgttcggacatgatttctcataacactacacacgatgatatggaaagacaggtaccttctaaatatataccatcagagaaaaaaggtgagaaaacaaactccttttcttctttatctccgacaggaaaaactgctgagagttgttctagaagccctaaaagggagagaaaggtgaacacgatggctaatgttggggctcgacagaatgcattatctgaaaaattactggtcaagactctaaacgaaggtgaacacaagctctcttattctaacattactacct

SEQ ID NO: 3488 - DNA, 127 bp, Oryza sativa
  unsure (1)..(127): unsure at all n locations
cacaagcaccncacaagcaggaaaaannnacaaaaagcggancacaacaaacgcaagcgggggagcaacacaaaagggggagaaagcncnccgnaaccacangnggcgcacncacacacanagcgac

SEQ ID NO: 3489 - DNA, 250 bp, Oryza sativa
caataacaatgcttggagcagtaacaacaatggtagcaataatgcttggagcagcaccacagattatgacaatggtggtcggagcgacaacaattcctattacaacagcagtacttggagcagctacagcacctatagcaacaacgctgcctggagcagcatatcagctacaacagtaacagcgcattgagcagcaatagcatgtaccacaagtacagcgcatgggcaacaatagccacaacagttggag

SEQ ID NO: 3490 - DNA, 281 bp, Oryza sativa
ccagccgggccggggcgcaggcacggcgccgcaacgacacggagccaagcaaacagccgccaagccgacgcctgctctccaaaatctctgatcaggaacaccgaacaggaacgaactccccaaaaaaaaagatcagcacgaaccgcggcctgagaaaccgacgacgagcgccgacaccaacgcttgaccataaaccgggacccacaaccaaccccaccccagcgaggcgcaaaaccacccacgacgggaaagagcaccgcacacgcaaaaaagcacaacaa

SEQ ID NO: 3491 - DNA, 159 bp, Oryza sativa
atcattggtagtttacactggttacaaagacttgttcagcaagcttcccagacaactctttcagtgactggcaacagatctctcatatttgattgatccctgctaacagtgcgcccattgaagattgaaggattattcaagcctggagaccatttaaac

SEQ ID NO: 3492 - DNA, 266 bp, Oryza sativa
  unsure (1)..(266): unsure at all n locations
accaaagcaaaaaanncacncnggggaaaanncannnncaggccagaaaaccccncaaagacnggaaaaancagnnncaaanncnnggccgggggcaagncangccccaaaaagacgaaagnancancngcgnanggcaagaaagacaaaccancancaacaagaagagggaaaaccccanncaagaagcccgccnncnnnagcccnncnnaancnanagaagaagcangncagccaccanagaaaaagaaaggagaaaaggaccc

SEQ ID NO: 3493 - DNA, 191 bp, Oryza sativa
agctcttggacagaattaactctgcattgaccaccgtccgagggacaatgtgtgctatcttgctccacagtgtatatatgggcaacctattacagaataggcagatgttatagctctggcattgtgctttttgatatatctcagggagaaggtctacggagacagtgaaatatgggagccatcgctatatt

SEQ ID NO: 3494 - DNA, 433 bp, Oryza sativa
  unsure (1)..(433): unsure at all n locations
atgtgcaccagtcaatcgcttgtanatgaatgaatttgttgctctttaatcaaacaatattaactgccggtgtcgagttgacggggaatgtgcccaatataacctctggtgctgactgcgcctcctctgcagatgcatgattaacacgggcctgaacgaacttgggtccggcacgtcttggcttcgggcacttttcaaccgtgtgtccacgtttgctaccaatgaatcataagtcgggattttctccccacctcttgtgctgttctgcagagctggctgaactgaatgggctggatctttagcgactccgatatggttgagctggctgctactattgtggactgcactacgaggtcttgtaaatacccgaggtatgacgtctgccgatatcatgggacgccacgtattccattaaaacagctctgatttcccg

SEQ ID NO: 3495 - DNA, 58 bp, Oryza sativa
cggggggagagcacggcacaaacaaaaaaataaagccaccaaaacaaacggggggaaa

SEQ ID NO: 3496 - DNA, 334 bp, Oryza sativa
  unsure (1)..(334): unsure at all n locations
tagttcctgacttctcatnnnggagattgggtgccttctgagtgtgcaggtcagggtttacagcctcacagaaaatatccaaaagttgcactttaccatgttttccagcttcatacaagcactgcataatcacaacatacgaaatacattattcgatggtatggctctttaacttaagcagaaaaaatggccctttgcatgatattatccaagttttcataagtacaaaggaagtgatattccagaattccactgtctctaattgcaaatggtaacacatttgttggtacccattaagtttagatcacgagtaaaccacatttcgttagctttt

SEQ ID NO: 3497 - DNA, 431 bp, Oryza sativa
  unsure (1)..(431): unsure at all n locations
attactaacatgggatccatccctgtaataaattaattcgccggcggctcttgttacaaattaaagttgtttctgcacaaatgatttatatattttaagtcgttcttgccaaaggaataaaaataagttttatatacaagcggtcgagcacatacacactntataaaactccaatatatcgtgttatacatgtactacctctgcctccaaatacagggggtgtgtggatacatgaactaaaccttatgcactgtcacatcggatatatggacccttattttaagtatttaatatagaccacttaccacactaattgcataaatgagagcttatctgcgagataattctttaagcctaactaatctattatttgatacgcatcacatatgctaattatggattaattgtgctcaaccagatcgtctcgcgat

SEQ ID NO: 3498 - DNA, 271 bp, Oryza sativa
  unsure (1)..(271): unsure at all n locations
aacaanacaaaggccgacgcccgggcacgagaagacacccaccacaccacccngcaggccaacnnagggccgcgggacgacnncaacgaccggcagggccaagcccaagacancgaaccgacgcgggcggcacncaaggaggagaccaaggngcaccagcacgccgccccaagggcgnngaccgacggcaggcgacacacgacggccaccccgacaacccgccggccncaccgaaacacaagagcaccgagcccgggacacggcgacggcc

SEQ ID NO: 3499 - DNA, 293 bp, Oryza sativa
  unsure (1)..(293): unsure at all n locations
gacctatanatactcaagctntccatgatatattatccactagttaataagaaatatttataaatattttatcattaacatcacgacgatgcataatagttaacttaaaaatgtgctaataaattaaaatgaatattgtactagaacagatgatgtcacataatatgtccttaacacgctttctcactgtgaaacctatgtaaactaattaagagcattgtttaaattaaataaagcataggaaatactaatgccatctattaatatatgtcaatatataaattatactcatg

SEQ ID NO: 3500 - DNA, 369 bp, Oryza sativa
  unsure (1)..(369): unsure at all n locations
aagaagatccctcacgacagagaagagcagggggctacaaattaatagccagctgtagcacagactctaagacgcagtgtgtctataataggtgggactagatattaatagtgtaatatgtaattattgtatgaatgagctattaaattggttatagataaattgaagctagtagttgactatactattgaacttgctctcaccgtgatgagtgagctgtggcagttaggaatgtcaattttggtgcacgacattgcgagcagagaatgtgagctcagcatcagtactctagcgggctgcagtttcgactatcatcatgtctgacctaacctgtgtgccanacctaccctcatgcactgtagtagtaaa

SEQ ID NO: 3501 - DNA, 349 bp, Oryza sativa
aaataactgctctggctcagctgcacgcctgatatctatatctcttgtacagctcatgctcatgtctgtgtgtgtgatgttgggtgcaagctattttctgaaaattggcccgtctttcttcattggaacgccattcgctttatatagcgggaaatgcggtaaaatctgttcaagactaggcaagaaactgtataaaacgttataaagaacctacactgcaattatatgatggccgggtctcaatgcggaataactaagctatttagtgaatgaaacttaatatatctaaatgggccaccctgaatataatatctacctgcccaatgttcttttcaatatacaggctttt

SEQ ID NO: 3502 - DNA, 368 bp, Oryza sativa
ctattgttctctacaacaagtgaggcatcacaaacagaatctccatggcttatagcctatctacgcctatccaccagaatcttaatagaaggtgaaatgctatattttgcaacatgaacacaatgggccgttgcccatcatcaatcaattaacagatatgccaccttcatgagagctctatttaagtagtggaaaggagggttgcatgagctttcttataccttctatgaagaaattgtgaagtctttcataagaagactctaactcttattacaaaacttcaaaaaacatgataccttcttagatccctgaacttgacaatctccttctcactattaacatagagcttctcaacatactcaccagct

SEQ ID NO: 3503 - DNA, 362 bp, Oryza sativa
gctgacccagtctacggaggattaaccaatgaattctgtgtgtttacattggtatgataaaccgtcacaattttgagctcgatctccccccagaggaaccttagccaagagaaccatgaaccacaatgaagagcttgcccacccatgagtaatatttatagtagcctcttagaccgagatctctcttggttatccagacataagaggaacataactgaacattttgggctcaagatagtattaatcgtagcccactaaaacatcccctagagagctgtaaacaataacaaaacttgtatagcattctgacatcatgactctcggtagaggatactaagtgacatataaatagagatgaagat

SEQ ID NO: 3504 - DNA, 320 bp, Oryza sativa
ctgcttcgcctcacctgcccaccccagaatctatggtcaagtggagcgtctccatgcacaaatcctcaaaggccttaaaaccaagaactttaatattctcaagaagcatggcgaaacatggatcgaggagtttgcaacggtgctttgggtcaaccgatacacaccaagccgaacgatcggtgaaacgcctttcttcctcgtctacagcgcagaagcggttcttccatccgagctcacactgaagtctcctcgggcaccatgttctgcgaggctgatcaagatcagcttcttagagatgacttcactacttggaagagcga

SEQ ID NO: 3505 - DNA, 352 bp, Oryza sativa
  unsure (1)..(352): unsure at all n locations
tctcgggttcttggtctctgcccgaggcattgaggccaaccccgagaagatacgagctatatagcggatgcgcccccccagcaaacttagggatgtgcagtgcgtcactggttgcatggccgccctaagtacgtttaaatcgaggctgggagagaaggcgctacccttatttaagctcctcaagcgctcggggccgtttactcggacggaggaagctgaaaatgccctcgcccagntgaaggcgtatctcagctctcctccagttctagtcgccccggagccaaatgagcccctgctactttacttagcggcgaccncccagtagttagtgcaacgttggttgtggagcgcg

SEQ ID NO: 3506 - DNA, 395 bp, Oryza sativa
  unsure (1)..(395): unsure at all n locations
catngacgaaacatcggatataggttgctgtccctgccacgaggaaaacgcctncgatttcttcggacatttagcaatctggtcatcccctccattatttgtgtcatccttggcccccactccgtcatcatcatggaccattgggtcatcatgcaaaggtatcgcaggttcgaaacccttctcctcaagggcaaaggtcaccggataacccattgtaccaaaaagaaggtctgtggtaattggaaggtcggctctgctcaacaaagctacccttactcgaataattcccttttggcggaaggtgagcatgtctacttcttgtgttacaccaactacacaccctagtgcccagaacgccaaataatgacgccatttgtgagggacaccagtgatat

SEQ ID NO: 3507 - DNA, 317 bp, Oryza sativa
  unsure (1)..(317): unsure at all n locations
tgattgacagctgatgagtattataatctcatggccaatgaaagggaagacttggtttaatcaaaattaagagccccttgcaaggttaccaatgataaagaaccggttgctcgacattacaacatagaaagtggtgcccaaatctttttctgaagaagaacttgtatggaaagttgatttgccgattagaacttcggataacaaatttggcaagtgttcgccgaattgggaatgaaccgttcatatctataaagntgtgtctaaaggagcttacatgttgcaaggacttcatggagaaatttattgacgagcactta

SEQ ID NO: 3508 - DNA, 121 bp, Oryza sativa
acagaaggacaacaacccagcaaagaaacagaacagcacactccgacacaaaaggaaaaccagcagaaaaccacaccagaaccgccaggcccccagcacaggacgagggggaaaccaacca

SEQ ID NO: 3509 - DNA, 387 bp, Oryza sativa
gctcgcttaatctagtggattgtaaataatgatcaatattatattattttatgcgattacaaattaatagctaccattatgagactaggttctggctcttgaaatatcaagtgtcatgtggtcgatgaagaacagtgtgtgcctcacgaacttgttttggaccacacatacactgattccaaacaaagcaagcaaaatttctcggctgatcttcaaacagaactcccaacgcctaccatgctaagattccaagccaaagcagagcttctgaatatatgcatctcttcaaccagaactctcaatgccttgcatgtaaatcatctatatgtaacacaatggctacacaagtagatgtatatttcgaaatatctatattccatgttctag

SEQ ID NO: 3510 - DNA, 491 bp, Oryza sativa
  unsure (1)..(491): unsure at all n locations
taattacaacttggctganagtattattgccacagataatatatacccggcatgctgtgtgctttgacttggacgacgtagagtcatgttcgtttagaggacctgtcaantttattaataaaatatctcgggtcgattatttaccgccggtggcccggcacaaaacaaaaaataatatatgccctctctctttctttttttttgcatgagattatgcttctggagagaagagatggcaccaataagagtgccaaatttaactgcgtatatatgacatgcaatggatccgataaaggatgggttgagagtatagactggagactttctagcatgtccacttgtatcgagacttgtatatgataaagtccatggcaaatgagttcataaaaatggattgttggcctaataagaatcaaatttactatttgggaaaagttaacggttctccagttttattagacctaattgcttcaatgttaaactgcatataa

SEQ ID NO: 3511 - DNA, 334 bp, Oryza sativa
tcaccggtggacagtaacctctcggtggtccgggaggcataacgcatctttaccgggcgcacgcatgtgcggcaggtggtttcacagcgagtggtacaccacgctgccgaacgcgccgcatgacactaagatggcgtgcgcgacgccacgcctgcgggcgatgtccgtcgttcacgctaggaaagggtcggcgatgacgcataccctgtcagcgtctgcttcggcgtcggcgatcaaatcacggacgaaaccgtcgaagctgttctgtagcgagcgcgactctgtggcctcgaacagcgtgatgataaggaggggcggcacggcattggtcgac

SEQ ID NO: 3512 - DNA, 347 bp, Oryza sativa
  unsure (1)..(347): unsure at all n locations
tacttctatcgatatgcccttatgcgcggccatacataacatagaaatcacacgtggaaggggtgggcaattagctagagcatcaggtgctgtatcgaaactgattgccaaagaaggtaaatcggccactttaagaataccatctggtgaggtcccgttggtatcccaaaactgcttatcaacagtctgacaagtgggtaatgttgtggtgaaccacaaaagattttgtagagcccggtctaagtgttggctangtaaacgccccgtataagaggggtagtatgaaccctgtggaccaccccatggcggcggtgaatggaagccctcatggtagaaaaaaccacacc

SEQ ID NO: 3513 - DNA, 312 bp, Oryza sativa
  unsure (1)..(312): unsure at all n locations
gagatcaagagtgaaaccgacgagtgcatttgtgcaacctcctgaggtaagggttgaaatataccctgcccttgtggcccctcaatggagacgtaagatccgtggatccgaactttgggaaacaaatcaacgtgtctactctcttggtttgctcgttcttaccatctctcatattgtgcttgagcttgttttgacccgatctacttgcatgcttaattaatattggtggngaccttatatcttgtttagataccttgtttgtaatctattgtttcatactacatttgtttgttcgagttacaaagtcatagc

SEQ ID NO: 3514 - DNA, 331 bp, Oryza sativa
acaaaaaccagttgaagtgccacaaaacgccctctccaaaggaagcctgtaatagtagaagacaaatttacggagaactagccacggagaactctgatcgagctactgtcagctacaggatggctgattctgctcctgaaaacgcttatatacagctacgggatacccaagaaaaaagttacttcatgcaccaaggcatagttgctgctcctcatatgctctgaatctgaactagccgcggcggaggcacaggcggtgtgaaagtagacagaaattcctccgacaagacgacgatgaaacggtgaacgccaattgcagcggagaccaccga

SEQ ID NO: 3515 - DNA, 418 bp, Oryza sativa
actcagctgtagaggaattgagaagagttgttttacctcgagataacatgttactgatccgaggagtgatccgggcacaccgatgagcatgaacgactggcgtctgacaacacccctgaaattttactgttcatatgaactccatcaattaaaccgcgaacttcggctaatttggatgtccaagaaacgtaaaaaaatcaatgaattcatatgttaaaaactgacaagagtatatcacaattgagcaggctttgactactctctctagatgtctcgtcctgcctgatgtgttccctacttctttctgacttcgagtcactgatacgtggactcacctggtagagggttcatatatcagtgatacatggactcatttggcagaggggtcatatatcagtgctcatgtagatagacctaa

SEQ ID NO: 3516 - DNA, 431 bp, Oryza sativa
  unsure (1)..(431): unsure at all n locations
tatntcacgtttgtcacggtgcagatagaaataataaagntccattttcttttgtgaactgcgtctcttgtagtgtaggatctgtttcatatagtgatttactatgctgcttgtgtggtaaattcagagtatcattctgctgggtagtaaaataattccttccgatctccacttacaggaaatgagagagtattagaaacatattctgaaatatctgttctgaagaagattcaacttacacacctcacacattatggactgaaacttcacgacttagtggcgaagaaggctgatcattcaagggcggngctggcagacttgctatatgggcttttaaaatttgagccatcagagcgtcttacctgccaagaagctctaaaccatccattgttcataaatactacatgagtacatgatcatgctgactctac

SEQ ID NO: 3517 - DNA, 326 bp, Oryza sativa
  unsure (1)..(326): unsure at all n locations
ctcaagctcctactactacccaccaacaacgtgcgatggccattccgnctataagccctcttgcatcattgtatcttcatacatgcggcattntgatgccgctacttgtgcgaagacacttcaggtgttaccggtcatttgtcctttattactcctccttgctctcctctttcaatagatttggacatgattgcagatctcaagacactacccgcaactaagtactactacggtgtataccgactactgcgtaaaactctgtcaagggtgcctacaaagaatacttccaagttccaatgcaaggtggttttgtcttaactcggttc

SEQ ID NO: 3518 - DNA, 202 bp, Oryza sativa
caaaaagggggaaaggaagagggccccccaaaacgagaaaaagaaaaagggacaaaacagggacaaagagaacgagagagaagaaagacaggaagaaaaagcaaagaaaaagaagagaaccacaggaaagcaaagacagaaaaaaggaggaagagaagacaggaaagggacaagggaaaaaaagaacaaaagaaaaagaaaa

SEQ ID NO: 3519 - DNA, 321 bp, Oryza sativa
  unsure (1)..(321): unsure at all n locations
cctctctcctcagcactagagagagcaagccaaaaaaataacaaaaaaacaaaaagaggatccagcgagcacaccccaccattccccctttgtcaccaccttccaccaccgggtcttgttttcgttgctgattgggtttgtgttttgtggcgtcctttgtgggtaggctcgcgtctctacttcgactagcctaagaccagcactgtacactatacccttgagcgattattcaatttgctttggctaatggtggttctagatntctcttgaacattgctttcagcccaccaacagcttcaccacaaacccgactacagcttg

SEQ ID NO: 3520 - DNA, 362 bp, Oryza sativa
tgaagaaattgctctgcatttgacgatcatcagagaggaaattcatgtcaaacgaactgaatttctcgtcttcttgtggccgacggtttttcttgtcagaaatggtgaaccgagctgacagatcgatcttacaatgtagaacgaccccggcgtcttgttcaccacgttcatgtgctggctgacgaacgacattttgtgagtaaaactgaacttcgtctgatctgcaatgccatgcatagagctaattatgcgcgaagaggattctctgaatattccgccctactgatgcgtgcggttatatagctacaaataatatgcaaaggttgacagacatattttgatattaaagtatatacaactaa

SEQ ID NO: 3521 - DNA, 386 bp, Oryza sativa
  unsure (1)..(386): unsure at all n locations
caaagtgtcaaacgacttctcctgtgtcttttcccaatggaagaccacccctatcttcatcaactcattcaatggtgcagcaaaggtactgaaatctttgacgaaacggcgatagaattcttcaagaccacaaaaactactcacctgtgtgatggtttagggaaccggccaactctctatggcttcaaattttcactcatccacctcaatatcctgtggaagaacaacatatccaagaaaagaatctcgttctgtgcacaagatgcacttttcaatgttagcaaacaaacgtgcatcgcgtagaagcattaaaacagcacgttaatgatccatgtgttcatccaaagacttgctgtanatcaatatgtcgtccaagtagactacca

SEQ ID NO: 3522 - DNA, 307 bp, Oryza sativa
  unsure (1)..(307): unsure at all n locations
ccggngaancccgacgagnncccgcngacancaaagcacgcggaaccggcaacagcgacggaggggagccccccccagcacgcgcgcaggaacagaaaagagacagccaacgggaaaaagaccagggcgcgccacgcggccgcgcgagcgaggaaacgcaacccgaacacgagccgggaaagaaaaggaacagggggcggaagcgaagcacccaggacggacggacgacccggcgaaccagggagcccaacccccgccgacgagagaagagccaacacaangcaacccagacacgccggaaaacacg

SEQ ID NO: 3523 - DNA, 457 bp, Oryza sativa
  unsure (1)..(457): unsure at all n locations
gtctaagatcacccaaatcggagttggcatgaagacgctattctcgtttgaagtcattgctatctacggaggccgaactggattccaaaacttattggacttttttaatatcttatagatcctccattcacccgatgcgttctttggcaatgttttacatttctcatgcttgattgcatgtatatacatgatggtcacatcaaaaagntacaatgaaacttataacaatataatttcgttgacaatgagatgtaaattataccaaataataaacgagtaagagcctaatatcatantttaccgcagtgaacaaatatatgactcanatatacatttctattaataagtgaatgcagaaaaaacaagaatttaatttctctatggtatattgtaaataaattctcacatacaggatactaacatatatgatagagtgacatggataaaaaacaatcta

SEQ ID NO: 3524 - DNA, 224 bp, Oryza sativa
actaacggacgcagcggaagcccccctgcagggcacgttccgacccgatagagagaaggacaagctgctacacgccctgcagacccccgagcatccaggacgaacacgagggaaaggcgatattccctggaagataggactcaaggaagacatccacacgaacaggagctgcccgaggagcaagagagacaccgaggcgaagatcgcagatcttgaggacaggg

SEQ ID NO: 3525 - DNA, 402 bp, Oryza sativa
  unsure (1)..(402): unsure at all n locations
cgtacaagctgaaatccatgctttcaaagatcttggaattcancgaacctctccaactcgtgatgtccattgtcctatccataagacagagaatcacgacctttctagctgcaaggttcttctcagcgccatgaagacatcaccacctaaggtccagcaatcacaaaatccccctatggatacagacaaggaacaaggtgaggcgactacatcagaacgattcatcggggtaatcgatatcgatccccacgaaccatctgtcctacatctgctcgaggatcaagcctcgtcatcgacaagtacgccacgcgacgtgtacgctatcgatggaaccaacacatccagaggcactaacgcngagatggcggatgaaacgactaccctgacgctggcccacatatc

SEQ ID NO: 3526 - DNA, 376 bp, Oryza sativa
  unsure (1)..(376): unsure at all n locations
gacttttaagtcagcttatcggctcacatgacgcataagccagtggatttaatgtcctaagtttagtggtggagtcatacatatatctcatataagccaaaaaagcttctccaacctagcttttggcttaatagtgttagagtggcttatggcttcaaaaaaagccaaatgaaaaagctgcttggctgttttgacttagacttttcgacttataagtaggcttataagcctaaacaaagagggccttaatagtgttagagtggcttatggcttcaaaaaagccaaacggaaaagctggttgtttgtttaggcttatacttttcgacttaaagctggcttataagcctaaacaaagagggcctaanataagtgcagt

SEQ ID NO: 3527 - DNA, 398 bp, Oryza sativa
  unsure (1)..(398): unsure at all n locations
caaggngcatggctctggaggagtcaattatagctaaaattgccacgaaatcccaaacacgagtgtgtgatagcagcactcgaatacttggctaatcgggactaaaccgaattaagtatcattgaactatacatagccttggcatggctttgagagatggttacatcgctccagcaatcgtggttcgaaaattatctcaaccccattattttatttgaaaataatgtagcgtatgacacacaatgcaaatgagttcacatgaacaaactcactcaaagcatatgaacctcccaagttcttctatgcacatgaattgcatataaacaacgaaatattgcatgctaagttatgtgaaaatcttgctgattttatcactggtcattgttgacatcttctcg

SEQ ID NO: 3528 - DNA, 320 bp, Oryza sativa
  unsure (1)..(320): unsure at all n locations
cagcagcggcnacaacgacagggggggcaggggaggaaacggcccccaccaggccganggcggaagtggcgggcccgaaggcggctagcgagcaccgcgcggagacggggacttcgaagaccgctagcgagcccggnggcagnggccaccacagcggcagagacggcggaggtagcgacgctcggaagcgggcggcggcaacaacgatggacggaggcagcgggaagcggcactgggaagcgggcggcggcgacaactacgatgacggccaaagagcccggcggcggacggcgagcggcgctgggaaacaaccaccggca

SEQ ID NO: 3529 - DNA, 453 bp, Oryza sativa
atgatttcttggcgttatataatgttgaagtaatcttatattcttattagcctcgaatttaagaaattatgtttgaagactaagagtgttgaacaggaaccattctgacacatggtatgatcatatggatataggtcacttgtgatggacaaacaaacataattacatgatgtctgattgtgattgcagccagaattatagggtatcacaattttagtacaaccaatgaaaggttagttcaagagtaaccaaatattacagattacttcatggatgcatcttttggattattttgtataaagtagcaagagggcaaaccagtagttagtacttactatacctaatagcactttaaaatatataaacatgaatggcaggaatgatacagagtacttaattactgagactgagagcaatgctgtctaaactaacagatatgacatttcccagata

SEQ ID NO: 3530 - DNA, 159 bp, Oryza sativa
  unsure (1)..(159): unsure at all n locations
tataaatactaacttctcgaacttcgagagaacacgcgatcgttaaacatccgatnaccgcttatatgcgcaaacaaactgaaacctatacgaaggacccatcgaaagaacctatttagactatttagtagtgccattaaatagatctcaatttacgga

SEQ ID NO: 3531 - DNA, 330 bp, Oryza sativa
  unsure (1)..(330): unsure at all n locations
gagaacaaaacgcagtgagggacagaagcgcacacaccnacaaagncagcagagttgactaaaaaaacccaagcatgcttctaaaggaaaagggaaaagaacatccgtcttgggctgctgccactatgcactcacaaggagaaaaggataagagggacacaaggttgccccaccagaccaaagaaagagccctaaagaagagttcggcaaacacacagcccgaacacgagaanaagaactgctggggaatgcaagaccaaaagtgccacactggacaaccggttgccgaacacaaaggaaaaccccccaacaaaccaaaaatgaccgcag

SEQ ID NO: 3532 - DNA, 474 bp, Oryza sativa
tatattgacagcatcttaacgcgagattatgatgaggttcactcgggttttgatggatctccacgcctgaatgattagagcatggtgcctcgaccatatatggcattgtgtgtcgcttgacctgctgttaatattaacgacccttttcactgtgtgttgctcttgtcctgttcggagctttatatgtgtctaatattatttatccttctttagggatgtattatgaactataactttttctctagcgtacgtactactttgtacattatctggagtacaaaatattgtatgtcatgttataacaaactgacccaacactacaaaaatccatataagatcacacatataacaatccgttcaccgtattatacaagagtactggacatacatattatacagctatacggcgtctcctactactattaattcagataatacatcatgcctcattactcgccttgccactgatttcta

SEQ ID NO: 3533 - DNA, 170 bp, Oryza sativa
  unsure (1)..(170): unsure at all n locations
ccaagccaagggcncacccaccagaaaacggacaagggaccacaagacaaagggagccccacacaagaggagcaaaccgcccgagggaggaggacgacaacccaaaaccaacagacagaccgacaagacgnaaaggagaaggccnagagagggacccgaaccccccacaa

SEQ ID NO: 3534 - DNA, 96 bp, Oryza sativa
  unsure (1)..(96): unsure at all n locations
gggccaagaggagcaaaataataataaggngcgcnacagcccggnaagagggggaaagaagccgccaccccccaacgaannnnncaacgcgaaccc

SEQ ID NO: 3535 - DNA, 293 bp, Oryza sativa
  unsure (1)..(293): unsure at all n locations
ccatncccgccagacagccaaaaacagaagcgataagacccccccggnccgcaggatgccaaaaaagaaggccatatagcagcacaccccgagcacgataaaagggcggcgaccaaagcgatcggataataatcctgcaaaaagcaagacacttaatcgaccaatgcccagcgatgagaaaactatcgagacacccgcggcattaggccgccaaagtggcgccagcgaggccatnaacaggctcatcaaaaggacgcccataccatgcaccangtaattaatatacaacccaa

SEQ ID NO: 3536 - DNA, 114 bp, Oryza sativa
ccggcgaaacccgacaagttctcgccgacatccttgctcgcggaaccggcaacagcgatggaggtgaacccctcccagcacgcggccaggatcagaaaagagacgcccaccggg

SEQ ID NO: 3537 - DNA, 250 bp, Oryza sativa
caaagagcaaagagagaaaggggcgaggcaaaacacaagcgagccaagacaaaaaaagaaaagacacgcagaacgccgaaccaaaagggacacccccacgagaaaacagagaggaaacacaaccgcacgaggcggaggacagaagggcaaaacaacgagaaacggcagaacacaggcacgaacagaacagagagggaacaagcgaacaagaccacacgaggagcgaaaacagcaaacgaggacacggaga

SEQ ID NO: 3538 - DNA, 281 bp, Oryza sativa
  unsure (1)..(281): unsure at all n locations
gaagnggaacggggcaaacggaancacggaacgggagaaangganccccnaggcngaangaanccnccaancaaaggaaaaggagncaaccaaacccnnaccgaaaaagaaagaaggaggggcagaaaacagacnnncncaggcgcncgggcgcggcccaaaggaaaaaagcggcncggccgagccanggggccggcgcggccacgaggaggcggcccaacagaaagggcgcgggcgagagaggccaacacgggggacggcggncccaccacgcagggccc

SEQ ID NO: 3539 - DNA, 122 bp, Oryza sativa
  unsure (1)..(122): unsure at all n locations
agggacgacccccacnccccggaaaccaaacagccccaaagccaaacaaggagcaggcaagcagacaccgaacagacaaccagaaggacaagggggccaacncaggggaggacgcagcaggg

SEQ ID NO: 3540 - DNA, 178 bp, Oryza sativa
tgattaataatactcccatgagggagaaaacatatagaattccacgtcgcatagaacagaataagtatgtcgagaccttcttatattaaatatcacaacacttagatgctccggtgcctgatccataatagacaaatctcccaatcacccatacaacttggaagtgcacatatattaa

SEQ ID NO: 3541 - DNA, 292 bp, Oryza sativa
  unsure (1)..(292): unsure at all n locations
atctgagctaccacgaccaagtagttgataggagcgtgtttattcttgtgtttgtntgntgnntgcgactaaccatcgcaggattgcgcaagggaataagagatcatcgacttcttcaccttagatgagatatgacaacttctccatgaagtgcatatgaggtacctgactataagtttgcatgagttgaatctaagctatcattatgcgacgagaagtatgattttgttgcttatattgatcggaagctagcaatagacaatgaatctgacaagattttctgatgctcaat

SEQ ID NO: 3542 - DNA, 431 bp, Oryza sativa
  unsure (1)..(431): unsure at all n locations
tcaagctcgcatacttctctcttccttatgtgtatataattctgggtaagacttgctatgtcaatcttgtatnttacccggtgtctgcgatttcaggagaggattccggttatgagtnatgcttcttgtgtggtcattgctctgccgaaggcggcgaaggccatgagtgatctcttgcagcctggctcttgcccgcgtggtttgccctaatggggttgtggcaccaccgggtttatctcttacttatgaactctatttgagacttccgctgctatattcatgtgttgtatgttgggaccaccgaccctattattgagtatgtctctcgctgcactctaaccctattatggcacttgctatagttattaactggctcgcgatgaaagtgtgaagctagtcccatttctggtgactatctcatcatgataaac

SEQ ID NO: 3543 - DNA, 138 bp, Oryza sativa
cagagaaatggagggaagcagccaccgcagcaagggaccagcgcacactcaaaacccgaagacaaacgcaagactgaaagagcccgccacaaccaacgcaccgcagacagcagcacagcaatcgcaggagagccacgc

SEQ ID NO: 3544 - DNA, 200 bp, Oryza sativa
  unsure (1)..(200): unsure at all n locations
tacagggacaatctcttgggaaccaatacccacggaatggagtttttctactgccctactgctgccagactactggctggcatctgcagctttgattaataattgtacccctgtacagattaatcctagtacgagtactattaaacgggaatttaaatgaatngcgataaaaataaattaacttttaataaaaacttttc

SEQ ID NO: 3545 - DNA, 390 bp, Oryza sativa
  unsure (1)..(390): unsure at all n locations
atgactatctttctnggttaataaaatattgagtgatcttagatctgttgattcttcttatggggctcattatccacaatctgagatttctcgtcactttttgaatggtcttgacatgtctatttgggagatgaaagntacatctattcacgagtcttgtaacatgtctactttgactntggattcgctttacactacacttgaaactcatgagatgaatattccttctcgtaaggtgattctaagtctagtgctctggtttcgtcttcaacttctttggatcttggtgcttcttcatncaatatattaatgccatgtccgatgatcaacttgaacagttcgaggaggaggacttggntttgctatctaacacatattctcgagctatga

SEQ ID NO: 3546 - DNA, 103 bp, Oryza sativa
  unsure (1)..(103): unsure at all n locations
agcgggaagacaaggggccgcgcagaaggggccaccacccacccccnacanngcanagaagggggcnncacaaaagaacgcccacaacccgaggcccgcagca

SEQ ID NO: 3547 - DNA, 271 bp, Oryza sativa
  unsure (1)..(271): unsure at all n locations
agtggagcacttaacccgtaagatagtattgttataatatactcccttcgttatagagaaacatagctcattttacatcataatgatattnttattctttcaaaatttntatatttatcttcatacaagtcatattatacacaccaagagacagataattataattcaattcagtaaattctatcctttaaagtaacttccatgggtttctctacaacctgcatgtataagcctctatcgtggaatataaaataagtagcctttctataat

SEQ ID NO: 3548 - DNA, 400 bp, Oryza sativa
  unsure (1)..(400): unsure at all n locations
tatcagngacanncatggagtgttgtgtcaaagcgaaatatgcgctngcacgcagagaagcataaaaaaattaaaaaagaataaaatatcgttaggacataaaatgagttttctcccctatagccaagggagtagattgattcaatactacctttgcggattaagtgcttcactaaaatagttctctctataaaagtttcaatgctatcttgtgggttaagtactccactaaaatagttgtgtaaaaacattacaaaagttgtttctaaaggtgacccatgagtctgagccaagctcgtcacataggagggtgcacatttgaggaacatgtgaaaagaatgcccatggagatcatttgtttatgagtgcgatgaatacaattgttcattcaattataaag

SEQ ID NO: 3549 - DNA, 374 bp, Oryza sativa
  unsure (1)..(374): unsure at all n locations
aaaatgtgttgattctttcggagcaagccgaatctactaatggaaaggaagtggtcattggtgagccaaggcctaagatgatggtgccaaagaagccggagggtggcgtttggaaagagaataaaggtggagcttcaacgtctaaagctcttatgaagaccaaagtaacctttgatatggttttggagaagtgtgagaagcaacgtggtgagagggatcacaacaaactggaatagaccaanatcacctcctatggagctacattgtcattcaccaagacaatccgttactattttttttcttctctacagctatatagggcatatacaacgtcgctatcagtctaccttcactatcttatcagtaatgtatca

SEQ ID NO: 3550 - DNA, 157 bp, Oryza sativa
  unsure (1)..(157): unsure at all n locations
aaataacttagcctgtataacatttatcgaaaccagcggaaatacagtccttctctagcacgtggcggtgacacctggtatggaaaattaactgtttgccacttttatggttggcaattatccaaataccatttttagggttgcagctatttntttc

SEQ ID NO: 3551 - DNA, 257 bp, Oryza sativa
  unsure (1)..(257): unsure at all n locations
gcgcgccacgggcgagggggganaccggnagaccggacccacaccggancggggcacgccgagacgaggaacnacgnaggacgacancaagcaaacaggaaacagggagnanacnggcgcaggcccccgggnaggacaagcccnaacccagnngacacgggacnaacgagggaaaccacagaacacaaaggcgaaaggggaacncgaagaaaccgacgagaaacgagncgagcnggnnggacaagaacacccggcga

SEQ ID NO: 3552 - DNA, 407 bp, Oryza sativa
  unsure (1)..(407): unsure at all n locations
gctcgatttntttggaggaaaagtccactttgggttctcaactatttaatagcatctccaacagattggttcccaatcctagattttggggataaatgggtaaaattcagctcccacagattctgctaaaaaattggagttcccttccccaggtttttgggtctctatttgtaggggtgcgcaagccgaacccaatccctcgcattcttcggctttccgctgcttcgattcattcccgcgccaatgtcaccaggtaagcatagtataaaaactcggaccggagcttgacccggcggacctttctgttcaccggtcccgcggtctgacccgataaccggcggttcaaccgtgattttttacgtatatgtataatgcatgtttgctagtagtcacaagtgatatactgg

SEQ ID NO: 3553 - DNA, 381 bp, Oryza sativa
aagaggacaagaacggtgtttttagcgacttgccatcaccacagcggaactcgccatctttggttttagatgcatcaaacttctcagtccatgctcctttgaaataaagcgcattacctagaaccagcctggtagtatggtcaacagatccaggagggagtatctctttgatgaggcctgatgtgactttttctacccatgagttcacttgagaagcaacttcagcagcctgaatgaaacaatatcagtattcagcactattgtcaagctttagaaatcagaatgctagagctgagaaatgcactaagcatccaagaaattgcattaacattctcataaagtaattatatgtactggtgaaactcgtgaaagatttagcac

SEQ ID NO: 3554 - DNA, 336 bp, Oryza sativa
  unsure (1)..(336): unsure at all n locations
aaggagacaggcgtactgtttttgacgagctcttcccgctcacagccnncggcggctttcatcagctgttgcttatgatggaaaaagaaatttatttacttgtgctgagctaccagatggtttgtttcgtgtcaaagtccgttcacggacttacattgtatctgtggagttcaagaagaagcttcctttgagccaactctcggaactgcctgtgcccagagaggtcttgcaggggcttgatgtcattgtgcgtgaggcctctagctggcgcaagattatcattggtcagggattttactcgcagggccgcagtgtgcccattgggccggatgttgt

SEQ ID NO: 3555 - DNA, 389 bp, Oryza sativa
  unsure (1)..(389): unsure at all n locations
gtggatctatgcctactatcactatagtcaatangtttacacttctggaacaaaccatctttgctgggttgggcaataaccacaatagtctcggtttgaatatgaaccgggactgaacaatcttttttggtccgattaagaagcccaaccaaattttcttagatatgtcacacccggaagttcccctgttcattaatttctaattcactaatgaattgcctatagaaattactttggttaaccaagagagaacataacataacgatatgtttaataatcggaattgtcaaggagaatttctttntaattctctttgctctaaaatcattaacaggacttatagcaaaatattcagagcatcggagctaatgatggtaatctaacatatc

SEQ ID NO: 3556 - DNA, 304 bp, Oryza sativa
gttgctactatgctgtatatctcaaatgtatatggtcaaggcatatgtacttctctcttaaatcaaataatctctggcacggcggcttacccttacccctgattcccacgagacattgtctcttcttgccttaagcgggtgaaagacagaacaacaattagagtactaatcacccaatcttcattcaacgtttatttcggaaagtttcaaatgattattgtaaagaaatccaagttctcaaatgatacctcggtctctccaatgtatcacaagaattcctaccatttgccttctgatcctactt

SEQ ID NO: 3557 - DNA, 306 bp, Oryza sativa
  unsure (1)..(306): unsure at all n locations
caactctggccaatctgcttcacatatatgactgnttcacgatgaaaactgctatctgtcgcccgctaacaaaaaacatcaaatgatcccttgcatttggatctatcgagcaaaacaaccacactatatgcttattaacaggtgggtattctaacatttgatatcattgcatattgctctttcccttatatataaccttttcaatttctgtacacgttggaccacctatatccctttatttcttttttnggttagccctacatggcattttgttgcacattttaaccttcattaatacaatgttta

SEQ ID NO: 3558 - DNA, 183 bp, Oryza sativa
  unsure (1)..(183): unsure at all n locations
aagaaaaaaagaacccccagggaagggcccagagaaaaaacaaccacgagcgacanaaagggaaacacaaaagcaaccggagaaaggaagagcagcagcacacggaggccaaggggcacgcgccgacaaaaggcaaacagcacggacccaagcccgaacaaaaccacaccggcaaacaagaca

SEQ ID NO: 3559 - DNA, 208 bp, Oryza sativa
  unsure (1)..(208): unsure at all n locations
gacacaccgcccagancgnnacgccnnncgggcgggncggaacnaacccgacaaggagaaccgcnaccngaggaccggnacagnnacggccgccgnncaccggggcancggacgccggcaccccaggcaacagaacaccaacnaacccgaccanccggcacagggcagggcgcagcccccaaacacgagcngacgacanngcggagac

SEQ ID NO: 3560 - DNA, 358 bp, Oryza sativa
  unsure (1)..(358): unsure at all n locations
ntactgttccctgggattgggcttgggccttttctgcgcagcttatgttgatgcgaagaaggcccncttccgggggggcccgagccatcagtgagataccactctggaagagctcggattctaaccttgtgtcagacccgcgggccaagggacagtctcaggtagacagtttctatggggcgtangcctcccaaaaggtaacggaggcgtgcaaaggtttcctcgggccagacggacattggtcctcgagtgcaaaggcagaagggagcttgactgcaagactcacccgtcgagcagagacgatagtcggccttagtgatccgacggtgccgagtggaagggccgtcgctcaacggat

SEQ ID NO: 3561 - DNA, 377 bp, Oryza sativa
  unsure (1)..(377): unsure at all n locations
gcgcgntcatcatcaagggtcttatcgatacctcgtggntntgttgttctctatttgtaatctatgngctcgcttaataaactggattatggctattaccttacgatgggcctgaaccagtataatctctgttttgtgtgtgctagatgtcgtatcatgtagatacttgctccaacgtaccccagtacccccagaatacggtctacgggtatcgtccatcaacagcaatatcttggtgatgctctaatgagcaatcagtcgtgcgcactcatccgcgtggccagtttctgtacggtacgaagtaccccgttcatacgcatgcgtatcaattaggtacgtagttcgtcatatatgtccanacttatatatttataaat

SEQ ID NO: 3562 - DNA, 419 bp, Oryza sativa
  unsure (1)..(419): unsure at all n locations
caagcnagcaaaaaggagccggnggaaatcaaataagcatcacacganggcagaaaaggcgggatcaaatcaacaatgacggccccccctgcacacacaatgtcagtgattcagctgcctaaaagggcgataaaagaaattgaacgcaaatgcaggggattcctttggaaagggcaagaggaagtgagcggtggacactgctcnggcgcgtggaaaaacgtctgtacgccagcggaaaatggggggctgnggatcaagaattcnggaaaccnccggcatgcattgcggctaanatggcaggtcaccaagctacagcacaagaacagaccatggtctatggtggactttcaactcggaggggaagcggagaaacaacgccaatcaatggcagagttcaacgacgggaatggacaaaacac

SEQ ID NO: 3563 - DNA, 364 bp, Oryza sativa
  unsure (1)..(364): unsure at all n locations
tcatatatgatacccgacgggtaccaagtctggtactagnagnnatctgtcttggatcattatgtatcggctggtatccatatgtatcaattgatgtactatatctgatactgataaatatcagagtctaattccttattggtatcatttggtttagacataatctcgtggtataatagccccctaattatattacagtgcactgatcctagcatgtaacaccaaacactatggctagaaccgtagctgaaggttttgtttcaaaaaaaaagtaatgtatggtttattctaaaatttattgaagaagtttactataaactctcaaaaaaaaatcttctatatattctaaaatattggaataaat

SEQ ID NO: 3564 - DNA, 127 bp, Oryza sativa
  unsure (1)..(127): unsure at all n locations
cagaggcaggaaagagcgggggcnaaggggaaagggccgaaccgcccnccaacagncancagggaagcancnaggacgaccacgccaaaccccacaaccaacggnggagaagaaagggcggccgaac

SEQ ID NO: 3565 - DNA, 292 bp, Oryza sativa
  unsure (1)..(292): unsure at all n locations
tcatcagagaaaacagtcggcgcctcttcttgttgttgtctggagtctattctctaatagctatggggggggacgttggaggcaattggacatcctgagtgtctgtcagtaaatgaactctcattgtaccaatggctatgcagcagccgaatgatcattctagagccattgcgtcggggttttgacacagtggtcacgctagtggcatggacgatatggaaagaatgcaacggtcggggttttaatcagcaacaaacgacctgngtggacatcttgaatggaatggcggcag

SEQ ID NO: 3566 - DNA, 225 bp, Oryza sativa
  unsure (1)..(225): unsure at all n locations
aacgcgggacagcacagaaaggcaaaatagcacacaagaaaggaggaaacagcgcgaccccccaggggacaacagaggaggcgcacgcaaaaaaaaaggaagcgcggaccaaaccaagcaaanccgaaccaagccaaaggacaacaacggagggaccgcacacaaaacagcaaaaaacgcagggcagagaacaccggggagngaacacaacagcaacccaagaca

SEQ ID NO: 3567 - DNA, 270 bp, Oryza sativa
ttgcagtacacaatgaagaggtaagcccgtacatgttgactaagcatatcccttgttgcttctatagttgtcacgagaaatatttttataatggccatggaattgattctaacaatgttgttgcttcttcgcctcatccaattactgtgttcactgtagccttgatacttgtttttatatgcaaagatgcaatgactggtgatggcgttaatgatgcacctgccctgcagaaagcacatataggaatagcgatgggatcacgaactgcag

SEQ ID NO: 3568 - DNA, 363 bp, Oryza sativa
  unsure (1)..(363): unsure at all n locations
tctttgacgcttactctggctaccaccagatcagcatggcataagatgtctaggagaaaacaacgctcatcatgcgcttctgtgtatnttgctataccaagatgccattcagattgataagcgcacggaacacatatcatcgcagaatctaatgggcacttggcgatcagcttggacgaaatgtcgaaacctacgtggatgacatcgtcgttcaaaccaagacgagcgattcactattcgacgacctgagggaaacgttcgacaacctccgcagatatctaatgaagcttaacccggagaggtgcacgttcggagtaccatctgngaagctactctgctttcttgtcttatgacgagggatcg

SEQ ID NO: 3569 - DNA, 369 bp, Oryza sativa
  unsure (1)..(369): unsure at all n locations
gtctcatggctaacaacgacttgtactatgtgatcaacattatagcacgccgattctccagaattcacgatgtcgtcaggagagtatcttaatagaagtagaaagtggtcatgcgtggaatgctcggtcacaatgttcagacagtcctataaatctgaaataatattgtagtatgatcaaacgtcgatgattattaacacatattcctgtcacttcgttaaactttaaactgaatgagtaatcactggacgttctactacaaagagttaagaattgagacattngcagataatgcacatatgacctgtacatgattaaagtttcttttctgaaacactgataaacttataacacccagagcaaaggtaa

SEQ ID NO: 3570 - DNA, 414 bp, Oryza sativa
  unsure (1)..(414): unsure at all n locations
tcaccccttatatntatgtgatattaggtccttccctaattttctcgtttctttntatctcanaaaanattgagtcaaaattactgcaatggccatcaatattatggacttctctctcttttttttccttaaaaaaatgcatcacttaagttctccatagtttctcatgctagcattctgaggttggattccttaaatgcagaggctatgtcatttgacgaggatggcaatgaggtatggtactttattttgcttttgacttttgagtgggatgcttatatatcactatcctatttgctttactatttcttggcaccctggatgatcagtgaacttagtattttgtgtattcagtcaattgatgtgaaggtacagaaagcactggactgtccatgtgtagctgagttgaaaaat

SEQ ID NO: 3571 - DNA, 440 bp, Oryza sativa
  unsure (1)..(440): unsure at all n locations
agcttgaacatgagcatataactcacaatagttattctttcagaggaaaggtgcanaaatatgcatgacaacacgtgaaaattttcttcaattattacatattcagatgaagttaacaaaacagtgggattactgtgctcacccatcatatgcagatacagcttgaaacttgtacggcctctcatctagctctttaagctgcagatatctagctaattcttcatcagtgatgacccctggcaatcctgttgaaagaaattcaatagtaccttgaaacatgagatcatgagatgaatcatcattgacaaagcaatttgatataagaatatgaactntgaaaaccgttcagcatcaatatataaaaaataagtcacaaatgataatatgacccatttatggaaaaaaaaatgccacatcaaagctaatggaagctgggaaga

SEQ ID NO: 3572 - DNA, 461 bp, Oryza sativa
taagctgggcatttgtgtggaaagcctgtaacatcaacctacattgctgttgtacaggatgacagggcgctctacctagacccccatgaagttcagctggtaaaactatattattttcttagcatatatgaacaccagtttgacagatgttgtgtttttctgcctccagtgagttaagcaatctactcaataagtagattgactctcatgtagctatgtgtaattagagtcttgatgtcacattgtcacatgcaccaatatgatcagcaattcatgcctttccaatggtgctccgctgattgctccgtcctcccaagccctcccgttcacaaaaaaggaaaagaatagaatacagtattactagtatgcacctttgtctactatgcgtgcagtcaaggattgctatcatctggcattctgggattttttcatgttacagaataaactgaaaatctctttcg

SEQ ID NO: 3573 - DNA, 421 bp, Oryza sativa
  unsure (1)..(421): unsure at all n locations
ccttaatatatcttaacgctgtctacgtgctgtcatataaatcttttttaacttgatacaantttacagaacttggtatcaattaattacacagcgaatacgggccgggattgttatggcctgttaatgcatcatgcctgaaccgacctagcccattcgaactgacgtacaggaacaactttacccatcaatagcccaatacttgttacagttcagccttacccagaccttacatggtccgttcgactatgcgggcctggcctaatggaggctatccgacttgtggtgttctttactgtcgtcgtacatgcatgcactgtaccaaccaatcgtgcgcactaactgattttatgatatgatgtcacgacgcttatctttctgatgggagatactattgccagagcatgtttagaggagtaat

SEQ ID NO: 3574 - DNA, 381 bp, Oryza sativa
  unsure (1)..(381): unsure at all n locations
ctaccttggggttagaatccatggactggttgtgacaacagcaatgcattaactactgaacgtgacttgttggtactgtcatttgcaaggcaagctttgcattaaatgctaagtgacgcatatctacacggtgtgtgatgggagttacgtggtagcgggtgtgcggctatcatgcgcaccatcatcacccctacgaatagagcaaggctttcagatggcatggttgactgtcttgccgcttagactgtctcagtgcatgtccacactttcttccaccttaggctgacagtcggatccagaaagcgtcaatagtgctctatgtaggacatgcggcanagcgagaagttgtctttccaacgagcaccgagagggccacacaag

SEQ ID NO: 3575 - DNA, 424 bp, Oryza sativa
  unsure (1)..(424): unsure at all n locations
gatgtggtcatagatcagacatatgcttcagatcctgcagagtacaaactatccacattcttggagagcattaatgtggaccgtgactcttgttttatttttgtagccaaccgtagcatatggagaattgataaaagaataggatattcgaagaaacttggtaattcttttctctatgctctacactacgtctcttgatatagttttgtttttgtgtttttacaaaaccatgctcaaactccagtgccatgtttttcaacctatgtaaaggtctaatggagttttgcttttgcttttctttcnttttttaaaaaaaagattggttcgatggagctatctcccagccccagttggttcttgctgatctaatagaaattntctttccaacggggaattacacaacaatttacttcaggaatctaat

SEQ ID NO: 3576 - DNA, 445 bp, Oryza sativa
  unsure (1)..(445): unsure at all n locations
agcttccgtgccctgcactgcaggcctctgtgtcgtggttttcttttgggaagtgacataatgtgttcacattttcttaaataaaatacataaatatactacatctaaaaacatgtgatgaccagcattagtacaacatatatatatctactaccttaatcgtaaaaaaattacggtctaaaattgtcctgcacaataataagaaacaaaaggtacaaatccaaaccgtgaaaggtatacgtgtactcttcaccacagtatctatgtttattttcacattgtgtaggtcgagttttagacttncaattttgtgggatcgatgtttgatgtcaatatagttagagttttgttaactctntcgataactagatctataccttattatattgaaaaggtaaagaagtcttatgattcctccttcttctgttggtagtcaaaaaccgat

SEQ ID NO: 3577 - DNA, 476 bp, Oryza sativa
  unsure (1)..(476): unsure at all n locations
tatgcttattatctcatctaagggcactactttgcacttcagatgtgtttgtctgtttgttcatgccacagagcaatggagctccagcaatatatattcatgggtgtcttcagactcaatcttcagtgtcaacactttattgcgatttttgactttgagtacgtacaggtcatttatgtgattgtgtattattcgaacatgccactggtggagaaaccatctttggtccgtcgacccaaatccacatataatcccggtttcattaataaccgggactataaacgatttttagttccggtctataagcgtaacaggactagatgatcttgtatcccggttagggttaccatccgacactaaagatccntttgtctctatgtcagatcgtgtatgcggttcgacttaactgggactatatattaactttattccgagggcgtacttactggaataaattcacactgactatattccat

SEQ ID NO: 3578 - DNA, 423 bp, Oryza sativa
  unsure (1)..(423): unsure at all n locations
tgcaaacttccgtgccctgcactgcaagccttttttttgtgtttatttgggaagtgacgtaatgttttcacatattcttagataaaatacataaatatactacatctaaaaacatgtgatgaccagcattagtacaacatatatatatctactaccttaatcgtataaaaattacggtctaaaattgttctgcacaataataagaaacaaaaggtacaaatccaaaccgtgaaaggtatacgtgtactcttcaccacagtatctatgtttattttcacattgtgtaggtcgagttttagactatcaattttgtgggatcgatgtttgatgtcaatataattagagttttgttaactttntcgataactagatctataccttattatatctgaaaggtaaagaagtcttatgattcctcctttt

SEQ ID NO: 3579 - DNA, 233 bp, Oryza sativa
  unsure (1)..(233): unsure at all n locations
aaaaaaaaaaaaaaaagagattatctctgcccganaaaacngcagaaaaaggcagggaccttgtttccaagcagcaaacagactcgcaaaaccaggggccaccaacgaggcaaccacggatgacagagcgcaagatcagcaggggaaccaaagcccggggaaacactggcgcgacaagccaaaccggccaaaacggacaaacgaggacgacggacaagacggccggaacagcc

SEQ ID NO: 3580 - DNA, 418 bp, Oryza sativa
  unsure (1)..(418): unsure at all n locations
agcttncagtaaaaatccccaatatgtgcatcttgctggcgtgtgaagccaaatgtcgcatttttttccaacccaaatgtgaatgtgacccatacttgttcgctagttagtgtttggtacaacaattcttattttgtagtttactttttggtgctgggatctatgaaaatgactccttttgttcccgggaacaggttccttgctatatctaacttaaaaagtcgttacttgcaccgcccaaaagtggccacttggtcgtaaagaagcgcactaccaatacactagagcaattcgactccaatttcacaacctaacgaanatgcaccactaatgcgcatncaaatgcaatttctaaaactaatatacaagaaaaaaaaacagtgcgaatcgatctcagaagtgacacctagcaacaaca

SEQ ID NO: 3581 - DNA, 432 bp, Oryza sativa
  unsure (1)..(432): unsure at all n locations
tgtgacanttggacagagagtactagctaatccatttgttgttgtcatcatcggtttattatgtcctgatgagatgaagcggaatccattaatattatgtggaacaatgggattgcggcatgttggaattatcatctgtagcaactgactcaaagtcaaataagttatagatgatttttttggtattatttcaaccgtcgaaatgcatatggatatgtgtctgagattaagtaaataagttgtcaaagattaaatcaaccaagtgctatttgtcatcttggccattaagaaaaacatgaagacggtttatagcgtgacacaaaagcaaagggaatcaagtcttatagtctcgatggtgcatatttgacactttattttctgtcanggtacgtttcactaccggcatctgtgtattgatgaattttccattac

SEQ ID NO: 3582 - DNA, 436 bp, Oryza sativa
agcttgagataaaacaaagaggtgcagactactctatttatgacgatatccagattgtgcatggaaataacttttgtatatcataacaaaacacaatgacgtttaaaaaaaataaaacatgaattgtattgtataagcagaggctatatatgaagacacgttatcatttattttgtatatatactgagttacatctaatcatttaaaacattgattttatttgacgataaaactagcaaatcccgtggtttgccgcgcaggtgccaacgaatattatgactcacaatagtacactgctactagatggttatatagatcgcctctgcactccacaccttccccccttccgacttccggcgttccggctgctcgctgccgtgccgccgccgcaagcttttgctcgttgatggcttgatcagccacgaatgagcctagt

SEQ ID NO: 3583 - DNA, 389 bp, Oryza sativa
  unsure (1)..(389): unsure at all n locations
tgttatgtgaaattacccctccgtccgaaaatattctccttccgttccctatcgccgcttcaagattgttttttttaacgaaagaagtgtgtttcaaaatataacgatttttatcctatttaaaaaatattaaggttagctaaaatgctttaattttagttgtttcaacttgttaatttctaaattgtgaattgcataaattccctttctaagcttttgattggttntagcattatcgaaataatgataatcatatgaatcaatataatattatgtgtatcgcgatagaaaaattgaataaaagattcttatattttatgacggaatgagtaagtgattaattatatttttaatgaaaaaatcaattgaaacctaaactaatcaaaatt

SEQ ID NO: 3584 - DNA, 419 bp, Oryza sativa
agctttcgtgccctgcacagcaagccttttgtttctttttttctcttgggaagcgacataatggttcgacattttctaaagaaaaatacataaatctactacatcttataacaggtgatgaccagcattaggacaacatatatatatctactaccttaatacgtcattaattacggtctaaaattggtctgcacagaaataacaaacatatggtgcaaatactaaccgtgaaaggtatacgagcactcttcaccacagtatctatggttatgttcacattgtgctggtcgagtcttagactctaaattttgagggacctatgtatgatgcaatatacgaagagatttgcaactggcttaaactagatctataccttatatattgaaaggtaaagattttatgatactgctttttgttgg

SEQ ID NO: 3585 - DNA, 262 bp, Oryza sativa
tgcgatgaaaccaagataaaaggtggcactctacactgacacacatgtatgggaatcctcgctcattgataaatccacactgtagtgggaatatggcttcatcatccgatacgatcctgttgaacaagtctcgattaatgtactccaccgacttgagcatgtacgacttaagctttttggactcgtttaaaggtaccgttgtcccatggttactgatgtaactgaaggctaacatgaagctcgtgtaccagggaacacacga

SEQ ID NO: 3586 - DNA, 381 bp, Oryza sativa
agcttcgaatctacagtgggtgttgttgttgtttgttgcggtgatgatgcttggcttagagcgcgtgcttttctcgtcggtttggttatccgcattgtggggggttcgaattcgttcttctccgggtgaatcgatcccaacgattgcagttcgaatgtgaacttggatgatattctattgagcacgtttcagttggtaggatcgagtcggtgaccgggggattgaatgcccgctgaattacggcatagtagttgcggtggcgccctcatacgagtgaggaaaaggggatctatcaactattatggattgtatattatatgtttgagatttctagttgacacatgtcactgtcagtgttagttgagattcttctgatgtcac

SEQ ID NO: 3587 - DNA, 410 bp, Oryza sativa
  unsure (1)..(410): unsure at all n locations
tctcgggttggatatactgaacgtgactcagatgactgctcaacggatagatgggcacgtctcagtacacctgagtccttcatgccctgtccctctctacatgcaagattgcagccactggtgcttgcctggagtccctgatacctggaatgagcttgtctacaacctcttgttgaaaagacaatctatgataggtcaaaatgtacctcttggtggcaccaaaacactgaaagctggctggcgaaagctaaataagtacaacttgacaatttgaagagggaagtaaatccagcagctcatcatgacagaacaaagcttcatccagtgtcttgggtgatgctgctcctcagctgatccaattcacttccaacgagtangtaatagtagttatcctagtgagtggacacatt

SEQ ID NO: 3588 - DNA, 428 bp, Oryza sativa
  unsure (1)..(428): unsure at all n locations
aagcttggctgagttctgaatattactcttgntttcttaaaacaaatccacggatcgatcaaggtgacgcacaagagaattgtttcctgtttaccaacatagaaaagcatgcatgaataattaacgttggcatttgtggacttgcgtatctaaaattaaatgtgcaagagcatcttgacctgcatgcaggctgcagcctgaaaaggtgaaagaatagggagtttttaactctgaacttactctagcaagtggagtaaggcatgtaatatactatgcatttaagcacaaatgtctagatatcatcttagctaaataaatgatgaggtggagggaagaataaaagagagtgatgacaagtcacttaaagaaaataaaaggaaattaaagagcgaggttgattggatacttgtgttgtctgtgacgcagtc

SEQ ID NO: 3589 - DNA, 387 bp, Oryza sativa
  unsure (1)..(387): unsure at all n locations
agcctaatatacagcataatttcttgttgttgtttcttttgatatgaggtgcgatttggtgggattactatttgagaacacagcctaaaaatatgaatcttgttaagctgcagagtgttaggctagttggattaattgagaatgtattagtgggtgcttattttggttacgcgacacgcccaatcatgcgattgggatcgacgttgtcaactgtntcctaccgggacataaatcgtagcttcctacagttagattaattaaaattatgcgacaaataatgcgacaatataacagcataacctttgtattgttattacacaagccggtcgttgggcgtatatctgattggcttagtctggttcgataagaacccattgtattttaaat

SEQ ID NO: 3590 - DNA, 313 bp, Oryza sativa
  unsure (1)..(313): unsure at all n locations
agcttgccacaaatggttccctgtctctgggttttcagttacccgtttatctttaccttgtaatccttgggatggagggaagagaaagcatgccactatcttctgaagtgtaagagcacccgatggtgatgccagtgcggagatcagtaggatgttttatatgtttgtactgaatttttttatgaactaaacaagggtactgttattttcatagcagtgaataatatacatcgcacttggtatgaaaagttcagtttaaacaaaaccaaatgagcaaaaggattatntacattggtggataagataaacaaaa

SEQ ID NO: 3591 - DNA, 379 bp, Oryza sativa
attgacgatggcgacgtacagatgttgttaccctccacggtccgccttgaatggccctatgatatccataccccataccacgaaaggccaagagagagggatgagctgcagagcctgtgccggctgatgagtttgcttggcatggaactggcaagccttgcatcgcctgacgcagtcctgtgcatcctggatagcggttggccagtaaaagccttgccgaatagctttatcgaccaaaatgcgcgaggccgagtgggccctgcattctccctcatgggcgtcggcgatgagctcgatgccttgctcccgagagatacacttcaagatgactccgttggcaccgcacctgtagagggtcccttatactatcacatatcgc

SEQ ID NO: 3592 - DNA, 425 bp, Oryza sativa
  unsure (1)..(425): unsure at all n locations
gcttaataattcctgtattaattctcaaatatatattatcagctggactgctggagtagtaattaacttgccatcatagagattttcattcaagcaaaaaagttgattaaacattatcgcacgatgcttttagtttattaaatactgtacgtgttgttcttttctgtgaacgacgacttctatatatatgttgatgtgaccacaattaattagctggcaaacttttcttttcaaaaaaaaatccgacctagtgcaggcctatatgagggcagaacaaaattggctgtgtttagttcagcgcacagtttggaattttagtaaaattgtgatgaanaaggactgaactttggatacaaacttagatctaaatacagccattatcacaaaggagaagaagcatcgacgactttctccgttccaaaaat

SEQ ID NO: 3593 - DNA, 446 bp, Oryza sativa
tagctaagcgataacacacttatgcgcatgcttactacagtaattaattctaattaacaaagaaattagcaacatcaaccaaaaaacataacatgaagaagagcaaaatctgagaggaaagctagctagctgccgccgccgccgtacgcaactcaccttcttgctgcggcagcctctgagtctgcgcggccgcggcggcgcaccggcggccatctctgcagccggcgcccagcagcagcagcagcaaaggtaggaggaggaggaggaacagacggctgcctcccaccattgcccttcggcccctcccaatactgggcagcaagcaagctacagagagactttggtagagctaagctagctaggctaagctaagctcctcctcactgtgctcgtgctgcgctggcgcgtgcgatgcgacgctggtttttgggtggagttgcgtatgg

SEQ ID NO: 3594 - DNA, 442 bp, Oryza sativa
  unsure (1)..(442): unsure at all n locations
agcttcaacctncaggcacggggttaaaataatataaatgactatatgacatggagaaagtggtgaaatgactgagtactgtggttacattaaagaaataatagaaatcagctttgatggcaccaaacctctcacacttgtgctcttcaattgccattggtttgacccaagccaagtctggtactcgccaagatatggccttgtcgaagttgctcatgcatcaatccttctcaagtttgagccatttgttatagctcatcaagcgacacaagtgtattacatgccatacccatgcaaatctgtgcaagatctcactaattggtgggttgtatataaggtgcagccaattggtagattagaagtacccactgatcaagattatgattttgtccccaacactgatgttgtccactatntccaagaagatggtctgctcggcagt

SEQ ID NO: 3595 - DNA, 407 bp, Oryza sativa
  unsure (1)..(407): unsure at all n locations
ngctgaaggaagatggaagagatcctgtcaaggagttgtttaagataacaagggattctagattaatgagattaccaatatctctatgcaagcttcctgtaaatttattggctccaatagagagatatactagtgatgaggaaagattggaaacagagtcaggaagaacaccaccaatcttgcatgcacccatttctacgtgttggagattggagcaattcgtcaatgccgtcatgaatttccaatcgtttggtccttcatcttccataagggtttccgcatgaaccagcgtgccgagatttctcatcctcccgatttcctcatgaacaacaccgcttaaagaattaacaccaaaggtaagcatggagatgttggaagcattatctactgatgcatggatatgccca

SEQ ID NO: 3596 - DNA, 412 bp, Oryza sativa
  unsure (1)..(412): unsure at all n locations
agctngtattcagatacttctttatgtgggaagtttcgtttgccgttcactaaatgtgntatgctgtatatgctatgtctgttttgttgccgcacatcttctttagatattgccatttattttcaccatttatgtttttgcgcaatgaagttgcgatatgcttcttatgagttatagtagtatacatgggaggaaccattgagtatgatcatgctaaaagcttgtctgtattttgtatttttgtatgtggcaagcatcaaataccttgctttgggcatatagatgtgtgaaatattgtttatgtactatttatctgtagcatgtttaattgtaatcgtgttaccttgtactgacgtctggcgacatgatgtttctcttatgtggaagcgtaacattttgcacaaagaggtgg

SEQ ID NO: 3597 - DNA, 406 bp, Oryza sativa
  unsure (1)..(406): unsure at all n locations
gttgaagaagactcaatgttgttttntcatttcttttggttagtggatattaattagcgtattgttttggaacaataagtgtcgttatacaagctgataaatattgccgaagtagggaaatcacatgtggtgtggacatgtggtgtggtggtgaagtcatgagtgcatataattaagtccacccgctaggtgttatatatagtgcccatatattgctgaactttttagcaactcacatatatcaccgagtggttctaaaaactactagtagatatcaatatgatataccgcgcatctttactggcatattttttttcaccatatgcatttcacatatattgaactatgcttgctatgcatcatgcatgcaatgagaaaaccatgtcttggactctattatattatg

SEQ ID NO: 3598 - DNA, 390 bp, Oryza sativa
  unsure (1)..(390): unsure at all n locations
agcttgataaaagcttttaagaaatcatagacttggctagaattatcaaacacagcataaatacaccagtattgtacaagttgaacctccatttgttacattcatagtcagtcagaatcagttttttcatcatcagagttattactactcggctgaaggtcggtattgcggaattgctctacaacgtcatttgcaatcttgtcagcccgcgtttgagcattgctgataagatcaagagcagcttcttcgcttgtcccgtctgcaaagccatcaatggcgtcaatttcaatccttgggtacaaggatttggtcatcgccaatgccatgctagctcccatacttncagctttcttgatattcttgaaatatacatctggagcaactctcagc

SEQ ID NO: 3599 - DNA, 483 bp, Oryza sativa
  unsure (1)..(483): unsure at all n locations
tatgtggttntctggggtgttacatggctggaggatgcattccacgcggcgccggtgtgttaacgaccaaatttggtaagatatgaaccaggttcggcattggaatcgaagtggattcaacaaagagttagattcgaagaacagagtatgcatcggctgcgaaggcatcggttggagtctgcaccggctgagatggattggacagatgacagccgatacagtcgatagagccaatacagccgattctgataaatatggttctgagattgtttccataatcgatctgcgtgcttcacaaggattgccacgatagagatatgttctgagaagggcaattgtacctattaattaggatattntatgtaattttcttagagatatgttngggcaaaagtctgccgcanagacttatggtatcttaaagtttgggtaaagatagagtagtgtcccgacaggacatatcatgtatctcgggtataaata

SEQ ID NO: 3600 - DNA, 436 bp, Oryza sativa
agctttgatcagagatcatcttttgcgtgctcatactcgcatgaagcaacaggctgatcagcaccgttcagaacgctcttttgcagtgggcgattgggtttatttgaagcttcagcctttcgttcagcagtcggtggttaccagggctaatcgtaaactctcatttcgattctatggaccatttcaggtgcttgacaaggttggaacggtagcatatcgcttggatctgccatcttccagtttgatccacccagttgttcatgtttcccaactaaaaaaggctttggctccaactgaacaagtccattctccacttcctgtgctggatccgacaaatgctacttcacgttgtccggcgcagattttggatcgtcgcttcatccgcaagggatccaagctggtggagcaaatacaggttcgttggaccggcgatgca

SEQ ID NO: 3601 - DNA, 440 bp, Oryza sativa
  unsure (1)..(440): unsure at all n locations
tagacaccatcaanactctgagaaatgataaggaaatgtcatggtctgcataggagggtgaggttctactttaaaagaaaataaggcagtagtttgcccatcaattatatataaatgtatatactcggaaccatatctcaaacagatcacttataagactccaggccttgactgataagaattggaggcaccaggaactaaagttcagttcattgtgacattgggtgtcagaccacacatgtgttgggcaagcgaaggcataaaacaagagagtataagaacacaagttgggaatatatagtataaagcacaagttccagcactccgaattctcgaaccagtgtgttcagaatagtgcataccaatgaccacaagggggtaggatgtagatcccattctaacgacatatcccatgaatggcatatactnccntacatgat

SEQ ID NO: 3602 - DNA, 438 bp, Oryza sativa
  unsure (1)..(438): unsure at all n locations
agcttgtnggatcaattcatttgctggtaagtttgtcttttccaaggtagtcgttgtattattattcatagaggcaaatatattaatgtttgttgcttctttggcaatgagaaactatctggcatatttaaatcttattacttgcttgtccataaagtgtgcttgccaaaatgtatacattttttttcctgagaatctgtagaaaaatcatcaactaaatttatgataatcatcaatgctttgctctccatactataataacgttcgagctcaatttctgagttttatgttgtttatgcagatgagaagggatggctacacactctgcaatgatattagagaggtacaggaatacctataactctatcaataacattacctgtctgcacactgtatattgaagcgtacgaggcgtttcctttctgttgctntacttgt

SEQ ID NO: 3603 - DNA, 399 bp, Oryza sativa
tataacctattgttcctcttaatgcgccgagcggcacaaaactattgtcccttgggtacagtttggcgaggccgaaatcatcaacctttggaacaaaagtgtcatcaagaaagatgttatgtggcttgatgtcatagtgcaatatctgcatatcgcattctccattatgaacatgactcaaactttcataaagataaaaacaaacaagtccacatggcggactcttaccatatctctaattcaaactgacattaaatattctaattaatagatacaatttccttaaatgagctcaatctctaaacggcaatgtcagttattccaatctatgcccatgtcgagcccaagtcaagttgtatcggctgcttgccatatcggcttaatcatattccgactctg

SEQ ID NO: 3604 - DNA, 433 bp, Oryza sativa
agcttcctctgaactgatataccgtgcttgtgttttatgatgaaactactccacatgccatcatgattgcaatgtttactgttgctgatatatgattaacatgcatattcaccttttctcattttctattacaattgtgaaagccttgaatcatgtggatagctgattggccatgtttgcatttgaaaagcactagtcatggggcagcaaataattgacatgtgaaagttgttaacatgtgttaagtaacagccgacaatttctttttgtttttttaaatgcgccatcttacagttccttcttattcagattcctacaaatatgaatggcctgattgaatatagagcacatcctttctggttacaaaaatactgtccatcacatgaggtggacggtactccaagatgctgtagttgtgaaagaatggaggtac

SEQ ID NO: 3605 - DNA, 405 bp, Oryza sativa
  unsure (1)..(405): unsure at all n locations
taataacatggcttgagtgcttcattatatctntcatttattatatattaatagntggaccttcttggtcctactgttcttttcaagaataagaacgttcaagtattgtttctacaaatacatagaatacgaactagattgctgaaactaattatgataagattttcttgagtcaaagcaaacccgatggtttcaaagtccaaatatgttacttcctccgtttcatattataagactctagcattgcccacatttatatatatattaatgaatctagacatatatgtgtgtctagattcattaacatctatatgaatgtggacaatgctagaaagtcttataacttgaaacggaagtagtattcaataaaaggatctcggcctctatttaattcagtagaagtat

SEQ ID NO: 3606 - DNA, 218 bp, Oryza sativa
agcttgaggtagcaagttcgactccttctattttttcttctttgctcatgtctcttggacccatttgtttccaaggttaccgtgcttctgtcctgctttcaagtcttccgtgttttttcgctctggcacttccccagcggtacatatcttccatttcgacggctgctacttcttgcctcaagtttactggctcagtgggctcacccccgcgctaccgt

SEQ ID NO: 3607 - DNA, 490 bp, Oryza sativa
tgacgaatagaacaatatatctctacatcaacgacacatctatctctactatacgttgatgagagatcatgtgcacacttgcagattgctgatgaggagcagcagctgcagcatgtgacggtggcccggtcggccgccatggagctgcatgctgcggcggcggcgcatcatcagcagcataatccgttcgcggtggcggcggcgcatctggacatgaagtgcttcttcccgttgaacctgttctaggcggcggcgcatgtgcatgccgtggcggcgcatcgccagcagatcatccccaccgagctcaacctcggctaccaccaccaccttgccattcccggcgccgccgccgacgacgcgccagcttctcacttttgaacctcatgaacttcattctgcaccggcctgctgccatggatatgatgatcagctcatcttctatatcttatgcttgtatgcagacagacactactgatgtggctatatatat

SEQ ID NO: 3608 - DNA, 426 bp, Oryza sativa
  unsure (1)..(426): unsure at all n locations
agcttatgaactaagggtagattattttacttataaaatcattntatacatcactagctagatgaggcaagttctggacctaaacctttaaaggcatgaacctatagaacactatacacttataacacgttataacttgtaaaatacataaagaattcatattaactccaaaaattatgaaaacaaatgtgttagtcttagaaaacacttctctatatctctgtggagtcaaacttaataaacatcactttataaaaatattttataacactacctaggtaaatgctatcctataccgagcaaacttctaaaattcataactcacaaataataaaaagagataaaatataaattccttcacctaaattcatattagactagtacatatccactgtngcacaaatcatgcatttagaagcatttgga

SEQ ID NO: 3609 - DNA, 401 bp, Oryza sativa
  unsure (1)..(401): unsure at all n locations
taacccggagaagtgcacgttcagagtaccctcatgaaatcttctccgcatccttgtctcangatgatggatggaggccaaccctgataagatcaatgctatcgagaacatgaagtcgcccacaacattcaatgatgctcagctgtgttaacgaccaaatttggtaagatatgaaccaggttcgacattggaatcaaggcagattcctgcaagagatagatccgaagaacagagtatgcatcggctgcgaatgcatcggctggaatgtgcatcggctgagacggatcggtcagaggatggctgataccgccgatagatcccgtatatccgattccgatggaaatagctccgatgctgttctataatcaatgacgtgctcacaaggattgcacgatggagat

SEQ ID NO: 3610 - DNA, 422 bp, Oryza sativa
  unsure (1)..(422): unsure at all n locations
agcttagctcgnttntatctttttcgtgcatttgtaatcttttatattntcgtaagacgtggatctgcatttcagcaattgtcatttgtgtactctggctggtcctggacaggggttttaatatacattcagtttagaaattctggttcgtgaatttctgggcgtgacacgcgagagccctgtttcattcctggagatctgcctcgacaacgacgggttccacggcggtagtgacaggggtcgcgccgccacgagacgaagggcagcctttgttgccatatgcccacagcaccgcagccacgacgacgaccaccaccaccacgggtttctggagggaggcgacagctgctcgagaagcccaattgagattgaaattgatgtgaatgcgatgaatggatgttttcgttggttcgagactgatt

SEQ ID NO: 3611 - DNA, 415 bp, Oryza sativa
  unsure (1)..(415): unsure at all n locations
tgcaacagagctggtgagagaaaaaaaattatttggacatagtgataacagtctttattattatattgctaataaatttaatgttgaaatatatgcagggacaacaaatgagctacacagcactgatgcagcaagttattcaaagtcaaagtcctaagataaacttgcataccaatcaggtgacaagaagcaattcataacttttttgtaaaagcaatcagcgctgaaattaaaagtttcatgttaaactaataaattttctggacaaaaaaaatgcagggaaggcttgctgaaatgaactatcaccttcaatcaccaatatgatacagtgtaagttggataaaactcttaacttggtatttgaacaacaaactggacataactatattactgtatttncaattgtaacacacta

SEQ ID NO: 3612 - DNA, 447 bp, Oryza sativa
agcttagtctaggggagtgtaccttgaagagaaatcgttcaaagaagctgatttctgcaagtcagctagtttgaaaagcctggacaatctaaatgaacttgaagaggccccgattgtactgcgattccaacttggtcaaccgatggtgcttgacacagaaattgaatccttatgaactcaagcgcattggctgcatgaatggtatttggaggaggccaaaaagggtgttgggatgttcggtgcctactacaccaacgtggattttcaccaccccaataatacatgatttgtagattttaaggaactcttccagttgtaccaaagaagggaactcgatatctgcctcctgcaattgtggtcattgtgagtcctttgatatcttgtcgaccttaattcatagcattctacgtactctcagtaattctcaactgtgttctccttttgcag

SEQ ID NO: 3613 - DNA, 340 bp, Oryza sativa
gataacgttagacatcaatcaaaaatctagtttctccttggaaagtgggcgggctggcattgcattgcctaatgttggcggacccccgcatgcagtgcaagtgaagcggctaaagaatgtgaggctacatttcgtctcgccaacgacttgccccgcatatctaggcagctagctaccgcgcgcatttaatgtaagttgatatcgagcatgcatgggtactgtacgcgccggtcggactccggtggtgatcgatcaatggcgaggctctcaacagctgcgtggccgttcctggccgcagtggcggctgcgctgctgtgctccgtcgacgcggtgatcgtcg

SEQ ID NO: 3614 - DNA, 442 bp, Oryza sativa
  unsure (1)..(442): unsure at all n locations
ctaagctaacaatngtgcctcttgtnttcagccttacaagaatagtttgtttatctacatgacatagcaaataagtgctaatatttggcttgtanatgcagaattgcttgtcaccttccaagactgatttgatggttggaataaaaacattcttccatgctgaaattatattcttgcttgcacttggcttgatcccttgcattctccatttgctggtaccatcttctagtataactagaattcccttgcagtcccaagtatcctgaacattgttgccatccaagtggcttatatcactaataagcctgctgtcaataacctcaaaatattgtgccatcatatatgatgtgaatggatttttggatgccggtagcaagtcatctcttttatcatcacttgggtcttcaattaatagcaccaacaatgcaagctcatgcattct

SEQ ID NO: 3615 - DNA, 272 bp, Oryza sativa
  unsure (1)..(272): unsure at all n locations
ctgaattggaatgagttcgtcacacaattgcactacttagctagcagaccactgggtaaccccatgaagatacaatctgacgggttccatgactccgtcagctaatacaatagcacagcgctatgagatagattatgttctcaaaacaaaaacgagacagactatcgattagatcaatatcgtggagtatctacttcatcgacaaatatattaaatatttngagaaatagacttatcaagaaatgtataataaacagtctcagcaatatatg

SEQ ID NO: 3616 - DNA, 399 bp, Oryza sativa
  unsure (1)..(399): unsure at all n locations
tcatgaccttacttactcacacgttctcgctggcgacggttgctgtgtgctctctgccaccgtgttcatctcaaagtattccatgattgaagcactctttcattcatggagtgaggagatatctgggctcaggatctcaggatcttacacactcgatgagcgcccaagttttttacattccagatgcatctaagttaagggtgagaatagtgcgtgagcctacgagacgcaggataaatgatatgggtgatacagaagcatgcgggacgactttacgctgcatcangtgtgatctgcggggccatgcttactggaaatgcccgtagaatgcggaatttccgatgggcgcacacgctagtccatctggacatgcaaacgatggtaggcgaccacctggtg

SEQ ID NO: 3617 - DNA, 445 bp, Oryza sativa
  unsure (1)..(445): unsure at all n locations
agcttgatcaacgatgcatgacttgtgtataacatttaacctacataaatgataatattccaatatccctttcatcttgtactcctatttcacaagctatttgtttctgacaagctatttgtttctgacaaagctatttgtttccaccttgtgtatattttgggcagataatggagaatgggaaagcctatgctatggaaggagatgtttacttttcagttgatactttccctgagtatctcagtttatctggaaggaagttagatcataatcttgctggttcgcgggttgctgtcgatacaagaaagcggaaccctgcagactttgcgctgtggaagggaattntgatgttatgatattcatagatctcttgcacattggtactntctgcctatcttttctgtattattggattcaggctgctaaggaaggcgaacctttctgg

SEQ ID NO: 3618 - DNA, 413 bp, Oryza sativa
  unsure (1)..(413): unsure at all n locations
taatactcaacgtgatggttntntatatgtaggatatattttattcatgtacaagagagcgctattttttaaactagtccaaaagcctgtcacatgcatggttacgtattgatggcattatagaaagcctttactttgggtgtgtttagtttacgtcaaaattggtagtttggttggaattaaaaagatctgatgaaaaagttagaaatttatgtgtgtangaaagttttgatgtgatgaaaaagttgtaagtttgaataaaaagtttagaactaaacaagactagagaatatttaattctcaccgttaaattggtagcagaaatacgctctgaatcaatcgttctatattactngaatgatccgtanggagccggtagcggtacgtcgactctgtaactcaataaaaaaaaa

SEQ ID NO: 3619 - DNA, 427 bp, Oryza sativa
gcttcagaactggggcatcatgagaatgtttcttggaccttcatggtctgtaacggctgtcgaagctacatgcggccatctcttatgggtgagttctgagcttcaccatcccactaagagagatgtcttatatgtttctactatctgaaaatgtctgagacattactcctttatggcaaattgtgcagtaccatacgatgcgtaatgttctcttcatggcaatgacagagttcacgaaggtggttttttttcccccacaatgttggcattactatttaaaagcacaagagtatactcagtagagtagacaactttacaactaacatggagccattctccgttttacctgtctagcttttcttaactattttaatgcattccagctctctgaagaaccggactggaatttcatcagtgcaaaacagga

SEQ ID NO: 3620 - DNA, 417 bp, Oryza sativa
  unsure (1)..(417): unsure at all n locations
tcagaagaagcagtcttcagttcactttgtacgtgtctattataattagtgctatatatcctttcccttttaaatttatatggaaggtgaaggttccattaaaaactagtgtgtgtttatgtaatttaaagaggaggggatggcgtgtagaagtagtttgcaaggtgaattttgtgatgaattggtaggagagctcccatcattctaccaagatagaaatttttgacgcaatgccaaggtagaaataaaacaaactttacaaaatttgcaccaacgacagaaacgagagtcttataaaaatggccaaacttaatttacaacatgtccaaacttctgaaaattctgtgggttctgaanattaaatggcctctcacatctatgatgaagtttgatcagtcaaagaggacttcggtaatg

SEQ ID NO: 3621 - DNA, 269 bp, Oryza sativa
agcttcacataaagtcagacagtcatattgacaagcactgacactgtgagcaacaggatggtccgtacctgatgactctactaaaggccctggattatcaaggaatggaggtgccgccatatctggaccatccacaccatgtactgtctgcatattctgacgccttctaataccaaaacagccgaactgtatcggagggagttcactgggaaggaggattacattcttatgtatacaagctactgttggtgacttgacacggtcaggct

SEQ ID NO: 3622 - DNA, 296 bp, Oryza sativa
tactctcttcactgcttaacacgagcaggcagctgtctgctattcgcaaagggtggacaggagacaactggcgccggactgtgagaagcatacagaactagccaatgctactgcgcatcgctacctgccttgcaatacatattgccacatgtcacaatcggaatacatatgtacccttacagaagggacattagtgtcaatggaacgactacaatctatgaattgatgcagatcatgctatataccagctttcggccagccagtatatccatacacgctgacacattagatgacac

SEQ ID NO: 3623 - DNA, 437 bp, Oryza sativa
agctggtgcagatacagctgccggagaaacctgactacgacggagtcgtcgccggcggtgtcttctccggtccattcctgtcccaccaatggccgcgccgccgcggtgccagacacgaccaagaacaccatcaccatcacgatcagtgacagaacaagcttcctgatcaacacggccatgatcttttacttccctttcgccgctcttctccctgatctccttctgtcttttctactcgctttcactaagaaaaaagctaagaaactttactgaactttacaatgttcttctcaaaattctgatatgttcatcactggaatggagcaagcctatatatagatattagagtggcaggcggcggttgcttgctcggtacggtggccacttgaatcggcgttagtaattggaattatattaagggattgacgccgtcagtg

SEQ ID NO: 3624 - DNA, 436 bp, Oryza sativa
  unsure (1)..(436): unsure at all n locations
tcatgagatgacttgtatgaagtggacaaatcattaacgcagcaccacttgagttgacctaataattctactctcatcacgcagcacatgacatgcagacgtgccttgtggagaagacaacctccacatatgttacgtggctaaactgacagcagcatgcatagagaaaatgcagaatgcgtacaatacagtgcacttgaagatcttgcttccgttgcacactaatcttacaccgttcaaagcttaatttatactgtatatcatcaacagtacccgtgatggtaacactttgcgtttgtctgcatgcatatgcaaatctacgcttgaaagggagtctacatagtagtactagaaacaaactcgcatgttccctnaccggcaagcatgtaattaaatctctaaagaagttgtgtgcggaaaccttatctcaatatat

SEQ ID NO: 3625 - DNA, 427 bp, Oryza sativa
agcttcccctctcttacatgattcgatctactttcgtgttcgccgcccttatggacacgagcgttcctttctaacctgacctcaattgtcaacgcccgataaaaccgtgaatcgatttatactgtaagtgctaaccactagcagagcttcaagattttataactaggccgacaagtatatgtgtcgagaattatatcttcaggttatataaaagggcattatagttcgtcgtgtcgttacataataatggcataatataaggcgtgtattagatgtaatatataccaagtagataacggatctagtaccaaatgtactaggttgtaacatctccgtccagggcttaataggattgataggatactcatatcaacaatttgtaacttctttttcagaagccgatctcgaaagaacataggttaagcgt

SEQ ID NO: 3626 - DNA, 388 bp, Oryza sativa
tgtgtaccttgtaattactaattgtttatgtagcatgacacatgttcattagccgtatactcatgcaactgtagcgtacaatgaatcaaacctcatatacaacaaacctttacatcaaagtagacgagatttgtttgtttattcaaaggtactcctatataaaccttactccaataaaaacggaaagtagtatgcatgatagatccttcttacctactaataattgaagtggcatgaatagtttactcggcagcaaccaaccaaccagggagattgattgattgattaatcagcaggcatgataagatgagaaattaagtcgtagtaataatcttgacagcgtccaagatgttcttgccctggagcttgctggagacgacgagcctga

SEQ ID NO: 3627 - DNA, 436 bp, Oryza sativa
agcttgcatgcaaactaacaatgcgtgtagcatatgcagctgtaatctggggctgaatttatagcactcaaggggctatcgtgttgggacagcaaccaaagaactgttcattgccgccgttgatatgaagtattcatcgacgcaatcactcagtttcgacccttccattcatcaaattttgcagaaaactcccttattttctctttttcagagcgcggtcctatacttgaattttttttcatcttcacataagatatatcaggatctagagggcctttacataagaatacataagatagtgaacttacatttagggacttaagaaagattatcaagttaagcgaggacttttttgcaaaattgccagctcctgcaccaggcgacgtggccatcaccggaagcaaacatgccagtaagaaaagcctcggagcactct

SEQ ID NO: 3628 - DNA, 377 bp, Oryza sativa
tgcagatgtacaggtgaagcattcttttatagtattgcatttatacatcaatctcatttgtatttagccttttgagatatatgctttactaaaattgtagtatttgttttgaatttatatatgaatatatacaccttggccatcgatatagatcatgcaagagtattgatgaataatttacctgctatcgccagatcttgtcaaaggagcattcttttgggatatattctaaatgttatttttatttggttgtaccataaattttgatcatagtactagcattcaattattgagataactaggtgaaaccccgcgcattgctgcgggaatttattattataacaataaaaaaaataacgtgtaagatagctatgata

SEQ ID NO: 3629 - DNA, 434 bp, Oryza sativa
agcttgtgaacgaatgccagacatgaattcacaattgctcaagttgcaatccctagctctcaatagctcaaatacccaaatccaatccaaaatcacaacaaatgctcaagattcaaggtgaatttggtgtagaaaccctagaagagactaaggtaggtctgaaaagtggaacaaccaaccacccaaagagtgggtggatactatattaaatactcgatctaccccgtaactagacattactcacagattcaaatgtcggaggttctgatcgggcagatcggaaattttgatccacacttgggcacattgtgagaaaggggatcgaaatttccgatcagccctctctatctcaacaaggagcatcgaacagaactttcgatgatttctatcggaacttttagttgcccttcctcaccaaatatagagctctgatc

SEQ ID NO: 3630 - DNA, 389 bp, Oryza sativa
tcacgatcttctctttcatgagcctcaccgaccttcctctgttctcaaccgtagtccagatttctccctcgccgatgttgtcgaggtcgtcttctcccactaactctatcactctcagcatcggcgggaatcacgccgcgacgaatccggactgcacaaaatcaacaatggcagcagaaggaattctatcaattcacagattgtaccactcggttagttcttgcatctatccatcaaccatatcatctcccacccatatctactccaagagacgcatcattcacactataacagaaagaagatgaggatctcacctgaacggctatcggtagctccggtctgacttcactcatggggacacgcaccacctcccaccgaaacatatgctc

SEQ ID NO: 3631 - DNA, 432 bp, Oryza sativa
agcttcgaataattaattgggttatatgttatcatatttagcaacacagggtatccaccacatcaagttcgtcttgtacttgccttaacttcatcgataatccaactcaactcctgtaacgtggcaacccttcacacacctatggagcaaatctactcataataaaccactatattcaactaatgatagttacaagggacatttactaaaatcgaaacctaaaatatatagtgttttaccgagttatattaaatatatatagctgttcccttactattttatgtgtaactcacaaaccgtctaacggaatctagcaaataatacaacttcggacatctagacataattgtctacaactttcatgtggagcacataatcagatcatgcctctgaaaaatccagattaaagaaaacgaattattgtcctgattt

SEQ ID NO: 3632 - DNA, 312 bp, Oryza sativa
tatctcttacgctccaggaatggatcagtcataacatcttcgaccggcttgccttcgccgctgccgactggtgtttccgcctgcacggctggcctttatgccgccgttgttgggcgtctacatcttcaccgaccggcttgccttctccaccgtcgactggtgtttccgcctgcacggctggcctttatgccgacgttgttgggcgtatacgtcttcaccgaccggcttgccttcgccgacgccgactggtgtttccgcctgcacggatggcctttatgccgccgttgttgggcgtctacgtattcaccgacc

SEQ ID NO: 3633 - DNA, 442 bp, Oryza sativa
  unsure (1)..(442): unsure at all n locations
agcttgcttattaagcctggctccctgttccggtttcttgtacctggcctncagatgcagtagagatgattcttcagtactctatcacctggcttcttctccaggcaacgcatgatttcggcaagacacctctctttcgttctcttgcagttgcaggaacgtctttgctcgctccataatttctctagagctttctgggtagcttcgtacaggctgcgaagcttgagccctggtagcatgccggggcgaactgcgacgaggaacaccatgtagtctgacaacgtcttgatcgccttcagttgtttgaatgatgccgcattttgatcaggttcgatgcacacgccgtagaagacgttcgtggcaatgtgcaagataagaacagactcttgaaactctgggagaaatgccaaagctncatctaattcccgaacactttcaacat

SEQ ID NO: 3634 - DNA, 293 bp, Oryza sativa
taatctaactacgcaaaaagacgggagaagttactcttttaaaacatcagcaaactgtaccaagttccagtgatgtctcaatcgaggcaatctgtggaccatatcacagaaacgccccatctacagaaccatttctaccatacagagaaaaaactccattaaacctctaaatttgacggcaaagtaatcacctttagagtgatgattttggcctcattaaggttacccatgttggccataagcgttattattatgcaagtgtagtattcagtcccgtgttacgtccaattgca

SEQ ID NO: 3635 - DNA, 429 bp, Oryza sativa
  unsure (1)..(429): unsure at all n locations
agcttgtggctggtagtaaaacatcgatttttctttttatatagagttcgatcctcaactatttctcgcgatatcttcttacgaagttttgttagggcatctataacagcctctggtttaggtgggcaacccggcaagtagacgtccacaggaattaacttatcaactccccgaacagtactataagaatccgtactgaacattccaccagtaatagtacaagctcccatagcaatgacgtattttggttcaggcatttgctcatataatctcactaaagagggagccattttcattgttactgtaccggctgttaaaattaggtccgcttgcctatgactngatcttggtaccaatccataacgatcaaagtcgaatcgtgagcctattaatgaagcanattcaatgaaacaacaactggtaccatat

SEQ ID NO: 3636 - DNA, 484 bp, Oryza sativa
  unsure (1)..(484): unsure at all n locations
ntntccctgactngctgcatcataaactaaatcacaagcttctgatatataacgggtggttctagcgagatttgtaatatgagtacctttacgctttgccgagatgtaaggggccattttaggattccatttcttaataccatgaccaaaatgaactcccgcttctatcatctctttcaaattgatgttccaatatcttcttgtcattttttccacacttccttttgattttttctttnttttcatcctacctttccattacgaaatttctttcttttcgaagattaagaaagagccgaaatagcttgaaataaataataattgttccgatggaaccttctacatggtataagcataaccttaatgaattaactaaacttctttgtaaattaaaataaaaatagaaaatctaacctcttagcgttctaaggtcaaaaatctagtttaaagtannaaatctgctgtatgtatgcgtaaatcatat

SEQ ID NO: 3637 - DNA, 429 bp, Oryza sativa
cgtgcaaagtaggtggctatgaagaacatatggtgagattgggatgagagatatgttcggctaccgacgattctaaatgttattaaggctaataaccccacagtgcgttatgttgttgagcctcaccaagaaaggtcgagaacagtggatggggtaacaaggcatgtatttgggcatgacgcatggttctttgggcagtgtgtagaggctttcaaccactttgtgtccgatgatagcaattgaggtaccttcttgactggttcattagtatggtttggagacgcttgattagactcaatagaaaagtgtgcataatctcacataggcacaaagacattctacacaaaatcaacaatgtcatctctcaggtcaccgtaatgtacatcatagatggtgcacgcgacacttctgtgctaacttctaccgtgc

SEQ ID NO: 3638 - DNA, 266 bp, Oryza sativa
taccatcatattagctatataataatggctttaacacaagacaacattttgttatattttatcatagatgaatgaaataatttgatactcaagcttattttgtataacaatgttaacttaaaaagtttgagtcacgactcgtaatatgaaacggaaaggttgttgcaatgtagctggacgcagccacttaattcctttggtcaagtcgtgaagagttgacagaatgcgcatgtactcagtccgcgactgttgacgattgctcacat

SEQ ID NO: 3639 - DNA, 446 bp, Oryza sativa
agctttaggttaagtcacatcaccatcacgtgttctctctccgttcaaaaaagcccaatctaatatagaatgagacataatatagtacaacgaaactggacaggagtctgaccagattcgttgtgctaaattatgtcccatcctaaattatataggttgggttttttggacggagaaaatatttatcgcattggagcagtcagatcaacagatcaactgtcatgtctgtttaagaagcatgcgtgcatttcccattccatagccattcagaactactccctcctcctattttaagtgaagccataaattttcgtgttcaatactatcttatttcaaaaatatatgaaaaaataaaaaaaaacataaatcacgcatagaatattattcatgttttatcatataataacaacaaaattattaattataaaaacatttaaataagacgg

SEQ ID NO: 3640 - DNA, 404 bp, Oryza sativa
  unsure (1)..(404): unsure at all n locations
tgcaatggacactgttttcatatcgatagaaggtgccaactcaattgttaatgtatgacattgtatgaccatgcccaagagcccaacaatttgacaaaaatgtgacaagcattgagggaaccaaaagcaatttatacaataaacttgaaccaaattcaatgaacaatattccaaaaattaacttatgttgaaaaacgaaataagtgacaaatacaaaacaaggaaatgtaatgcacagcagaagcaaacctgaatggcggttagatagtaacggattgcaagatcaacatcacccttctcctgaatagcataatatatcgcatctattttagaatgataagtattgactttcaaaacaatatactcattggcaaataagattattatttntcatgatgtatatc

SEQ ID NO: 3641 - DNA, 406 bp, Oryza sativa
tttttattgccctcccatttgtagaactccagcttcttcttgttcagaatattctcagagacctaagatgataacaagggcatgattaaacgtttaagaaattcaaacaagttgaaccaaatgaggtggcaagcatggaaaactgctattcatatgcccaaacaaaaccgcattgtaataatgtcaggtgggttgaaaaaccttgacgtctatgagcagcacaacttgagaacagtagtggcaagaggatcctaaaatggactgcgtgccaaagcactcgctgccttatgtagtattttcattatctcgactagcgtactctataattttgttagaacaaaataccaatataagcatccaaagcaaccggtcaatctgattcctaagataagaaaccatctcacat

SEQ ID NO: 3642 - DNA, 419 bp, Oryza sativa
  unsure (1)..(419): unsure at all n locations
tcatcggacaaaacanatgatcgttttcaggaagttcacctctatatctaagaaacactcaatgcagtcctgtaaaccaacgttacacaggtggatcgtgctcaatccgaatggcaaaccctgtatggtacccactatcgaaatgaataacgtcaccccatcgttacaagttaaccaatttttttaaccgataatcagcagtaaaaaaaacttccattcgaaatacctttctaaaattttttgtagcgggccagcagctagttccaccttttcagtgctgatttgaattttttggcccgctccgatataagggtgttacacgtacgtttgctcgtgcacataataatcgttagtaattcattcgtttgcacatggatgtacagctatctatcgaagtgcgctgttgctgtccactgtca

SEQ ID NO: 3643 - DNA, 380 bp, Oryza sativa
tcatgagaggatgaaagatatcttacacgagtcatataaatttgaccaaactcaatataatgtccaaccatcatttgcataataaggttgatcaataatgtacttgcatatggccttgtgtcacgcccggaatttctatccaaaatttcaaacgcttacatgtgtgtgaatccctcgtccaggaatcagccgaggcacacaataacaaattgataatagagtacaattattactctaattaataaacgaataaaatgtcattacagaggtagatagttcctctcaatcaataaagatctaagcagcggaaaataagataaatggcgcagacggctccacttcacaggcagcttgaccagggctacacctaatccttcaca

SEQ ID NO: 3644 - DNA, 386 bp, Oryza sativa
tcactaaagattacccatgtgcaccagcaaaacgcttggttatgaatgaatgggttgcaccagaatcaaacaatattactgccggtgtcgagttgacggggaatgtgcccaatataaccattggtgctgactgcgcctcctctgcagatgcatgattaacacgggcctgaacgaacttgggtccggcacgtcttggcttctggcactttccaaccgtgtgtacgggtgttgtacaattgaagcagagctcgggtttttctcccaacctctagggctgttctggcagagctggctgaactgattgagctggaatctttagtgaactccgagtatggctgatgctgtgctgctcactattggtgtgactgtcactatggtggttcttg

SEQ ID NO: 3645 - DNA, 436 bp, Oryza sativa
  unsure (1)..(436): unsure at all n locations
agcttgaaaaatattgaaaatnttgtttgagtgcacagtgtgtgcattttatgaaactaatgagactaaataattatagcaaaaaattttgacataaattttgaaaataaaaaatgtaataaattaaaaattttatttgaaattttaataggataaatttttatgttcatccaatgggtaaaatggatatttttatagaaattagatggtcaactaacgggaggagcatggaagggatcaaaatcaaattttaggggtatccttggaagtaagcaaaattcaggggtatagaagggattagttaaaatttcaggggtatagaagggattagctaaaattttaaggtatacaagggatttctcttgtaggttggatagtagaaatccaaatttcatggagaacctgctctacaacggttgtcctaccactcttatgc

SEQ ID NO: 3646 - DNA, 445 bp, Oryza sativa
  unsure (1)..(445): unsure at all n locations
gagttgtgatccctatttatttacacttaatatatgctagattctgccgtaatgaagcggatgcccgtcgccggtatgcttggttcaaagccttttatggttccaccttttacggtacggatcgtaataccttttaaggttctacctcatatatatatatatatatctcttgtaagccgccgtgcggcattgtaacctcacccaatatagtgaagatattttactggctagcgcccgtggctttttctctcctgctttgggagggttttccacgttaaatctcatgtcttctgtgattgatctgtattgttctttatcgtttattngcctatcgtttcctaacataaatgacaattntgaataactaatgtaacatatttacgtatcatcagttataaatcatcaatttatcattatatagtgatatcatgatattatttatatg

SEQ ID NO: 3647 - DNA, 423 bp, Oryza sativa
  unsure (1)..(423): unsure at all n locations
agcttcaagatgtcgcagcggcagaggtattctatttttgtttgaatccaaaactgatccgacactaacccatcgacgtgcaggacgccaacccgtgggcggcaatagctggccgggtccaagccagactcggcattgatcttcatcaacaaaacacagccgtcgagggagctaaataccagcaccacatttgatctggtcagtggcgtaaatcctaatccgattccaagagatcctggggntcgcgctacaatccaatttctagttgacaaaattgactactcgtcctgatgacgccaatttaacaaatatgcctgtttcttacacgttcacagtacacatgcatatgtgttgagtcagtacgtgttcagccacccatgatcacgtatttagtagaatgaatttttaaattgatctactaat

SEQ ID NO: 3648 - DNA, 395 bp, Oryza sativa
tctcattcacgatcaggatgtgcctaatagttgtttctgtgccataagcttctgaagcaatatgtctattacccatttgtggagaatgttcttatacggttggaccctgaacatattcaccccactttgtataactgcccattaccttcatgtaactgaattgagaacttggccaatattctatagccgtattcttctcaccatataccaaccgtcagttttttagtcttcgggtcctaaaattaatttaatttgtgttcaaaagtgtgcaaggtgcaacatgccattgaatgcacatgacacggtattgttcttgttttatattctaagtgttctaacaagagttacttgtactccctacgtttctaaatacacttgccattatgtactatcta

SEQ ID NO: 3649 - DNA, 359 bp, Oryza sativa
agcttatccactcggagatttccatatatatgttttcttgtttgttaaacagagcggttcgtgcgaagatatgattcacacattatgctgttaatatatcgcactatgctatataaatctttagaacatgtcgatccaggactcaactctaatgaggttttgtgttgggcagaaccgtaatctgatgctaagaactcactcttaattctctactcggagaagattaattgtgcaaaaaatatccaacacaagaacaagcgtgacgagtagaagctgatgttgagatatgaacccttccgaacatttgcgtcatatatatccgaaatcatgatcttctgtcgtcatgaccctactcgctt

SEQ ID NO: 3650 - DNA, 413 bp, Oryza sativa
  unsure (1)..(413): unsure at all n locations
gctggcgcaccgtcaccggacgagggtgcgcgccttcgttgtgagccccgcgcatctgacggccgtcgctcgagccggagaatgtgggcgatctgccttgcctatgcccatgcccggatggccagcccaacctccatggaaggccggttttatgtccgaaactgatggaaattaactttgatcaaaattttaaacttcgatcatggtttttaaagtaaatctttataaaactccatctaggccacacataaacatatgtgatttggaacatgacacatcctcgcgtttatggtcataaaatttcacaaaaatcacaccatgaaccattttgacatattcctatatcaaaatttttaagagtggatttaacgtttacatgatggattatatccttataaatntaagatgttatc

SEQ ID NO: 3651 - DNA, 437 bp, Oryza sativa
  unsure (1)..(437): unsure at all n locations
catgcaagctttgataattaattgcacttttttattaaatctcatcctcgagctaatggagtaagctgatccctctcacttcccggcggcggctgcaacctcagaatggggaattagtgtttgggatgaagaatggggatcgatcgattaaaggctgctgaagcggaaaattctggcacaagcgatgatcgagcggcactccactgacatcgatctcatgttcaggtcttcgttggcttgtctgtaactgttcttcagtgagaattttgcaacaccctggattcttcatgtttcacacatttgctcgcagcacagttcaggtcgtgtatgtgtatctgccatgatctccgcaaggtagaatttccaatatantgttttttacaaaatggattaaaacctagcctctacatccaaactatatgtacatagcaagcatt

SEQ ID NO: 3652 - DNA, 423 bp, Oryza sativa
taacttatctctgcataatctctaatttcttgctgatctgcatacatatactgctctgttcgattctgaaacagtacatacaatacatacaggtgcatgttctgtttcgtataattcggtgacagtagtataataactgcaacatatataattaagtaaaggtgcaatattattagacctttgcataatcttttctttctgatccctgcattcatatatactgctctctcgtggattcttgaacagtaatctaactgaaaactataattatagcaagtctaatagtatagctaactgctgactctaaattatctatagctaacttaatagccgattaatagccgattcatacaatagttacctataaacatatactacatgatcaatatttggtcccacctttcatacacatatgcattttac

SEQ ID NO: 3653 - DNA, 420 bp, Oryza sativa
  unsure (1)..(420): unsure at all n locations
agccttgtccactagcttctcaaagttctcatatttcttggagatcagntggttggtcaattcatcatcaagactagacagaaacttttcttgcctctcggcattagtgcgcacgtccttaggaacgtatcgcagaatgcggttaaactcatgcaaatactctataactattctggttccttgttgcaaagaacggaactccctcttcttttgttccacaattccctagggaacctgtgccttattaaaactntgacaaaactctgaccaagtagcttctgtcccagctggacgggtcaccatgtagttgtcccaccaaacagaagcgggaccttgcagctggtgtgtatcaaaagcaaccttcctcttggtcgggcattggcaaagattcaacttcttctcaatcgcatggagccaatc

SEQ ID NO: 3654 - DNA, 409 bp, Oryza sativa
  unsure (1)..(409): unsure at all n locations
ngaccttccgcggntgccttgtgtgttcgcgatatctcgcataatttgagnttgggtggccataactccagcaagagtggttaagtcgggtgtctgagtttcgtcattgctggttgttgcccgacgtctgcttgccatctgtgtaggttgatggagtaaatatcctaattttctaactagctcctatggctttatcccattaagggagttgtgttgatatgaactttgttctgcaagcatggtggaataaactcatttataacacaacaacaatagatatcataaataacataacagagtttcacaaatggtacataaatcatgatgcaatcgaccgcatacatacgcagtccatataagggtcatccaaaagatacatcaaactaatcatcaatctactcgtcaatct

SEQ ID NO: 3655 - DNA, 407 bp, Oryza sativa
  unsure (1)..(407): unsure at all n locations
cccacaagtcaggtgtcactatccagttaccgtcttatctgccacaaccgcctaaaggacccacctgtctgtgaccctgccgaggctggaggcctgctgggccggctcatgttcggtcgaacctatggttcggtcgaaccctatctgatacggctcaactcggccctccacgtggacgtccaggatcgcttctcaatgacggtcacaatggcataaccgacattacgcataaagataaccgtcataccggccctataaaaggaggagctcactcatctatctcgacacactcaagcaagctgagagtcctcttcatactttangatgagtatcttagtgctaagcggagtaaaatacaatagcgttcggagtcctcggagtcttcggaagagccacggtatggctct

SEQ ID NO: 3656 - DNA, 429 bp, Oryza sativa
  unsure (1)..(429): unsure at all n locations
ataccgatcatgtatgcggtattantttttctacgccaacaatggtaaccactaagtatccatggggataaggccttttgattgcccatgcgcctgtgcggcacggaatgatagttattgaaatataatgcttatcaattaaaaacactagtaatatgcccgtgctaacgctacggggtgacaattgataactcaaattgaaaaagatataacgtcatagtgacatttgatattttaaaggcattacatttccccatagaaggggtgggattaaggttcaagcaaaaaattacataaagagttaagccagtgataatcacgtggtaccgcacgtgtttcttctggtatgctatacaaaatcaaatgacagtagtcagtaggaattcgaattgtaatgtcttcttctaaacaatgaatgttaaaaatcat

SEQ ID NO: 3657 - DNA, 433 bp, Oryza sativa
  unsure (1)..(433): unsure at all n locations
gtccctgcctgatgcttcttcgaacagcagtttgctcaccgaaggatcggtcacgatgtcgtctccgccgtgtatgaccaataacggcagtgtcacctgccaactgaaaatgttaagcacaatagcagtgtccagggagttactgcacatttgcatcagttgcatgtcgtgtgcagctcgaatcgagataataaacatggcatatattgaaatacgctgttctaatgatgatacatgctttttttgcttccaattaggaatagagagaaaataaaaccattttcacctcatgcaggttcttctcaatgtctatgctgaccatcangagttcatgacaggtcttcagtgggagctttcccctgtatatgtacggatttgagcgaacctaaacgcagttaccaacaaagacaagttcagtaaactctgccttttc

SEQ ID NO: 3658 - DNA, 439 bp, Oryza sativa
  unsure (1)..(439): unsure at all n locations
agctntcatgaaaggcatttcgaaagccgacacttgtttaccatatgctgacgagaggggtcccagaccaacaacaagttaggtcccataccatactgtgccaggaagcccagtggttctccccgacaccaccccggtgaatccacatgtctctcggcatcaaagctcccctgataagctagttactcagccaggggtgtcccattccacccatgtggtcgtacttgtcttatgtttggatgaaattccaaggaaacggtccttaagtgcaagagcggggaaaccgtacacccgatatgttccccggttcgcgcgtttggaaattcatttagttcacaagcaccgacccaggtgtcgggtgttccaagtcttttgtaaaacccaagtttacccaagatgttnttcagatttatagttgaatgcggccgtcgatactcgt

SEQ ID NO: 3659 - DNA, 428 bp, Oryza sativa
actcatgctccatttgttttctgtttaatatgaattaggagcaagttaactataccatgtagatgcaaagtttgacaataaatgatgaaacaaccttaacttaagccaatcactactaccggccttaccacattgatcaataaattggccgatatgctccatttgtggtctaatatacctacccgtgaatgttatgaagttgggcacctcatatccttgtgggtatgggaccgaatctacatgttcatgatacggcctttaatatgtatgcatagctactttggaatctatatctctactatcccgcagacattgtcatattcttttcaacatacacatgaccgatttgtgaactcggcctatgtgataatgctatttcacttttcgcttatgatattaacctgaaccatcacttaattcggctatat

SEQ ID NO: 3660 - DNA, 442 bp, Oryza sativa
agcttcaaggatgggaaatggtcttgtcgaagatcatggtgttgaggaatgaggagatgcattggctaaagaaagatgtatacacctcagttatgcttatatctgtcttctttggagctcctgcttttgttgctatggtcacctttggaagttgtttgcttctaggcattccattagaaacagggaaagtattgtctgctctggcaacgtttaggcagctacaaggaccaatcaatagtatcccagacacagtctctgtgatcatccagacaaaagtatcacttgacaggatatgctcttttatgcacctcgaggaactatcgagcgatgttgtaactaaacttctaagaggtacaactgatgtatcgattgaggtgaggaacggtcagttctcttggaacacaccttctgaggttcctactctccgaaacttgaacttccg

SEQ ID NO: 3661 - DNA, 443 bp, Oryza sativa
agcttacatatatgattgagcaagattctaacgtacgttcggtatctggaaaggaacggagacaacataaggcagccgccatttttatattgtcccatattctatggcccagagcactgacagatatctagcatatgtatggtggctacaacagaatacacctaccacattttctatgtaccaagccctgaagcccttgcaacatatgccttactatgttatacatggatatgcctgtgttaacacattaaatacctgaaatggtcgtgaagatggttggttttatactaatttcctcccatttctcacattttcagtatttcctccggttccataattcttcacgttttggacaacgacacggtctccaaaatatatctttgactatacttttctattacgtatacaataaataaataaatttttagtcttgtcatagtact

SEQ ID NO: 3662 - DNA, 295 bp, Oryza sativa
  unsure (1)..(295): unsure at all n locations
ctaaacaggatctgtaangatcttgattttgtctaaagcgatattttacccccactcaatatctatcgagcttctgaacaaaatgccaatacaaaacttttacggttgggcatttcagacatatttctaactcaaagcattttcgaaagaccaaccattctaatgttgcatccgtgtgaaattcatcataaatcttgactgtacctcttttggccaaaacttgcctatggtgggttcaactatttgagccaaaattctttgagaatatgggcatcgactactatctctaatccat

SEQ ID NO: 3663 - DNA, 394 bp, Oryza sativa
gcggcaacgacacgtgcggaggatgctgtgccttggggtgtaactgcagcgcgacactcaccacgccggcgctcgaaagaacctcaaaaatcacgaacgcgcccccacctggcgcgccagctgtcgaggagtgaccctctctagcgggaggccgtgaggcccccttttgttagttcggctgggggaagaagctcgcattggggggcggcctcctccgactagtctttgggaaggagtggccgccaccccaccttgggcctcactcccctcggggagggccacgtggcattggtgggcagcctcctccgtccaatctctgggcctctaaacatgatacccccgggcccatatcaccgacaggtgtggataaggattttctacatctaaatagtta

SEQ ID NO: 3664 - DNA, 406 bp, Oryza sativa
tactccctccactcttaaaaaactaaacttctttagtttataatttggtccatacaaaactaacttataccatcctacttaatattagcacgataaacgagaagttttattccttcaataccctgtaactatctatcactcttactaattttctaatgattaagagcattgtagttattcttactctccactaattccaccttgagatgctaggattggattatttatgggatggagagagtagtattagtcttgtagtagtgggctacctatcatatacatattacgtcttatagtttgtgttgcggctgtctacaaatatgtagcatgctgctattttctgtcctcatctatcttctcaatatgtgcttatagctagcttataatctgctattataccagctct

SEQ ID NO: 3665 - DNA, 435 bp, Oryza sativa
  unsure (1)..(435): unsure at all n locations
agcttataataggctaatagaactgagctatttacatgccgacctctgtaatcgcactgctagaaaaactatttttcagacgatgacatttttttctctgacgggtatgccacttagagctaaatgaccgtctgtgaaaataacaactgagcgatatcgtcgtccgcttgcaaaaaggttaaacatgttaaaaacatcatctacccaccaaaatgctaagtcagagcacttcgccctcacacctctccctcctctcccctctcacctctcctctccttctctcccgccgcgggatccagtcggagggcggtggtggcggcggctaccggcggtagcaacgcggagggtggaggacgcggcggcttcctcccagatccggtggagaccgcggcgacngcgcatagggtggtggtggcggcggctccaagcgctggc

SEQ ID NO: 3666 - DNA, 447 bp, Oryza sativa
  unsure (1)..(447): unsure at all n locations
tgtaacataagcatctgatattttagcaaaacccttattttataatcttgatttgatcttagtaactacagtaaccactactagtaatattacaggataaaagaatatggatccccttatgtacatatctctgtggagaatcgttctttaattnttttattgcattaaatatcttgaataataaaaaaagaaaattgactttgatatgtggaggtccagaactagattggcatgtacttaatggctacaacagtggctagaaaacacaacctcataagtgactaaagtgactgacaatgctatgatgggggcaagacgggtagaaacaagaacaacaaaaaacaacttttattcatgaaccttatgtaaaggagtagtgctgctggaaataacataccactcaattgncatttgatatgatagacaaatcacacggtgtatgtgggt

SEQ ID NO: 3667 - DNA, 416 bp, Oryza sativa
  unsure (1)..(416): unsure at all n locations
agcttgccgcccatggcctcctcagcgccgctttctatcatcattatgctggcgccgtagcaggatggtgcagctccgcctcgattgccccctcgcatgagcgccagcgccgagtccgtggctgccttcaccgcccgcggctacggtggcacgcccctgccgaggagagagggagagagggaggaagaaggagtcaaagagagaggctgacatgtgggtcccacatgttagttgggcccttttttttaatgacaaatgggtccccataaatttttgcacttctaatgacatataagagttatgtcaacaccacgtcggatgaagatcaagttaacaccgccacgtagtcgccacgtcaacgaaaccacctaggaaatcaaattgcaccggttntaacagtttaagggtcaaaattt

SEQ ID NO: 3668 - DNA, 285 bp, Oryza sativa
  unsure (1)..(285): unsure at all n locations
tatacttattgacttaagttctaaagctatcttttttttatatatattatataagccggtgaatntaaagttttaagtttaatgctggagtcatgtctccgtctcaaataaaccaaaacgtttctccaacctagctactggattatggattaacactgtatagctcatgactttagaaaagccaaacaataaagatcataagctaagcttataagcctaaacaaaagagggtctactatggtccttgaacttttgcttcgggatgaatttacccctgacgtgagc

SEQ ID NO: 3669 - DNA, 433 bp, Oryza sativa
agctttgataaactggatttcggctaactctcactaactcttcgatatatttcttgctgaaagtatccctgatcccactgataacgagtaggcccaaacaattcaattgtggtagttgctgacccataccacatatttccggcaactacgaaagctgcaaaaaaaacagcagcgatactactggaaagtacagtttcaatattgcccatacgtaatcctttgtatagacgttgaggtggacggacactaagatggaataggcccgctaatatgcccaatgtacccgcagcaatatgatgagaagctattccccccggaacaaaaggatcaaaaccttctgcaccccacgccggatttacagcttgtacttttccagttagtccataaggatcagacactcatattccaggaccatacaaacccgttacatgaa

SEQ ID NO: 3670 - DNA, 414 bp, Oryza sativa
  unsure (1)..(414): unsure at all n locations
ctaagcttgtcttaattcccgaaaattagccttttatgattattttgtttataanccggcaaaggggggattattcagagcatgctcaatggacaatggggatggaatagctgttggatggctaagacatcctatctttatagataaagaatggcgcgaactttttgtacgccgtatgcctacttttnttgaaacatttccggttggtttggtagatgaagagggaattgtgagagcggacgttccttttataagagcataatccaaatatagtgttgaacaagtatgcgtaacggtggagttctatggtggcgaacttaatggagtaagttattctgatcctgctactgtaaaaaaatatgcgatgcgttcccaattatgggaaatttttgaattagatcgggctactttgaa

SEQ ID NO: 3671 - DNA, 439 bp, Oryza sativa
  unsure (1)..(439): unsure at all n locations
agcttcggtccttgtagatttccaactgagttttaccaagttttttggaatgttataaaagatgattctctagacttgttaacgcaataatttcataatgtttcattgcacttgtattcgcttaactttggtacgattatcttgtaacccaagtctaacgatgctactaaaatacaacaatataggccaatatgctaattaaatataagttttaagatatttactaaggtggtcacaaatagaattatgggaatggcacaaaatgttataagcccaactcagatggcttttattcatggtaggaatatcatggacgggtagttatttaacatgagacgattcatgagttgcatangaaaaaacaaaatgggattatntntatgattgagttngagaaagcgtgtgataaaatttattggtcttttgtgcaacanactat

SEQ ID NO: 3672 - DNA, 422 bp, Oryza sativa
  unsure (1)..(422): unsure at all n locations
ntatgtatgcctgtccanaagaatgatgtttgtaagaatgattgcatgttatactataaggagcatgctaacaaaaggaaatgtataacatgtaatgagcctcgttatattgaagggttagaactccctgagaataagaagggcactccacagaatgtgcttcgctacctcccaatcattccacgcctacagatgctctacatgtcacgatgcactgcaacacacatgacataccacaaggatgggcttgaatcatagaggtgcaacaatgaaagcagaaagaaaaagttaactcacccagcagagagtgaagcatggaagcatattgattcatagtaccctaattgtgcaaaagagcctcgaaatgtgcgtttatggttgtcaacagatggattcacgccatttaatcaaactgcaacccc

SEQ ID NO: 3673 - DNA, 434 bp, Oryza sativa
  unsure (1)..(434): unsure at all n locations
agctntagccgacttcgtcgtctagtggaccgtttgccaagaggacacgcccgaggaaaagatggagtggagtattggactatgcactttgacagggccggggttgttttaatttccccaactggagaaagactgagctacatgctatggatacatttctctgcatctcacaacgtggcagaatacgaggcgctccttcacggactacggatcgcaatctctttgggaatcaagcgtctgatagtttgcggagattcacagttagttgttaatcaagttatgaaagagtggtcctgtcttgatgacaatatgatcgcttatcgacaagaggtacgcaagttggaggataagttcgatggactcgaactcacccatgttcttcggcacaataacaaagcagccgacagaatagcaaatttctgatccaaacgccg

SEQ ID NO: 3674 - DNA, 138 bp, Oryza sativa
tgaggacgaagaagagaggggacggggaatgtttctctttttcttgcctggaccattccagcggaagctgcgcctagttgttatagttaatgccacagagactatagctgctgttatgaccatatgtctatggcaaat

SEQ ID NO: 3675 - DNA, 379 bp, Oryza sativa
agcttaatcacatagtatctgttttatttgcttatctcactcaccattgcaatgaatccagatggtatgggccaatgctggattcccaagtgcacgtaaagacttgatcatgatcaatcgctctgtcgagtggcttgcgatcatcgattacaaggttggtatgccacccatcactgcaaattccatactggccaacaaagtggctacttagaactacatgatagaaaccatgatgaacctgcgttcttacttatatccctatgttactcgacagaatgcgcatcgcagtaatgcatagaaactgattgccttacatactataaaaaaatttacgcttaagcaacatcttatcttgtccacgacttttcattctactatt

SEQ ID NO: 3676 - DNA, 436 bp, Oryza sativa
  unsure (1)..(436): unsure at all n locations
agctngcagtgtcgttgtggtaacggtaaacaaatcttgttacttgttcagttctaaactgggaaaagaaggtggaacctttttatttcattcgactataagcttgattttatttaacttccaatcatgtatttagtgtgattggtagctgcgacaatctaaattatgttcctctttcgtttaataaaacttaaacctttcaaggcgtcttgttatgaaattattttatcggatgtcaccgaagtgacgtcttgttatgaattatgaattcacgttccagccaaagataatttttaatagtctgaaactttgccatagacaagttggcgaaattgcagttcatacgatgataatataactgaatatatcggtttcatcggcgttacaaaggaccgaataaccttagacaaacaaataaataataaatcatacatat

SEQ ID NO: 3677 - DNA, 438 bp, Oryza sativa
  unsure (1)..(438): unsure at all n locations
tctctgaccacaatgttttcactcttcatcagcgcagccgtcgacccctcgcctgcactcatggtgctcgtccagaccgtggaaccattgacatcgatcatgaccaggtagccatcatcatgcatcaacaccttcgatccatgcccattcactggtgaccggcgattcgcagaccatacgactgttttgcccgccgtgttggtgagccatatggagaatgtgaaggcgtttgtcccaattgggtagaagccgcatgagaaggtggaattcggtgatgtgaggaatgtatgcttgtaatcttccaccgagaaagatgagccggtgtgcaatgtcagccggtgtgaagcagaagtgcagaacaccaaaagagagaggaagaatganaggatgatcagatagagaaaacttgccattgttttgtttttctttgacaactct

SEQ ID NO: 3678 - DNA, 433 bp, Oryza sativa
gcttatcccttacgctccaggaatggatcagtcagaacatcaccaccggcttgccatcgtcaccgccgactggtgccttcacctatacggttggttggtcacaccaccgttgttgggcgtctacgtcttcaccgaccggcttgccctcgtccgccgccgactgatgttcccgcctacacggctggccttttataccgcactttttaggagttggtacaatgcatcttaaaaggtgtcaaacagtaaagctttatatagctgctccgctgacttttttatatagtcatgacgctgtttgggtttatcaagcaattgattggatacaatatcattgcttttcgccacgtaagtgtgcatttttattgaccaatattatggcttaggctgattatatatcttagtcattttccaaggcggtggtaaatcctttatg

SEQ ID NO: 3679 - DNA, 466 bp, Oryza sativa
  unsure (1)..(466): unsure at all n locations
actgtaagatcgacgaacgcgctgaacgatgctctcangaaccgagcctctacagcttcaaagtgcctgaattagattcagaaaattttgtatcagtacacatcgtgaatcatagtaaacacaatcgatagcaattgttaagaatggatttactgacacgacgagcttgccaccagaaacagacatctccctctttaccttgtcaggttgcaactgcaagataaataccacaggattcgagttcttttctcaacaagctagcatgaagaaaagaggaaacattgggactccttatgaaaacaagaaccatgttaaagtgtactataacttcttacctccttatcaacagctagcgttttgtaaactatggatgcgcgttcctcggatccataatcaatttcatagtcactgccatacaaaaaggttggtagtgcaagaataaatntctctacatatgagctacata

SEQ ID NO: 3680 - DNA, 442 bp, Oryza sativa
  unsure (1)..(442): unsure at all n locations
agctngatatcaacttctattttgttctcctattccttcccagaagaattggatctacttttgatatgctaacatatcttgtcaacacgaggtttatccgaagacatttgacttccttgtaaaatctgggacttgtgctcacgagatccttgggttgaactggctacaccagctacttcttcttggaatttacatttgggatgtccggttgcaacatattcttcaatactgtaaagctaacgctgcatctccagatagtactatccagataaaaacaccagagaacaagccaaagaattctgaaataacttctgttcatggngacacactatctcttaccaacgttggaatggaaaggcaggaagcacgtatcgatacttgtcattcttttgatagttcatttggcggtatgattntggagaatgagcagctaactgagaaa

SEQ ID NO: 3681 - DNA, 482 bp, Oryza sativa
  unsure (1)..(482): unsure at all n locations
actaagctgcatattntatgtggaataatatgtgggacctacattatggtgaatgaatcttgccatanatgtggcacgaaccaaacggatgcctaaattaatcaaacctggctaacttgagtccgtgcgagtgtcgttatgtcaaatccagtgtgtccttatataccatgtaaagaaatgctactccctccggtctcattttaattgacgctttggacaataacacactttacaagatatacctttgaccttatttttctattataatatatacaataaataaatgcatgtttacttttattatagtgttttgaaagacaaatctatatatatttttctagtttctttaaactaaatatgtttaaagttattgatggtcaaagttataaaagttaacctcaacctgtctatacgtaattaatatagaacagagaaagatgacagttcattacttcttttaattaaacatctataatatatac

SEQ ID NO: 3682 - DNA, 425 bp, Oryza sativa
agcttcaagaacagtggtgtatgtgatgactgtttgtttatatccgcgtcttttcatctcttcaattgaccacattgcctcatcgatcctacggatactgcaccacccatggacaaaaatgttaaacgtgtatgcatcatgcggaatgtgcggactaagcaccgcataaacctcacgtgccacttcaatctttctctctttgcagagcacatcaagaagaacattcatcgtctctgtgttcctttccaaccccatatcctccagtttatcaaacagcaaaacaacatccttccatcttctcgcacccgccagcctactgatgctctttgcaaccgtctcaaccgtgaccaaccctctgccgtgcatgtcagacaacagctcccacatttggtcaatctgtctcatcttcccaagcaggtcaacca

SEQ ID NO: 3683 - DNA, 442 bp, Oryza sativa
  unsure (1)..(442): unsure at all n locations
agctttatgtcctcttgtcaggctcctaattctaataataaagctcttgacggtagcattgttggctcgagaatcaaagtacggtggcctgctgatgaaatgtaagtgtgataatcatcaaatatgtttcttatttgaagagatgttctaaaacatgcatctatattataattagtgctcaatggtttgttgtttattcatttgacttgtttatataaaacttttggcgacttaaacctggtgtatggagctatgtaccaatgttttaccatttgctatattgttcaattgttaatgctggttcttattgaacttccattgctntagtcctctggtttataacgaactctcatgagttatactggagttatgtgtgtatgtnttaggctcttcttattaattttgaattcattgcatgctctgcanggtctacaatggattg

SEQ ID NO: 3684 - DNA, 450 bp, Oryza sativa
  unsure (1)..(450): unsure at all n locations
atttccggatgcgatgtttaacataaatttaatatatttgtaagcctcatgcccnctaccccgttggatcctcatgcaaagaagaaaaagaagaaaaagatgccctccaccatttctggatttgcttcacatgatatttttttatacgtcgtactaatttatactattcttaaaaataatgtttaaattataccaatatattataaattaaacgacaacttaattacaaaaagtattatcaaacatacatactgtatctctgtgcctctgcaatctcgcaaagacgtggtatggaactagaaggaaactgcaacaacgcatggtttgaaatggttcttcacctttggcctttttcttataccagccagctcgccagttatttccaagcctgtggacagttcgtctgcaacgaccaacttgcagaatatactcgagtaacaattaaacaat

SEQ ID NO: 3685 - DNA, 396 bp, Oryza sativa
agcttatatcattatttatgcgaagatgttttttataaataggtcatgcatcactgacacatatgcatgttcattgaagaacctcagtgcacttactacacactgatttgctatatagacaggcagcatagctctatgttacgacgtgatcaaaaacacagagtgcttacccaagtgagtaatttacatagaccagagactggaattttgatgttacatgcacagtaattaaaaagtaaactattgctcgactgacctagagtggaagtttagctgagacatgcagagagacaaaaaatatgatgtcatatctcaagtacggatcaagattctacctgtgctcataatctgttcaaagcacatcgtaatcagaattgtccgggtcaccaggtcatc

SEQ ID NO: 3686 - DNA, 278 bp, Oryza sativa
  unsure (1)..(278): unsure at all n locations
gatcacccctctatgaggctcggcaagtgtgtcagattgagagataaatgatacgacgatgaatacgaaatgggaaagctctttcccattgaagatctttgtgacacacaacctttttcaccacttgtgtctgagagatgcaatacgttcgacctttatccatcctgacatgcaatcgttctattttgtgcggatagacagagcgtgataagacaaatgacaaagtgtgtcaaacagtatcgntctctcaatcgagcgagaaatctaggttgtcgact

SEQ ID NO: 3687 - DNA, 427 bp, Oryza sativa
agcttattcaaccaaggcaggtcaagggttctttattttattctccgagaaaactcctccgacgacaaggttagggtctagggagagtgtacgactcaaacggcttaccaaagtcggtaactgagaacacactcttacacacgacgtccaaagtaagatacatttgtttaaggaatatttctttattcacaaaataattcttacagtttttacataaattttccactacattacatctttccctaagatatctgtgacagggcacgagtactaccaagaaggccaacgccagtccatagactggaagatcttctcggccagcggcgacatcgacctcgctagatggtctatctccgccggtgttctccgagaacgagcaaaaccatggcggagaaactcgaggtccaggcgcgggcggtgatctcgt

SEQ ID NO: 3688 - DNA, 378 bp, Oryza sativa
  unsure (1)..(378): unsure at all n locations
ggaaccatgagcacctcgctctaataccaattgatcgagcttagatgtagcctanagttggggggtgaataggctatcctgatttttctcaacaatcgcatcggttaaattgacagggcccggaacctcctagtgatgatgaccagaacttccaggcaagatgagtagcctggaacttccggagttcttgagccaggaacttctaggcagcagagataaattaaaactgagatgaaagccaggtcctagcaagagaagtttatgcacacagaggaacaagatgaagatcgcagaatatcagcagattcacacaaagatcatgcacaagagagacaaagatgattgtttcccacagttcggatctcacgaatcctactc

SEQ ID NO: 3689 - DNA, 426 bp, Oryza sativa
  unsure (1)..(426): unsure at all n locations
ctcagctttctacttttgactagtaatagattatagaggtttntattcacagcacggaaatatatacagggtctatcacaaacaatagacccgcaaaagaactagaataaggctattcttcgaggggatgatctctatgattcatgtgcctcccgccttgatccacgctcgcgcattctctttgatcttggtgataattgtagccattgtggtagctatgtgtataaagatcctggtatttcgctcgcaccaaagcttcgaggccacaaggatgatcaccaattttagtgtctttctcggcacatggggtatacgtgacagtttgtaccaccattcttctacattggcgcaagttgcccactcatttatttggaggtcgatatttatacatctttgaaagtttgtccatatccttctcgacagtct

SEQ ID NO: 3690 - DNA, 438 bp, Oryza sativa
agcttcagaggacatctagcttcactttttgcatatggtttccaactttggataataatagtaaaagtacaaatagattgttgtgttacaaacttacaattgcttacaaatatgtaagatcatacgtactccctccataaaaagaaagctaatctatatggggatgtaacaccacttatgactacatgtgaaaaaaaaccccacaaagctaattatgaaatcgactgcatttttcatagcctatttattaattttgattttccatttgtagattgagtatgttctcacatgaatcaaaaatatattacatgaattagattgacttaaggagtattccttaaattaatggaaaatattctagcctagacttcagagaagctatgatcaattattactgagtttgcaggacaaataattacaaattacagcttgattaaa

SEQ ID NO: 3691 - DNA, 423 bp, Oryza sativa
tagcttgatgctggcttataagagcactaccgcgagattatcatataccatattcgccttgacctctctgcagaatacggtgatctattgtggcatggacactatagtcaccagttcagcaccgtgtgagccacactcgtgtacggccgggtcagtttggtttacatttcgtttaacaaaacggaagccatgtcaaccaattatgatggacaaagtaaccttatggattaatcagtgagctgttgcaattcagcattactagatctatatatgcatgtaaagaagattataggctgtagatataacaggtatcaccagagtcaatcttgttattctttttctcgatgtgtacatcaacttttgacttcaaagattgtgaagtgttctttaatcccacattaagaatgagtggcatatgccctt

SEQ ID NO: 3692 - DNA, 426 bp, Oryza sativa
  unsure (1)..(426): unsure at all n locations
agctttactggttgacaccctttaatattcatttttccaacnnccaaaaagtcgagtaactgcggtataaaaggaatttaaggtattgggcacttgatcacgcgcactttggcctaagcgaaaagtgcctaagtccctaaaagaacgtgacaggccacacctgaaaacatgggctgcagacatattangcctaggccaaaaaatatgccttcgacaccctttaaaggatgacgcatgtaacatgctcccgagtaataaatcttccgggtaatatagaccaagtgtagctcatatgaatagtttctgatctgaatgattatcccttatgggatactccaaaataaatataataattgaatcccgactggcgcaagtattcggttgtaacccttatggggaataataaatagtccagtccttaaacat

SEQ ID NO: 3693 - DNA, 338 bp, Oryza sativa
ctgacttgagcagctagacgagccacttgtcgcgtgcacacactgctggctagagcgagggccgtccacttaccctgatgattctccttcccgtcgacgaccgtgtgcggtttctctgggcgctgctcaacaccggcgagcggatgtcatatgtgtacgaggcacgcacacggtcgcagcgtgagtgatacatggggttgccgcatgtgtgcatgctggagcacggtgacgacagcgcgttcgtgcatgcgccacgcaaagactggattggatcggacactgtgaatacaatatgagggcgtaatggatatatgttgacacgctggaacgccacatta

SEQ ID NO: 3694 - DNA, 427 bp, Oryza sativa
  unsure (1)..(427): unsure at all n locations
agcttcatcagntagtgggttgtgtttaagaattgtgcagnttataaagtagcattattggctaagaggcaatggaattctaaaacaagggatattgttctttcatggcaatctgtcaaggaagttctgctgcagctattggcacatatgttgtagtcggtgcaagcgctgaagtgctattacttattggctcttttagagacaatgacaagataatgctactccctgaagacctccttgatgcaagggctgctaaaatctttatcttaccttggccaccacccccatcaagtctggaaatgctatatattgagatctgatgggattcctgaatatcatcgacttgatatgtaggcaactgcattgagagctntgaaagtatgtcatcagtccataggtgtcctggtgccatgttctttacttgcat

SEQ ID NO: 3695 - DNA, 330 bp, Oryza sativa
  unsure (1)..(330): unsure at all n locations
taaaggtctgcatagtgggatcgcctctctgagagatgatctacgtaacatggaggctgctctggaggacttatcacagttggaggaacccacccagcaagtgaaggagtggatgcatcaattgcgggagctttcttacgacattgaggactgcatcgatgtcttcgtgcaacaccttggtcaggatgatgctcatgatgggcttattagcaagattattggttggatcaggacgatgaaaagttgccatcatactgcanggcagattggtaagctgaatgagcatgctgtggaaattagtgaccggcgtaagatgctcaaattggacat

SEQ ID NO: 3696 - DNA, 441 bp, Oryza sativa
  unsure (1)..(441): unsure at all n locations
agcttacataagcaggtctggttaaatgcatggttccttttttaactgctaacttgcgtttgtcaccagcttatcttggatatctgatatttctgtttccaggggatagtgcatagagatgtcaaacctggaaatttcctgttctcccgtaaactggcaaaggggtatcttattgacttcaacttggcaaatgttagtgcatatacttatctcccaatctgatgctcgccttctgttttctttatgctaattttaacattntgtgttttccctgaaaatccatgcaggaccttcaccagaagttctttcgaaacagtaagttcactttctaagtttcgaatntttgtttgaatttcgatggttaattgcagtgcattgattgttatctgntctgtgttattgcctcttccagttntaggctctctgtactgaatatagctc

SEQ ID NO: 3697 - DNA, 104 bp, Oryza sativa
ctgtcgacagccacgacgtggccatttctcacgtcgcacgggtggaggaagaacaagcgatccttgtgagttatacattcatcacagcacattaatcagttcca

SEQ ID NO: 3698 - DNA, 443 bp, Oryza sativa
  unsure (1)..(443): unsure at all n locations
agcttgacagtgganaagatgataccacttgagatgttctcccatttcagaagaccttttgatatggaggtaaacctgagggaacttattcttaagcaccctggcattttctacatctcaaccaaaggaagcacacaaactgtcctccttagagagagttacagtaagggatgcttggttgatcctaaccctgtctacaatgtaagaaggaaaatgctagatcttattttgtcaggatgccatgggattgatgaaacggatggtccaattcagttagttgaggagcacaatcaagaaagcagtaatgtgtcatagaatcacatgtggcagacagattccggatgccttgtcggaagctcanagtgacatttatcaaagaattagctattntaatctctgacattgtttatgggcttatgggagtacaatgttgataatggtat

SEQ ID NO: 3699 - DNA, 204 bp, Oryza sativa
ttaatctaacttatcgttaggtgcttcttgccaccagtgagaggcttttttgccatattacagcgatgccactattttctttcttttttttttggagagcaggagagaaaaggtcatgtggattgtttttttttctctatagttaattcctagctaagcaaatgctctgtcctgctcttgaatgaacactgacccatggatttc

SEQ ID NO: 3700 - DNA, 399 bp, Oryza sativa
  unsure (1)..(399): unsure at all n locations
cagctccccccttttccggcacttgcgacatctacttcttttctttgggacatacgaattaaagtttgtggttatggtaagatatgaggccgctggggacgcggaatattccttcctcctttttttnccttccttcttctttttcctctctactctctccttcctccctccctcttctctcctcctctccttccccccnattttcttttttctccttctctctcttcttctccttcctcttcttcctccccattcttccgctatttcctcttgtccctctctctcccttctcctccttccctctttttcctttcttccccctctttcttctccctcttcccctttccctctttcttctccttcttttttcttccttatcttttattcctctctctcctt

SEQ ID NO: 3701 - DNA, 464 bp, Oryza sativa
  unsure (1)..(464): unsure at all n locations
attctgtgatgccacatcatcaagattatattgaccattagtttatctngcgtctatgcaaatcaaccggtagatcaagttcttcttatccgatggcatctgaaaggaccaatgctctattgtcttcatctaattacctcatgcatcattatattcccctttatcactaaccactaaccaatacattctccacccgaagcctacaccactacatttgtgtctacctctttcttattccctttaatttttctaatgcatctactaaccatatctaggttgatccaatgaattntcttggaatattaatgcttgaatatgcttcctcaatcatctaaggaggaaatgtcaatggtccaatgaaattttggtttgtcactgtcatagatgacatcataaatttgttggtacagattacaacactcgatgatcttaaccaatgcaaagatatctatctatgtctatct

SEQ ID NO: 3702 - DNA, 436 bp, Oryza sativa
  unsure (1)..(436): unsure at all n locations
agctngttgacgaatatgcataaaattgggcaacaacacttgatatgaatcatcaaatcaccttttataaggctactccttaggtaatcaccctaaatagtgccagagaaagcatataaatatagcaatgcgagcatgtcctcaatctggcatgacaagaataagttatatattattgaatggtgaatgagccaaaacaaagtacttgccacacgaggataaaatctatatattatagaagttatctacaaatacacatatataagccaataagttggaaaggggtgatttctatctgctatatgaaaaaactgaatctaaaagggaacataaatatttggaattgcgtatgaacgaacacttcaattaaatacaacctcagtcctagtatcttatacgtcactatanaggaagcgtaantgaaacattttaatta

SEQ ID NO: 3703 - DNA, 482 bp, Oryza sativa
atctttaatataatcatgaaactcatgctccatttgtgaccattgttaaattgaactaggagcaagcaaactataccatgtagatgcaaagtttgacaaataaaggggaaacaacttcaacttaagcaaatcatcgctaccggccttaccacattgatcaataaagcagccgatatgctccattgtagtcatagcattctcacctgtgaatttcgtgaagttgggcacctcaaatccttgcgggtatgggaccgaatctacatgttcaggatacggcctttgatatgtatgcatggctactttggattctatttcactattatcccgcaagacattgtcatcatcttttccaacatccacatgaaccgattgtgactcggtcttatgtgacaatgctatttcactttcgcttataatacaatccgaatcgtcatttagttcggctatatcttcaatggcattattctctaagctagcaacac

SEQ ID NO: 3704 - DNA, 439 bp, Oryza sativa
  unsure (1)..(439): unsure at all n locations
agcttgttacttttgaatgggttaggttaagatcttatcctctntgatctaatggaatgctgtcaggatgtacaaaccttcgttagatgatgttggtttctacttgattcttcactgggttcctgcacgatatgatggagagatcggtgacccgttggtggctgttaccagtgaccctgtcatggcaggttgcccattgatcttttccttgccagtgttgtgtgtttactactactgcctgcacatcctcagtcctttaccaaccttgcagcatttccatctgtttcggatgttcacttgaagcagaaaagttcattgttgtatagcggaacaggagtctattatggtggatatgaggggtcaagcttgtataagtggtacagggaatctagtgatggaaccaggcattgtatagatggtgctgatttaattatatatg

SEQ ID NO: 3705 - DNA, 421 bp, Oryza sativa
  unsure (1)..(421): unsure at all n locations
tcgctcactcactngcagtgtcagtgttgctgattaatctatccaatggtatatatattattagattgttaattgattaagaaatggaagggctgataccattggtgtacaaggccatattggagtacaggaacaatgcaagcatcaggcaggtcactctgagaagcttcttcttcgtcaccgtcgtctacgaccatctgcacggcggcgactccggccggtggtgctactcgccgtcgccgccggcgagtgccgcccaccagctggtgtcgccgctgctgcgatcggcgccgcgtctacaccgagcaggttgattaaatttaagtggtcaaatgctcaatcaacaagaagttagttagcctgcatatcatatcatatcatatcatgatcatcatagtgcgtataaataagatcaataaca

SEQ ID NO: 3706 - DNA, 385 bp, Oryza sativa
  unsure (1)..(385): unsure at all n locations
agcgtgtctacctgtgatgattcctggtcggtgtttagtggactgtggtgtcttcacaagagatctggtttctgattcaatgtcagcatccttcccgagagaactgttcgtttgagcttcaacctcgggaatcttttggcttggccctgcatccgactggtttccagtcgggggctcctggttagcacctacttcagcttctgccgactggttcccagtcgggggctcgttgctaggttctacattgtcggatgccaggtgtttgtcactctgacgattctctgcagttggcccggattctttggaagaatttgtgtacatgttggtcgggtcagagtcttttccagacgggtctatatcagatggcttcctgcanatttgatta

SEQ ID NO: 3707 - DNA, 401 bp, Oryza sativa
  unsure (1)..(401): unsure at all n locations
tgtacatggattactgagtatattgaagagtctcttatctttgtgttttgttgccttatcatctataagtgaactatgtgatgttaacttctctacaggcacatctcgctttctcagccctgagagacatgaatgccagtggtaaagtgatgattgcgatgggctcaccatcaaaatcaagactctaacgccctgtagggttcatcanggttctattcaaaaccatacatctatgcacatgtcatatgtatagaccatgacggtattatttaaagcagcggtagtgcctttcaataatgtggtttacaagtactgctagcttgcatactaccagatacatgaattattctatgtatgtagattagtggagaataaatttgaaaaataaaatagagctatct

SEQ ID NO: 3708 - DNA, 429 bp, Oryza sativa
  unsure (1)..(429): unsure at all n locations
agcttcaggaagctatttntttagtactagttattgtctaaaaatatctgttttactatttggttgtagtttattatgagaaggcagaaaattcaagtaaaaatcttgcactctgaattcatccgagtacttgtcttgcaacttgcagaaggctcatttcctggtcaaaatatttagcagaagcttatgaaattgtgatgatttttttttctagaatctgattccttgttttgctgttcagaatgatcgaggatgcagaagagaaagggctgattactcctggtgtcacaactctagtcgagccgacgagtggcaatctgggtttaggattggtgcttgttgctcttcgcaaaggttacaggttcgttgcagttatgccgggccagtattcgtttgataagcagatcttgctgaaatacatgggagctg

SEQ ID NO: 3709 - DNA, 450 bp, Oryza sativa
  unsure (1)..(450): unsure at all n locations
aaaaaaaaaattgttgattcgctgcattaccggacctatgatactcaagttcnattatggctntaatagcttgtgtccaaaattctgtccatcattgctnttgggacgnaaggtgtagccaggtaccatcattttcgttagttcagatgatatttgtctcgattgttttcacctgtagatatgtctccctcgtcaaatggggatgaaaatagatctatctcataaaacacaaataaacagtctttccttttctattatttaatactcccataaaaataatgaaattagatagataaaatagcactacatgtaccacaatacgattttttttatttttcaaacctttgtaatgtttaatttaaaacctcaaccctttcaaaacttattttctaaacattgttgtcacgccagacataacaacattggcacgccacctgcagtgggtgtgac

SEQ ID NO: 3710 - DNA, 427 bp, Oryza sativa
  unsure (1)..(427): unsure at all n locations
agctttcttgcatgaggatgtgccacatcatctttttatattagccatcagatgaagagttcaaataaacaatggtcattggatcgaaagagtgcatgtattaaaaaaaaccatagatgagctaaacatatggaaatttctggaggtttcatctcctcataaacatatgattcaaagagagggaacaaaggaggcttctgatttctcttataacatactcatataatacaacttagctatatctatagttggctaggacaatcgatactttataaacaaattaacttatatcaaaacatttttaaaagctaaggtaaactaatagaccatacacagaagttttaaatagaatcaaaagtcgcgcaaagcgctagtatatatganaaatgcaaggataacttcaggaatatgtaacgagaccaccact

SEQ ID NO: 3711 - DNA, 164 bp, Oryza sativa
  unsure (1)..(164): unsure at all n locations
ggtcgaatgttgagagtcttgtatgtgtgtagccctcgtctcttttgttagntgagaaacaactgaacatagagtcgagaattgtagcttcttgtcgtcgaatagtcattgcctgagtgaagatacgcatagaagatgtccgagttaaaatcttggatattgga

SEQ ID NO: 3712 - DNA, 435 bp, Oryza sativa
  unsure (1)..(435): unsure at all n locations
agctttggatcatcagtaaacgacgaaaccttgtgtntctaatttagcaggtcttgatactcaaaggctgcctctcttagtgcatcagttttgctctctggccaatcaaagtgctttagtactgcccgctcatcgacctaaaacgttatttgaccctttttcagtactaactattttgtcatgtgttgcattgaaaaaaaaatagataagcttaccaagaaggatagttcctcatcaagccagtttacaaatgcaacaacgtcgtcgatatttacaaaactagctgctcggacctcatttgctagagactcaacaaagtctccttgtgtctccacatccactttgacctgaaacaaatccatttttttatataaaaagtaagtcctcataataatctacctgaattagcagtggactaaagggaatcagtagtat

SEQ ID NO: 3713 - DNA, 410 bp, Oryza sativa
  unsure (1)..(410): unsure at all n locations
ntctcttcttcctgcgtctggatctcgctcatgtatgcgttcacattngctttcttcttcctctcattcccattcccccctaccctcagaattgcgtggataccctttcctctgatctacaggtttcccctctgcctgccactccccatggctctggattcangtcgctcttcaacattcactaccgtattcacttcttgaaggccaatttctggttcctcaccattgtatccaataaagggtgggtactctttctttctttcttgtcatccactccaagttgactgcctctgtaaatattctatctttccaactgttgcaatggtagcccatatttactagtatttntttcccttggaagatctatgggaaaaattaacttacatcttcaaacgcctgtaatcatctat

SEQ ID NO: 3714 - DNA, 359 bp, Oryza sativa
agcttgtagccacagagatctctttttttttctacaactccaaaccccaacacaaaagcaaaggcccagttactgaccagtgggccccactcagtcaggtcccacgtgcacactggacgggagggagggagccatgtgtcctgaggaagactacacgaggcgaagcccatcccaccatccaccactaataccctcctgcttgagactccctctatcctcgccactctcccccctcccatactcttacactctctcctctccccttcatggcagctgcagcagcggcggcggcttgactaggaggagcaatggcgatggcctcctccgcctacgccccagcgggcggcgttggcacccac

SEQ ID NO: 3715 - DNA, 341 bp, Oryza sativa
tccagcaaagtagctacgcactatgtgacccaactatccttcatagaattccaagaacgagaacgaccttctctatcaatatattaaaaaaaaaaagggggcacgggccttctcttatgggggaaaaaaggaacgaggatttaacccaacactgtctttgtcttatccagaccgagagtctggttaacctcgatttccacatataaattatatttctacaatacgatgggacctgaattatgaaaaagaaactgagctagttatattccttgaattggttcttgctaatattattgcatgcaatgacaaaggttcccggtcatcatatttcctgtatttac

SEQ ID NO: 3716 - DNA, 445 bp, Oryza sativa
  unsure (1)..(445): unsure at all n locations
agcttatctttctcaaacttcacatctttcaagttctcttctagatcacgttttgaaaggttgctcaattgattcatgccaacatgggctagccttctatgccaaagccaacccaaagaagtttttgcaactaaacaagttttcaaatttgcttcactagaattgaaatcaacaaagtaaagatttccatatctaaaacctttgaacacacaagacttgtcaagaaggctagaaacaataacttcttgcgggaagaaagcacatgacaagccaagatcacaaatttgagcaaccgaaagcaaattgaaatttagagatttaacaaaagagacattatcaattgacaaatcattggagatagcnaatttacctaacccaattacctttcttttgctaggtctacaaatgtcactttctcttgttcattccctcctacttcanatgt

SEQ ID NO: 3717 - DNA, 427 bp, Oryza sativa
  unsure (1)..(427): unsure at all n locations
agttcattctgaagtatgaagtagtatagaactttctgattttctattggtgtttagctcttaattgttgttttatctgagaattcactgctgactgctagcttaaccatctcaataaagctgatgaagacaaggtgctcgatattcagacgatattggtcaagtataacatatttcatattgaccagtgagaagcatccgatagaagtaaacgaatgagcattgagttccagaaaatggtgtatagtatagatggaattatgaaaagcatctctttccttctcttccatctctccctcccttgattcccagccatagaatcctagatctggatggtggattggagtattggtgaccgggcattgtgggtgctaaattctactataaacttgatcaaacctgaantaattaactaattatatgaatc

SEQ ID NO: 3718 - DNA, 438 bp, Oryza sativa
  unsure (1)..(438): unsure at all n locations
agcttctccaccatctcgctgctagccaagttgttgcatttacctccatcaatgatcatgcggcaacaacgctctttgaggacacactttgtttggaacaacgtgtgtcgctgattntgctccgccttctccatttgtgcgctaaggacacgctgcacaatgaggctctcatagtgatccgcaaatgcagccccaatgtgctcttccggtggctcattatctgcatggtcagccgcaagcaaagcaagtgtatcatcatcgaaatcactagcagaggagtactcaccatcgtttttgactaccaaaactcgcttgctagggcagtcacgctgcacatgcccaaagcccttgcaacggtggcactgaacatctctcattcggcctgtggataccatngaagaagcactcggtgctggctgagcggcctttgtcacggac

SEQ ID NO: 3719 - DNA, 377 bp, Oryza sativa
tatccaggggaccgccctttggaccactcggtctggatgatccaagcgatcgaacttgattgttgtctccgaccaccgaagatattgtggcgtatcgggctgaacagcattaatctctcgctcggtcaacctttgctttcttttggattcataagccagaggtccgacatagatgcggttgagctccttgcgatggtcttggtagcctgtctgggcatcatcgtcatcatccttctttgttgacgtgctatgatctccgtcggaggccttccgtgtattcttggcgtattgctctgcaaactgcttgtagacgaatcaatctttggctgcatgattggagctgggatgatgcggacattgcgagttcatgatcctgt

SEQ ID NO: 3720 - DNA, 410 bp, Oryza sativa
agctggtctgaccctcgccaaggagaccatatctgttcatgcggcggaggagcgcctcaccctcgaagatacgacgggtgttgttcttctcatccagggtgagcagttccatactctcccaccagcttcagctcagcatcaagacgctccttctcatatggccgccttggcttcttgaaagtcttaccatctacagcacgttaacagcataagctacacattacagtaagtaaaatcactactacacattacagtaagtaaaatcactagtgatattacagataacaccaaaatgcgtaggcactatgcagaaccgcagaagacattactcttgcaccaaaatgtcagtgacagaaataatagcctagtctaaaatcacagcaatggcatgatctaccataacgtacact

SEQ ID NO: 3721 - DNA, 346 bp, Oryza sativa
cgcacactaatgatgacgagggcttatataacacactctccctcttcctggcgcgccaaatgactgagcgtggggctcctcaccgggagaccgcgcgggcccccctttgccggttcggccgtgggcgctgggtgaagttctaagcccttgatctgtggaatggttcgcgagagagcaaatgcgcatgacacgggcgatgtttacaggttcgggccgctgataagcgttataccctactcctgtgttctggtggatctgtgtatgaaggagttacaaagagctggagagcaagagagttcatactctagagaccctctcactcctctttttgcaatcccctctcttg

SEQ ID NO: 3722 - DNA, 388 bp, Oryza sativa
  unsure (1)..(388): unsure at all n locations
agcttcttatcagtctaacatgactctgccgtgtgaatcatcgagcattgtttctgctctggtgaattctgatgtcattgcaatgctgttctttcctgttggtgtttgtttgcagggaaagaggagaagaggtcgcgcaaggagaagcggaaagaagcgagatcggagaagcaaaaactgcgctttctttcttgggttcagcatcaggttagcatgccaaatcctttatgcaaagaaaactgacatgctttgctagtttggggattttaatttaggtgtacaaaatttcttgcattanggtggcaaaagcaaaagtaagaagccggtagagccatctgtagaatcaagtccagtagaggaaaagaaaccaaagaaagaacctaccaat

SEQ ID NO: 3723 - DNA, 391 bp, Oryza sativa
  unsure (1)..(391): unsure at all n locations
ctttcttaataatcctgacaatgttcagctaaaggaatgcactacatgatatcttggagttcatcaaggctatgaagatgggaatgggacggcaagtcatcactaccaggtctcaaaaacagaaagtatttcgcatattacagaaaaatattggcactgtactgttgtaacaaatgacaaatggttagcagtaacttcccttaatggaaagtatggggttagcatatttatccaaggaagaatataccttccacgtgatttcttctctgtcgattggtttcctttcgcaaaatgagcaaatatttcagtttgctgcatgagatacttcagacgtcccttccccttgttgttctgtccatgaatntaatattctaagctaccacagaactca

SEQ ID NO: 3724 - DNA, 429 bp, Oryza sativa
  unsure (1)..(429): unsure at all n locations
agcttgctgcacaagttntgaagtttgccgggactcttgtagaggtaatgctattattactaaaaattttatattctaacttttgaattgattgaacattattaacattagggaaacttcatcccgttccgtattgaaaaaacagtgtaccttttgggggaaaataattcctttggtaactgttaaggtgcaggagagaagtaagtacatttttagacctataaagtatttcctgaagtagaggtgcccgtttttcttaatattgtacctgcttcctctgcaggggcaatgtcttccgagtgtttcttgctgtgttgtatgtctgtagtacataagtaagcatgtagtgcttaactaagaaaaatgatattcttttcatctgatatatgtctctgcttgtttctcagacttaccatactctaaggatgt

SEQ ID NO: 3725 - DNA, 312 bp, Oryza sativa
  unsure (1)..(312): unsure at all n locations
tgcagctcaccgngcggggagaggngtattcgggtttgttttgcagggngggcaagtgattggtgagaggagatgccgctggtgattctggtgaaaggtagcgtgggtagcgtcagatggcagcatcgtacggagatgtaaagtgtggccggaacgataaaaagttgataccttttggttgtgtttctacgtgcaccgatgatgttcctcacggcatgcacatgtacaaactcgcggtagcaatcgagacatttctccggctgaaacatgcaacgtggagtatgactgtatgatgcaatggcggcccacatc

SEQ ID NO: 3726 - DNA, 416 bp, Oryza sativa
agcttgaagtagagagatcgtcggcttgtgttttgtatgtggctctacttgtgttgaggaagaggccccttcttgtggctccctaggacgtacgtccccaagagccaacctcttgattgcttcgctcgggtcctcctcatcacctaacacatgtgagtcaacttgctctacttgagagccgttagtttcgtcaaatgtcacatcaagcgcgatctcaacaataccggaggttttgttgaaaacgcggtatgcgcattcatttgacccatacccaagcaagaacccctcatccactttaggagcgaacttagaggatctagccttcttattaagaatgtaacacttactaccgaaaacacgaaagtaagagacatttggtttgttaccggtaagaagctcatagggagtcttcttaa

SEQ ID NO: 3727 - DNA, 448 bp, Oryza sativa
  unsure (1)..(448): unsure at all n locations
actactctaccatgatcccttcaacttccagaccgcatataagnttgcgccggcggcgcttgtgttctaccttgccatcttcaccaacacctacacatctactgaagcgtgctaatgtggatacctttatagtgttcagatcgttgaccccgcttttggttgccatcgctgatgatactgccttcaggattcaagaagcatgcatgtccttccaagcttacaatattgtcccttgtgatctatttatgaggtgctgttggttacgtgatgacatattcggtgttcagcctcacagcctacccatgggcagttgcttatctagtaactatgggcctgcttggaggagcttctatgagctgaagatnnttttagaagctattactgctagaagctccaccaaataatccagattgtcactcagattataagaatctatagttatgaaatc

SEQ ID NO: 3728 - DNA, 437 bp, Oryza sativa
agcttctaggcctcaccctccatatctctcttacatgtgggaccaaatccttatgggacccatgtgtcatccaatcacagccaacataccatctactcatctctcttttaatctttcttttatttctcaaaaggtgagataagggttaaaatacaattctcaccatataatttacattactactcacacatgcctagagtacatcttcaagggccctttagtaattcacatgcaaccaatcaacattagttaatcaccccttgaatctatcttttttttttacaaatggaggaaagaaagagagaagggttaaagtcaactttcaccaaaattcatactatctctatagtccttctaggaagcatctatatgggcccattttctatccattcatcatccatactaccttggtgaatcacctcttaaatctattaaat

SEQ ID NO: 3729 - DNA, 361 bp, Oryza sativa
  unsure (1)..(361): unsure at all n locations
tcatctcaagatttccactntagaaataactatgaaactgtttttccatatcggcctagccatgaacagaattgttaggcaaagatgaaaaccaagtaaatgccgatccagacaaagacaaaggaaacaatctgatcctcaaagcatcaatagccgatgcctcaccacattgagccaagaatctgctgacgtgctcataagttgatacattgtcctgcctgaaaactttgaaaaatctgggaccttctatcggctaggtagtggaactctctcaaaccactcatggtaggggtgccgatataagtttcctgtatcccttggtttaagcccaagctgctccttcatcacatctgcatacata

SEQ ID NO: 3730 - DNA, 298 bp, Oryza sativa
  unsure (1)..(298): unsure at all n locations
agctntagcgatgatgggcttggtcctgtgccttccaagtggaaaggcacatgtcaagctgggcaagaattcaaatctaacctgtgcaacaggaagataattggagctcgatggtatgacgggcatctgaagccaaaggatcttgagggtgagtacaggtcggccagggatactaacggtcatgggacacacgtagcgtccaccgcggctggtgccctggtgccgaatgttagctntcacggtctcgctaccggttatgccaggggcgttgcgcctcacgcgcgacttgctatttaca

SEQ ID NO: 3731 - DNA, 410 bp, Oryza sativa
  unsure (1)..(410): unsure at all n locations
ntaattgtaattgttgccgaacactgtccagcttatcatacagtgaattntcaacagctgcaacatataataagtcataactatgaacactcatataccatatatactggcatttacaaaatggcaggagcataaatctagtactaaccgattctactcaacaatgacacaatggcaccagtatctgcttgacgatacatttcaccaagatctgtgaccacatgtgcatctgctgtatgcaccctgatacgcctttcaccagaagaggatgtatatctggtggtggttaagaacaactaccacttcatacaatatatgctgctaaaaatgtatcatacagctaacaataacaaatatcacacataacagaatcttctaataataactaatatcgaacagctaacaataac

SEQ ID NO: 3732 - DNA, 421 bp, Oryza sativa
  unsure (1)..(421): unsure at all n locations
agctttataatcctataaattgcnncgtaaagtattcaatgtatcctataaattgaattgttaacatgggtcttgttttatagatcttgtcataatgaacgtaatggtgaaaatgaaattaaaaatagatgtttaaagtttgtatatcatttgcctaaaaaaacatgtgatagactgacacacatcagatgtgtctccctcctccatgtccattgtcagccctgacaagctcagacccgctattattgtcacgcgtccatgctctgctaggtgcgcgcaacgtacgcacgccaaataataatttgatgtcctaacgtccgccaggctgccgtatttcctttnttatttactattattagtagtcattaataaattcacagaaagtactattaggtgagcaatattccaaacgcgcaacatg

SEQ ID NO: 3733 - DNA, 370 bp, Oryza sativa
  unsure (1)..(370): unsure at all n locations
atccctcgacgaccgacattcngtattgactttcttctccatgaattcgacggatcgatcgatcttttcttgtgtgagagaccgacggtatttgtgccgtgtcttacttatacacgatatatataatggtagattaatttgcggctgcctgatcgtgttgcctcatgatttctattgcaaagactgcaattgttaagatgacagataatgaatccacccgatcgaattacacttggaaaatataaagtatatgcacgcctacacgacatcagatctattatttccaaccattatctgcaccggtaattaaattatgaaaaggaagcatcagcgttgtttttatttggctaccaataagaacccgatcgac

SEQ ID NO: 3734 - DNA, 432 bp, Oryza sativa
agcttgagagtctgggatatttgagctaccactaccttattttgaaggaaattatgatcctcgtgcttatattgattgggagctagcggttgatagtgaatttaaaaagcatggcttgtctgagaaacaaaatgttaagtatgcctctagtgttttacttaaaaatgcttcttatgattggaaacatctttgtaggcattgcaaaatacctcaaccttagaaagacctgaaacaatatttgggagatgctgacattgtgttcaacaaaccgcaatgtttaaaacatgataacagaactgttagttcatactataatgatgtgcatactctgttattacattgtggtttagatgaatgcgaagaagctacagaattgaggttttcacgtaggcttaacaaataaattcaagacatgctcgcttgtcaacgata

SEQ ID NO: 3735 - DNA, 349 bp, Oryza sativa
  unsure (1)..(349): unsure at all n locations
tacggacactatgatactcagcttgggtgtttgttgacggtcgttatagaccattttcccccgtcaatattactaaaataaaggataactagttatgcttacaatgcacatttgtgttagaataaattattnttcactgtcgagaatcagacttattaacaaatgggccaagaacacataattgacacgattaaaaagggctaaaattcacaaatctaagaagaggagaagaagagaagtccacctgccaaactgtgggctggttgggccatcccatgattcgaccgaaccatccgcaacaccgatggatccatgatttggctggacggatgagattaactcccaatga

SEQ ID NO: 3736 - DNA, 432 bp, Oryza sativa
agcttggagtaaaagattttctaatcttaacaatctgattgcaaattgcaataaggtcctgtcagcccttgataatctagaagaacatagaacattggtcattcaggaatggaactttaggatcattttaaaagaacacattctcaaactgctgaattacaaaaatgagttttggaataaaaatatgtacaatcagatgggtaaaatttggagatgaaaataccaaattctttcaggatttctcacctaactcttgaagatggaacaatcatcacctctcatgctgagaaggcacatgtgctgtatacatcatacaaatccaaaatgggaacccagggaataatgcaaatggtacttgacctctcaaatcttttacattcatctcaagagttggaagctctaagtgaaataccttcaaatgatgaactggat

SEQ ID NO: 3737 - DNA, 392 bp, Oryza sativa
tctgagagatgcgactagatcgcccgctctgataccatgttgtatatcatatggagaggtatactgcgtaacgtgggacacattgtattgagcctctggggccgatatatataggagtacatgggaaggatataagaaaggattacagatatggaaggaatccaaacaaaccaatcatatcctaatatgactctaactgccatatactctaacactaaacacatccttggtagtcgcgctgatcactgatcagccaagctttatggtcgcataccggtgttcgtccgctgaaggctcaaggtcgcagaccaacaacagatggatccgcgagctccatgtggttctttgggatgcatgcgatcctgcagtatatgttgatttggctgatgggt

SEQ ID NO: 3738 - DNA, 186 bp, Oryza sativa
ttcggaccatccccacaaggacagggcggttacaggtactatatccgaggcaatggacaagttcaccaaccggaccgaatcgacactcacggtggaaatcaaggccgacaacgctatcaaatccattaaagggatattctgcacatatggattgcctcaccgcattataacggacaacgagctcca

SEQ ID NO: 3739 - DNA, 406 bp, Oryza sativa
atgaaatcaccattgatacactagtattacaaaggtatatgaagaatgccggcacggcgttataattcttttcccatatgctcttcatgctgcccatccagtgatggtttaaactttgtcactgttccagaatttctaaacgatccctatctaatgtcatctattcgggatgatgtcgttggagccttctagatcacaagagcgttcaggacaatccagcttaccccaccgtgcatttactctctggcaaggaaatataggttttccaaggctgcaaaagacaaccacaaaacgctcagatattgtgaataatctcatcatgggagggcaggaggccatgagattcagcaaaatcatgatgttgtgaatgaaaacatctatacttcaaaacacataccccctttat

SEQ ID NO: 3740 - DNA, 420 bp, Oryza sativa
agcttaatatgatcgatcgggtgaaacgacacttggcctggaactatgcatagaaggcttggtttatgctaatcagtggccaggctaaaagctattacaaccaatgtttaaaaaggacaagacgatgagataggaaaggaaatgaatggacgacaaaactatgggcgaaccatggatgcaaaacttgttggtcaaatgcatgcatacgcgtacgtgcgtgcttgtaaagtgtaactatagagagaaccatcatgcatgcatgcagatgcagcgagaaataaggtaacaggagtagttgcttgcctctgatcgatcccactaataaccaatgatcattgggtatatatgcatagcatacgcatgagagctacactcatcgaggagacgtacaatgcggcgcggctgtagacactctggggg

SEQ ID NO: 3741 - DNA, 411 bp, Oryza sativa
  unsure (1)..(411): unsure at all n locations
ntgatagtttccctcanattcaaaaatntagttgcatatatacaagttgctttggtgaaactaaccagtgggtaaaactcttgtcatttctaacccccgccgagttagcatgttcttgctccattgtgcagaatgaggaggcgactgtcgcgtccgttcaaagggtccggttctccatcaagttgtcatgacgagtctagtactcattcatcagctgatgtctcgatggaagacgccgtagctccgtgacgactcctaaacaacgctgacctcgaccttgtcagtgatcgggagagacaagcctactacatgctgagcgaccgggagtatgctcacacgtgagaatactcaccggagttgctgaaaaagatatgtatggatgttgaatttcgttctatctggaaagctatt

SEQ ID NO: 3742 - DNA, 427 bp, Oryza sativa
  unsure (1)..(427): unsure at all n locations
agcttaacctcttgcctacctttactatcagctattctatacttttcagacatctattcaatgttgagcctggttgactcatgccatttcaaaataaattcagcgcgtgccttagcatcattatgaaccctctcactagtaggtaaaggccaaatatcaataggagcattacggttgaaaacatacacttccttgaaaaggacctaacttggtagtagaatgtgttgcccgactctatgcaagcgtcacatgaggcaaacattttcccacatcattaattntttttcagatagccctcacatggacccaaatgcgttgatacctcgtttgtcatctgtttgcggtacatgttgtaaaacaatactttgacccacttgttcatagcggcacaaaaatgactaagaatttgcatacgatctgaaacata

SEQ ID NO: 3743 - DNA, 422 bp, Oryza sativa
  unsure (1)..(422): unsure at all n locations
tgcatctttganataatcatgagactcacgctccatttgtgaccatatagaaattgaactaggagcaagtaaactataccatgttgatgcaaagtttgacaaagaaaggggaaacaactccaacttaagcaaatcatcgctaccggccttaccacattgatcaacaaagcggccgatatgctccattgtagtcatagcattctcacctgtgaatttcgtgaagttgggcacctcaaatccttgcgggtatgggaccgaatctacatgttcaagatacgtcctttgatatgtatgcatggctactttggattctatttcactactatcccgcaagacattgtcatcatcttttccaacatccatatgaccgatttgtgactcggtcttangtgacaatgctatttcactttcgcttgtgatac

SEQ ID NO: 3744 - DNA, 358 bp, Oryza sativa
atgcttccccctgttctccctccggccttcatgaaatggacagagagctggccgccgcccaagccacttatggggcgatgacggtgagcgtctacagtatgaggcggcggcgctacactcttaatccgcttaggaacaaattcactatgactcccttaagtagtgatcgaatgtgattcgtatcccttgaatcacacatatcggatatttcaacctcccaactatttaaattggtgcatttgactccctcagcggtttggaggacgattcactgacatggacatacatgacggtgttgactcggtcttcgtccacgtggagttgatgggcacttatgtgtattataattaaaaaatat

SEQ ID NO: 3745 - DNA, 398 bp, Oryza sativa
  unsure (1)..(398): unsure at all n locations
cgcagnagctctgngaggactcaacgaaagcgtaatcctgtgttagatcgaaggactaagatcgatatgctccaccaagctgtctacagtctacggtatgtgctgctatgcatcaaattgctaattcaactgcttcaatgtttcatcctaaaatatgcaaaccctgatatgtacgtgtcatatatttagtaattttgtatggtttagcactgaacatcaattatatgtctctctggccaaatatatgttagagcaagaagataacttcataaacatatgagatagatttgtacattggcacacaacttttatttgtactctaacagatcagagttcaaacgagtaaactatgacggattctaccccatggttcttgagaaagatggagaaaacatttc

SEQ ID NO: 3746 - DNA, 410 bp, Oryza sativa
  unsure (1)..(410): unsure at all n locations
tttttcctcttactatactgttttatctatcagattatgnctccatgctgggggcatattcttcatttctgttctgaaacgaccaattttcatttcttatttagttattttttatgttatgcttctatagtaattgcaggtgttgattgcaacttgcttagctgcaatatgtcctgttgtttcttcatcatatttgataaatgttaactgaaccagttcctcatttcacatagttgaatctatttattaactgaatatcattctgataaccgtcatgcaatcctgaaaaaaatgaaggaaagaatttgatactgaaagagaggctaagaaagaagcttatgagaagtcacaacctactaagaatggtcatgtatgaggggtaaacattctttactaacaactntacaaat

SEQ ID NO: 3747 - DNA, 438 bp, Oryza sativa
  unsure (1)..(438): unsure at all n locations
tctcccgcctagcttcatgtgtgttggacgattttcttcttgtttggaagttgaaacaacagctccatgtatcactgaaagcgacttctatatcattctattcctgcagcagaagcaccagcaatgcagtagtgagccacaagttccccaaactggcgttaactggcctaaaagcccatgaattcaaagctcatattaaaattctgaacctttccccggggtaccggatatcaccaggactaaataattccaggtaaaaccggtaccaaaaacaattgtagctagggaagcangaagagggacttgtcgacatacctgatgtccacaagagaacaagggccgatattgagacaagcgcgattgcatatgacgtgaacatacttcatggcccggtgaaatactcacttttgcttcataagtctaccacttacaactgaa

SEQ ID NO: 3748 - DNA, 398 bp, Oryza sativa
agcttcacgaatctacgagaacactcctgattcttaataaattcgagcaaccgcggctatacgcaaactaatcataacctatacgaaagaccacaagaaagactccttttagactaatttattgtgccactaaatatatcttaatttacggcagtcctgtagttgaacggattcaatcggtctactgattgagagatatgaatttggaacttcaatgggattttccaaattgggatgatttatcaaattttttggaatgcaggaatggttatggaaatattaaaatatatcccaataatatattgcattcactggtggggggaccaaagaaatgttttatggaattccgataataaggaatggttatggaaaggaatggcaagggtgttttaaacttt

SEQ ID NO: 3749 - DNA, 321 bp, Oryza sativa
tggaccgcgccactgcattggcgcctccggttccgatgaagagagatggaggcgtggagctcggtgccgccgctactccaccggcgctcgggcggcgacgtcgccgccttcagccccgacgaagagaggtggaggcgtggagctcggtgtcgccgccgctttgcttcgtccgtccacgagagagagaggtgcggaatgtgtgagaggggagagggagagataaaagggagcggagagagatagatgggacctactccaagcaacatgcattgtggagtatgtactatctccatcccaaaatataatactccttctgtttcg

SEQ ID NO: 3750 - DNA, 346 bp, Oryza sativa
atgtctagctttgaattgaaaaatattatcaataatatcataagttcaccatataagggtgctcttaatttgaaatcgatggtcaaaaatttacaaatccaaacgaattgttattgatcttattttaagccatagttaattaacattttatacccccaaggttactttatttgtataagaaacatttgtattaaacctttgacttaaaagatacacactgatgaattcataccttttttaccaatacactctacaaacacacacggtatattgcatattaattgaattgaacaaccattactatatatcatgcacgcctctgctacactatgcaccttatatagtt

SEQ ID NO: 3751 - DNA, 372 bp, Oryza sativa
ctctccagcgattcaaccgacgattctcaaagagaatttgtttatgagatccccgaaattgcttcccctctaccacttggaccggagaaggaaagagactgccggatttggaaaggaaactgcggcggcggtgctagggtttgcgggcgacggcagctcgaagaggacgaacgatctgacaggtgggacccacctgtcttcgttcgaactctcgcgcgcgcgggcggctgcggactgtgccggactgggccgaacgaaagatagagagaagacgggttttgggccgactttcggcccacagccaaaagaagacttttaaaaccctttcaatataaattatttcttatatgcaactccctttattacaaatac

SEQ ID NO: 3752 - DNA, 387 bp, Oryza sativa
  unsure (1)..(387): unsure at all n locations
agcttaactgtaaaatctttggttcatgggtatactntaattcatgtgtgctatgttatagatgggntcattnntcttttattgcaacacatgacgtaatatgctatatgtatgctaagctcttgaatattaatgaacataattcctatacttgatgaaatcattgtcaaaaggtggagaaagaatgtgaaaatttttggagaagcaagattaatttttgagagttggtgagaagagcaaagagcatggtttttgttcaattgggaatttctttcttttaaaaagggggagacgttttctttngatttttgagcacgatgtgtacatttgtacgaagtgtgcttttaccacttttggttttgtttcaaacaccaaacattttatgaa

SEQ ID NO: 3753 - DNA, 407 bp, Oryza sativa
ctaatatgcatagagtggctgcaggaattattataccacttcgtcgaagtgcctctgggcacatgtaagctagccaataaatagtagaggctagacactacccctctatcctaaagtccgcaatggaagctaatcattcttactacaagttaaggagaacgaagagcaaaaacaaaatgtggaggatcgttcaacgagagtagtttgtaggaaatggagacaccaggaactcgagctgataagaatgggtgtcaacctggccatccatcacattgattcctcctctgatcaatgatggagcacttcagttcactgtattctttgagcagaggcacagccacagtaggattgtgcttcaactctcaaggcatttatagattcccccaaatgctgctactgatcaaggc

SEQ ID NO: 3754 - DNA, 424 bp, Oryza sativa
agcttatcccatagcatatcaaaaactataattaatttaagatcatgatcatataaaacaataatttgcaatcagtcagaacacacccttgttggttatctttctcaaggtttttctctgccaaaaaatattaaagaaaagaaattaaaaaaacttaagaaaaaaatatttcaccaatgtaataaggtaataaaataccttatttttagactgtcaccaaccatgctaatttcattttcaagaatggagaacagatcaatgtgaatcctacaatgcatctcgatatatgatctgatcaacttatgctctgaaataaaaatatcatattaaaaataatgtaaatacaaaatctaaaatgcttaatctaccttctttatggcattgtaatggcctttacaacttatttaattcttataagcctctt

SEQ ID NO: 3755 - DNA, 349 bp, Oryza sativa
tcattgatcgcgtccctcctccaccattgacacagcgcctataagcaggaggccaatgagcccacgctagtcagcatcctttccaacggcctccctacttgctagttgcctccttttatcatgggagctagatcttgtgggtgttgccatacctcacaagcatgagatgaaggaggaggctacaagaccagcttgtagccaacgtgcactcaaggcaggtctagcagtgaggagggcctaagcctctagatccattttcgagggtctgctactctgcttcaccaccgttatgcttgtacaaagaagctctctacagcagagaggaggagggggaggggaaaaatagggg

SEQ ID NO: 3756 - DNA, 120 bp, Oryza sativa
agcttcgcgccgcaaggccgccgccgtcgcctatgccgcggagaccacggccgatggatgcgggtcctccaggagcagagatggcgcatccgcagctggctgcttgccgccggacgtcgg

SEQ ID NO: 3757 - DNA, 428 bp, Oryza sativa
tggaggagaggcaaagttgttttacaaatcttttatttgaagatattttgaaatcactaagtgatttatttctttctatgtttgggcgaaaagagacttgcgtctcgattcgactttatgagatgcttttcaacagctcatttagtaacgtaccgacctcccgggtcagatcattacttctcggctcccagagcttttttcattttctcggactcccagagtccagctgcccagcagcacaacaatccgcttccactcgggaagcctagtctatgatgcccgcagacatcccgaatcacacagattcgtttctgaccactcaggtcatccatctgccacataggctgattctggttacgattcccacaccacaacaacttttcacaaagcacaggcgaacaaatctacgcaacgggaaccacctcaca

SEQ ID NO: 3758 - DNA, 436 bp, Oryza sativa
agcttgaagccatcacgaggcaccatgcgtatgcacatcataactattcgccactacttttgtcctagatataaccatccataactagctatgacatattctaatattatcaatcaccactcttagaatgaatagattatcttttattcacttggatgtcaagcgaattcatgtcaccgcgcatgtctacctcaccatcaaagcctataatcgtgcaccagtcctaagcccactatacgcatacgaccagctacgtttaatggagagtgagtccactttacgcatctatgtgacagatttaaatcatatctatgaactgctataccgaatatcttgtacctcaacttacaaaacctgtgtatattacgtcttatggcagtatgaaactatagatggccgggttcactgacgtgatgaattaactgcagtcaacatg

SEQ ID NO: 3759 - DNA, 261 bp, Oryza sativa
  unsure (1)..(261): unsure at all n locations
gacctatgaaactcagctagagcggcntagatgcagaaccatcagtggcgccacacttatcatattacttctctcggctcacaaacatcctacacgatatcaattggagaaaacattactcattcaatgcaccaaccgaaggtgcaagcaagaaatgtttcctccttattcataacatcaatgcccttcaacatcttgaaactatcaaagacagagatgccgcggatgcactttacttcgagcacattgtaattcagcatc

SEQ ID NO: 3760 - DNA, 400 bp, Oryza sativa
agcttgaaccttatgtataggttgggttcagctaaatgttatatatatatatatataattgcttagcaatgcttagaaacattagctcactaatgggatgaatcttatatactacattattaatgatggctatattaaatggtagctcacgatggttaatcgtgtgatgttaattaattgataattaaaacctggcttaggagggttgtgagcatatgggtttgatgagtgtgctcatgacaattaaagaccggttcgcgagctactgttgtgaaacctttaccgtgccaaccacaagccatcatgggcaacggcgtatcttttgttagcgtgttcattatgtgggccgactggaaatagcagaagtcacggggtcgtggggagccatccctgttaatag

SEQ ID NO: 3761 - DNA, 401 bp, Oryza sativa
  unsure (1)..(401): unsure at all n locations
ngaatcanagtgggaaggatcatacctcatcaaacacaagttcaggacgggatcttttcgcctagcgacactcgaaagcgaggagttcgaccattcctggaacgccacctctctaaagcgcttctatgtctagaatgggtggcacccaaatcgccaacttgtaaaaatgtacatactgttatgtaagcccttcggcactatgtaagccctttggcactatgaaagcctttcagcnngaaaaaaaaagaagaaagagagaaaaaagaaaaaaaactggatgtagggctattatccaccatggaggcccgaaccagtataaaatctatgtgtcctccgccttctttttatttttttcgtgtgagtgagtaattgtggaaaaaccccaaggcaaacgcctgatc

SEQ ID NO: 3762 - DNA, 367 bp, Oryza sativa
  unsure (1)..(367): unsure at all n locations
gcgatccttagagccacctgctgcatgcaagctntaatgtgttctactactaatattctattagtgttcatcactcaggcccctctgccatagctagctttatgatgcatatgcacactctattattgtaacaagaagaaacaaagctctggttcgtgatgtaaaaataataaaagaagtgcatcattttatcacatagagattatgatattctataggttaatcatgaaaatactaaacaatttagtgtggtcatagcttttatagaccattggcatattattgggaatagtactatggcatatttgtggaaatagttctaatttatatggagcacatataagggtgaatcagatcaaagatggac

SEQ ID NO: 3763 - DNA, 364 bp, Oryza sativa
  unsure (1)..(364): unsure at all n locations
ggcaagagctatatgatagcattcaacactactggggcatgtgttgacatgtgttctaatgggatcttgattntttttttcaaccagcatgaaatccataattgagagatacaatgagacgaaagaagatccccatcaaaccatgaacgcaagttctgaggcaaaggtatgaatataaaaacttcctatttgttgcttgtggctaatttcctcttagaaatagttggatgatcacatacttatatgcacaaacaagttcaagtacgagaaatgaaagaaaattaggtgcacaacaaatcctggccaatcccgatgcctaagactaagaggtactcccaccctttgatcttgtactccaattctt

SEQ ID NO: 3764 - DNA, 427 bp, Oryza sativa
gaccatagaaactcagcttggggagatccgctagacaactgttatctccattttctcacccccccccacagaggtttgcgatgggttattatccaatttgcatattatggtcgtttatattgacgccgttctacaccatatccatatttgattacgctggcaaataccttcatcaggttgtattctctaccaactgtgataaatatatatgaaatcctgtcaaaatctgtgcacattgccaaatagaaagcctattgtggttactatctggacacacccttaattagatgatgttgatcacgtgacattcacactggacatatgtattaggaaatccgcttaaacttgtttaatttcttaataatcttccaatacaaacacggtcccacataataatagtactatattactgctcagtctaaattga

SEQ ID NO: 3765 - DNA, 220 bp, Oryza sativa
  unsure (1)..(220): unsure at all n locations
agctngcatacatatgtattaccaatttcttatacacgtatacgaagtgtgtgtacgcatatatagactttgtatacatgtatacaaagcttgcatatatatgtattaccaaatgttttatacacatattcaaaggttggatatttatataaagtttatatatatgtgtattctggggttttatacgccgatacaaagtttggatacacttacaaagttt

SEQ ID NO: 3766 - DNA, 385 bp, Oryza sativa
tggcgtttgctcaaggtccttgataaagattgaacccctgttaactgaagtatgcttgaaggtcatcatgctattgctgcatcatgttgttgaagttggcgaactgagcatcagcagattgttgccattcttgcgtttgagctatgtgttccgcgaggatgtactggatctctctcgtctgcatatcaagggtgtccattctcctagtgatttcacccaagtcccaacgagaggaacttgagcgacattcacttggagatggaggcacaccacttgatctgggaggttgattgtcctcccattggatgtcatgaggcgcatgccacaggtccacactggcacttacccaggttgagactctgatactgtgacgtggagcttgggt

SEQ ID NO: 3767 - DNA, 423 bp, Oryza sativa
  unsure (1)..(423): unsure at all n locations
agcttgacaaanaatgtgatcaccactactattaatcacaaggcaatctccataggtgcaatgaccacatctcaacacggtgactaggagccgcatgaaaaccgtatggcggaggaaaaggaacaatgagtttagctaggtcttactattgatgttttaaatcatgaccatggtatgtacatgatatggggatcgttggtaccagggtatatgcgagatcgaagtaaaagagacagagataatgatttttatataggtccgggccccttcatggaagataacaaccctactcctgttggccgaagccagtgttgctcttattcatcagaatcacacaagtataataattgggatggcttatctaatcgttgttgatttggcgacatgaacaccaacacgtactcgacgacggagtaatctttc

SEQ ID NO: 3768 - DNA, 429 bp, Oryza sativa
taaagaagctcatgacaacctcctttccactatttaacattgagctcgcattgatgctggcatatcttgtgatttgcttgatgatagtgctacttgctatattgctcatgttgcatcatctaacaattctacctcttgtgatgatcttgtggatatgcctagctctagctcttgtgtttcgatttgtgatgtctcacttgttgttgagaacaatgagcttaaagagcaagtggccaagctcaacaagagtttggagaggtgcttcaagggtaagaacactcttgacaagattttgagtgagcaacgatgcatccttatcaaggagggacttggattcattctaaagaagggtaagaaaccttctcaccgtgccactcgctttgtcaagagcaatggtaaagattgctccaagtgtcgtgaggttgggca

SEQ ID NO: 3769 - DNA, 183 bp, Oryza sativa
agcttgattgagaggggtatcgaactcatcctccgctaaatggccgaatcgatcgaagttctggtactatactcatggtggaacgcttaacccagttgatggctccctggtcttcagcgatcagatacgcgaggctgccagtcgactaacggacgcagtggaagcctcttctcagggcacgtt

SEQ ID NO: 3770 - DNA, 320 bp, Oryza sativa
tgtcatgttgtgtgaaagcttgcgtgtgagtgatgcacaatattctatgaaggtgtatgtatgccgcgtgagccgtatggagggcgaagcccctgggtctgcggtgtatatggcgtagccaggaccgcgtgagccatacaaaggtgtagcccccgggcatgcggtgtatatggcatagccaggttgggtgtaacctatgccgcatgagtcatacaagagacaagcccctggccatgcagagtaaatggcgttgccgacgagggtgtagccagggccgcatgagccgtgcaagggtaaaagtcccacgcaggcagtgtaca

SEQ ID NO: 3771 - DNA, 348 bp, Oryza sativa
  unsure (1)..(348): unsure at all n locations
agcttatggactcatgatgtggctgtcttctctggtggagaaaccatcnttcgtcgggcggccgatttccacagtagtcccggatgcaataaaaaccggggctaaagatgttctttagtcccggttcataagggtaacggtcatatttgatctttagtcccggnttgtattaccaaccgggactaaagatgatctttaattcccggttcgaatgctgtcagggtctgtcaggccctcccggtatctttagtcccggttgataacaccaaccgggactaatgatgctaactttagtcccgtgtggtaataccaaccgagactaaagatcccggtgatctttatccccgg

SEQ ID NO: 3772 - DNA, 247 bp, Oryza sativa
gacgctatggaatacttctgcttgcagctcgcactctaagaactcacctcatcccactggttcttggacgaccaagcgagcactatagcagtcaacagcattgctcgctcgacttccttgaccccgatccgcttctgtgaaggtgatcggtcgccggcataggcttctgatgctggagaggccgccgatcctgaacagataccgcgcacccgggtgggcagtggcggcttgctggaaatgttggcgc

SEQ ID NO: 3773 - DNA, 239 bp, Oryza sativa
  unsure (1)..(239): unsure at all n locations
catattctntacttccttgcataatataaagtacttgctagaaatatttctatctattgaagccaagatacttcttaacattcaagaaatcgtgttgtttgtagtgagtaattagtattgaaccaatactagcttganggcttgatgcctttatccctgtacgtaaagaatgtgacagcgtactaaaattttttgaactgctacatggctggttttattgacatgaacatacctatttt

SEQ ID NO: 3774 - DNA, 399 bp, Oryza sativa
tatctcttacgctccaggaatggatcagtcagaacatcactaccggctcgtctcggccgccgccgactggagtttccgcctgcacggctggcctattatgccgccgttgttaggcgtctacgtcttcaccgaccggcttgccttcgtcgccgccgactggtgtcctcgcctgcacggctggcctattatgccgccgttattgggcgcctacgtcttcaccgaccggcttgcattcgccgctgccgactggtgtttccgcctgcacggctggcctttatgccgccgttgttgggcgtctacgtcttcaccgaccggcttgccttcgccgctgccgactggtgtttccgcctgcacggctggcctttatgccgccgttgttgggcgtctacgtcttcaccg

SEQ ID NO: 3775 - DNA, 423 bp, Oryza sativa
atccttaagtcacctgaggcatgaagctcagtgtaatctgaccttcagctttatccgtttgctcttgtagcccaagatttagtgatcgttcttgccaattgtcataactgcaagcctgcaataaccttatatggcccggtttctgtgtggggcgtttattggtgggcttggatgtgtgctactccctccggatgataacgaaacggccttaaaagaacaactgtaactgtttattttctactacaggataaatataaaaaatcaatagcctttattatctactatagtataaataaaaataacaatagatatatgaatttatggatgttgaagtacttcttaaaactaatttatacaaaactaagtttacgtatggtcttcgtattgtagaaacaagaagtatatagtttgattattttattt

SEQ ID NO: 3776 - DNA, 301 bp, Oryza sativa
  unsure (1)..(301): unsure at all n locations
ctcatacctactatttgttacagggtctaagaacaaaataccaacacagacttcttgaagctattgactcaaaggtggtgaatgcgatcctatatgttattttgatttcaaaagtaaaaaatgttggcgttctgggaggcctggcttaccaacatatatatgcagcccactaccaaagcttcttggtgggtcttgcacctgctctaaccagggaagatgcctgcgatccaacaaaagcccctggagtgatcctttaattatgaaggganatctctaaatttgccattcttttcttagcata

SEQ ID NO: 3777 - DNA, 393 bp, Oryza sativa
  unsure (1)..(393): unsure at all n locations
agcttcngcaggtgaatcctcacagatgtcccagacttattcatggaagtgatcataaagatcagaaaaggacattccgaacaggctaaaccatggtctaacaccagtaacactgtcctcatgtaagatagccctcaacttcacatgctttgatctactgctgctgctggtcaacccagccgccttagatgcaacatgcagactttgatggctgctgctaaagataggttgccgctgtgccttttggccgcaaggaaccgaatggcactgcagcggccggaggggttggttgtagtagcactcccccattacccgtcacctgtcagccatgaacattgaacaaatttcatcaagtttcagttcgatctgtgttgatcgggaagcggtagctag

SEQ ID NO: 3778 - DNA, 144 bp, Oryza sativa
cttacccggcatatatagcccaaggccctttgcctgtcatctatttatacaaatctcagagaacagttatctacagcatataagaatgttcatacactctcagtatttaattcaacgtccatcttcaataatttaaaggggtaa

SEQ ID NO: 3779 - DNA, 436 bp, Oryza sativa
  unsure (1)..(436): unsure at all n locations
actcaagctggcttgccttngaacatcttatatatcctctcgatgaaagattgactatatctgggcttggatatgactatgccatcaaagaggaacttgtccggaattctgtatcattgcattataacggtaatatgaagccttggcttgagttaggtataccggactacaggaagtactggaagaggtttcttacaccagatgaacgattcatggatgagtgcgatgtaagtccataatgcacttaaacctgtgaaacaaaatatctgacggaagattgctacgtctgctgctgtattatatacctagaggggacgagcacttccattgaggaaaaatggggccaggaaagcagttattatccatcaattctgacagagtagatccagcaccatctgttcattgaaatagtgagcttgatggatgagttttctac

SEQ ID NO: 3780 - DNA, 268 bp, Oryza sativa
  unsure (1)..(268): unsure at all n locations
agctttctcgacgccactacgggcatcattatctacgggaccggggttgagacttgagactaggggaggaggttgttgtcgtcatcccctcggcttgttctcttttccttcattaactaccaccgtgttcactcttgttacaggacaaggaggagtgacgcgcacatntagcggtaaaaacaagctcaacggcggtaggccattgttctctctacgctgcggcgctgcgccactattccgtcctctagatcctgaccacagtctcctc

SEQ ID NO: 3781 - DNA, 385 bp, Oryza sativa
  unsure (1)..(385): unsure at all n locations
gcagctcaaagaaaagctgacctcggctgtctttcttttcttcccaacatcaggagaagactntcgttatatattgtgaggcatcaaagccaggactatgaggagtactgatgcctgacggacaggttgtggtctatgcgtcacgacaattgcgaccacatgaggaaaattaccctacctatgacctataactcgcacctgtggttcatgcgctaaagatttggagacattatctgattggaaaccattgcgatatctacactgaccacaagagtctgaagtatatcttcacccaatcagatctcaacttgaggcaaaagcgatggttagaattatataaggactatgatctataggtgcactatcacctatgcaaagcaaacat

SEQ ID NO: 3782 - DNA, 208 bp, Oryza sativa
  unsure (1)..(208): unsure at all n locations
agcatttcagcttactccctgtggcaccctatataacctcgcgctgnctctcctcgccggcattgtattgtacacacgatggagtggtcgtcgatgcggtggtggtgcctcgccgtggagctcctcctgtccacgccgctgctcgccgcgggttacctgcaggagaggaagaactacatcgtgcacctctagccgaaggacgaggccg

SEQ ID NO: 3783 - DNA, 434 bp, Oryza sativa
  unsure (1)..(434): unsure at all n locations
tggtatagttaagagcaggtgagccattctcactgcgttattgtcccgtgacatgagctgcagtgtttttcttgtggatccactctgtgcattcaaatcccatgccatgtaacctcatgtgcacatggatctcaacaatcctctgttttgtgtagaatcctgctgctgcgtcccgtaattaagctcagattgaattattgatctcctctaccgccaaaatgcgtacaccggtgtttaaatgcgtgcagccggatgtagttgatgcagtctgtattgggtactctgcagtnacccgcttgccgtgtgtacaatgtcacgctggacattggttaggccctctttgtttaagcttacgcttattggcctagacttttaagttagcttattggcttatatgaattataagccggcggatttaatgttcctaagttagt

SEQ ID NO: 3784 - DNA, 433 bp, Oryza sativa
agcttgatatacgtacgagccaaattaactttgtatcaaaacatttataaaacgtgtctgcgcacatatgtatatagacacacacactaagtgattccccgtactttgatatggaaattactaattaacttttaatattttgtattaatcaagctaaaagtaaaaaaaattagttattaactggtttgtcaaactatgttaagagagaaataaaattagttgattttgtatgagattggagataaaatatgatatcccgcactctgattataaatttgtgtggcatggttcaaattttcccttgattatacgcatggatgaatatatgttaagtattataaaaatgatggatatatgtaagaaatattgtgaataataatatgaagaaatatgattgcatgttgatctgtagaattaatgaattataaatgat

SEQ ID NO: 3785 - DNA, 421 bp, Oryza sativa
  unsure (1)..(421): unsure at all n locations
tcgtctcctcttgtacctcaccacattatccatttatccttgcaatgaattcgctntgcttgtaccaatcctaactactactactactaccatcttacattatccttgcaatcaatattttgcttttgcctgtaccaacccctggtggagtttctgctggactggaaattgatgtacaagtactgtgtgtatatgcgtttaaatgtacgacgcatatatcaatacatcatcatcacgggggtgaatggtattgatatatacccgtgttgtggttgttggaactcaagtcacgagtgagtgagccaggtatatccatctaatgttatctgtgtatctgccaaaatccaaaatgctagcagtaattgtttcttgctgccgattcagctagtttctccacagctgcagctgagcatttgtcgca

SEQ ID NO: 3786 - DNA, 379 bp, Oryza sativa
  unsure (1)..(379): unsure at all n locations
agcttgttcactctntcaaggtcatgctctgtatcatgataatgangctacactctagtgcataatggaaagaaaattactttgctacctttgacccctgcttgaaattgttgaagctgataaagagcgagctgctagtttgaaacttgatgaatctgaaaatcagcacgtggctaaatctatttttctacctaacaaggataatctttcacctatatctaaggttgatggaattaagttgaaaggtggtgttatgcttgcaacataatgtgacattgctgaaatttcagatgatgatatttgctatttcttgatatgcaaacaagccttaggtactctagatgatattgctaggtcgatacctcgtgttgttactaac

SEQ ID NO: 3787 - DNA, 413 bp, Oryza sativa
tgcacttatcaccaaaccgcacccacattcatactacatttcttgtgtcgaacaacagtggtgaagcgaaagtacaaaactggtgcacattaattttgcaattggaaattaccatgatgttgttgaaagtgatgttgtgcccatgcaagcatgtaatattctgctaagtagaccatggcaatttgataaggattctatgcatcatggtaggttcaaccaatactcttttctgtaccatgataagaaaattgtgttgcatcccatgtctcctgaagatattttgcgtgatgatgttgctaatgctgcccaatccaaatgtgagagtgataaaaaacccaatctgattgctagaaacctgagacaaatcaatttgaaacccaaaagcttactcgctactaaatctgatattactg

SEQ ID NO: 3788 - DNA, 360 bp, Oryza sativa
tgagaatgatccaaagactcttctttctaaataatgtgactcaatacatgttaaaggtcacaactgtcggatatatagataaagagagagctttcaccctatatcgtttgcgtcaattgtctactttactataaaggagaagaacgtgagtgttttgtatctactcatatctttactgctatgagaaggatatggaatagattccgggattcgctaataaacgcgttggtttataatacagcgatccgctaatataaagctttacagtttattataacaagctgtatgcactctgtctcgtcaatgatcacatcacgtcacacgtgccacctaatcataatcactctcttttttcctttt

SEQ ID NO: 3789 - DNA, 439 bp, Oryza sativa
atccctaagtcgcctgcagcatgcaagcttctcaaagagatctttctgtagttattacataataattgaatgaatctagctggctggcctatgtgaattacatagcatacatcttgtaacttccttgttcagaattacggcatttgtgctagcctatccttaccatgaaatccaactgataaaatactgccaaaaaggtcctcccgcatcatcactataactctaaggttaaccattatgctgaaaaaataactcttgtttacattgaaccatgggtcactataacagatttgcataagtcatatcatgtacatgatgtttgatgatatcggatatcacgcttatggtacgggcagtgccatactgctatagtattatcaagtttaaaatacagttgccaatgaaaatgaaattattcatgacagattcagtgactatc

SEQ ID NO: 3790 - DNA, 295 bp, Oryza sativa
accccctctgcagaagttatcacactggtctaacacctgtgcccatggtcatgggcagacatgaagtgattcctatcgcaaccttgtttgactaccgcttgtgaaattgctgatgtggaaaagaggtcgatgttttgaaaatctgcagctgatgggatcaactatgcccccggggccgtttgaaagttgatggcccaggtggtcgtctgaaaaactggtggtcgggtgctcacctagttttcatattataaagactgatacatttgacatacctccgaccggacgagacgcactg

SEQ ID NO: 3791 - DNA, 420 bp, Oryza sativa
agcttctaagccagggcttcatataccttgtttccgaaagcgtttgctactagtcagacaatctacatggcttatctaaacctgctgcatcaatcataagtacgtatattcacgactaatgaagtaaaaaatgaatgcgtgcagcaagaaagataacactactatgttgtgattgaggatggcacgttcatgtacaagatcagccgcgaaatccttgacacatttgtatggccaagagatgacaaatggatctctgttctgagcacatccaagaatctgtatgttggtcaggtaaataatgcagattccctcatgctgccaacaagctgctattgccttctgtgaaatggtcatcatgtacattgtccatgacttttattgcataagaataaggcaaatttagctttcaacttctcgctg

SEQ ID NO: 3792 - DNA, 399 bp, Oryza sativa
tatgacatacaatagagatacatctactaagtgccctattttctacttgacatctatcgcattaactctgtctctgtcgattccacattctttgtagcattttcttgagctccgtatcacccgccactacgtggtctagcctgtttgctaagaaaatacaatatccacatcccagcatcgacaccaatgcatgtagatctcaagcatggacaacaccgagagcagttgagcttagtctcctccattgctacgagcgtattatgtgtaaggtggggagggttgagattctgacgcgctttctctggtagagaagaagacagaggggataaacccaccataaacatagttatcaagtgaaatgtttttgaagaaaaaagcctgtattatagtgaaaaagct

SEQ ID NO: 3793 - DNA, 206 bp, Oryza sativa
  unsure (1)..(206): unsure at all n locations
ncaagcttggattagtgccaccgcataggtgttgtcttatttaaatacactacatggtgggctgtgggtgcatggttntgctagacgtgcccatggcgattaaggaccggttcgcgggatgccctggaagaatttatcgtacttaccacaagccagcgtgggcaacggctgggcttggagtgtagcttttctctagccgacgtacc

SEQ ID NO: 3794 - DNA, 448 bp, Oryza sativa
  unsure (1)..(448): unsure at all n locations
tgctcttgtagtttgctggctgacatgaattgtcgntggtgtataagtttgtgttatttccgtatctgttgatggaatgaagatgtttagccaaatcagtctattttgtcaaattgactgaatttggacattcaaagattactaagagaagagtgggggtgtacttaattactttatatttaaggtaccatcttgaattcttttgagaagtccagatggaattgaaccattgagttgatttcctgtcaaatctctaaagaagccatatgcccataaattatatacatatgtcagttacaaatgatgctaggcaataaagtaaaatttgacaggagttgccaaacttacaatactgccaacgaaagcaactgtgaaagtgcatctggaatcgaacctgtcaaattgttgtttgacagatccctgcaagatatgaagcaagtcttttaac

SEQ ID NO: 3795 - DNA, 446 bp, Oryza sativa
  unsure (1)..(446): unsure at all n locations
agctntgacaaaactctgcccaagaaccttcttgtatctggactggtcaccacgtagttatcccaccaagcagaagcgggaccttgcaactgatgtgtagcaaaagcaaccttctcttggtcatagcattgcagaaggttcagcttcttctcaatcgcacggagccagtcattggcctacattgtgttgggggtgcttgagaaagtgggtggctggatatgatgaaagtctaacagtttggacaggtgtgatgatggaagaccaaactgctggttctgctgcgcctgctgcaacatctgatggtaatgttgctgcatctgttgtatcatcattgtcatcatctgagtgaccgttgggttctcggcggtggagatgaactgtgcagatcaccactgaatgagctccatcggctggtttctcttgcactatcgcattggaagcacggg

SEQ ID NO: 3796 - DNA, 385 bp, Oryza sativa
  unsure (1)..(385): unsure at all n locations
tntttatggtacatgaaagaaaatatgcagatttatattaatttgtaccttttctactgacaatgtcaccttatgcaaacatttaaaaaaaatcatattactccgaacacattctatttatgcacctttttttttttgcgaagaaccatgtaaacaaaatgccttctgctaatgggggtttgcacgttgttgttgggttggaggcttgtacttcattttatatcaatgcaatgagaaaagagcttctgggcttctggctctgtttcaagaaagaaaaataaagaaagcgttttgcttctcttatcgatctaaccttggagtatgaattcactgtgtgcctaccgctaccatagtggctcaatgaatatatctgctctaacttttt

SEQ ID NO: 3797 - DNA, 392 bp, Oryza sativa
  unsure (1)..(392): unsure at all n locations
agctngataatactcctctacagatttgntttcctgtctaagttgtngcaannggtgcagcaaatcacgtgcatgatatgaaggaacaaatctagctcgcatgactcttttcattgcatcccangtttggggagtgttatttggattggaacgaacaaattcactccaccaaatggatgcanaatcagtgaactcactaatagcagccctaacacgtgtattctcaagataatcatggcaagcaaatttctgatcaatggctaactcccaagtaagatatgcatcagggtcatattttccatcaaagcaaggaatggtaaacttgatcttgcctaaagaatcatcattatcacgtacctcccgccgtggtggagcgcccatgccatggcgct

SEQ ID NO: 3798 - DNA, 395 bp, Oryza sativa
tgtgactataaacaaagcactaccgggagataccccggattatcatggttagttttctttctaataaaagcacgaaccaatttttatgatagtatgcaccttcaggtattcttggtcgctaaccattgcaggttgagattaagaacgagggtcatgcgatgcctaagaacatggtagctacatcaactgtacgctttggtgatccttggtattggaacacactcgatatgagaatccgacatcacacacttggtttttgatgtcttgcgacacaaaagtcgaagtgtgggggaggtcgacaagcttttcatgacgagttccatcaaccaaggtcatcttggtttgaagttggtgatagtcctatcttgcctgaacaaaaaagaaaaaataagaag

SEQ ID NO: 3799 - DNA, 192 bp, Oryza sativa
tagcttcggatgtgcatcgactacaccgactctttactggcatgttctaaagacccttaccccctgccacgcatagatcagaatgtcgactccaccgcggagtgcgatcctttgtgttttctagatgcatactctggttatcatcaaatccgcatggctagggaggatgaggaaaaaactggattctttacc

SEQ ID NO: 3800 - DNA, 410 bp, Oryza sativa
  unsure (1)..(410): unsure at all n locations
tgtctgcaganatgaaaggtattgttggatgtgcagaaattgatgatattattgttacagcaaattgtacctattaaaatataacagatataataacttcatgcttaattgcttaccctttccaacaatagcctcaagagactcaagggtagtgagagatgcagcgagatcatcagcccagatgttgcgtccatccacaacaccggcaaagaggtactttccagaggggaaaccagcactcttgataaagtcaagagtcttggctccacggataaggtcaaaaccataagcagtcacgctgttcaaggatgtgagggtcctgcagtgaaaaggcagtatcagtgttctgccactaaaaagaaaaagcatgcttaaggaaagggcgggtttggtaatgatacgatagtaca

SEQ ID NO: 3801 - DNA, 223 bp, Oryza sativa
tctgagtcacctgcggcatgcgagcttctttcttctagattcagtgttcagattatctttcttccgaaagcaagtataccgagcattcattcgatgacatctaggtcctaaatccaaaaccttaaacactatatcaccggcatacctagcgtaaaagaaaaagttgttgcccatctgcatgttccattactttttcaagagctaggtctaatgggaaaaatca

SEQ ID NO: 3802 - DNA, 444 bp, Oryza sativa
tgtgatgctcgggatggactgactccatatgcgcgaaagttctgatatcttcaacgaaagccccccaatttcatcgacccttacttaatgactggtgatggcgatttatgcttttattgcctcccagacttatcattcttacttaagcttaagatcgggacagaatagttgggcactggcattctcacaggctattgtaagaggagagaatcgcacctttgataaaaacagtctttaaaagttaaaataccctcctatgattggctttaccttttagaaagaatcctcctaaggttgccgaatctgtataaaactagtgtgcaggaaaagcatataaagccttggtttcccgtagtgagactgcttccgttggagaaataaacccttgccactagtataacaaggtgtccttgttcggatggcgggtcgatagggcccataatg

SEQ ID NO: 3803 - DNA, 430 bp, Oryza sativa
  unsure (1)..(430): unsure at all n locations
agcttagattaaaaccgcatattccttcatctatgatatgaaagaaagaggtcaactaatagcatgtttggaggagcttaaaattccgagaagcagctaattggtagtcaacatttagaaaagctgagtttcccagcttctggcttctaatttattttcctatagcttcttaggaattgtagcaaaagatagattatttgggggagcttctgattctcgaagaagctacagcagttagaagctcccctaaatagaacctaagaaaggtccatatagatatagatagagaaaaaaatcgagatatttaactatttaccactattgcaagtgacagttaaggatattttaactatntaccactattgcaagtgacaattaaggatattntattggactcacatattatagactgcgagtgacaaattcttag

SEQ ID NO: 3804 - DNA, 340 bp, Oryza sativa
  unsure (1)..(340): unsure at all n locations
cttaattcaaacatttcaatatggcaaatagtggaaagtaaattcattttctgtatttattcttctgggttgaatatgtgcggcaataaattactgttaactcgattttgtaatcttcagtaaattgtataaatctaattctatcatggnttctgctgacttatttgtaaataattgcattttgaattttgaccctcttcttggcttacgcaccaacatttgttgccagatggtctgttgattaatcttgaacttataattgttctttcttgttagaggtcatatatttcgatggttcaaataatttctagaattcttggatcccttgataattttactt

SEQ ID NO: 3805 - DNA, 366 bp, Oryza sativa
agcttgacacatgcagaaagctactatattgtgtgtggaaaagcaaaggcgccattagccccaaagaagcttgatcttggcaaggctgctagtagcattctacaaagcctccatcctgattcacattgggcttgccattggtcggagacaatgccttattcaagatggggccctgaatgcgaggagttacacgagtactacatggaaaagtccaacgccatggggaggaattgagagaccctgctgttgtgccagcacgatggtcagccggtcctcgggcctactgccttcatcgccgtagacttcaatgatctatgggaccacctacagggtgcgagcgatcgacaccaaacttcttaagtgcta

SEQ ID NO: 3806 - DNA, 326 bp, Oryza sativa
tgcgtgacacgtaaacacacattctgacattcagtggcttctctgtttctacattagccttgaacaaataccaccaatcctccaccatctctacaaatttctgagttctaatcgcagcacacatgcccaggaggggaaccaaaacccaatcatcaactcgcaggaacctgcgggtcaatggtcgaatagaccaccatcagccagccacccacaatttgaggaatccctgcgtaactcgcctagaaattgcatcgtctaagccgaaccgggtaactcgcagcgcggaggaaagaaactcaccggcattccgccgcgccgcgcccgga

SEQ ID NO: 3807 - DNA, 413 bp, Oryza sativa
  unsure (1)..(413): unsure at all n locations
agcttctggaaacatcaccgattcatgacattcaatttaaaaatgaggttgggagtcttatgaaggtcaaccacagaaatatagtcaagttaattggctactgttatgaaatacaaaagaaagtggtggagcataatggaaaatatattcttacagaggcagtagaaaaactgctgtgctatgaatatatatctaatgggaaccttgacaacaccttttcggatgatatgcaaacctaatatttccagcattttcctgtttgaatggtacaagatnagatatttcctgatgtaccactctaggttactgaagttcaatagcaaaaagtagaaatcaactctataagtgtggctatgaaatccttggtttttgcatagaagaatacataatccaagtattgtttcaaatgctct

SEQ ID NO: 3808 - DNA, 371 bp, Oryza sativa
  unsure (1)..(371): unsure at all n locations
tccanaacatctagactaataaatatttataacaaatcaagacacaaaacttccgccgacctggcgaaaaaaaatcaagacacaaaaataaggtttcctgacctgttcctttatctgtgagttttacaataatttcacttatagtaggtcgtttctttggatcggtctccacacagtttaacccactttcgatgcatctttttgcctgtaagaagtcatcttcttctagtgatgggtaccttgacgttatttgtgatgattttaaccatttcctccgtacctgcagaacaagacagcataacccagatgaaaggatgaactatgatatatatcaacatctttctccacatcgttaatacatatctcttaca

SEQ ID NO: 3809 - DNA, 427 bp, Oryza sativa
  unsure (1)..(427): unsure at all n locations
agcttggagaatttggatttgatggatctatgtttgaagattntggatttggggaattcgggtttgaggattcctttgttgcgaatctgggtttcaagaattcgggcctgaagattctatggttggggaatttggttttgaaaattctggaattgaagaattccttgcgtggttctattggctgagtgttttccattccagccaaccttctttgcaaggtttcttcatgtcccttctcctcttgagtattctccactgcacggcttgattggattccgtcaccccgttgtgtttcccttcttgcctctggatctgtttgccctcttgcttgatatgcaaacctgaatcgctgcactcccttgtaccctcatatggtctctgtcaccgtcacccctgggctgcacatttttgtagtctactttcgcga

SEQ ID NO: 3810 - DNA, 386 bp, Oryza sativa
cttcagcagagagcgactccactttacaagcttttttttgtttgtggcgaccaaacccactctggcaaaacagctccctctaagaagagctttagccctggtgttggggataagaaagcacgactgatttctactcactgtgcttcacaagtcataccagaagatgaaggctgatgtctgatataaccataagaagctacaagttcttttgcgttaagctagcatttacaagcagtcgtcgaaagcacgtcaacagttgtagtaactacataatattaaccaaacacttggcaacgcctcactacggtgctacaggcccaaccaaccacctgaactactacagttcatttatgctaacttagggggagactaaacaccgcgaatct

SEQ ID NO: 3811 - DNA, 328 bp, Oryza sativa
  unsure (1)..(328): unsure at all n locations
aactcaagcttggtgaccaaccaaccccaactataaacaacaagattcgttttatcaacttctacttcatacgaatggtaattaggtaggttaaatagtgaactcacccattcctgatagacgacgacatcacttttgttctgaaatgtgacaaagccgttcgggttgaccttaccccttgcccgcgcccaattgcgagctctgtgttcanggatgtccgaaaacggtgcagggacattcgctgctgcagtggcagcatcctcttgggcccatattggcttcttgccgatgtaacctgcggtgcccagccgatgcgggtgctcattcc

SEQ ID NO: 3812 - DNA, 169 bp, Oryza sativa
agcttgaatccttttctttcaaatcaggacattatctcttatatctgtctaaagaggaggaaatagcggatatgaacaacatccatcatacagtatttcccgatgatattattagccggcatttggagacaataaacagttgaagaccaacttaatgtttggttgcatg

SEQ ID NO: 3813 - DNA, 437 bp, Oryza sativa
  unsure (1)..(437): unsure at all n locations
cagctttgccgngacgcgtctcatgtgttgggacgaggctcatgtgtagggcagttttcttagtgcgggtaaagtgtacatccactgcagtgtgagtaaaccaaacctattctaatagccgtgctcgcggttattgagcaccgggacatgtattacacttggctagactctaaattcttaacttgtgtgggatgggatattgcatgatgaattttatgctgttggagccacttcctgagaagcgagaaagtggacgttctcataaaaccatgacgaatcaatggcgggaagctattcttgggatcacaatggatggtggacagaaccgtcgttgtttaaatacaaactctggtactaaaaatttgatcaagcaatgctaagtcttaggcgtgtgaaaagaattacaaaacttgctttgcgcacaagaactatgggca

SEQ ID NO: 3814 - DNA, 460 bp, Oryza sativa
agcttgttggtcataatgaagataaatagatacactacattggccaatgtcacctgtgacgggcccaaaccctcatctttaacggcttcacgcatggtcagagatcagtggtcactggtgagtccagtcacctttgacgggtggccggccgtcacatgtgacacccacctttgaccggccaagtactagatggccatcataggtggttgtctccgctagcctagggcgaggtgggaacctgtacatgggactcatctctgacgggcctttaaataaaagctggcagaagtgatggtagggcacaagtagtatgaatctgtcacaggtaatctacctgtgatgggccccaaagtaaaagcccttcatacgtaggtcacctctgacggacctttatttgctattccgtacaagtgatgttaccttaacggatattgttctgacctgcactgatgagaaattc

SEQ ID NO: 3815 - DNA, 400 bp, Oryza sativa
  unsure (1)..(400): unsure at all n locations
actatcacaactcagcttttccatagcggatctgatgaaagagccaacgatcttgtgtcttccatttctgaagtggntcgagaagctttgccttataatgaacccaggtactcttttctactactctttttccatcactctttcttctctggggtttatttctaccctttcaccttgttaactatactaaattctcggattttggtgatgacttcttgcatggtcaatctggataaatacacacatgactacaggccaccttggtggatacaaacacctttctttgttctttctagttcttgcagattaattcatactccttctatattgtggagaagtattttttgacagattgtggatgccaaccatcttgcagattgtggagtagtattgttttaac

SEQ ID NO: 3816 - DNA, 408 bp, Oryza sativa
  unsure (1)..(408): unsure at all n locations
agctntcacaccaccaagagcgcgcagcaactctgtctgctcactagcaaaagttccaagtcagggttggcagagttgtcagaaatgttacacgattaattaaaagatttgatcctagaatgaagtaatcttgtataaactgaagtttaaaatctttagaatctgaaacaaaaacactaagactagtttgcagagaatgtacgattaatgccactctcaatgagccataggtttatttacgaactcanacaaagtagctccaaatgttaaactcttccatctctaatttgttangtattcaggtgcatcatggtaaacataattgcttcagagaaagaacataaatctgtagattaagctaagaggacgttggatacagctgaagctaggctgaaagcatgctgtgtg

SEQ ID NO: 3817 - DNA, 445 bp, Oryza sativa
  unsure (1)..(445): unsure at all n locations
tcagccagaaattgccagntggttgtggagccgcaacttgatccacanattttaaattcttctagccacattaatagaaaagccacatgttctcgaggggtgaccgaaccatggcccatgtatgctgctacatagcctgaccaacctcgtatgcttttggttttgaagtcatattggttctttgtgttcaaactcataaggttggccgatgaggtgacatccaaacctgtgatcatactgatatctatgaggattggagtcatcggcccttgattgaacagaaaggcattagtagttttgaccagaagtaaaaagtggctgccatcaagggttcatctttggctgagtttgctatagtaaggtcaagtgcttggccgattcaatttcatcccagtgagccctcttgctggctgatacacgtttgaaccatgtggtccaactcttt

SEQ ID NO: 3818 - DNA, 238 bp, Oryza sativa
gcaagcttgaactttcagcatgcctcaacgctttttcttttatcttttcagcaagccccaatgccccgtggagattcataaccttgagaccgtggacgctgtacagtcttcgttatgatggtcatactcaccaagctagagcttgtgacataacggttctgatcaaagctctcggaaggcatattaacgatgacagcaatgtacaatttagcagcgctctagggccacggatccaaac

SEQ ID NO: 3819 - DNA, 358 bp, Oryza sativa
  unsure (1)..(358): unsure at all n locations
taatgaagtgaaaatntaacagttacgacgaagcatcacctattttcttttggtccattttcgtattacctgtgatgcactccactcttatttactcttcatctcatttgttagtatgatccaagaaaattattgtatgacttgggtttgctccatggcataatccgttataatgtatcatttgatgaagctgtacaaaacatcatgttgcctagttcttcttttgaatggtgatctaataattgggcacatcatagctgaaaatgggacttgattactaattgcacatggtttaaaaatctttctatcttatgggcattgaattgttaatcatttccctgcacacatgatttatttt

SEQ ID NO: 3820 - DNA, 420 bp, Oryza sativa
agcttgtatgccgcgaataaagtatatttctttgtattgatcatacaccatgcgtacactgctttaacaaatatgcttaattccctaaaagacacatgggttctccacacccagaaatatacgacatacgtggggtgaaattccagtaaataaactcataatgaatttaccaactgcttggaaaatgacccgatggataatcaggctaagccataatattgggcaataatattcacacttccgggcataaaagaacgattttgatccaaccgattgtttataatccaaacaggccttgactattaaaataaatagctggcgactatataagctcactattagcccttttaaatgcatgtcccactctaaaagtaataacgcggttaaagatttaagattggcactgaactcactttgcta

SEQ ID NO: 3821 - DNA, 267 bp, Oryza sativa
  unsure (1)..(267): unsure at all n locations
agagncacctgcngcatgtcagctttaaaggggctcggagctgtggttatagccctttgtgcggcaacagcgaaagatagctctcggcttgaatgataaaggccgttcccaatctaactcgaatccatcgatttccgaaccgatctatccgaagcttccaaagaagagaagtacatgagattccgaggatcatttccccttttttgattcggcctgataatgaaaggagcggaccgaatttgaaaggaacgtgggctgtggcgcgct

SEQ ID NO: 3822 - DNA, 437 bp, Oryza sativa
tgagctctatctctactaaaaccaactagccatgtatgtgaatctcatactgaaggtagagagagtgagaaagcagagctggaagaagaacactaagtcctaagtgtaacatattgtaaaaattactagcctaaagtgaaaataatagcttgttcctagtccaagctgcgaacatagtaaagaaagccagtccaatatgcaattaactattttttttttcaacccaagtccagtagtagtatactgcaatcgaaaggggagaaaagtaaaatcgatcgcaaaacccgtgtcacggtgtcatgtacattcacggaatacgctggcgtgtagtcgtacacgtaccattaccatacatggctgctagaccctacacacgtactgtacgtccaacggttgtactgtacgttgcgctcgtctcactcgcgcgtaacgtatac

SEQ ID NO: 3823 - DNA, 435 bp, Oryza sativa
  unsure (1)..(435): unsure at all n locations
agctttagtggggtgggaatacatgatcttctatgtganggcncgccctgcgcccctgtgtattcgttggctctggctccaccgctcagagcatccctactgggatggcctgaaggccccatccgagcagaccattttcaacatgttccatgcgtccacctttttcatgccgggagatggccagtcaatactctatttggtttgaacaatggatcgacgaacgctcggtggcctccttggttcgagatctcctcttcggcgtgccccaacgccttagaggctcacccacaactgcttttgtcctgttcggcgaacaattcctgggtttctgacatccgcggcgccctcactgtacatgtcatctcctagtttcttcttattcgagatgtggtgcttcacataccgctcttgtcggcatctgtgatcgtcttgtgt

SEQ ID NO: 3824 - DNA, 440 bp, Oryza sativa
  unsure (1)..(440): unsure at all n locations
ntgttgagcctaaaacccaaagaagctatttttaactttctatttctcgcaaactaagtagaaaaaccaaacaaggcaatgataaaccaagtaagcaaactgaattgataaaaaaaatcacactccattattatgatgatagcccccgactgacaacttcaaggaaaaaacttgatgtttgacagtcaaaaatagggaaatacagtgataaagttaagcgtagaaacgacgaagatgttcaatgttccaagagttgtcgacgagagtgccgtcttcgcgcttgagtcgatatgaacctggccgggtaacttcagagataataaatggcccttcccatagaggagataacttgtgccgatctcgtgtggtttgaattttccgtaaaaccaggtcgccgactagaaaggcacgagatcgaacattgcgattatgataacgtc

SEQ ID NO: 3825 - DNA, 431 bp, Oryza sativa
agcttagtaaattatttatgggttatcctttctttctggtaagccggtgtgtatgagttcggataactcagaggaacttcctatttaccccgacgtggtagtttaggtgactaagtctgtccaatacaacggtattgtgccacgtgggtgggttcccgttgtgtccgccaccatggcgtttagtttaaagcgtgggcccgccacttaacggttctaggtcatataacgtgtatggcttaggatggagttacacgtatcgtgctggcgtaaggctaaatcatgaattttggaaaagctttgttgcgggtaataaatcgggtacttatgtatcgcgtgccatgctcttacatgattattatttcgcatcatgtgggtaaagtgtacatactctgcagagtataaactaattgattagccgtgctcgcggacat

SEQ ID NO: 3826 - DNA, 434 bp, Oryza sativa
  unsure (1)..(434): unsure at all n locations
gggctatcccatactagcacaagcgggtgtttgtgtactttattaaccgacancgagggaagcccttacgtcggtttgggcgcactctccccctatcagaatacaactaatcaccatatgtacaccacttgaggcccaaacctaaaaaccatgtttttcactattttatttatcaaaatcacaagttctaaagctctggccagattaattaaaaatcaattttcatgtttgaaatgagcccattatgacaaggaagaccattctaagcatggctaagctttatagtaacctaatgtcaccaaaactcatatataaagtggtatagccatattgtttctaacggtaggaatgaagaacatggatatatgtggagcttaagggatcattgccataataagaggttatctaacaagtttaacaacattttaatttat

SEQ ID NO: 3827 - DNA, 304 bp, Oryza sativa
agcttgagctgaattataagaggttttattgtacttttttgtatactagaattagggagagagtttagtataagaagtcggaggaattctggagttgtcggtaatcatcttcttatttattttactttggcaattactcatctctaatataattatcattctgagaaattaagatttgctcggggagaattaactcttgttagttcctaattagcgtgcggaaccttgttccctgtaatccagcaaaatatattgattgctttaagtgttaactacctctaggtaattatttcccgtaattgct

SEQ ID NO: 3828 - DNA, 424 bp, Oryza sativa
  unsure (1)..(424): unsure at all n locations
attaggacctataaaactcaagctttttacttccttttgagcttaagctcaataaaagttgttgagatcttcagtcatgtcagcatttggatataatcctattatccattactactacttcanattagtccttggaacttcagggcacgtcagaattccgggtccatgcgtgcacagtgaacccatactgtgcataacagttgttaaattttgcttaacaagtccaagggcttgtgttcaaaaacagcatcacaaggcaacaaaaagtcagaaaaaataatggtgcccatttcagccaaggctggtggtgcatatggcttggtgcagagagagatactttgcagcttacagctagcttgcaagttgttcttttctttggtcctgataaactactactacaccccaccatgcatgcacagtcact

SEQ ID NO: 3829 - DNA, 408 bp, Oryza sativa
  unsure (1)..(408): unsure at all n locations
agctntggtgaccccggtgatgaccacctttttgccggcctcggcggtgaaggtgtcgtaccggaggaagagctcgacgagcaacagccttccgacgagcaccaccaggttcttgccggggcactgcttgttgtcaacgctagggttctccgtctctcgcccattcgaccagtacacgtattgcagcagcttcctcccctcctcgccgacgaaccggtcgccgacgaactccctcgccgtggcgccgaacacccgcgggtccctggtggcgcacggctggtagccgaacagcatctcccccttcttgatcgcgaacgacgcgtcgtggctctcgatctccaggtcggccttggcgcgcccgtactggaacctgaccgggggtccagccgcagcgcctccccaccaccg

SEQ ID NO: 3830 - DNA, 430 bp, Oryza sativa
  unsure (1)..(430): unsure at all n locations
cggccgatgccttgtgtcaggctctgtcgtggtagtttattataagttanctgctggtgtggtgttgtagttgtggttttcgctcacttttctctaattaactgaggtgttgtagttgtggttttcgctcagttttctctaattaactgagcactgtaaagtttgatcccgttttcttctcaaaatgggatatcttcttcttaatataaaatgtcggcaacggcctgaccgtaggtttcaaaaaatatacgaggcagtttctcttttgcttttagcctgcaacacgctagctcaaagtgcaacactttgcacanttggcacagacgtttacatccatccatcgaagttattcgcatcaatcacagtgacatgttaagagtggagaagatgtaacccgatcgaacaaacagacaagctgatcgaacaaaaa

SEQ ID NO: 3831 - DNA, 435 bp, Oryza sativa
  unsure (1)..(435): unsure at all n locations
ctcgaccggatcttaagcacctgggctgcagctgaagatagatatgtagtgggtaattacaggggagaggttgaacttgaagaagttttcatctatcaagtttgaatgtattaatgaatgtacatgacgtgttttagtgccaataacaatcagtttgaatgttttaatgaatgtacatgacgtgtttaatgaatgtacatgacatgnttttccatcttatctatgtttctgacgattgagaagtgcaaataacatcagttttttttttgtcccttangaagtaatgactggtgagtgttgagtaagttaaacacacgttacgattataaaatcaaaggtggttttgattattattctgtgatgaaccaatgngcattggaaattattgggtttgtatttggaattattacgaagtggttggagatattgattcca

SEQ ID NO: 3832 - DNA, 434 bp, Oryza sativa
tcacaagcagcatatatgtgtctgtatgtgcaccatgcattaatggtcaaatcggaaccgggaacttcatatatatatatactccatgttgtgcatatcaagatcccctaattggtacatcactagtttttttttctacatgttatttggtcttgctaacatttgttcatgttaaaatatttgcatctgtagtttgtaacaaaatgcacctgaattctatttgaatcttcactatatacttctaagcacttgctctgaccctctgatatatacctctgatgctggtgggctccaaaaaagaatgtcacgtaacttggagatatatatatgcttgtattgggtgtgacatgtaattggattggatgggataggtcagtaccaccactttgaacgatgagggtgatgagatgatgttccacttatatcttgcatga

SEQ ID NO: 3833 - DNA, 133 bp, Oryza sativa
ctctcgagaaccgaagaaccctagcgccgtgcgccctaactgcgccgtcgtcgtcgacagtccagaccgagctccgcaggcgctccagccgtggccgtcgctcggggagaccgccgataggagcgcctaagcg

SEQ ID NO: 3834 - DNA, 413 bp, Oryza sativa
  unsure (1)..(413): unsure at all n locations
agcttcacattgttcttccaactgcaacaactgacatgtttttgtcagtacccagagagtctgcaaatgaggtttgacaacagtatccagtttaccttaagaaatagtagtagaagaaatccgcataaagagcttgttggaccaaaccagcaatccaagcctggaagaaacagatcgtcagaactttttttcatatttgtaccatgggatattaaacaccaacttacgaggggcaggccgctacggatccttctgctgtggtgaccctcantgaagtaccggtaatccagttatgatgtaaatgcacggtaggcctgcaaacaagtatgtgagattgaagagacaactggaacctagagcatgtgatcgtccttattaagatgcctattcgaattgacacatgatataaaaaa

SEQ ID NO: 3835 - DNA, 432 bp, Oryza sativa
  unsure (1)..(432): unsure at all n locations
actcagcttcccggttagctcngctttatcttttccgctgcactagttatcttttctattcttgtaagacgcggatctgtatgtcaacaattgtcgtttgtgtaccctggctggtcctggacagggatttaatgcacattcagcttagaaattctggttcgagaatttctgggcgtgacaagttggtatcagagccgaccttgaccgtaggacaagccaactggaaaccctaagagccctctgaacccctttttcatatgcatatgcccttttgcacctggaattgtgtcgggaaaatttggagttttgcctttttggtttgcgggaaaaatcttggtcgttctttctgatcggatgttttttttaaataaaagaaaaaaattagctcagtctatggctttacaaaaaatttatttggagtttattccacag

SEQ ID NO: 3836 - DNA, 423 bp, Oryza sativa
  unsure (1)..(423): unsure at all n locations
agcttgtcagcaccgccacgaaacananacttgtcctttaattcaagcacaaatccccgccaaccaaccaaccaaaacatcgctctcgatcataatacttcactagcatcgatccgagacccgtcggtatatacaactaccaacgaacacaccaacccagccatggaccatncattccacccatgcgcatggatctggacgccccacctacccaccaaaaacccacccgcacaatcaaacgcatccatatcccgtacaaaccatatggagccgcaccatcaaacgcacgtatccgcggatagatacggttcatatcgagcatgagcatgggcaacacagatctacaggagatgccgcaacaaaatggcccccgccccatccgacgggagagganggacaagaggagagaagagagccgagctg

SEQ ID NO: 3837 - DNA, 438 bp, Oryza sativa
taagcctgatggtacaattgaaaagtacaaagcaaagcttgtggtcaatgtttatacccaaaaagaaggcgaggacttttttgacacatactcaccagttgctcgcttgaccacgattcgagtactacttgctctggctgcctctcatggtcttttcattcattagatggatgttaaaacagctttcttaaacggagagctggaggaggagatctatatggatcaaccacacgggtatgtattataaggtcagaagggaatggtatgtaaactgttgaaatccttgtatggcctcaagcaagcacctaagcaatggcatgagaagtttgacaccacccttacatctacaggctttgttgtgaacgaagctgacaaatgtgtgtacctatcctgtggtggcgagaaagagtgatcttgtgcttatatgtcgatgacata

SEQ ID NO: 3838 - DNA, 118 bp, Oryza sativa
  unsure (1)..(118): unsure at all n locations
agctntagctgatttccttgccgagtggacctagtgtctagaagacatgccagaggaaaagatggaatattggactatgcattntgatgggtcgaagaggcttacaggcactggagct

SEQ ID NO: 3839 - DNA, 384 bp, Oryza sativa
  unsure (1)..(384): unsure at all n locations
ntggtcatgtcgagcacagactgtcaacaagaaacatattttattaatctctcagctaggcttctcaagatcgatccaattggacccactactaatcatcatcatcatcacaaacaccttacattgattaattaattaatccaaaagagcaaactaaaataatcccaggtaaaaaataaggggggtgaactaaagaagcaaacaatccattgattgatgaattgagatgattaattaacgagagcagcagcaagcagttccaaacaccctaatctgtactctctctaatcaaatcatcatatgccatttgcatttgcattngcacagctacctcccattaacccatcatcacagcttagctagcttagcttagcttaactcagc

SEQ ID NO: 3840 - DNA, 423 bp, Oryza sativa
  unsure (1)..(423): unsure at all n locations
ntatcagattctattttccgaagttgcacctataactatttattgtaaagaatcctactcttatgggtaaatgctcaatatccaagtgggcttacaaatttgatcatgatcaattgctttgtggattgtctcgcgtctcttgattagttggtatttatcccccccaatattgcaagtttcttacgtccaaacaaagtatttacttgttactaataaaaaatcaaaaagtttagcctacgttcttccttatatcccttcttttactccgatagtattgcagatcgcaatcgatgcacagaaaatgaatgcatttccatactataataaaaagtaagtgtaataaatagagaattggatcatgtcacatgacttaatccatttctactctatgggatcttacggagcctcttcatggatgacatg

SEQ ID NO: 3841 - DNA, 449 bp, Oryza sativa
  unsure (1)..(449): unsure at all n locations
agctngactgagtacaacatacttatntgtcatctatgttctattacgaataaaatcagcagacttaaggcaagcacatgggctttcctcagtaaccatcccaacctagtttttcattatatatccttaggacccatttaacctatgcatagcccgcttttctttaatagctagcaatgattatgcttattttataaaaagtttttgttggtttgggaccgttttgagctggtctaagctttacctatcaggggttcagtagagaagcaaaattatgccattctctaatagagcagagaaaaataaaatgagatttcgcttgtgtataacaattccttcattaattgttttattccttccctacaagattatgttcttctgcagaatatctatntctttctaatcaagtgattactntagtcagactccttcagaaattcatttcatca

SEQ ID NO: 3842 - DNA, 422 bp, Oryza sativa
tggaactgcgactaaattggagagaagctatttgttccaagtatccgagaaaaagaaagcagtatgaagcgagagaaaaccgatctaatgatgaaaagggggatctagccgatggggacttacctcagcgtatttggccgatggtgcggcagatgggctcgcggaggttgacatcgtcgcaggcggagatctggctggggatggagtcgcctgggaattgccttgcgcattggaggaatcgccagagagagagagggtaaagtttctcttaaacggtgaaaacggaagtcacggtgtgagatttctcggagataacggttagtatttaaagcactatagtaaccgttgggaaaaccgtcgaatgcgaaacttgctcggagtctatacaccgcatattcggaacattatcaaatatcccggac

SEQ ID NO: 3843 - DNA, 424 bp, Oryza sativa
  unsure (1)..(424): unsure at all n locations
agcttctcctgtggaggaattagttttatgtctctaccggnctctgcactgtaacagtgcacatatgccatagatcagttcaagggccatctatccgtactatttgtagctatattttatgactatatatcatggtgaactgggatagtttcacgttctacatcccattgataacatctgtttgaacagaaaaataacaggaaatagtgcggttccaagtggggtcgcagtttaatctcggagcccccttgcctcgcctccctgtgcaagtgtggcggccgtctattgcggtgcgctngactcatctttatataaactattaatttgccgattaactgatcattcatgtaaatgtgagaatgattgattaatggattcagtcgaatgaaaaaattaaaggttttagtntgcaggctgcaagtgt

SEQ ID NO: 3844 - DNA, 415 bp, Oryza sativa
tgtcaagcggcggcatcctccacggtacatgctacgtctgatctcatcgccggcggctgcgtcctccgtcatccactcctcacgctggagctagtcgccagcgtgccgcatcctccaccatccacatcacgtcggagctcatcactaacggtcgcgtggcctgcgtcctccgtcatctacgcctcacgctggagctagtcaccagcggcagcatcctccaccccacgccgaagctcgttgcggtagtcgcgtcctccgtcatccatgccccacaccggagctcgtcgcagacggccgcatcctcctctgtccacgccaagtcggagctcgtcagcggtggccgtgtcctccttgctccacgtttatccactccggcgacagctccattcccgactgtcgcgacaacccacgttca

SEQ ID NO: 3845 - DNA, 457 bp, Oryza sativa
  unsure (1)..(457): unsure at all n locations
agctngagggtcgacacatcatatcggaagtgcaagaagatggacgtcctagtgccccggccgaagccgccaagaactatgtacgtcacagcggttgtgttgtgcgggataacgtgcctgtcaatacggggtactggcgaagaacaaaggcacgccggagatcataagagcttttttcccaaattcgggagaaagagatgcttgtggaccacaaatgctcgagacattcaccccttcctgcgggtacagaagacaaagtgaaaaggtggactctgaagaaaatggcagaacagtttcagagcttcaagggagatctgtaccagaagtatatactgaaggtgcagacaccgaacttcgacacattcccaaagctaagggatcactgngacgagttcgttgcatatagacatgtgaacaagggcaggcgatgatggaaagaaacatagaaaatgccgcc

SEQ ID NO: 3846 - DNA, 401 bp, Oryza sativa
  unsure (1)..(401): unsure at all n locations
ttacggacctatgaaactcagcttcttcacaacggtcttagccatcaagacttctggaggcatatctcttgagtgccatgccactagccctagacactgcaatcctgtatggcaggtgcagccatggtgaaagggatctcangtgtcggctcagttggcacaaggtagagcacttatagctagcctaagggctatgctgggtggtgatgtgtgccatggcaatagcagctagcagcggtatagctgcgtgcgtgtgtggtgacacatgaagcacgcacagcttctacatggtactagctagcaaagtaatgttttttagaattatntgaatttccaagagaatagcatttacatgagctaaagttttacagttagacatgaataattgaaatgtaacactg

SEQ ID NO: 3847 - DNA, 149 bp, Oryza sativa
  unsure (1)..(149): unsure at all n locations
agcttgttctgcccatcagcaatgtgcccatatcggttcatgcggcgaagcagtgcctcaccctcaaagatgcggcgtggattcttctcatcaagtgtgagcagatgccttgcattgttacggatacggctcanagcatactgaacacg

SEQ ID NO: 3848 - DNA, 272 bp, Oryza sativa
agcttcaggcttctactgcaagataactgacgacttatgccggcttctattctattctggcgtccgacgcacagggtcttttgtattaagctttctcattcatattttaattcgtcttataataaaaatacgtttcatacacacttttctaatatattgacaccgtattctttctgctggtgaatgctactagtataagacagcggtggtatttgcggtcttgcggaggcatactaaagacaggcggctagttttgcgggcaaaaactaacc

SEQ ID NO: 3849 - DNA, 443 bp, Oryza sativa
  unsure (1)..(443): unsure at all n locations
agcttcatataatgctgttgttgcttattaatcatgcactggtctgatcacaggacatggatcgcatactgaggatattntctggaaatgagcatccattccatgatcgccctcttgaaccttttgtgatgccaccacgccaagtgcgtgagatgcgtccccgggcaagacgtgtactgaataaggcgcaaaagatagagcaggacagagcagcagcggcatcaaccaaagatgaagaaaatgttaagaatgccaaatccgagatcactgcatagatgcacattcagatgtgtgttgtgtgggtggagattgctactactcctacattgcaaatctacctgttgctttnttttgaaggatccatgtatcttttatctctttgacatgtagcctgttggancaatagacagtagaatatacaacctggaatgagcactaatctg

SEQ ID NO: 3850 - DNA, 424 bp, Oryza sativa
tatctcactcccccatatactgtagtataatccaatagtattatcaccaatgttaattactgtaattaatgaaatgtggactagtactacacactgtactagtaatatgcagtgacattgctagagagtttgagtatcccagctactgtagtagtactgaaactttgtcatacacatgtatggtcaggtgtaagagtagtgcagctatccgtatttttaaagcaggaagagaactgccactatcatcatcatcatcaatcagtgtaattaagtaatgggaccagcagacactaaatgcagaatttacctcgagatccaactcgccaccaacttcaatccaagtgcagcagcagctatgatattccaaaaatcatctttcatcttcatgctacaagactgaagcagtataccactactaccaatg

SEQ ID NO: 3851 - DNA, 411 bp, Oryza sativa
agcttatgccataatcaacccaatcgtggattttatgctctgtcatacctgtactctttgttctattagcctttgtttggcaagctgctgtaagttttcaatgaaatctttactactctgtctgccaaattgaatcatgtattcattctaaaaaaattcgaaatatggataacagccgcaaagtcttatattatgaaccttcgattctaagattcaaattcttctacattgaatgtatagctgcaacaataaatttggatcagcctttctactccctgcatctacgttgagcatgtatctttaggtaaccgcacaatacctaacctaatttatcgataagagcgcttattataaatcaaatcttgcaattttcttcaaagactgaattttgctttttaggtgtcaaaataa

SEQ ID NO: 3852 - DNA, 392 bp, Oryza sativa
  unsure (1)..(392): unsure at all n locations
agcttccttgaattcctcttgagcagccgcatagactgtcacaagaatccattggaagccatctgacttgttccagacatgaaacttaacatagaactctccctcaacaatactcgaaatgtcaagaacctccaaattcactcctaaaagaattcacctcctccacataagttttttaaacacgcgtttgaaaaatcatttttgcctgtttccaaaagagcgaaaaagtgtagcttttgctctttcgaagtctccgaaataaatctaaatttaccaagtcacatagacctctgaaatttataatangtgaacaccatttgcatttctagtaatacactgctccaatacatatacgggtagggaggtttaattcaactacttaattaaaatat

SEQ ID NO: 3853 - DNA, 418 bp, Oryza sativa
tgccttaacagagtccagcaaagctgctttagcttgctttctgtttctgtatccagttaacagggacgcaggtaaaagagcttcaccaaccataggtggttgctgtccataaagtgcttgataaggagtcatattcagagatgtatggaaattagtattgtaccaccattcagcttgatctagcagagaatgccacttctttggtcgagagaaagtgaaacagcgcaagtatgtttccaagcattggttcactcgctcagactgaccatctgactgagggtgatgggttgtgctcaagtgcaactttactccagcatcctcaaagagcttcttccaaacatgtgaagtgaagaatctatcacgatcactaactatcacagaaggtaatccatggagtcaataaaaatgagtcttaaac

SEQ ID NO: 3854 - DNA, 368 bp, Oryza sativa
  unsure (1)..(368): unsure at all n locations
agcttaactgaatggttctcaataaaacatttgtgagtattttgttcanaacagctctaaggctgtgtgttagtaaacatatggaatagtaacggtcgcgaaccatttcctctttatactataaatacatagcactggattataccatactccctccgggttcattttatttaacgttgtgaataatgacccggcctacataacttccctgagacctattgttctataaaatatatataaaaaaaaagtcgtggatacttttattatagggttagttttgaagacaaatatatataattggtcaatttcttgaacttaagattttagtattgaggacaaagtctaaaagttgagctcatcttgtcaaa

SEQ ID NO: 3855 - DNA, 431 bp, Oryza sativa
  unsure (1)..(431): unsure at all n locations
aaacagtctaatagaacagnngggagtgtatgatatatatactatttgagtcagacatgggttgtatgtggttgtcgtacatatagccatttcgtaatccatgaatagttgagtatactgtgcgtgcaaaaagttatgcggactaattcgtgctctagagatgttcgttaagtacatacttatccccgcaaaagaaatgattaactaatgtagcgcttaaaaagattattcactagaatgttgatataaattacatgtaggaataaattaaacatctcagtataactagcaagtaattttgaacaaatgggtctaaaccaaggggaatcccacctaccagatccatggaaacccctgagttcccctttaaattttccgccatagttgacaagataagaagtgcgaaaggtctcttaataatattntaacat

SEQ ID NO: 3856 - DNA, 122 bp, Oryza sativa
  unsure (1)..(122): unsure at all n locations
agctnngctgtgcagagtttggtactcgagctctagcttggtggagatactctctgagccatgtgcaggatgtgattagacaatgtgattggtactagtttgctagttgcatggaagagctg

SEQ ID NO: 3857 - DNA, 446 bp, Oryza sativa
  unsure (1)..(446): unsure at all n locations
tggtcttcccggctgcgtcgccattgctgcacggacaaggtttatctgctacctagctggagcaagagccatcgacaatactgcagccaagaaggacattgctgagaagatcaatcacgcaggcttcggcttcgatgggttggtgtatgtaacgttgagttcttggagattgaacaagggcagagagatgttaatgctgccattttgtttttcctcctcctctctttctatttattttttttctggtggttggtcttcccttgcattttttttttgggtgatttccctgctaatttgttccatctttgccatgaactttgtatttactcgtaacgcacatcatcgtcttgctctgttcaattcttgctatttaaacatcttttagtagatgaacaatgaanaacttctcctacttctatcttcagctctgatgccgtgtagtgttc

SEQ ID NO: 3858 - DNA, 162 bp, Oryza sativa
agcttttattatagagttgtttgaatttgccttgttgtcagcctgcctttaatgcgctatcttgctttgttatatgtaaagtactgaggagaattccaaggtcttgtgaaggacgacataatttgcatcccatgtttttctctttatgagactgagaataaa

SEQ ID NO: 3859 - DNA, 352 bp, Oryza sativa
  unsure (1)..(352): unsure at all n locations
tgaacatgtctcggtagctttaccttcaaatctgcagntccttctttgtgcctagtgtaacggaagtacatctcgcaaggcataaatactctctctaacaaggcacctgtgcgctttaatttctcggaactaccaagaatccgcggaagccattgcaggccagcacctgggtccacatcagtcggtgcaacatgagcttgaacatcttcaagaagcactgagtaatcagccctttgccaggtcatttcaggttgtagctcaagaatttgtatactgcttgcccccagagcttgctctaacatttcttttccaacatgaacaactgaatgaaacgaacgagccagcacacgcc

SEQ ID NO: 3860 - DNA, 457 bp, Oryza sativa
  unsure (1)..(457): unsure at all n locations
agcttatgacaatgcnantgaagatgatcttgtgctccacactcnaaacaacgagtcgggtctcctcttttcctgtgtctaacatttttcatagctcgagaaaattggttagataacaaaaccaagtcctcctcctcaaactgttcgagttgatcatcggacatggcattaaataaagcaagaacagaagacttcgatgaagaagcaccaacatccaaataagtcgaagaagataccaaagcactagacttagaatcaactttacgagcaagagtattcatctcatgagttttcaatttgtgtaaagcgaatccaatgtcaaagtagacatgtgaaccgactcctgaatagatgtaactttcatctcccanatagacatgtcaagaccattcaaaaagtgacgagaaatctcacattgtggataattagcatcataagaagaatcaacagatctaac

SEQ ID NO: 3861 - DNA, 443 bp, Oryza sativa
  unsure (1)..(443): unsure at all n locations
ttaaaactcagctattttagtccgtgttcgcacgacttttatcttctctttatttgaaagcgtcactatggtgcttaattagtttaaataagtgtttgtgtaacatactttctagcaattgtagctataatataacagatttatcttgatttgcaatcaatagtattactataataaaataaataatttaccacataattttgaatgtgttatttgtagtattgtcaataaacttataatctagaatgcccgctcttctttcagattaacgaaacagcgagtgtagtggctacggtaaaggtttgtattgatcttcacagctatttcatcctccctatctacgcgaccataacttcactatttgttgttgcttgaaccaccgccggaccatcttcgctactgcatgaccgccatcctccacttatatatntcatttatgcttc

SEQ ID NO: 3862 - DNA, 392 bp, Oryza sativa
  unsure (1)..(392): unsure at all n locations
agcttggcgcacacgaaagaggctagggcttatattaacacacgcgcncnctacctggcgcgccagatgacggagcgtgtggctcctcaccgggagaccgcgcggggccccctttgccggtttcggccggggcgccgggtgagggtttaaacccttgatctgtggaatgtttccgagagagcaaatcgcaagacacggccgatgtatacaggttcggccggtgataacggaataccctactctggttctgtggatctgtgttgaaagagtacaatagctgagagcaagagagtcaaactcttagaccctctactcttcttctccagcccctctcttggaggcatggtcctctttatatctcaggggataccacatacaccattctacctacc

SEQ ID NO: 3863 - DNA, 362 bp, Oryza sativa
  unsure (1)..(362): unsure at all n locations
taagctcaccaaccttaccaagatcctcgcctgttgcggtgtcgntgccgccgacgagaagacctacacgctcggcgagatcagcgacgcactctgcaaaggcactgggttcaacacctaccttcggtgtagccagaacgagctctaatacggcgagacactgctgtacgaggttgtgcagtgcgtcgaccgctccggcgagaagctcgtcaactgcacgacaccgtactgggtgacccgctggcttgaccctgacaagatcaatataccggcttggttctatggacagtaacagcactatctataatctacattaatgcttgcggatgaatataatctttcaatataatctaagcgtcatg

SEQ ID NO: 3864 - DNA, 270 bp, Oryza sativa
  unsure (1)..(270): unsure at all n locations
agcttctcatgagaaatggtgagtctctcatgagaagnctctagctcctcatacaagacctgcaaagaagcatgatccttctttagggccttgaacttgacaatctccttctcactataagcatggagctcctcatacatactcacaagctcatcatatgaaacatcatcacaatcatcatcactctcattatcactaaaaaatgttaccttagaggagcccttttgcatgagacaaagtggagcgaagagtgatagaccctcctgatgg

SEQ ID NO: 3865 - DNA, 340 bp, Oryza sativa
tgtccagtcgacaggtcttcaaaagaccagcacgacgactttcacttggaggttgatgctcaagaaccctctttcaaaacaaccagaccgtatttcgagccatcctttacaggtacctcactcgataacacacacttccatttttgttcttatattcttcatttcgaagccttattttcattgctctaatttagtaagtcaaagtgcaaccggaggctgcatctcccagagataaagcccttccctccacccccccaatttctgtactcgaggagcggtactcaagtatttcaagcgccgcatcactttctgcacaccctgtcagttttcaacggagaaa

SEQ ID NO: 3866 - DNA, 358 bp, Oryza sativa
  unsure (1)..(358): unsure at all n locations
agtcttggctataggctgatcatanttggatnttttttgtcgtaatacaaaacgcaaatctgtggctacctccattctgattcaccctgttcatggtaattatcactctaaaactcttcattcgagnttgttccgatggttctccaaaaggcgcttgtgttcccttacctttgacaaggttattataatgttctcttccttatcttgagaggactaatgcagctaacatgcattgtggcttccaaccttttataaacatacttttttatacattgcaagccctctgtttgttgagaagacatatgctctgtttgaaattatacataataatgtgtgtgatttaaacctcaaatgcttt

SEQ ID NO: 3867 - DNA, 189 bp, Oryza sativa
cctcccccccccgtcccccccccagcggcctgacctgtaacatgcccgccaaaccacccgcccaagacggaacagtatacaaccacacgaagggcgcggccaacgaaacagacaaaacccggcaacagcgccaagccgcccgcagacccaccccgcgacggaacaccacaaaagcactaagacagggca

SEQ ID NO: 3868 - DNA, 355 bp, Oryza sativa
aaataaacactaaacacatatacctactgcatttatcattctctctcaaataacctttagctcaaaataaccaagagaatgttttaactatttcttttcttgaacctgctagctcatatattttctcttttattccgggtacgcccctgtcgagaagactagttgcagggattcagcacccattattatgctcacattaaatacatccttgtcggcaagactgcgtccaaggattcgacattcattcttttatatttttattctcttgttcacaacgagcaactaaactaattgtggaaaaacaaattaatacagcatatatatagagcattgagaaataaaccatatgctatca

SEQ ID NO: 3869 - DNA, 406 bp, Oryza sativa
  unsure (1)..(406): unsure at all n locations
agcttcatacaatcatctgtgaatagaagagcaacctatctcttccacataatgtttgcagcatgattctcagaagcatcaagaaagccatcactgaattttacctaaagcactgacatcatgctgacacaccaaaaattggtagaacgcactgtgctgaagatgtgtctcagttctgactggagaggacacaagtgcatcggctaaaggatatgtgatgatacccatgtgagcatgtaggttagaaagatgacagctaattgagcacgcanggcaatggaggtgatatccatcataattcatagaagacaatagatgccatctaaccctcacagacgaaggaactntaccatggaaacacggcagtctcctctgtcatggaggcctanagggggagggggagtgt

SEQ ID NO: 3870 - DNA, 314 bp, Oryza sativa
  unsure (1)..(314): unsure at all n locations
caggcccatagcaccgacaccaccacacnccgaggaacacactgtagtgtagagctcctctcctggaacggtggagacactaccaataccgacataaagctactgataatatagaccaagcagaccgacataaaacacaactattcaacgatctctaaaagaaaactcaattcctaaggaggaataaaaccaagcaatcggctcataggacacaaagaaaaaatctccataggaacactaaataaatgcgcaaaacaaacctcctaaagatactaaggacggaagaatgaaaacacccatactatgctcgaaca

SEQ ID NO: 3871 - DNA, 445 bp, Oryza sativa
  unsure (1)..(445): unsure at all n locations
agctntattagtcgtttatatgctaacaaatcgcatatatttgattatcagcatgaagactgcacaggaccatcagcggatcgatggcggctactttctggtggacccgtgccattatcgccggttgatttagcgtatcgctttatgcgaaaggcgatgaaatngttcgggacgcactctttgggcctgcatctcggaatgaacaccggctttgattcaagcagttcgctggattatgtctatcaaaatcaaccgcaaggtagtaacgcattcgggcgtttagtcgacaaaatctacctgaacagtgttggctggcgcggtattcgccagcgcaaaacccatttacaaatactgattaaacaagccggtgccgatcttcacgccaaaagtttagccgtccgcgtggttgacattgccgcatggcatgtgcgctatgtactggatg

SEQ ID NO: 3872 - DNA, 116 bp, Oryza sativa
  unsure (1)..(116): unsure at all n locations
agcttgctcaatccagcacgcgtntggacgcggcgtatgacgaggtcgtcgacgcagagtgatcgggcccggacgtgacgctgatggtagcgccgcatgctctgctggtaacgcgc

SEQ ID NO: 3873 - DNA, 415 bp, Oryza sativa
tcggacaatgcagaacgaatgtgatcaagagcaccacatttatagcgatgagttggaccaccttttttcctgtacctaacattattcatagctcgagaaatcttgttagcggccaaagccaagtccttctcgaactgtttgagttgctcatcggacatggaatgaatcaaagcaagaacagtagaatttgatgaagaagcaccaacattcaaagaaatcgcggaagaaaccaaagcactagacttagaatcaactttacgagaaagaatattcatctgatgtgttttgatctttgtgtaaagtgaatccaaagtcaaagtagacatgtcaacagattcctgaagtgatgtaactttcatctcccaaatagacatatcaagaccattcaaaaagtgacgagaaacctcagaatatg

SEQ ID NO: 3874 - DNA, 373 bp, Oryza sativa
agcttgcaacaagaagaatcaagacccataccatgattccatgccaatagcattaagcaaatgattctttcagaataccaaagaaggcaattcatcataaactatattcatcatcttgaaagataacattagtagtcataagaacctgaagtcaaggtgcacctcataagtgttcttcggccagaagaaaaagaacacttggtcacactacacaacattcatgagtcctgccatttccatctagatcagcttctgacaaaatcgagttgtctctggtcggacattgaggtaattcttcattcatagttaagaagacattactcagccagaaagactatagacttgaccaagtcacttgtgtaaggttaacaaa

SEQ ID NO: 3875 - DNA, 411 bp, Oryza sativa
  unsure (1)..(411): unsure at all n locations
tctttatagcntatttgctatatcactcatcatattctacttagcagcttgtatatcactcggatcatgttatttggaggattcacaccgcatatgctatatattgatatcaagtcacttggttgattacgattatcaaaaccactcggttggttggattatttattccttgactatatgcttggnttgttcacttaaccgcatagtcgagggctacacctattatgtgcatctagtcgatgcacctgactttatttttcagccctccacagtcttcagatttggtaaaagtactcgggagaccatggcaaagatgattgaagtactcggctttggagtaatctggttcgagaaagattatttttccactgtgaggtctacgggctactgtggagatatgggtacccatac

SEQ ID NO: 3876 - DNA, 136 bp, Oryza sativa
agctgtgccgggctctcttgcttatctggttcccgacggcgagctccctggttcggtcgaaccaagccctctcagccccgttcggactctcattcggaattggatccctctaccctcccatgtcacaaggacaaaa

SEQ ID NO: 3877 - DNA, 397 bp, Oryza sativa
tagcttaattatatatatgtggaaaaagatggaaatggtttttatcccttgatcatgagaatatgaaagatatctaacacgagtctcataaattcgacaaagctcaatataatgtcaagcagtcatatgcataacaaggttcatcaatgatatacttgcatatggccttggtaggtataagatgaagtcaattggaggattgagcttttaaaacaattttattttgaaaacaaattccaaagagtcataacaagagttgcaaggattcccttcatcttgaatcatctcacataaagcaattacttagatgcataaggttccctatacatggatggttgttcacaagcacaagttcagctgagaataatgaatatacaagatcaatcacatgaagaat

SEQ ID NO: 3878 - DNA, 247 bp, Oryza sativa
  unsure (1)..(247): unsure at all n locations
gagagcacacacagagcaggttccacccacacacagaggggaacacacaagnaaccacagaaagagcacagacaaacgcggcccagaaaagccgaaacgaagcgagaacagagcgacaaccggaccaacggagaaaaggacaaaccgagcagcaccaggagagacccagacaaagaaaaaacacgcaaaaaccgaaggccaaacaacggaaaagcaaaaaaagcccgcggcgacgcaaaaaaggaaa

SEQ ID NO: 3879 - DNA, 421 bp, Oryza sativa
  unsure (1)..(421): unsure at all n locations
actcagcttctggcctattccagccgcttggaagatgttcatnngttaagtctctacacaagaagaggcctgtagagaaatccttcactaagcacacggtcccttccgttccaagaccttacatgggttctggggttgtagcaacagtacctatctcagtttcacccagtaatgctgaatcaaggattttctccgagcacggtactgaacatgtgaatccaccaccggtatctggtgtggacctattaaatcaggtcaacctgtattggcatcatgcaaggaagtcgctggagggaaaactgtccatgagaatcaaacagtctctgaatctttcaagcacactgaagagtcattacgtatgtttcgtggaggatgcacattgatctactttgaataatatattacctcttggtagaaataa

SEQ ID NO: 3880 - DNA, 408 bp, Oryza sativa
tgttggactgatctaagagtacttagcactttcttggcactatatacgacagatacttctaagacggtcacagggcaccaatctggcaggactattcctgaacttaattaattaggagtatcttttaaacactaaaaatcggttgctttcatggggcccttgcgtgggtagggatctagccccagcccatcagttacttttcatcacgagctgtgttatacatccgactcaactgtcatatactccctccgtcccaaaataaatgtagttctagcacggttcatatctaacatttgaccgttcgtgttatttgaaaaaaaaatatgatcagtattttactgttattagataataaaacatgaatagtactttaagtgtgactatttttttatttttttaaaaattttt

SEQ ID NO: 3881 - DNA, 364 bp, Oryza sativa
  unsure (1)..(364): unsure at all n locations
agcttgacaacgataactctcaactattttcgttctggctgtgtggcaagggttttntatgtggagtggtgctgatggcttctgtagagcaattgagttgtccgggaggcggagctactgcgccgggtggcgaactgagccacgataacccgccataccctttgtgctggcaacactagaagtgtccgacaaatgtgaagagcttctggtgaaagccatgcttggtatatgaccattggccgcaatgtcgaccgttgtggacgccgtttcctcttgaggcatccctagtctagtctcgatgggtgtggcaacgtctttacattgttttcttcttggaagctttcttagaagagctacttataat

SEQ ID NO: 3882 - DNA, 358 bp, Oryza sativa
cggtgttagcagtccaagaggaaaatacaagttataatgtcttatcataaaaacgacgaaaatgctcgatattccaagagttgtcaacatgagtaccatcttcacgcttgagtcggtatgaacctggccgagtaacttcagaaattatgaacggtccttcccataaaggagataacttgtgccgatctcgtgtagtttgaatttttcttaaaaccaggtctccgactaaaaaagctcgtgattgaacgttgcggttgtgataacgtcgcatcccttgtaaataccgagccgactggatcaaagctgtttcacgggcttcctccaatcgggtgagatcatccactcgggtttcttcgta

SEQ ID NO: 3883 - DNA, 352 bp, Oryza sativa
  unsure (1)..(352): unsure at all n locations
agcttgttcagattttctcgacgtgcaagctgaaatccgtgcctgcagagagcgtggaattaaacgtacttctccaactcgtgatgtctattgtcccattcacaaggcatagacccacgacctctcaagctgcaaggtccttcttagcaccatgaggacatcacctcctaaggtgcancaagcacaaatctctcctatagatgttgacatagaacagggagcaatgactatctcagatcgattcaatcgggtaatcgacatcgatcctcacgaaccgtctgttttacattcactcgaagaccaggcctatcatcnacaagtacaccacgcgatgtgtacgcttgcagtggaa

SEQ ID NO: 3884 - DNA, 386 bp, Oryza sativa
  unsure (1)..(386): unsure at all n locations
gaaactcagcttgcctccttgccgcgcctctctagctcaccgtcctcatttgtcttctcatcagctgggcatggcgcccgcgctggccttggctattgctgtcgtcggggacagtaaacagccgccgccggtcacccctactctacctccaccgcatgtcgccaaggagaccttctgtgtccgtgccatggccttctccattaggtatcaggcggcatatatcagacttggtacccacaagtattaggcatggtacctatgtaccaaagtttgtgacacctangtaccaatcggtactaaggtaccgtgtacccacgtaccaaagtctataatacataggtaccagccggtatcaagatatcaagtaccacgtgctagtcgatacc

SEQ ID NO: 3885 - DNA, 278 bp, Oryza sativa
agcttgtgagctgaggatggttgtctccgcttatgtttgggatgcagctgttaaggatatcttcacggccagaagcctccgtcagatgatcaatatcctgttcttgagcagcaagggtgccggtgcccgtgacaagaaaagccccgtggtatcgtccagctggagctcaggaaacaagagcagtgagattgggaaggttcaacttgctgagcggtgagcctgtttcattttagtggggtgaaatcacattctgaaatgctttataagccttaattaaa

SEQ ID NO: 3886 - DNA, 345 bp, Oryza sativa
cgtgctgcatgtgtgaaagcaaataaacaaaaatggtgattttagatagaattacaatcagatgaaaggatattatctagtagagtaccagttttacaaaacagaataaataaactagaagtagaactagagaacctataaattaactattatattaaggcattaccagaaatataatgatattgatgaagcattaagcccagctagaaaaatattaggaataaattattatctagagcctgctgcaaaagaatatattctaaaatgcacaaaagctataggaaagaagactttagaaatacccattaagatgactactaaagaagaaggggtttttaaaaaacc

SEQ ID NO: 3887 - DNA, 344 bp, Oryza sativa
  unsure (1)..(344): unsure at all n locations
agctttacagtccaggtcattatatggcctatgtggataagctaactatgtctgttggaaaacaatgatctcaatggggtacaaaaacaaggttntggtcatgaaatttcgtagacatgttggaatgcacataacttttcacagcaagtgtgaactatagcacacttttttaaacaaacaatataggcaatgagagtaacacataaaattgtgaaggatgaaattcactttatagatcaagcattttataacagtgaataacagcatgtagacttgctgaaactgttattaatatgcagagcatacatgtgttttcaaaacatattctctgaactcacctcttg

SEQ ID NO: 3888 - DNA, 321 bp, Oryza sativa
  unsure (1)..(321): unsure at all n locations
tanaagaatatagcgaatcccaaagtctccgtaatctctgtttggcgccagaggctgctccgttcgttgctgaagatctgtgctgcgaaccccgccgcgctggcgagcgagcttcttcatgccgagctcaacttccttctgcgccgtcaagcagctctggccgccgccgacagactcccccgctcgttgcctttcgcggcggcgccatccgccgcctggagagtgacaatatgaagggaaaaaaaaagaggttaggagaaatgggaagactgtggagtaagttgggccttgggccataagtgcgggtgaactaattctaat

SEQ ID NO: 3889 - DNA, 368 bp, Oryza sativa
  unsure (1)..(368): unsure at all n locations
tagcttncagtggagccacatgtctctttatttgtggcataggagtgacggctggacctattccttgggatttctttcagaatactattccatcgtagcagctgtgcagcttgactctccccaccgggaattattctgttacgaattggttcaccctgctccttgaattgaatgcaactctggcctggccatatatcataacatgatggctaatgttggtcttccacatggtgggggtccaccacaggcaccgtatgcacaggcacagtttcctcacaaccatgcatgcctattgaccctattagtctacctgatggtggtgtctcccacagagccaacctattcctcgtaacccatgcttttctgca

SEQ ID NO: 3890 - DNA, 252 bp, Oryza sativa
acacatatattcttctcaaaagcaaccagcaacggagcggcaaccatggaatggcaggaacgcctcagcacagctcaacaacccgaataacaccctgctagccaaggatacacggcagaacctacgaacggatgaaaatgaaaagaaggcagcgaaactacctgacaactctgtggtgatgaacgagcacgcaacgaaaatctacatcgaagcataacagcccggaacaaccatacacgggtgaacagcacc

SEQ ID NO: 3891 - DNA, 450 bp, Oryza sativa
  unsure (1)..(450): unsure at all n locations
cactggcaacagcatgcgtacaatctatctagctatagctattttgtttgtacatatattttggagatcattcttgaacagggcaacctttntgtccacagataaattaaagttcaagtgtacattcccatttgaaaagttcaaaattatgtgggagatttggtctttagtttaggacatgccgggcggccctgttgtcggaatccggatgcattataaccaaattcaattctctgaccgtgtttatcccggcattatgtcacctataggccgaaccgcgtgagagagcacctactatgcagtggatatctttgttaattcatctttggtcagaatttctctgcgttggaatgaccacacgatcgatatggtcgcttgcttcagaatctatgctctttaatttggatggaattaataatcaatcctactcacatgcaagggctctgtttg

SEQ ID NO: 3892 - DNA, 420 bp, Oryza sativa
cgctgtggcggatacttgtttgtgtggttaatcttgagaatggcgccgcagaaagcgctgtggcggatatggtgatggctgacaagaagccagtggttgagatgaagatttgtgttcatgaggccaaggaggagaatgtggtaaaaactcgcatatttggggccaagaggaagttctctaatggggaggatcttgatgagtccccgtatgctgattacattcacaacgaaaggaaggagatgatggtctctaacgagctcccttctgtttctccaaggacaaagacaaatgggaagccggtgttcactgataccatggattatgtcctccagaaggtgagaagcttgctcattgtgagttgataagaatttatcttgttatcatgtgaacacaatggcactacttggcaacaagttctct

SEQ ID NO: 3893 - DNA, 441 bp, Oryza sativa
agctttgtgggctcgtgggccacagaacctattttgattggaactacagttggcacctatccgtagcgggattcccggtggcgcaacgtgtggtctccgccgcgcccaaatccaacccaaaatcctcgcccccgcgcccgcgtcgcaccaccacatcacaggacagacaaacagatcaccgatcgatcacgcgttcaccgccgcgccacccgctcggtcaccccaccatggccgccaccacctgccgcctcgccgccgcgccgctcgtactcgcaccgctgcctcgccgccccaccacggtcgcctttgccgtcgccgccaccggcatcaagtacggtgagacctcgcaccgaatcgttggctcgctttctcgtgttttattcgcaaaaactgaatcattggctcttcatgtcagtaggtctcaaggcgtccaggggcgtg

SEQ ID NO: 3894 - DNA, 363 bp, Oryza sativa
aatatcagaaagaacttttcggacggtaccgaccaattgcactgactctgcttttctcagatccgaaacttatgaaagttccgaaaatgattttcgaaagttctgaatatcactcctattgtgctctaacggacagaatatgtgctgtggctataaatagcctcacctctccccttgagagggctattaatcctatagcaaacttgagtgcccttgcgttacttctctctgagtcattcgagccttgagagaattgagactgctaactagcggccgccgacgctggccgcacctagatgacacgaacatgacataatatatcctccctttttaagaatggtgctacaaaagccatccctctac

SEQ ID NO: 3895 - DNA, 162 bp, Oryza sativa
aaaaataaaatactggtgacattccatatttttgtggtgccattaatatagtaaacatcattatattcatcaaaacttggacaccaattatataccataatgattggttttgtcggtggattttggttgattctggaaaatatttagaaccgtatgatgaaa

SEQ ID NO: 3896 - DNA, 418 bp, Oryza sativa
tcacagacatggacgaaatctgcaatatggactatggtgttttgattccaaagatgtaagctgattccatagaaattcagtatcccacggaagaactttgaggttggaagagcaaatccaccataaaagaaatgagagaagaccaccgcctcgtgtgtatcgggggtcggaaaagcctcatcgcacgctggccgccacccgatgatctccttggcagggagaacgccgtgcgccaccatctccttcaggttctcctccgtcacgtcggacggcgcccattggccttcgaagctttctttctcttccgccattgattttccccgaatacgttgatttgattccagggatggcttgggagagatgatgaattgaggcggtggatcacgggaaggaatttgatcacttcttgaaggtggat

SEQ ID NO: 3897 - DNA, 445 bp, Oryza sativa
  unsure (1)..(445): unsure at all n locations
agcttgtacacctgtattcacattcatagcttcttgtgttataaagcattcatacatatatactcnctcccgacatagaacattacgcttcagatagcaaaactgatgcacttagtaacaattttttttttctgaaacgtagtgatcagagggagtatcattttatgcaatagctcacagagttataagtgaacaaggtaagatgaataatcgatccatccatattaataaagctatttctaccccattaagctntattgtaaaaataaagctatttctttaccgacagccctctgtctaaccaataacaatggatccccatttaatttcttcgtatactgtctcttctcaatcaatcacaacatcttctaatcattgtcatatgctctcttagattccgataaacctttaaaatacttgtattctggactgaggaagtctgtat

SEQ ID NO: 3898 - DNA, 399 bp, Oryza sativa
  unsure (1)..(399): unsure at all n locations
ggagaagcttgacgagatagaagctaatatgcgcaaatcattcgaggagacaactaacatcatcaaggcgacaacctccatcttcaattttgcatcatcttcaacacccccgacctcgcctactncaatgctcgccaagtgatcgtgggcgcgttccaacagtgccagtgcgtacacgacaacaagtgcaagccacaacatcgatgttcctactccgacagtcgccatgggcttgcaagtgagtttgaaccatggcattggtactacaacagtgacgcccaccaagtgcttggtaaatagcttcgacaatgacaccggtgtgaatcatgccattcttgatgaagcgtttgctagtaccactgctgcagccaccatggagacagtggttatcgaggacaa

SEQ ID NO: 3899 - DNA, 470 bp, Oryza sativa
  unsure (1)..(470): unsure at all n locations
tactttgacgacaatggcgcgttttctactttttttccgcatatgccagaatgtatgttctttcacaactgtctcccttcctctaaagatacgcatccgttgcagaattcctgaacggcttctcttgtataactcggcttcatgaataacataaagtctgctacgccttgatatccgctcggcttcatctctgtcttganggagctcttgggaggataataattgtatgaggtgctctctccagacagcttcaatcatagctatgtcttgggtgtccgccactagagtcgtttctttctgacgtacagtcgtgtcatacaggtgttcgactaatacatcggagggagccatctcgcgcttggatccaaagtgagcaagcctggctgtggcttcattgttatgtcggagaacgtgactaagctcgagtctatcgaacttggtattccatttatcgacctcttgccgatatg

SEQ ID NO: 3900 - DNA, 443 bp, Oryza sativa
ctgtgccgcgttgcatcttgtgggcttcaatcctttgttgtcccacaattgattcatgggtattcagatgcgagattgctaaagggcgatctatcccctatcgatcagattctgatcccctctccctcaccggattacttttctattttagcaaatttatacacctaaagtttgtacacctcaagtttacacatctaaagtttagtgacccaaagtttataaatcaaaagtttatatatccgatttaaatttgaatttgaattcaaatatttttatatatagtatttctatacatctaagtttatacacttacaaagttatagactcaaagtttataagttagaagtttatatacccgattccaatttgaatttaaattatatccgactcacatctgaatttgaattcacatattttttatatatataagatctctatacatc

SEQ ID NO: 3901 - DNA, 363 bp, Oryza sativa
  unsure (1)..(363): unsure at all n locations
agcttatcaagtctactttcaaatggatccagccacatgtccatatctgttctggagcggccgcaattgtcattttactcccgactatnttctgtccatggtgctgcgtcacctcttttggcccaatgggctgtgtatccatgttgggcccattaggggcgcgtcctagggttggagcacgaccctatggtcgttcttcccctctttttatacctctagtcgccgccaagaacaggcgggttttgatgatagagttagcttcttgctaccggctcgcagcgcgcgtgttggctaaaccgcccgtctgcctgtaatcggaaccncaccatattgtgtttgatagtgaaactttcatctttatct

SEQ ID NO: 3902 - DNA, 371 bp, Oryza sativa
catcactcaaagcacaaaatatagcattagtagcttgagcatcgagatgtaggcatttctcttgcccacttgtgggagcacgttcatccaaagcatgagaaaagcccacatctacaatccaccatatttttgggctcatggccctaaaatgagaaatcatgtgaattctccattgtgcataatttgtgctatcaaatataagagggtcaccacccgggtggactatatctctagaagccatccttttctctcggaacggttaaatccataaaaagagaaaccaagctctgataccacttgtaggatcaaggaggccgactagaggggggtgaataagcggttttaatacttaatggcacttaaacaaaact

SEQ ID NO: 3903 - DNA, 463 bp, Oryza sativa
  unsure (1)..(463): unsure at all n locations
agctttttatggcaaataataacatagctagtgtgattaaatcatctatatgaaattaatcaacgacatatcccatataatagcatatggtaggagaggtgagcaacccttagttaaccaagcagtaaatagaaactattcaaataaatgattcaatatattaagatattgtgcacacatatattgtacatcccattatagatatatggtatcgtattaatttgcttgttgcatatattaatttagagggagtatatgacaaacatgaatattagataaatactagttatacatcttgtcctcgtataattacagatcaactgtaaatttggattattcattgtaaaattatgtgatgggataatccgtaaccataatatgattgacctaaacgaatctaacatacanagcatgggtaattgctaaacctttataatttaatttgacaagtgaaatatgtaca

SEQ ID NO: 3904 - DNA, 390 bp, Oryza sativa
  unsure (1)..(390): unsure at all n locations
ctgacttgtgcacttggattggtatattgggttgtntttttttttaagaatgtggttgattgagctttcacaaagggaattccagccatatcatgttaaagttcacgattggtttaaactttgaagaaagggaaataaacgcttggaataactcaaagattttcgaataaacaaaatccctaagccaacagttccctgcagcctatcatcatccaactggtgacctctaagtctgctcttaagtgcttatctttgtaacccctaaaaacgtgaatataggctgagcagtagctcctaagctatctttgttactaagtgacgcgtggtagttgcaagctaggcaatctttagttaggttgtttgcaattggcactctgaaagtgcctgcgt

SEQ ID NO: 3905 - DNA, 471 bp, Oryza sativa
  unsure (1)..(471): unsure at all n locations
agctnngtttgagctgaaaagttgttggtggtatttgctatttgggagaaggaaaacagcacatactgagaacctgcttcttcactctcccaaagtttgactgcactgtccgtatccagagtcatcaaggagtggtgagcatgtaaattttctttacctgatgcacaataacaaaataatcctcctcatgtgttatacctgctgtgcatagttattgcatgcagtttttatcatcagtttgcagttatgatgagttaatattggtacctttgttntgactccgtcttctccaaagaacaaaggagagggagcaaaaggaaagaactacaacaggtggaatcacacacgccatccaaagcattttgtgacccgagcctacagaatttgatatcatanacaactctacttgcagataactgagactnttcatgatatatgctgaattcttgcagtctttctacagatacaata

SEQ ID NO: 3906 - DNA, 428 bp, Oryza sativa
tcggggtggcgtggggcatggacggcaaaggactctattgtcggcgacaatatcttggcgtggcgtggagtatggacgacaaaggacgcggtcgccggcgacgagctccggtgtggagcgtggatgacggaggacatgaccatcggcaatgagctcctggtgtggcgtggggtgtgaacggcataagatgcagccgccggcaacaagctccgacgtggagtgggacatggatggcggaggacgcggccactggcgacgagcaatgagggcacgaccacagatgaagacgtatcggtacatgactcctgatatttagtaggaatcacatgttatctggtagttatcactttagtattaacgagtatcagatggtatcaatgggtatcggtcaatatctataggtatcatctgacacctcacaattatca

SEQ ID NO: 3907 - DNA, 424 bp, Oryza sativa
  unsure (1)..(424): unsure at all n locations
ttatcatgattgtatgcgcctttcaaacacttctgaccagcgggcagcaaagtacataaatacgtatttattactgattagacacactgcatttattgcttatcagacttatgtttctctttgatccataatgtggagtgattttgcgaactccatacagtatatcaaatccattgatacactgcacatttaacttttgttggtcatatggagttatggactggacatgcttcccagcttgtgtctgagttcattaataaaagaacctatgaattactagctacttnctccatcccaaaaaaaacaaatccattgatacactgtacatttaactttgttgggcatatagagttatggacacattctagtacaacgaaatctgacagatatatgtccggatttgtagtactagcatgtgtcatat

SEQ ID NO: 3908 - DNA, 357 bp, Oryza sativa
tctcgacggaagccacccgcgtcggcggtgattgaattcaaaaccaaggggagagaaaatacaagagtcttttgagtttaataatttcctttttggggataatctaagtcggcaaaggacgcgaggaaattatcgtaatcgtaagagtaaataatttaccttttctcttcccgtccgctacgcgtagtcactgactgtgggcccaggaggaagaaagacccacctggcagtgtcaccggtgggtcatgcagggactttgctgacgtggacgcgctcgcgacggcggcattggtaaaggatggggggaaacgtgacgggttttataccctgcgcggggagggctatatctggcgtgtg

SEQ ID NO: 3909 - DNA, 455 bp, Oryza sativa
  unsure (1)..(455): unsure at all n locations
agcttactgcagaaattataaaatagaggagtattctccacaaggtgggaaaggtggtatgtcgtgcttgaagctactatatatgaatattgattagggcacagccagagctaattaacttgatcaactaagcaaccggagctaattaactgccgtagcaacagatcaacaaaagcaaccagagccaattaactgcagtagcaacagaccaactagattcactatatactgaactgtttttgaacagctgtaataagactgatctagtactatattatgtacctacagcgctttttctttggttatatatacccctccgtccaaaaaaacgtgtttaggtttgtagcttggaattcgttttttaacggagtacacacatggatngactgtatgaatgagatcctctgctgacactgacatgctgggcaaagagagtatgcccacatgtcagtaac

SEQ ID NO: 3910 - DNA, 439 bp, Oryza sativa
ttgaagattgggactacgtatggaatctaatttatttttaagaattcagcctgaaggagcatatatgatgcctacccaaagaataagaggtatatttttattttctgccaatctatatatactggagaagatctaccatactaccacaggcaacatttgtccaaactccagatgagtaaatcgcgttcaaatcataccaagaaaatactgcctgctaatagcagtgcactattgactcctacacaacgaattgttatccttaatttgcagcataagtggttagttttgtagatccgtacctgtgcatgaagccaaccagctacctatagctcactgctcgtattgtgggctgtggccgtatgtgaacgttctccgcgtcggctgctagtgcaatcgatattctttgaactcatatgtttgagtgagttgattctctcct

SEQ ID NO: 3911 - DNA, 447 bp, Oryza sativa
  unsure (1)..(447): unsure at all n locations
gcttcctcgtgctgaacccaagccaagatttttgtccttganattgttctaccaattgtcactgcaacgattgtgctggttgtgggtggcgccattgttatggtggtgaggaggagatcgaggtacgccgagctactggaagattgagaggttgagtttgggccgcatcgattctcgtacaaggaattgttccgcgcaaccgatgtgattgcggataagcatctactctgttcaagaggatttggaaaggtgttccgaggagtgcttcctaaatctataatggaggttgccgtgaagaaagtgtcccacgaatcgagacaagggatgaatgagtctgttgctgatatagttagtattggacgtattcggcaccgtaatctttgtcagttgctcggttactgtctactgaagggtgagcttctttttgtgtatgcgtatataccatat

SEQ ID NO: 3912 - DNA, 446 bp, Oryza sativa
  unsure (1)..(446): unsure at all n locations
tactaaagacctatgagtatgacttatacgctccactcttttgtattctacagacggtctagtaccaaataagactttgagagaaacttgcttgcacaagacttgcaattcaaggcgtagtccattgttcaagttgtgagtaagtgtagcttggagttctaggtggatgttcaaccttaattggtctccatcgaaccgctggtatataaacagtacattggaaaaggcaaatctcaatgggattttgagatttggtgggggattgttggaattaatgaatatgccttagcccactcgaagattaattctttggaaaatcacaaaagcccacctcatgggatggcatgcatgtggagtttagtaccaccttgcttattctaggagagggggacctccttanaagggaggatgtcctcctagccacttgaagcatgtgtggtggagag

SEQ ID NO: 3913 - DNA, 472 bp, Oryza sativa
  unsure (1)..(472): unsure at all n locations
agcttatngcttcacaatgcctgttggaattgtttaacagtatttcagatcagaggagctgtcttaatgctgagttaagatgctctgcaaagtatctgaagtccatgattgcagtgacagagggaatggtcttcgatcaagatagtaaagttgctgaaaattgtggtgcctgtctcacggtgattttatgttgggagagatctggaagcagagagaaggcggtgataagagaatctaaatggtctacgttaatattggaggaatttgcagttgccttgactgctcctggtttgacatccaaatccttcagttatcagcagaagattgcacatatatagctctttcattgctccaactgagccaagtaccagattggttgacaatcgttgtcagtgattctttgatatctggataggtgctaatctttctgctacgaatgtttaccgcggaattgtcactctcttcagtgact

SEQ ID NO: 3914 - DNA, 321 bp, Oryza sativa
atgacttggttgcttgtgcttcttgttccagagtgtaatattgtcgctctggtttgctgctaatgtatgagcttggtcgccagccggcaaacaccaagttgtcgagcaacaagacagtgaggagggtccgtgttcgaggaggaaatctgaagtggagggctcttcgcctggatactggtaactattcttggggaagtgaggctgtcactcgcaagacccgtatccttgatgtggtctacaatgcggcaaacaatgagcttgtgaagacccacacccttgtgaagagtgccattgtgcaagttgatgctgccccattcaagc

SEQ ID NO: 3915 - DNA, 390 bp, Oryza sativa
agcttagctgagctcactctctcgctagctatcttagctctatcttctaccaaccctcggcgccgtaccaggagaggccgccggcgtgctcgtcgccggcgaagaatccggcgcctccgaggtcggcgtcggccactgcgccggcgccgccgccgccgacgaggagttcttggtggccatcgaaatgcgatgacgcgtggaacatggaagggaatgagagggaccaggtgagcgtggtggatggcgcgaagaaggaggtgaaccccgccgtgtcgtagctcgccggagattggtggtggtggtggtctattgcccgtccggaatacggcgacgccttcttgatgaacaccgtgctcgagtcgctgtcccgtgagccgtcaccaccatgct

SEQ ID NO: 3916 - DNA, 461 bp, Oryza sativa
tgaccttgaaactcagctggagcctgcccgagatgggatcggaagtttttgactgtggtgccggtgaggaatatgcccatctccctccattgtgaccagatccaccactaccagccgcgagttccacatgaccgctggttgcaccatcccgatcgagctccgggtccatcggtcacatgtctcgagtcttcaccacctgcccgaagagagctcgagatctacctctacttcccttcatgagtgagctcgagctcggtcactggccgcaacctccaccagcctccatgaggggagctcgagctcggcttcttcctccacctccaaccgccaccttcatggacgagtgggcaggccaccatgccgcgccacatctgtcccatcacctcttcctccgagagtctccctgccatcgtcccctcctttcgagctgcttgccatgccactccatcacctccgatcag

SEQ ID NO: 3917 - DNA, 397 bp, Oryza sativa
  unsure (1)..(397): unsure at all n locations
tcgaattaaatcaagtaaatgggttataccgtgataaaaacaggttatcaacactagcaagaagaaagcaacaagccaacaattcaatcctaaggtgatatattccttgaacctttacacacagttgtcaaaagaacaattcatccatgaaaaacatgctacatnttttcatcattcagtaacttgctcatagtcttccactcatgaaatatacacacacaaacagaagaattgtgagtttgatgtgatggagctctggttacttacccgagcaacaatgtcggcatcaacaacaggaatgccgctagccttgaacaggttggagatggtgctcttttcagacgcaatcccaccagtcaatccaaccagcctcatccttttatttactcctacattt

SEQ ID NO: 3918 - DNA, 443 bp, Oryza sativa
  unsure (1)..(443): unsure at all n locations
tcagcttcggccagatcgacggcaccctcgccgcctgtcttctatgtgaccaggtatgcccgcctctactcctaggtctgtccgtgcgccgcgcttcggtgccgatcgatcccagtaactcgttttatcccacatcgccgattctgatcaagcgcgacctctttataaggtcagttcgactctacttcatcgcctcaccaggggcacccgccccgactgaatacagcgaaaattatcgcccctgtgtgcatcggctgggcatgtttgtttatatacccccttccggttaatagctgtaaaaagaagaaaaaaaaggagcagtgaaaagattcaatacggcaacgataaggttgtgtcagtcggtcctctggttggaggcagcgctagacactancgccttagctntgttaanaattgggatttgttttctgtggatccttttt

SEQ ID NO: 3919 - DNA, 391 bp, Oryza sativa
  unsure (1)..(391): unsure at all n locations
gtaccttactatgtgaccagaaacggaccatacgtttgtgtaacgtgatgagtccttgtacaatagaggggcatccctccttgatgttatgggcaaggatatacttctttatctacaatcagtactccattcaagccctcatatcgagccagtaaatgcacttacgctgtccttactctgatatcagccaagatttttactcggtgacttggcaaaggagcatacatgaagctcgttgctaatatggtcntggggaggtaccaaagtagcccttcacattcagtatattagcaaccttactctcgagtctgtcgaacttattatgagagagtctgatcttcttggcaaatactgcagcatgatggtttccgtctcagaaagactgctcctg

SEQ ID NO: 3920 - DNA, 446 bp, Oryza sativa
  unsure (1)..(446): unsure at all n locations
tgccataatctctntnttcttggtagccatactctgtttttgtgcttcaatgancatgcacaaccttgattaattcttgggtgatgcttcatattaactgaattcagtagctttgtttaatcatcgcatacataccttgctcgaggacaatgaatgcacctcgagtgttcacacttcatgactttctttgtaacttccagttaatcacagccaatttacaatgcaagatttttaagaacaatatacaatacaattgattcgtctgtgataagattttcttcttagctacgtaagtatggattgtcagactggtctatattaatattgcaggctctcaaacatggaaacacagaagagcgcaccttgactgatgagagaaaagctaagaagacggtatgttctgatctcaagaccatatggttccaatgtataaacattgttgaact

SEQ ID NO: 3921 - DNA, 330 bp, Oryza sativa
  unsure (1)..(330): unsure at all n locations
cctcattatctcccaaacctggacacagcgatccgcgcccgtgtaaaaccgagttacgcacnctttcacggagtcatcccagggctatcagcaacaccactcggccagattactcttccggtcacttttggtactcgggagaacttccgcacagagaacatctgcttcgaagtcgccgatttcgagacagcgtatcacgccatactcggacgcccggcgttagccaagttcatggtcgtcccgcactacacctacatgatgatgaagatgcctggtcctcgaggagtcatatccctacggagcgacatcnagcaagccgtcacatgtgac

SEQ ID NO: 3922 - DNA, 446 bp, Oryza sativa
tctgttcccatgcactatgtgtaaatgataaacaatttcatattggtatatcaagaagcgaagggagaggacgaactccaacagcaggctacgtattgtaccattcctcaagtgggcatgttcacttatccaccaagcctcccaactttgctctggtgccaggccaatacctcctctattgctcatccaatgccaccagtcagtccagtcatcaacagtcttgtgccactcaaagcatgatggattgaagacaaaaggtgcaaacagccaacagaaaacaaggaaccatattgaaattgtgacatatagatacaaacttgagctcctgtacgaaatgccataagctagatagacaaccaaaagaatgagtagctccagtgctttcacaaagtggctccgggaatacatccggtaattctcagcaaactttgcatggcgcacaacaa

SEQ ID NO: 3923 - DNA, 467 bp, Oryza sativa
  unsure (1)..(467): unsure at all n locations
agcttaatggcatatactatcttatgcaatttctngctactaggtgacaccagcttgaacaaaaactaccaaagctagatatatcaaaatgatagagtcttatatttatgcagcatgtatgcatatatacccgggcccctacggccagcttatatccattccattgctactttattagtgcatgcattcatgtatgcatgctacagcactatatatgcatccatgcctttgtcagcttcttcactgtgtacttcagttaactcgatcgtgccccatatatacttatatacacatcgaattgcatctgctnttgcccttatgggtccatgtatgcattgacatctagctcattgctttttccctttctttcttttttaagagcacatctaacacatctncttgctggaaatgtatgcaatatgcatctagaaatgatgtactttgcatcgagtggcatatgactctta

SEQ ID NO: 3924 - DNA, 431 bp, Oryza sativa
  unsure (1)..(431): unsure at all n locations
taaaactcagcctaacagaaactctgtcatatggaaaaagatctgtttggttntattatttaatacatctatcccataattgtctcagaatcggagagcccttttccttcagggatggatcttggatttgctcaaccggcactggcagactgattggctccaatcttatggagctgctctgttgcctctgccttggctaagatggntactctgtctcaagggctctgctctgggaaccaggatatctcttgattcatgccataactgaactattcggcaatataaagggattttggcaacgtatttgcactttcaagatctcttatattctagaacgggatagtatttcggcatgaattcacgcattctggacatgacctaacacctggatccttgctaaacagcaagatctgaaagccctgtatatcatc

SEQ ID NO: 3925 - DNA, 465 bp, Oryza sativa
  unsure (1)..(465): unsure at all n locations
agcttggtgatttctagcttgcgcaaaaattacaagttgttttaatcaattgtggattccccgcanagaanaaaaaccccaatcatttggggattgtgattntgtgatgattaaacatgctgtatctatatttgtaatgctataaattgtatcttgcatctctaaatttcctgttctattgaacctatgttgtgcgctcatcatgtgcttcagcttgcgtattggttgatgaagatggagatcacagtttcatctcatacagtaaccaccatagggtcataattgatgtatggctttctgtttctgttgtgtttaaattttgaagcttatctttgttcgctgtaggcctcaatccatgcgggatgataatcnagaatttcttttgcagaattgataattcatttgctttgaagatggttaatttgaaatctgtcaagtcttaagcactaatgcgtcattataatg

SEQ ID NO: 3926 - DNA, 438 bp, Oryza sativa
  unsure (1)..(438): unsure at all n locations
tgcacgtggaccacctatcaagtcactagcttttctttactactggtgggagatggactctgtcaatgtgattgcaatcaatgtggccgagtctgatgtgggttaccctatcaaggtatttggcactgtgctggccagggatgagtaccatttcaagggtgtctatttgttcaagcgtgacaggaacaatccacagatcatcacctcgccggtatgttactgattcgttcctcctccttgctagattaatactatttattgttcaaatccatatgccattgccttttcaatccgctgtctgatattctacactataaatgacctgttaattaagctcacattgttaagtgaaatgtggacggttgcatagttccataatggctggtgaaatgcctgatacgatagaaatcctgtntcctggccattaaaatccctact

SEQ ID NO: 3927 - DNA, 426 bp, Oryza sativa
  unsure (1)..(426): unsure at all n locations
agctnggaagtgtgtcttgaagtgagtgagatgatgtccttatatagnnggaggtatgacggttattcaacacgaattgtcggaaatgccccgcaaccgccatcaggagatgatcaggaccgtccacgccaaaccccagcctggacggctgagattntggttcggctgaaccagggggttcggccgaacctgngctgggcccatctggcctggctcttagcccatcgtcccccctggacctcctctatctatttctcaggattttgggttgattctcgggtattntgatgaagttcacaacccatccttgcatggatacacatttctcctcactttagtctagatttcctcccaacatcanggtttatcacctgcatataaatatacaccaacactgtggaatatgtgagattaagcacctatcac

SEQ ID NO: 3928 - DNA, 444 bp, Oryza sativa
  unsure (1)..(444): unsure at all n locations
tgctcgaagccatcactagggcgtaagcaagatttttcatttcaatgtatcttaatttcgccccttgcaaagctttggagacgaaatacacgggtttctggcctgactctctcttggacgagggctgcactgactgccaccggcgaagctgctagacagagcagcagttcacttcccggtgctgggctgaccaaagcgggtgggctttgcatatattgcttcagctcgtcgaacggtgcttggcattcaggtgtccagctaaactttcccgcgccccggagggtcttgaagaagggcaaacctcattcggctgcctttgagaggaattgactgagcgccgcaattcggcctgcgagcttttgtacttcgcgtacgctcgacggnggcttcatttgctgaatggcatcgattntctcggggttggcctcgatacccctttcagaa

SEQ ID NO: 3929 - DNA, 366 bp, Oryza sativa
  unsure (1)..(366): unsure at all n locations
aatgacgtgttatgttggatgccagattctccagttntgcaagcagcgccatcgcaattttggactagctaatgtgcagctttcccagcctctggtccaaaactgtgtggtagctggagtctctgctttgtcaacaaggccagatgaacacacctaacccgtctctctgcgttgtgctgctgaactgcggctatctgtacagaatcagatataatagcccatctaccttaacagtcactagttttagaactataaagctngttatatggatttccaggntattagtactatttgatagtaccttttcttctagttggagtacttgattagtttttgtgccatgatccgtgcaccgggacttgtttg

SEQ ID NO: 3930 - DNA, 439 bp, Oryza sativa
ctttgacgttcaagatcaatccagcacgctcttgtttttactaatgagtttaacatagctttctagaaaagcttgatatcttttttggaaatcttgacaaagtgctacggtgaataaaagatttgccatgcgagtccaagtgcgagaagatatggtaatcacaatttcacaatgcagtaccgagcctaacatggtatctcataaataattgcctataaaaccatgttaaattaaaaaaaaattatttcaaggcgcattgaattgccctactgcccccagaaaaatatgaagctctaatccatgagataattggacaccaataaaacacaaatatcataatgaaaacctgaagaggctcattctcgtcagtagttccgagcatttcatttataagaacttcccgctctgcaggtccgccaaatgttaaacacttctcaac

SEQ ID NO: 3931 - DNA, 386 bp, Oryza sativa
tgtcttggtgttaagaggctgtgatatctatgtctgccctgctaaaccaaagaaaggggcgttctttggcatatacccatggacaattcaaggcatagtgtccttgctctctacaatcatgacaaaaggggacatcctcttctggcgttggaagctcattgacctgtgtggcaaatgctcgatcaaacacatactgattttggtcttgacttccaactaatggtagctgtgaactaagcagcatgctcggaatggaccaagggtgtgcccttgttaactctcttgacgctagaggtggattgagttgaaaactctagttacttgaggcatacccactgacatcttttccttttctctgtaaacatctgttcagggattgggtgaga

SEQ ID NO: 3932 - DNA, 396 bp, Oryza sativa
  unsure (1)..(396): unsure at all n locations
aaaacttagcttatctccgcctctgataagtngatattttctatgttgaggaccaaccgaacttagcaagccaccacagcaacaatgcatatgataaggatattcaaaaaaaggctatgggtcttttgcgcaaagcaagatttgtaatacttttcacaaacctaagacctaacatatactgatcaattttagttccagagttcatattaaacaacgacggttctgtccaccatccatcgtaatcccaaagatagcttaccgccattgagtcgtcatgggtgtctgaggacgaccacctttccgcctctcatgaagtggctccatcagcatagaaatcatcatgcatcatctcatcacacacgaattaagaaattagagtctatccaagtgttacac

SEQ ID NO: 3933 - DNA, 397 bp, Oryza sativa
  unsure (1)..(397): unsure at all n locations
attattcttgggatccggatctgntattcattctatggaacctctttgtggatattcaccagataaaagtcagaatatggttcttatgggtggtttaagaaaatacattccaattacaagaaccttgtttttatggggtaccctttctctttgtggtattccacctcttgcttgcttctggtccaaagatgaaatccttagtaatatgtggttatattcacccttttttggaataatagcttcttttactgcaggattaactgcgttttatatgtttcggatatatttacttacttttgatgggtatttgcgtgttcattttcaaaattacagtagtactaaagaggattcgttgtattcaatatcgttatggggaaaaaggatatctaaaggagtc

SEQ ID NO: 3934 - DNA, 427 bp, Oryza sativa
  unsure (1)..(427): unsure at all n locations
ctaagacaagtcatgtgagaacattatgctctgtttagatatagggttgtaaagttttgacgtgtcacatcggatatacggatacatatttgaagtattaaacatagactaatgacaaaacaaattacagaatccgtcttgtaactgtgagacgaatttataagcctaattaatccgtcattagcaaatatttactgtagcaccacattgtcatatcatggagcaattaggcttaaaagattcgtctcgcaatttacacgcaatctgtataattagttattntttcatttatatttaatactctatatatgtgtccaaacattcgatgtaacaggggtgaaaattttgcatgagatctaaatagagcctaagatgatcacatggtagaataactggttttggatgctgaagctgcaaatcatatatg

SEQ ID NO: 3935 - DNA, 446 bp, Oryza sativa
taagctggagttttgccaaacagactctacatgttattatgttgatagattggattaaaactttttagtacgaaatggtggaaagcttgtttgaaaaagaaatggttgaaaaaattgttattctttattttatttagaaaatctttagatcaacagtttatttcggattttcagtaatgttagtatattctaatgattattctgcattgtgagcccttcacgtaccggcactacatattagaatgttgatagattggatgaaaattgtttactaacaaatgctgatgtggaaatttagttttaaaaagcaaaaggttgaaaaatgtgtgccagccataatgtgggggtcataattatagacggtggaacaagtcattacataatactataattcggacgtaattatgtctgggatgatcactatcatatccgagagtcgtacaaat

SEQ ID NO: 3936 - DNA, 465 bp, Oryza sativa
  unsure (1)..(465): unsure at all n locations
agcttatagcctgctattatacctactcacggttcacggtatcttttacggtgtatncgncatgttgatgtcacattcctttttttaacaaaattaatgtcgtggtaaaatatagcaacttgaaatattccaatttcctcttagcttgccatgcatattttaggaccaaaaaagtatgtgatatctgagtatcacagcgctattacatgtagttaccaaacacctagttaccatatgcaagtatcatggcatttagctagtgtaccaaaatcttagtttaaatcattatacaactggatggtctccanagcagacagcgaacatttaaaatgatgaatgtattgtccgcatctgaataactgangtatttggctaatgcataaatatcaatataaaccccatcgttttggtggcatatatntacaaacgaanaatacnttgtcaataataattttatatgcacac

SEQ ID NO: 3937 - DNA, 437 bp, Oryza sativa
  unsure (1)..(437): unsure at all n locations
attacatgagcaggtctccgagcattcgaattggcttcttaggtggtgtgacaatggatatgtcagaggaggcatgaaagaggcaaggccagtgagtcaccactccttgaatgacactgatgctggtccatccaggactcccaaaaagaaagatgtatcatcatcgggatcaggttctgtgtctaaggaagttgcaggatgacgatcaaaacgagctctgaagcgtgaagctgctgataaggcagctgctgaaaagcacttgaagcacctncagaggttgggcctcatgaaggcacccgaagcaacagctgaagcaactccagaggttgaacctcagctgaacgagtgattttcaccaacttctgtagataatggtgctgtgaagaaaactgcagccctagggtcacccgaataatcttccattgtgaatgactgga

SEQ ID NO: 3938 - DNA, 372 bp, Oryza sativa
ctgcagctttcttcttgagccttgagccttattaccttatttattaggacttctacggtttatttctttattcttgctcgagccggatgatgaaaaattctcatgtccggttcctttgggggctggatcttaaagaattcacctatcccaataacaaagaaacctgacttaaacgatcctgtattaagagcaaaattagctaaagggatgggacataattattacggggaacccgcgtggcccaacgatcttttatatatttttccagtagtaattctaggtactattgcatgtaatgtaggtttagcggttctcgagccgtcaatgattggtgaaccggccgatccgtttgcaactcctctggaaatatta

SEQ ID NO: 3939 - DNA, 448 bp, Oryza sativa
  unsure (1)..(448): unsure at all n locations
tcgcggccggggggtcttcttaatagaagggacatttgtctataagcttgtgcctgtttggagagatcatcataaattattaaagtatgccgttcgcggtacataaaatactcagccagggctgctcccgtataaggagcgaggtattgtaatgtagcaggggaatccgccatttcagctactacaatagtgtattccatggccccctcttcatggaaagtagttactacttgagctacggaggatgctctttgaccgatagctacataaacacatattacatcttgcccttnttgattgagaattgtatctgtagctactgctgttttgccggtttgtctgtccccaataattaactctcgctgaccgcgcccaataggaatcatcgaatcgatagcaataagccccgtttgaaggggttcatatacagaacgcctggaaattatac

SEQ ID NO: 3940 - DNA, 404 bp, Oryza sativa
  unsure (1)..(404): unsure at all n locations
agctntgatgtgtgttcacttgtcaacgaatattaatgtctagcgtgatggatatccttgtagaccgtagaggctgagtagttacccgtgcgaatgtgtctgctcacaaacattgaaaacatacactcaaacactactactaaaataaaccaaatttttacatccatcaggacatggaaattttatttttattctttttcaaacggagggtgtgctctggacggccgcttgaagagcctccctatttccgtgagcagtctggacttaattatcgtgatgtacgtggaattgaactctttaaaaaatgcgtgtgggttatctacactcagttatattcgaattaaaagcttttggaagtcaagcattcaaaaatacagattctgtacaggtggaattgcgagtca

SEQ ID NO: 3941 - DNA, 439 bp, Oryza sativa
  unsure (1)..(439): unsure at all n locations
tcatcttagaaccatcggtgaatatcaatcgaccttatctatggtcgattgaacttgtcgtcgaaacacattgcaatcattagtagagtgagaatgagaatcatgccacttacaatatgctcgacgtttcaactcttcttgagaaggtatgacatggcctttaggtaatctaatttgtttctcttgcaaaagataatcaaaaatcttatcacacttggccacatcaaaactatatttaacctcactttgccgatctttgcgaggagtcgacattatgttggaacagacaaaaggtttatttttgttagtccatgaccattcagcaacataaatatcatgatcaccctcctcctcactatcactagcctcagggtaatcaattacatgtacattnatgcttttgtcaaatggtctagcaaattttttattatccttaacc

SEQ ID NO: 3942 - DNA, 441 bp, Oryza sativa
  unsure (1)..(441): unsure at all n locations
ggcagttcgggtatgctgttcgctctctcttcttggttggctttattttcttcttacagatcccacaactaacatttgctctcttcgtccgttttaccttacatccagattcttgcggctcactgttcgatagagcgaaccgtgcgggcccgtcttgacagatttaggatacatcttcgagccaaggatgatgagattggccgcatgagtttggagatggaggccctcgccaacaccctcaaggaggtgaaggcgcaaaaacaagcgactccaagccgaactggagaaaggaagagaggccagagctgaggtcgatcgccttaaggccgaactggagaagggaagagaggctagagctgaggttgatcgcctcatggccgagcttaaaaaggagaaagcccattcngctgtgctgaccgactattacaatcttactgagcc

SEQ ID NO: 3943 - DNA, 459 bp, Oryza sativa
  unsure (1)..(459): unsure at all n locations
ggaactataaaactcagcttggagaagaatcttggtggagtcctggcttatcttcaattgagcgcctgtgaagatggagccgtaagcccgctagtccgctgctgtttatttttgattgtcaggccttatgtgcctttgtaataatgtaaatattatcgacataataaagatgtgccttttgtatcatgtttgtgtggtgtaccccggcttttcctaggacggggattaatacactagcgttcgggaaaatgcaaattttctcggtcgcgacacagatgggcgcgattggctgcaagtcgtactgaggtgcagcttggcttcgaccatgtttctgacagctttcgcacttcttgatttgctcaacacatacttttagtacggttggccaatatatgccctggcgaaatactttngatgcgacagttcttgctgctttggtgtgctcacacattccttggg

SEQ ID NO: 3944 - DNA, 421 bp, Oryza sativa
  unsure (1)..(421): unsure at all n locations
gctntcatggtgaactgtagcttgcctctatgttgcaaggatagcacggccgccggggtgcaccgcccagaagagattgttccagtcaggatctgtgtatccgaccgattggaaggattcgagcaagctctgctggatgttatccttgatcagcattggcacctggacagagaggtggaaatctatgccggtgctagtggcctgcatgccaagtgcgtgctcggttcctggtatcatggtctgtgaggcagcaaccatctcgaacaacgggcactcgccatcagaaaacgggcctgcgccaacgattatngcaccggcaccatcctcaaacagtccatgtccgacaattntgctttcgtctggggtggagaaacataccagggttagctctgagagtgctacaaggacgcgtgcaccacgg

SEQ ID NO: 3945 - DNA, 445 bp, Oryza sativa
tccgaggtcagggttctgggattcaatagcgtatatatttctggacctaccaaaatggatgaatctcggaaatttcagatgaaatttgaccgaatttggtgcaaaattcaaacaatcattaaaaaaatgggtaaaatgatcagagaaccatgacaagcatcaacacaccaccaaaataccatttaatacgcattaatgcatagatctaacaaccaagttcataacaacatacatagacttagcatgcaaattcataactgtgtagtccattagtctaattcatcaccatgtctaaggtctaaaataattacagtctatccatacatacacccaaaagaatactaaacatatatccataataaatattagtcatgtaactgtcgtcaattgctactgccactagctccatatgtgtagatgaattcaatcaccatcatacatgcat

SEQ ID NO: 3946 - DNA, 466 bp, Oryza sativa
  unsure (1)..(466): unsure at all n locations
agctnggagtggaccggtggttccatggttttttactcctcacaccgaggaggttgtttcacgtaaatcaccgtgtcttgtgtgcatgtgtttattgttgtttcgctgctgatttgctagttaaaactatcctcaaagttcatggaaagatgaggggttgattgtgtgaaatacgtttgtcggtttgcgaattgtagtttgcagattgaaagtgtattggttcagcccgaacaattattatactcattatttggaattttcattagttntgtcaaatattttaaattaggatatatgcagccttttgaaattaggaacttagcctatcaaatagggaacttagcccttaaataacccanaaattcgctcctatgaagaattgacattaggacattcagtgctactcagattactgcaaccactangctatataccctttcattatttcatcanacataaagctttc

SEQ ID NO: 3947 - DNA, 400 bp, Oryza sativa
  unsure (1)..(400): unsure at all n locations
tccccggatctccctctccgtgatactcttttcgtcgtgctctcccgtgcctcctaccgacgccgcgccgctcgccactagcgccgccgcttgccaccacctccggtcgcgcgccgccgccgctagagtcgccgccgcgctaagccgccgccgccattaacattgccgctgcgtgagccacctcggccgccgctcggtgtccgctaaaccccaccggagcccggttctcctcgcacaccggtgagctatccattctccttcgtctccggccaacaatggtggccgctgtggtcactctctctactcctaatccttctcaactccctccgtaggtgccgncgccgcccgtncgcccctcctcatcgccaggtcgtcgncgacaccttcatcctccgctctg

SEQ ID NO: 3948 - DNA, 456 bp, Oryza sativa
  unsure (1)..(456): unsure at all n locations
agctntgaacgtaaacccagatacaaatctttcactcactgaaaagttaaaacatcaggtactgggttttttctggattggaattgtatcaagataggactaatttgatcaaagtatcaccccagtctcactcctacaagtagtgatgtccttgagccaacttaggggcctgcgaggcaccatgatactgggatctgacgtgcaatcctttgctcatacccattcattgtctgttgccttggtccactggtcttcatcttctctgagcctggcatggttgccagtatctccaagacctactgttgccatggaaataggggcagcggtgagctggttagaccgttagagcaacagtttggtagaggaaggtggcagctgctggtacttgggactgttaattggatggaaaggtggcagtggcatgatggtggaaagcacttgtgcctatgacacttg

SEQ ID NO: 3949 - DNA, 441 bp, Oryza sativa
  unsure (1)..(441): unsure at all n locations
tgcgagtctangactatcgggttggctaggaagtctatctttctcaattctaagggtaacttccgggcatatttgagttgcccttatattccttccaggggaatgtactatcattggtacacgcaaattttgggttttccaaccatttcttttcacaaaagcttgcgatatgaaagaatgggaagctcccgaatcgaacagaactattgcgggtacggagttgacagagaacatacccatcacaacgtctggagcatcctgagcggtttcagcttgaatgtgattcacacggcctcgaccaaagttgttggaagcacgtgaaccttgtccacttgcctgagagctaagacgagactgagttgccgctggagtaagagttctggcaatgctgccattatcatgccctgagttggtgttggtaggattctgacgacactgtct

SEQ ID NO: 3950 - DNA, 380 bp, Oryza sativa
agcttcatcagctggaaggccatggaatctctcatgccttattgaagggcttgtcaacagaagtgaaggttattgatcgtaaccatcattctccaacagcctcagacttgattaagatgttactagaaatgcatatagctatagagtgctccagcttgtaagtgcagcttttctttgcagttttcacttgatttagggtgtcattgcactttcttctgaaattattttgtatcttaagttggtattttatgacattaccctagaaagctatgtttatttagccataccgaaataatgtagcaacatgagtacatgactgtctgtactggtcattcttttcttgttttgtttggataatgaaagttcatcatgttcatgat

SEQ ID NO: 3951 - DNA, 448 bp, Oryza sativa
aaaactcagctgcccaaagaacacgggacgggccattgtttattgtagctgtaacacaaaggggattgatagcatccgcatgctcccctctcctccatttatctcctcacacacacctctacttcaacctaaccttttctttttcctcttgcaacagttgcttctaccctgtgttgctccctccctttcccctccacctctattgcttggtttgcttcctcaaaatctctatccaaatccctcctcctcaccttcctgcgcctgaaaagttggggccaatccggcgcttttatctggtggtgataagctgcacatgagatcatgagactcgaggactcgctcaaatccttgtcgcttgactacctcagcctgctcataaatggccaggccttcaacgacgtcgccttcagcgtcgatggccagctcgtgcacgcccaccgctgcgtgc

SEQ ID NO: 3952 - DNA, 253 bp, Oryza sativa
accgggaaataaactctctccgtatatggaaggagaaaaaaagtactgagtgcatatatacgctaacacaaaaaaggccgagcatgacactattgccaatatatatacgttgacctaaaagattggataagctttgctaagatcactgattcaatatcaacacacattcatatagaacaacaatgacattgtattacatacctatgtccttccatcgtagacaggaatgtaagctttgacaaccgatcttaac

SEQ ID NO: 3953 - DNA, 336 bp, Oryza sativa
tatattggggctcacctataaatacaattattaaaattcgttaacacagttctacagattcgatatgattagagatatatatccaacaaagggacatataccttaactgtggcttcgttgatcaccaaagtgttgatgccggtgttcatgtaaccggaaatgcgcatcttaggtggcacggatgattgtgaccttagaattatatcttgagtggggcagcagaagatcctgccacaaaacaaccctgctgaggcaaggggtgtccaaaacgtacacttccttggccaccgacttccatagcatatgattgcggatagtatggctactcattcgcac

SEQ ID NO: 3954 - DNA, 373 bp, Oryza sativa
cttcatagattgtatggaggaactcatctattttgactggtgtgtcatcgataaggtgaggggactccgctaatgaatcttaatgttgctctacttactttaaacaatgctgagttaaaggttgtacttctgggtggtttcatccaataacccttcaattgttatttggcatataggtcagatctccggacagattaatcttgttagcatcatcactggtagttttgcaatgacatgatggcaatcaaaattgttgaggaatatttattcgagctctatgcctctattgctttcctcctgatatgtgtctcattagttctaaaacaggattcaattgttgttaaaccttctcaaaatagctaacatcactatt

SEQ ID NO: 3955 - DNA, 441 bp, Oryza sativa
  unsure (1)..(441): unsure at all n locations
tgctaatggtntgttttaaaaatatgaatgctcaatctaacatctctcttgcctaattgcgccttggtgatggaaatgctttatgctatcattatcttagacttctttcttggataagaattttggggggacccctatctcgacacttccacaatacgtacaaagaagttagctacagaaaaacactggcgtcttggtgatccacttacaaacattgttcactcattgcttattaccataaaaaaagaatactaatcttattctgcttcacaatgtgtttgatcacattaatttgtatgtctgtaataatggataggtcgattctatgcatttgaaaaggctcacaggttagatccaacttcaagtggccggggtgtccggcaattcaagacggctcttttgcaacggcttgaaagggtatgcatttcaagtacttctaac

SEQ ID NO: 3956 - DNA, 427 bp, Oryza sativa
  unsure (1)..(427): unsure at all n locations
tgacaaggcatttcgaaagccgactcatgttcaccatatgccaacaagaggggtcccaaaccaacaccagattaggtcccagaccatactgtgccaagaagcccaggggtcctccccgacaccaccccggtgaatccacatgtctctcggcatcaaggctcccctgataagctagttactcagccaggggtgtcccattccacccatgtggtcgtacttgttctatgctcggatgaattttccacgggaatcggtccttatatgcgaatacgggacagtgccacacaggcacaacccccgcatcgcgagttttcacaatccattntattttccaacacaccgacgccacatgtcgggttttcaaggcttctcaaacccatttctcaagttttcgacaaacaacggtgtatgtgggatatttggtata

SEQ ID NO: 3957 - DNA, 446 bp, Oryza sativa
  unsure (1)..(446): unsure at all n locations
ngcaagagctagaaggctagcactgaaggaaatttattgtgatgaagttgggcaatataacttgctgttggactatggaaatgaacttacgaagtcaaaccctaggagctcattttatcttagtctagatgacagcaagtttagcagactgtatttctcactggattcatgcaaaagaggatttctcagtggctacagacctgtcatttgcttggatgcttgccacattaagactaagtttgggggtcaattgctgacagctgtaggtgttgatcccaatgattgcattttcccaattgcaatggctattgtggaggttgaatcttataacacatggagctggttcctatagacattgaaggatgaccttggtattgtgaatacttacccttggaccatcatgacagacaaacagaaggtatggtcattatatttgcttgtgaata

SEQ ID NO: 3958 - DNA, 474 bp, Oryza sativa
  unsure (1)..(474): unsure at all n locations
aagctgcctatgctatactaaaggtcgccgatccggacaataagcttccagaaggtttatttgacacattgaaaacccttcctggttttgaggaggtccatagatcattttactatgctcatttggttgccaaccctcacattgctagagctttcgatagacttccatttgaaaacaagattggtttgctatgttcattagtgaaaagttccctggatcaacatangcttcttggatgagttggatagttcttttggtgttatgtgctgctggttggcttatctacctattatatgtaagactttaaactgccaatatgtttgaggcagagaacttactagacttaaaattgctatcatgtgcaagaattaaatgtgctattatgtgtaagaccttcagttgctaatatgtgtaagacntaacattgctattattatgtgtggcttgattatatgncactgggagctatactgt

SEQ ID NO: 3959 - DNA, 438 bp, Oryza sativa
  unsure (1)..(438): unsure at all n locations
tgcagtgagattntgtaatgctgatgacctttctgaacatatgtgcaggaacaacatggacctgcnaacacaaataaaaagaagaacatggacatgtgtgaagacctgaaatatttaatattaaacacctcaaatatcactaatggatatcccacctcatccattaggagcaagccccactccctatttcgaatttcttcaattatcttctcagagtcttcagaccgtttacctccaaatgcaaccatgttatatgtagtcacaactacaccggccattccacggaatttctccttgttatctgatgtaaaacggctgatatgttcatcttttatagttgaccaaagcttgaactgaaatgcccattgatcaactgatacagcatttgtggccaaacatagacaactcttcttgatacgacatgcagcagatacacca

SEQ ID NO: 3960 - DNA, 472 bp, Oryza sativa
  unsure (1)..(472): unsure at all n locations
agctnggaagtagatgtgtaaattgacatgcttgtggggcattanataattatgcacggccagcgattaatctatatatggtccatccgaccatgctgaggccatgcacggttattttcccgggaccaggatgctcattcaagtgagaatctgtgaatcaccagtacagctacagtactagtcgcatttgatctttgattcgatgctttttcagggcaaaacaccacgaccacaacggacacctgcctgagctgnctctacctgaatctctctttactttccatgagcaattgacacccactggctgcattggtcttggtcactggcatttttcactgcttttctcctttctgaatatttagaaatggccttggtctttgcggatctgggcttctagcacctgcctctttctctttgtgccttttgatgtcatggtggtagccacataatttggtcttatatcacacccaat

SEQ ID NO: 3961 - DNA, 446 bp, Oryza sativa
tttgtcccaagctccaccaaaatctagagcgcaagctctctcttatctttcaagatttgattgactcgctcggtctgaccatcagtttgcgggtgataagccgtgctgaaatttaaacgggtccccaattcttcctgcagcttctgccagaattttgaggtgaactgactccctcggtcagatacaatctttttgggtactccatgtaggcacatgattctcgaaaggtaaagctccgccaaccttttgcccgtatatgtggtatgtactgggatgaagtgagcaaccttagtgagtcgatccacgactacccagattgaatcgtgacccgatgatgtacggtgcagtcctgttataaagtccattccaatctcctcccatttgcattccgggatttgaagaggttggagtaaacctgctggtctttggtgctctgccttcactcg

SEQ ID NO: 3962 - DNA, 434 bp, Oryza sativa
  unsure (1)..(434): unsure at all n locations
agctcgncatagttgtactgatcagctaaatgcttactnttatactaagaagaaatcctagtgggaaaacatcaagcttgtatggaagtagacatttaatatatatattcatctcatcaagtcctcagcagataaatatgtagcaaggtgttcatgcaaatactaaactaaccgttaatagctttagcttttgatgacctgatgtcctgactaccttgaaaactcactcctaataaataaacaggttcattaaacaggaagctgctagtctaccttttgttgagcatactcatgttcacaaatgcatccaccaagactgaatgacaatttgttttgagatctacaaacccctgtgtcgccacaatatcatccattgaagaagaggacatatactcaatgcaagcattcctgagtgacgcacaatgatgttgatc

SEQ ID NO: 3963 - DNA, 411 bp, Oryza sativa
  unsure (1)..(411): unsure at all n locations
tactaagcttacttaacccattggcaacatgactgaggagtttgtttttttaatgangtnatcaacggggccaattatagattgcaatatggcataaccacgacgcatcgttatctggcaagccaatggctgctaggccagtacagtccaacgagtccatatccaagctaaagtgctacacgtacaaatcaactatggatacatcaatccatcccgcatgagtcatcacttatcactcataagatataccggtctaatcttttatagatactcatagggcatgtgtacgtgtgtgcgttatatgggtgagtgtgcgtatgcatgtgttcgttccgtgtttattatacacataacggaggctcttatttcttttcttctatgttaagcatgaataatttggactcaaagcct

SEQ ID NO: 3964 - DNA, 292 bp, Oryza sativa
gcttacgtgagaggtttgcaggtatacgagagtgcgagatccttgaaagaagagcatgagcttgagttgaaattaagcacctattattggcttttgctcaaatataataacactgccatttagaacttggaaaaccaccatatcaacaagcaaccagccggtacagaaaagtcagagattgctaaccgaaatcgtgcaatttcaacactggatcaagcaaattcaaccgagaagataaatgtatccacccaattctcaccaccaatcaatgtacacacgacgtattttatat

SEQ ID NO: 3965 - DNA, 447 bp, Oryza sativa
tagaaagcactgtacaagcaaaagctgcagcctaaagtatgaacattatgaacaatgcacagaaaattacaagcttcaccctaaagcagaagccctgtggtcagatgaaaacgatcaacacctctaccaaaatgagagcaacatatttcttgaaggacaattttatgcaacaaacgtgctgacatgctaaaaagctccactgctctgcccacagaatctcactactcccatctcaaaagctacaagctagattcttaacgataaatctaatacaggaataatatcagacatttatagccataattttctccttcccatttgaatcatttgtagaaatataagtgttatatgatcatggtgaaatggtgacacaggccccatgttcactaagcacattatagtatatgccaaattgcatgcacttgaagggagcatcacgagaatatg

SEQ ID NO: 3966 - DNA, 460 bp, Oryza sativa
  unsure (1)..(460): unsure at all n locations
ttggaaccatcggtatacttctatcgtncttcatctatggccgagtgaacctatcattcaaacacattgcaatcattagtagaatgagagtgagaatcatgccatttacaataagcacgatgttggtatttaatacggtcacagataaaatccgcaagcgcacggatataccaatgtagcacttcccctacggagtattccaagggtatcgaatccaagggaacgtgtgtggtcaaatcttcctccagttcatccaaggataccaagcaaaagataggttatgatagagaggatttactagtgagaaggagaaacagtatctagggaaagcttaactctaatcctaatgcaatacttcaggcactggcaacccgctggtccagatgtcactctactacgtatccaacagggaggattaagtgatctcgagggctgcaccacttacaccactaaacgactg

SEQ ID NO: 3967 - DNA, 433 bp, Oryza sativa
  unsure (1)..(433): unsure at all n locations
tancgatcgacattcgacaagaaggctgatggtctttatatagtatatgtgtcagacttattcagctgctggacacaattatggctggtggtgaaagctgcagatattgtacaccacgaatcgtttacaaatcttgccaagttcactatacaatcccttcaataaaaaggtttattatataaaatggncattaactaatatagcttaaggtataaaattgttggaattaatagatgggctaaggcccactcgaagattaattctttggaaaatcataaaagcccacctcatgggatggcgtgcatgaggagtttagtaccactttgcttattctaggagagggggacctccttataagggaggatgccctcctagccacttgaagcatgtgtggtggagagaagaggggaaacacatgcgcactcgcctcgtc

SEQ ID NO: 3968 - DNA, 469 bp, Oryza sativa
  unsure (1)..(469): unsure at all n locations
gcttcttagttggtggcttccttggttccatattaaaaatataaacaatgattntcaaagggaaaattatgacactgaaagatctatgcctttatacagcataatagtatgaacccatcatgtcagctcatgccattcattaatatgatatcatcaatgtttcagatatgggaccatggaagagttgaaggaggctgtgaaacgttttcatgaagccggtatgaaggttcttggtgatgccgtcctgaatcacaggtgtgctcaatttcagaaccaaaatggcgtctggaatatttttggtggacgccttaactgggatgatcgagcagntgttgcagatgatccacatttccaggtgaggttccaccttcccttgcanactatntaattagaattatttgaaaatgtcattcatgaatgttcattatgttaactaagtatcacaacattatgattttcttcatgaact

SEQ ID NO: 3969 - DNA, 404 bp, Oryza sativa
tgtcagttggcaccggcctaagtcacgagttcacattgtgtctgtcagccggatgcaacgggagctctgctgtgcttctcggcgtagacaaaatcggagatcctctccaggagcacgtcgaagtcgtcctgtgtcttgaggaggttcacccgcgtgtaccgcgagatgatccccgccgccagcagcagcgatctcgcggcagtcgacgtcttccttccactcgcatttcacccacgcgtaggctgctcatcaggagagaccatacacaccagacacaacttcagccccgtctgcgttcaacaccgtcgccacctcgcatcaccaccacccagccagtcgcctgaacacgccccgcccccgcagcattcatcagcccactcagatcttctcatttaaactctttc

SEQ ID NO: 3970 - DNA, 459 bp, Oryza sativa
  unsure (1)..(459): unsure at all n locations
gcttccacagaggcaactagacttgcttccttatcatgacctcttatctctgatctcactttcctcagaatctgttgcttcatgactgatctctcagcagactggacgttcttgcacatgttcaacccctgcacgtatcttgataccgctccactgaaagacccacctgctttctcgagtgccacaaatttctcgatgatttgggacgagagcattctttcgatgcaaggtttggttccgaccaccgcaatgtctaccagaagctgcattgttagttcctttgtctttgaagacttgcggtcaagcaagttaaccaatttttcaatggttcctgcttgtaaaaatctctgtaatacaagtgatccccccttcgcanagataatctggtgaagggcatagtatgctgaatccttgagatcgttgatgttgcactgcatcatgtcaattagctcatgaaca

SEQ ID NO: 3971 - DNA, 450 bp, Oryza sativa
  unsure (1)..(450): unsure at all n locations
ctataaatactcaagctgggaaaacgnggcgcaatcacccatcaattcatttcttgtaaaatacaaatactctccaataaacgtcatgaatttgatctcatgaagaccaaaaggcatgtccatcaatgctcataatttcatctcatcagtaataatacacccaaggagacatgataaaagaataacagggtgagaaatactattgaacagacagtggaaccacaaaatggcttgtcacttgttctgcaatgcagtctcatgcacatgcactgcacactcctcttgtgaccataataaaccaagcaaacacttgaatcaagaaaggagtggagtgagagccacagtttcatgagactctnncacatggacccccatacctgctcaacccttgagtgattgaatatggtcttgttggtctctctcatccatcatgctcaccaagatccaaac

SEQ ID NO: 3972 - DNA, 294 bp, Oryza sativa
  unsure (1)..(294): unsure at all n locations
ccttcaaggtgggaatgcgaattgcccaacgcaagtgcgtgccgtgcctctgtgccttttgtcctcgctcacaggctatgaacccgtgtacttagcaccgagcgggcttgcaagcgatgacagaaaaccacgtggatgaaatctttgacgtggcatatgcatctcgaatcgacgagggcatactacaatcatctcttggcgaanacgtacaagaaaaacgaagcagatcagcgcccagaagagactcccaaaaacgaaagtgacgtgtgctagctactgatggacatgatgatc

SEQ ID NO: 3973 - DNA, 425 bp, Oryza sativa
  unsure (1)..(425): unsure at all n locations
tgcccttttagggtccaacgcgatgggagttgtccatttttgtgctgagatggatctactttctttntcatgaattcagatacgcgattttaaacccaaaaaagtttacggattgtttgctaattccaatgatattttccttttgctctcattagcccatattttcaggtgtatctgtgattagttatgagacaagatttctgagttggttttaacataatctaatagcggagaatttggttcagaaaaaaatgacccagtcagagttcagacttcagacttcagagtcgtttttagaggaaacattagcatctttggtggcaccacctttctacaagattgcgggcgtgagtatggtccgttcttttctccaacaagaagtggatgaatattaagattttcatgtcatatttttcaaactatta

SEQ ID NO: 3974 - DNA, 373 bp, Oryza sativa
  unsure (1)..(373): unsure at all n locations
gctgtccccccatttcctgctttctctttttctttcctcctaagggnncttcccccttatcttaactttattccccacgcagatgtggtgatggagcagagntcattgttgtttgttctggtttatgttcagtcatgtgctaagaatnttaatttgactactgggatagaaatgatagatgatggttcttactgtctttgtaaaaggaatatttttccaattggttgttgtcccatcccttctgagatgttactactcatgtgtgcttatttcaccctggcataaccaattttctaccttttccattgcagatctatcttcagtagttatggtggaatttgctaattcttgctacttgacctcctgacatatt

SEQ ID NO: 3975 - DNA, 423 bp, Oryza sativa
  unsure (1)..(423): unsure at all n locations
tctgattgcaaggagttgcgtggactgtcgttctggtcttctatgttnctcggtctggggcacttgtcggcgaaatgacccattccttgacaattgaagcaacagatatcttcccggactcggcattttcttttctatcatcaggttggttattaactcgagggtggaacatagttcctttgaaatgagaccctaggtctcctttgacagtaaacacataatcccatatcagcatcttccgaaagaatcctcttagaacttgtttttattacaaatttctcccattttacatgaatacaaggcactgtcttanacaaaaagggaaggtgcttaacatcggtacattgtatcctcaacaggaatcatccataaacatagcaagctcactgttttatagtcatgaatatatttatttattacatg

SEQ ID NO: 3976 - DNA, 376 bp, Oryza sativa
atcctctaagacacctgatgcatgcaacttataaatctttacttctatggggtttcatatatgcagtaatagctacatctgtatttcaggcgaactatttgttcaaggttatgttcacaatacagctcatatctccaatgatggacaaaacataatatccacactaatttctttaatcaaagattaaacttttgggatgttaaagacccttaaaaacttgatgtgcataaaaggcaacatcaagttgtggataatgaaatggaaaaagtaccccactacactattctggaaatacgaattacccgctcaattaaaaaaccaaatattcttcacccttcatgtttcatactgcacagatataccctgatagattttg

SEQ ID NO: 3977 - DNA, 374 bp, Oryza sativa
  unsure (1)..(374): unsure at all n locations
gacctatgatactcagcttatgctgggagccccggccaacttctttcctttgggggtgcggcgtggcccngcccgagacctatcactcgacccccgctaggggtagaagcgacgaaagtgttcgatgttccacgggttaagcagctctgtgccgtcgtccatggccagcctaacggagcccggccgggggacgccgatcactcgatacggaccctcccacattggtgagagcttgctcagtccagcacgcgtttggacgcagcgtatgacgaggtcgtcgacgcagagtgatcgggcccggacgtggcgctgatggtagcgccgcangctctgctggtaccgcgcggtcctgatgctccaccgcactttctctc

SEQ ID NO: 3978 - DNA, 473 bp, Oryza sativa
  unsure (1)..(473): unsure at all n locations
acctgcngcatgcaagcttatgcgttgccgtaaccgtaaacatagttttntgcgttgccgtaatcattgacttgttaggccgaccagagtcacagatggatggcatcatggcagtatggcacctcacaatcagtacacgatacaggcaaaatcttacacctaaaaaagaagtgtccacctgaagctcaagacgcatttctcgtgcattctatatgcagcagcagaagaactccatcctcccaaattgctcaaacacacaaccactttgctctttgcacatgtcaggtgcagcaagcagcgtcttcaagtcggcgcaagcagcgatcaatctgaactacgtagtacatcgccgtctgcgtatgctaatcctctctcccataactttgcccagtaatcaagcgtaaacctaaccatctcgtacttaatctgaagagaaagacaatgtctcgtcttgttntgaacggcagcaccct

SEQ ID NO: 3979 - DNA, 436 bp, Oryza sativa
  unsure (1)..(436): unsure at all n locations
tggtgcctgatggaaatgaatgtccgctacccttatgtatctagtatttctaancatatgacgctgcttgatgaacgattacgatttggtacctctcttacttattctcgactattgcagaaatcattcattaagtatatataagccaggagaaattgtataatccttatgaaagcattcgagatagctaaattttacactaaaaaatgtgttatctcaagataactacttagagatgctaaattttaaactagaaaatatggtaattttctatatcttttcaagaatagtaaaattatccataagccagatagctagatagatgtgttgatattttttttattggctgctagctgcatgcagcctgcagtcactcatatatgatttgcgtcatgctcatgcatttctcatgcctcctgcagctacctctgatccg

SEQ ID NO: 3980 - DNA, 428 bp, Oryza sativa
  unsure (1)..(428): unsure at all n locations
attttgtttcttacaaacataaacaaattattnttatgtagctgattaacttgatcattctctactttagatgctcagatttgtacacagtactgaggtggttagttgaatggatntttttttctaccaatgctttagaatatgctttctcttgtctaataactattttttattagaccatgccgtactgactaatatatagttcttgcttattgtaattntcatgaaaagtaaagtgtaaaactagttatatattattaattgataaaaaatacgaattctaatttatcgttttagaagaaaatagtgaggcacatctcttcgctaaagaagaagcaacaacctctattttcatattccgataaatattagttacaatatttcgctccgatctatattcatcagtatcatattatgtgttttatcta

SEQ ID NO: 3981 - DNA, 450 bp, Oryza sativa
  unsure (1)..(450): unsure at all n locations
tatccacatcatcaataccaacaacatcaatcttgttatatacatatacacattntatgtacttccgatttccttcaataacatcgatgaagtcatccacggtagcatcctcgcggaataacacctaaagaaaaccaaataactgtgttaatcatgcgtgcacaaacacacacatacacaatcataagagtgcgtgtgtgacctctgcgttgtgaattttgtactcatgcagtatctgatagcagagcttctcatcaacatgggtcaagggaatcatgctgttgaaagaaattccaccagtcttcttctttttgaaatatatctgttcatacaagcagaagtgattaataatagaccagggaaaataaacagtacagatacacatacgaaatgattcattagcaacanagaatatgatttagaaagagcaacaccaactgtataaacatg

SEQ ID NO: 3982 - DNA, 442 bp, Oryza sativa
  unsure (1)..(442): unsure at all n locations
agctctgngaatgggataagggatggatgtgttctcaaatcttcgaggggcattctcactatgttatgcaagtcacatttaacccgaaagataccaatactgttgctagtgcttcccttgatcgcacagtaaaggtttgtgattttgttccttacatttgcttggcatagtttttgcatttctaacatttcttggtctggatctgaatgtggtgcccttatttaatatcaggtatggagtcttggttcccctgatcctaatttcacattagatggccattcaaaaggtgtcaattgagttgattactttactggtggtgatcgcccatacttaattacaggctctgatgatcaaaccgcgaaagtatgccatctgcagcgaattatcgcgtgagtatatcggacattgctacgagacacttcgttgatcatgttgggactat

SEQ ID NO: 3983 - DNA, 270 bp, Oryza sativa
  unsure (1)..(270): unsure at all n locations
ttcgtgattatatctatctcgatatctcttctaatatttgtttttaggtattgctaattatgaaaaacatacctgtgcctttgtttagctagctactgctagggcgcttggctatgcacatcctttctgttttaagtgtaaaggggaagtggattttcatccctgaaagagatatcccctcgctatttgtatgtcacttaaatggatatgaaaaaaatttaaaaaataataagaagatgtattaacctccgtccncaacgagggcttata

SEQ ID NO: 3984 - DNA, 404 bp, Oryza sativa
  unsure (1)..(404): unsure at all n locations
agcttaagttgatgagtgatgaagcacgcaggcaatcactctatacctcaatataagcatatgaaggcacaccagactgaagttaacgagaagagcaagcaggcaggactatgttgtgagtctgccacaacaagaaggcgagaaggcgaaagaaggcgaaacatcagtccacctatacagaaggcgaaagaagactcacaagaaatgcagcatgccaatctagcagcaataaagaagtctgtctgaaaggcaatgtcacaactaaacactaactgcaagagatgaaaaacaccgaattatggcaaaccgtctggcgcctttgctccctggtatggtttctgtgaaccaaagcgcttttgttaagcgtagaagcatacantgacaatttttgcttgccaacaaat

SEQ ID NO: 3985 - DNA, 469 bp, Oryza sativa
  unsure (1)..(469): unsure at all n locations
gacctataaaactcagcttncccctaactttggttntaacaaatctaaaccttctcatatagagacagggatcacagggaagtgcaaaacttcctcgaccacacaccaagcaaatttcacaatagggtaattgaacaaaacatgattaagagtttcagagcccccacacaacttgcatttatcatctcctcccttccagttccttttaaccaactgaaaggcacatggaatcctcccccttcctgcatgataaacaaaatactttatcttcaaagaaactttactcctccaggtcccctgcatgtcggtatccactactcctccaaaagtcaagagtctatacattgatctagaggtaaactgcttcttcttagcatgagaccacaccaccttatcatgctcccccccattcagaactacccattggagtttagagagaagctcagntaactgagctctcccttcttaa

SEQ ID NO: 3986 - DNA, 361 bp, Oryza sativa
  unsure (1)..(361): unsure at all n locations
agcttcatgggttacctcaatcgtctagtgttgatcgggactatatctttacaagtaccctctagactgangtgttcagcctaaaagatactcaatagatgatgagctcagcgtatcatgcgcaaatggatgggcaaactgagcgggtcaatcaatgcttagaaaccattttgcgctactttgtgcatgcttacccgaagaggtggtatcgatggttggagttggcggaattttggtataacacagcccatcattctgggcctgttcggctgcaagggcgctacagcctgtaggaacagtgaagcaagtacaaaaagaagcagtggctggacgcggttggctgcaagcagctgctatacct

SEQ ID NO: 3987 - DNA, 333 bp, Oryza sativa
gttccttgcatatctcaccgtcctatcacaattcacatgccagtgtagaccaatagcagttgcttgccttgtctcgatgctcacgtacaaccggcggtaatataatcgcccgttcacattctctttccttctctacttctgccaactcatttcttttgctaacctgagcattctaccgtcagtttaaaacttctattgtatcctctcatactgcataagatgcgtctggtctgacggtaagattgaatgggctggggggcgatccatggtctcctcatctcgtacgtggatgtagggatccatatgctaagtgggtggataggcggatagaat

SEQ ID NO: 3988 - DNA, 95 bp, Oryza sativa
ggatcttaagcgactgagctgcaagctgtttttttgaacaagcggctgcctcttgatagcacatctccaagatgtccgatatatcgtttacagac

SEQ ID NO: 3989 - DNA, 395 bp, Oryza sativa
  unsure (1)..(395): unsure at all n locations
tatcagagcagnaccctcaattcccaacacttattcaatgcttcactggctgaattatatcttccttgtgcctatctttccagaaatatccatggctggctgctacttttcaaggaaatcatgtcatgcttaactcatgctctaatttaatccgtgcctggttttaaccatgcgtaccttttctctaaaataatcagcttctgtttggctacgtggtaattttgaaatgcatcctatacgaagaccaacttctgtttggccggcttgctgatggcacatcacacatgaatcagatgatatgtgaggtcgatcagtgactaaacgcaaagtttctatagtttaaaagccctccttggaatacactataattttacatgacttttgttaaaaaaata

SEQ ID NO: 3990 - DNA, 384 bp, Oryza sativa
  unsure (1)..(384): unsure at all n locations
actgcacaaactccatggagggctgctcacgatccgtcattcgtgttaccacaagcccttcaatcgtgggaggggacagtggaaatggggaggtggtggtgattggtgaaaaatgatgactcaaagctttaaagtaaatgaggatggcagcattcacagtgaatggaagtagttggaggcggaagtggcgatggtgatttgggagtaaaggaggacaacgacggtccagacgtgtgagggtagatgagtatgcannggtatggttaggctatgatagtttaaaagaaaattcttaccatatataacaggaaccatgagatgctgagcagcggtacaagaatttgagcacagcanactggtttgacanacttgggacaacatatt

SEQ ID NO: 3991 - DNA, 399 bp, Oryza sativa
ctataaaactcagctattcaatagctcgtttgcaagatgaggttgatcttttaaagtcgagagcgcaatgctccaaggtcgttcagcaccaagaagagccaaaatccggacaatgtcgaggaagaggtctacagctcccattcgcatgcagttggcgtcccgccccagtcgatgtcctagccgtcgatcccgttcccgtcccagttcgcgcgtcttcgcagttgccgatgctctccgccgccaaagccgcaacagttagtgatgcagtgaagtggatcgtgtcaatctctattagcagcagttcgagtggtgatgaagaagacgatgtcgtctctgccgatcataggagctgttccaagcattaggcttgctaccctagtttaccgttttgtttactca

SEQ ID NO: 3992 - DNA, 324 bp, Oryza sativa
tccggatggatgacctctcggatgaatcccgcctccagaagtcgcgccaccttcctcgcggatgaaggcttgacgttccggggcctgccgccgcactttctgccggaccggccttgcgcccggacgtacggcgagactgtgctcaaatacctccctggggacccccggcatgtacgccggtcttcaggcgaagacgtcggctgttgcccgcacgaaggagacgagcgcgtcttcctatttgtcgaccaaaagaccaccgattcgtgtggcttggacgggccgtcgcccagtgcaacctgcttgatcgggacctcgacgcacgtg

SEQ ID NO: 3993 - DNA, 372 bp, Oryza sativa
gacctataaaactcagctgggccttgggcaagcctaccgtacttttttgtttttgggtaggcttatttgggctcagtctagcataaacaaaatacacggatggagaggatgaatcgcggtcatggactttccaggcaaatgaagctacacactgccgccggtatcacatgtcatatggcaaggttggtgcctgctgtagggctcaatctgcctgctgatccgggttcggcgaaggggatgggcggactcttgctatggctagatgggtgaaacatgtcacgtttcgtcgatccgggggatgggacgggtacctgagaaatggcttggggtaaagacacttgacaataaactatcaataccgcctcgtatgca

SEQ ID NO: 3994 - DNA, 375 bp, Oryza sativa
  unsure (1)..(375): unsure at all n locations
agcttgggggggaggcaactctcctcccacttatgtaacttgtatcacattgcatattttctttccatgtgcatatttgctttccaattgcatcctataatacttgaaacaatataaaaatttgcaaaatagaaaataccaaaaagatatgataggtttgagtcatgctaggtaagacaagctagttctctttgttgaaatgatgaatagctgctgtgttntatatatcttatatatgggttcataggtaagtgctctctcaaaggttaaatataagtagccaacaattatctgggaacctgaggtgaatgagctgcacttgctaatctgagtctaagtagttggagatatgagatagtaaaaagagttggtatg

SEQ ID NO: 3995 - DNA, 356 bp, Oryza sativa
gatggcgccgatggtcttcctctgattgtgagtacaccacaatgtcgtcgatgaaaaccacaacaaacttatccacggattccatgaacactttgttcattaagttcatgaagaaggcacgagcattggttaaaccgaacgacatcaccgtggattcatacagtccgtatcgcgtggagaatgcggtcttaaggatatcttcttcacgaatacgtaattggtgatatccggaacgaagagcaatattggagaatacagtggcacctttaagctgatcgaacagatcatcgatccagggaagagggtactttgttttgatggtaacattattgagagctctgtaggctatgcacatc

SEQ ID NO: 3996 - DNA, 336 bp, Oryza sativa
agcttgcctgcaagttcttctttgctggatactttgtcattatacttgagccattattgataccactactgtctagacaccactttaccagcacttatggcgagtgacttgggacttttattcaacatgtactatctgtcattggatagtgtaccactcagatacatatatttggcctctcatgctccacatattacttctggacagcacaagataatgatccctgcaatcgctgactacgccatccaagtattcattgctgtgctggcaagaaccttataagagcttggatgggtactgcatactgctgagaatctgatagaagcaccactacac

SEQ ID NO: 3997 - DNA, 394 bp, Oryza sativa
tgaccgaagcaagagcttgtgtaatttatggtgaattatgcaacaaggatgtttgtatccgcgattcgtatccgctcgtagaggaccgaacctgagagcgagaatctcgcctaggcttgtatccgctaacgggaccaaatcatatggtatggttggatgacatgaagagagtatgcatgcagaccactcctacgcccttactcatttggtcggaccataggaaaaagagtgtaataatcatgttaaaagccatcaaatgaaatgaatttccttgtctcatactcgctggctgagacgaacgacacaccatagaggaaaaatccctctggcttgtactcatgatggccaatcctacgaacatggcgagaacataagtttttgggtcgtactcatt

SEQ ID NO: 3998 - DNA, 298 bp, Oryza sativa
  unsure (1)..(298): unsure at all n locations
gcagcagcaaccgaccccacggcggacggaatttttgtcaacaataangacctgggaccaggtactggcttgggggccacaacgaggaatacgaagccccccagaagaacggaggcaggaacaagtaaatccacaaacaagggtagcaccacacctggataggcgacggacacctgaaggaagccacggacaaacccaactgaacaaccacacaaccacaacccgaaagagaaaccgaaacccacccgccaacggacacaaccatgatggggaacgccgaatggaacgaacagctcag

SEQ ID NO: 3999 - DNA, 443 bp, Oryza sativa
acactccacaatactcaagcttggcagcggcgtaggcccgagccctcgccaggaagtgctccttgttctctcgttcgagcacatgtcacacgactgcggcgaccacggtgtccttgcgaagctcacactacgggaggccgccaactcgggagcaccttcagcaccaggggagttgccgctggacaggcagccaatacggagagcgagggcctcctcgttagcctcgccatgctggagtacatccacatgtgcaaagacgacatgaccccttgaggacacagccgtttccggcaccattgtcggttgggcacagaggccgacgtggacagcgtccgacggtatgcgcgctgcattgggcttctcttctaggcggtggacaacatgctcaatatgatgagcacgttggagtatctctggaagcggagggtgccctatcgctggtg

SEQ ID NO: 4000 - DNA, 411 bp, Oryza sativa
  unsure (1)..(411): unsure at all n locations
tcctgtccagtctccactcgcaaacccagctcgccgtctttccttcccttccncaaagccaccgcaatctttctcctcctcgtcggcggcggctgcgaattccgacttcatattctccgagactccgatggccaccaaatcacagaagaagaagaggccttccgggcctaatccttctatcaaatccaaggcctcggcctccgaccaaaaacctaagccttcgaaacccacggaggaggagagggaggagaaagcggcggcggcggtggcggcggataatccgaagaagaagaatgcgaccaacgagatcgacaagatcttccaggccaccaagtcatccggcaagaagcgcaagcagcagcagcagcagggggaggaggaatctgtgcgagccaacaagcccaacgagag

SEQ ID NO: 4001 - DNA, 310 bp, Oryza sativa
cactgtggaattgagctcttttgtctggccgacacagcttcatatgagttatacctaccacccttaaactgatgggctatcggagcgggtatatcaatgcttggagaccttactgcgccgcttagacatgctggccccaccgctggcatcgttgttggcgcttcctgaattttggtacaataccgcctaccattccgccttgggtcttttcacatctagagtatgatataggcatccacctcgtcattttggtgtgttggacggagagacctgcgctgatgctgatttgtgagaatggcgcaaggaacgt

SEQ ID NO: 4002 - DNA, 369 bp, Oryza sativa
  unsure (1)..(369): unsure at all n locations
agctcgttcatggggataatcactagtggcttgaaactgattangtcattanggnattagaagggagaggtccacattgagcgctatgacagaactagttgacacatagcaaatagaggcatgaagtatatttcttgattagctaatggtgattacacgctatccatttttgtaagggagactcaactntgatcccaaggaaacaaactcgaacttattattccatgtaactactgccagccataacattagcttctatgcgcactggcccagcggggccatgaccacaacttttatacacttcaatctttaaataggttctcttggagtttatgcccatccctaagcagcttacacatgttccatgaa

SEQ ID NO: 4003 - DNA, 458 bp, Oryza sativa
ccttaaaactcagctgggtagggtgggtctgaacaagatggagaagtttctttctatgcatctcgtcagatacgtgcgcatgagaagaactaccctactcatgatcttgagttagctgcagcggttcatgcgctgaagattcggcgtcattatcttttccggactcgtacagaggtgtacaccaatcacaagagtttaaagtatatctttactcagccagatctgaacatgagacaacggagatgggtggaattcattaaggattatgacatgggaattcattatcacccgggaaagactaatgttgtatcagatgctcttagcaagaaaggctattgcaatgctactgatggacgacagttgccattggagttatgccctgtaattaaaagattataattgggaattgtcaatataggtcgtgttgcagccttataagcgaagcccactctcatcga

SEQ ID NO: 4004 - DNA, 368 bp, Oryza sativa
  unsure (1)..(368): unsure at all n locations
acctgaggcatgcagctgaagagctgaaagctgcactgntgaaatnttggtgatgtaattgggcaatataacttgctgttggactatggaaatgaacttaagaagtcaaaccctatgagctcattttatcttagtctagatgacagcaagtttagcagactgtatttctcactggattcatgcaaaagaggatttctcagtggctacagacctgtcatttgcttggatgcttgccacattaagactaagtgtgggggtcaattgctgacagctgaatgtgtggatcccaatgagtgcattgttccaattgcaaaggctattgtggaggttgaatcttataacacatggagctgggttctatagacatt

SEQ ID NO: 4005 - DNA, 444 bp, Oryza sativa
tcatcaccttccttgctcacacgttcttgctgctgattgtgtttgtggcatatctcccaatgcgtacgtctcaaattatttcaggagagaaacactctttcatacatggagtgaggagatatatgggtttgggatctcaggatcttacacaacgctgagtgcccacagtttttacattccagatccatctaagttaaaggtgaaaaagggtcgacgccaaactagacgcatcagaaatgatatggatgagtcagaagcacgtgggaggactttacgctgcagcaagtgtgatctgcgcggccatacttactagaaatgcccgaagaatgcagaagttccaagcggcgcagatgctagtccatctggacaggcaagtgatggtaagcgaccacctgttgaatgaacaacatgcaatcgcgcaaggccaatgcgtcgtcgcgcagc

SEQ ID NO: 4006 - DNA, 343 bp, Oryza sativa
  unsure (1)..(343): unsure at all n locations
tgcagcatgcaacttanaggaccttgagctgttttgttaactgcttacttctatgaagctgtacaaaggaggaacaagggatccatgcccatatctccctgaatacttaccatttacacgttctgtgccagcgtagcagacatcgctgtacaaagcggtcaaagctaacgaacagttagatggcatcatctcgcatctcattaagaaattcgagaagcttctagagtcccatgacgtgaagacgcaatctgagaagctaccggagcctcgtgaggccgatgcgaagtcgcaagctattgaggtgaatactcaagacaaggcattagccttaatatatatctat

SEQ ID NO: 4007 - DNA, 414 bp, Oryza sativa
  unsure (1)..(414): unsure at all n locations
nccccgacatggcncacgagagacgcgaggcgttttgattctgttccntttcccgcccagcactctggctcggctggtcaccttgtgcgcccgctggcgacaagatctcgctgcgcacatcggcaaccccctccacgcggacggagaaggagagtcgggaatacccttcttctggatgccacactttttattactgggttgccgagaactgtgcatttgcaggtattcctccctgtcaaaaaaggtagcgactctagtacgaaaaccagtacgaccaaatcagcataatgagagagagagagagagagctcgaaaccattaaaaaaaaaggtcacaaacaggttcaccacagcaacatgctggccaaacaatcagctttccaaaccgacatagcagttgacacacaacccagca

SEQ ID NO: 4008 - DNA, 457 bp, Oryza sativa
  unsure (1)..(457): unsure at all n locations
agcttatacatatgtataataattataatactatcactactagatactaatgccaatatggtccaaggagcaatgtctcactcactgaacaacactgagatgatcgcgtcggatttgtcgtctttactgcagcggcgcttgcactgtcacgacgaccggngtgttcacggcgtgcctcccgtcgctccacgtcaccgcgccgctcctcacctgcgagctcccgggctccatcttcttggctggcgccgcggcctccacccgcaccgtgaagctcagcttctgcccgtcgcgccagaacgccagctgccgctgctgcacggtcacagcgcacccctcgggcgacctcaccgtcgcgcggtacaccgcgcgcccgccgccgacgttggtcaccgtccggatgaagtgggtcttcatcgtcgccctggtgccgtccgcggcgaacgtggcggacatggac

SEQ ID NO: 4009 - DNA, 444 bp, Oryza sativa
  unsure (1)..(444): unsure at all n locations
tgaatgctaanaattagcaatgtgagcatagattgtttttataattagcgatgcaagcatatattagaaatataactcaccttgccggaatagcccanaatgctcgggaccaggattttgtatgttgaggaagaatttgatggaagctaatggtcatgtcatccaagcagaacttataaagcctctcactgtcgcagcttgaccatacaagataaacacagtttccttgcaatacaccttctattgaaggacatgagaaggcataagttccagagatgagaaatgcacggtcgttgccaataccctccaccctctcccatgacaatgtctcaagattcaagcaaaacacacggatggcggtgagtaagccgtcatcataaaagcacccgagatcatctatccacaatagaaataactttccacaggactcgatgatatggtaac

SEQ ID NO: 4010 - DNA, 444 bp, Oryza sativa
gcttcttctgatggtattctttcattttcggtcttctggctggaatcgccctcctgagattgattgccctttgctcggcctggagtaggtctgggagagacatcacttcttccatcgatgacaattctttgctgaggctgtcggtgcacagaatggttggtgctgaaggtattattgctatgatatattgcagagtcaggtgcagcatgaggagcattggtgctgaggatgatatcgtcgatgttgctggtggagctaactagctgatgagacaatcgtaggggtgttcgttggaattctgcggtcttggtcaacaacacactgagttggcaatccttgagcacatggtttgtaccttcgcacagaacacatgtgaccttgctggtgtgactatcacctggtggatggccttccccacaatgatggcagagtgtgagacacatg

SEQ ID NO: 4011 - DNA, 397 bp, Oryza sativa
ctgcagctattgctgagctggaatggcagttttattattttaataagttgaggctgaaccccattcccatgtctgctacccttcttttagctgtaaaagagctaacctttccttcttcacaaaatctactttttggctggaaaagagctaacctttctcgtcttcttcacaaaatttactctagtttatactgcacaataccctattctataaaaagaaaaatatttttatggagccatttagtttgtctttcccaaatattcatattttgcttaatttatatcatcaccgttcagttaatacgggtataatttgtcctatggttgaaatagattcgagatgaaaatttctaaagtttgatcgaaaatttcgaaatattagcatagatgagaagtcg

SEQ ID NO: 4012 - DNA, 397 bp, Oryza sativa
  unsure (1)..(397): unsure at all n locations
ncttgattcccgantaacggctgagacgagcggttatatatcccagctggcgagacccttgatgtgtctcgatcgaagtccgggaggcagcaacagcagcagcaatgtccggcaccgccaacgcgacctcgccggccgctggcgctggcacgccgcggtcgcggctgccgccgtggacgcggcacaagacgctggtgttgcttgccggccgacggcgctggcacgccgtttgggacgcggcacaagacgctggtgttgctcctccgtgctcccgccgcccgacgaccttnccttctgggtcgccgccccctcatcgccggccggccgtcagacctccatgccccggcgacctcctccccaccgccggccgtccatagccccacagaggattgagaga

SEQ ID NO: 4013 - DNA, 55 bp, Oryza sativa
ccgtaaccattttattttgaaattatatcaattttgccttatccttatatcctta

SEQ ID NO: 4014 - DNA, 391 bp, Oryza sativa
agcatgcaagcttgtcttggtgtgaggaggtttgtttatttatgtctgccctgctaaaccaaaggaaggggcttctttggcatatacccatggacaattcacggcatagtgtccttgttctctacaatcgtgacaaaaggggacatcctcttctggcattggaagctcattgacctgtgtggcaaatgctcgatcaaacacatactgattttgggcttgacttccaaccaatggtagctgtgaactaagccggatgcttggaatggaccaagggtgtgccctggttaactctcttgaggccagtggtggattgagttgaaaacctgagttacttgaggcatacccgctgacattctgtcctttttctctgttaacatctgtaccaggattg

SEQ ID NO: 4015 - DNA, 436 bp, Oryza sativa
  unsure (1)..(436): unsure at all n locations
tgtagaananagtagtaaaattgtcaacctatgacatttttattatgaaaatatattcaattattgatttgatgaaactaatttagtattataaatattactatatttgtatataaacttaatcaacttgaaacagtttgactttaaccaaaggcaaaactttttatagcctaaaatggagggagtaactacctacattcatttggagcatgtggaagagccatagcacttttagtaaatccagctgtggcaaaaccaactggtcattaatttggagcatgtggaagagctatagcactcttagcaaatccagatgtagcagaagcaactggggatctatcccattccctggaatggtagtgatgctcatgtggtgctcagatatagttgtacaaaacaattatatatgagagtgcgtacctttaattattcccat

SEQ ID NO: 4016 - DNA, 407 bp, Oryza sativa
  unsure (1)..(407): unsure at all n locations
agctngctaacaactaagtggcaatgagactgttatccttcttcaatattcacatctgggaaacgcataaagagagaaccatggaacccatggcaccatatagcaaccacaaatcgcatcaggctatgactcagaaatacttatgcttgatatataccgagaaaagaattggtgagatcacacccaaattattttccaataatgaaaggagtgagactaccaatatcgttggtattatgctctaaaggaagaatcaaaccatgcgtatctgtcagcacatagagtgatgaagagtgtcatggaacttaaagatgggcacggagaatatgttcttcatgtttggctggagcaggtacagaattataaggagatgcttccactaaagagaatgccctataaataatgct

SEQ ID NO: 4017 - DNA, 439 bp, Oryza sativa
tgaccgatgccttgtgttgggctccgtcgtggtagcttatgttatgttagctgctggtgtggtgttgtagttgtggttttcacccagttttccctaattaattgagcattgtaaggtttggtcccgttttctccttacaataagatatcttcttcttaatataaaacgtcggcaacggcctgaccgttcgaaaaaatatctgactgcttttgcactagtcatactccctctgccttttgcagcagagatagagatgggtgggaccatgggaatggaacaggagcccagcacgtaattccaacctctgtcatttgctccttctgctctttatatcaacttttaaattcgtaaatccaaatatataggatcatcaagagctaccatacagtattactgctaagaaagttccataagaaaagacataacgtttcaattctca

SEQ ID NO: 4018 - DNA, 419 bp, Oryza sativa
  unsure (1)..(419): unsure at all n locations
gcttagtaaattatttatggtttaagcctactttctggtatgcccgtgtgtatgagttcgtataattcagaggagctttctatttaccccgacgtggtagtttaggtgactaagcgtgtccaatacaatgttattgtgccacgtggcgggttcccgttgtgtccgccaccacagtgttaagtttaaggcgtgggcccgcgacttaacggttctaggtcatatatcgagtatggcttacgatggagtaacacatatcatgctggtgtaaggctaaatcatgaatttttggaaagtttttgtgtgggtaataaatcaagtacttatgtatcgcgtgccatgctcttgcatgattattatttcgcatcatgtgggtaaagtgtacanactctgcagagtaaaaactaatcgattaaccgtgc

SEQ ID NO: 4019 - DNA, 443 bp, Oryza sativa
  unsure (1)..(443): unsure at all n locations
tgaatgctgtgaataaagaaatttccaaagtattgggcattcgccatgcgcacactgctntaacagatgtgcttaagtccctagaagacacatggttccaccacacctggaaatatatggcatatgtggtataaaatccgagtaaataaactcataaaggatttaccaaccgcctgaaaaatgaccacaatatataatcagcctaagccataatattggtcaataaaaatgcacacttacgtggcaaaaagcaacgatattgtatccaatcaattgcttaaaaacccaaacagcaccatgactatattaaaaagtcagcggngcagctatataaagctttactgtttgacaccttttaagatgcattgtaccaactcctaaaaagttgagtaactgcggtataaaaggattttaaggtattgggcacttgatcacgcgcactt

SEQ ID NO: 4020 - DNA, 347 bp, Oryza sativa
  unsure (1)..(347): unsure at all n locations
agcttgagccacagaaaatgccacggtggattggatttcctattgtaagctgtggagacatctcagccattattcgggcacctttttggaagaagtttaataatttaacacttttatcaattactttaattattntttataaggatgataaatgagaacatctgagtgaatgaaagtggaccaaaatatcaaataatcgaaacccatttacggaggattaaattatattatcaaatctctccttttttttggcccgtggttgggtaattgaacggctgagatcagagagtgaaacgaacttgctcgaactctctttctcacgtgtgttcatgggcccaaatcaacag

SEQ ID NO: 4021 - DNA, 449 bp, Oryza sativa
  unsure (1)..(449): unsure at all n locations
tggtgactaaacagnttaaattgaatgcgcattatctatattatgtttttctaatacactactgctaccttgcgaaaaggaccagccattcatgtatatgtccaatggaccaatgatgcaattttcacgtggtcgataccaaattatcatttgttttgtttatagcaaacaaatccctagcttaattaaatgctaatcaatccagcccctctgttctctggttcattctacatttgtcaacttattaaaggtaacaaatagaaaccaagagtactctcatgtcacagggttcattactcagccagtttatcacaaatatgcacgtgcatccttcaattgcttgaagtcaaccatttcattcactttgatgttaaaataaatgttagcttgagaaataactggatggttgcttttatgaaacattgaacattatagattggcaaaatgaa

SEQ ID NO: 4022 - DNA, 461 bp, Oryza sativa
  unsure (1)..(461): unsure at all n locations
agcttgctcgggcaggggcacaatgtttctttccaggacgagaggattcgccacctacgagagcctcattgcctttctgggggcgtgccttcattgacttttgactcaagcatcgaccctcactcgagtttagttagcctatatgctgttgaaaaaaaagcataattgatgttgagtttcttactagctctatgcacaaaccatttaggagtacatatgccatactaccacctgcctagcttctcctagcctccttgggagggagtccatatgcagaatgcagtgcatgcagccactcctgttagtacattnttgccgtcggctgtttttactgcgttcttggtaatatactgattactactattnttggctagccagtcaagtatatgtactgattagtagctagtacctttttgccactcaagtataccagttatactgatgatgttttaccagctact

SEQ ID NO: 4023 - DNA, 406 bp, Oryza sativa
  unsure (1)..(406): unsure at all n locations
tgctcacttaccgatcaaggtggttggagttttattttngcacgcctaanaaggcctatgtttatgagaggatttgatccttctatgtggcatgaggtaaccctgggtcggctggggaaaggctttgtcgcgaacctctgacaccggccagtgtctagagtaagttcgtgtcttgtgggtaaagtgtacccctctgcagaggttaactaactgttcgaacagccgtgcccacggtcatgggcggatgtgaggtggttcccgttgcgtagatttgtttgcctgtgctttgtgaaaagttgttgtggtgtgggaatcgtaaccagaatcagcctatgtggcagatggacgacctgagtggtcagaaacgaatctgtgtgattcgggatgtctgcgggcatcatagact

SEQ ID NO: 4024 - DNA, 432 bp, Oryza sativa
  unsure (1)..(432): unsure at all n locations
aaagggaacaaaaacttggttgttgatcaggacaaaagggaacaaaaacttggttgttgatcaagagttgctattgtgctgtatatctcaaaggtaaggcgcaaggtatatgtactctctctcagattaaataatctttggcacggtggcttacccttacccttaattcccatgagacactgcttctccttgccttgggcggntgaaagacagaataacaattagagcactaatcacccagtctttattcaacttttattccgaaagttttcaaatgaatttgcaaaagaaatccaagttcctcatatgattcactcagcctctccaagtgtatcaatatgaattcctcaccattnttgcccttttgatatctactctannggttgatatgtggagcttggtagcgatcaaacatggtatacttgcattcac

SEQ ID NO: 4025 - DNA, 447 bp, Oryza sativa
  unsure (1)..(447): unsure at all n locations
tcgggacctattcgcatagaactttaaaaaaattctacaagcttcatactttgtccgnttgagataagattttctggggttggttctagtgtgctcctggttgtgaaaaaaatatcaaaaaaaaagttgtgcctctctcctcagcactagagagagcaagcaaagaaaaaaaagaggatccagcgagcacaccacatgtacaggaggttctaaatccgagcagatgtaaactctatgcacaaaatatattccaagatcattatattcaccaaagatgtgaaatataacattggttggatatggcaaatcagacttagcaaataatttctccttgaaattatcgagctcacaaaaatcatcaaactgaacatagcccanagtatttaaagaagatctcaattcacgctcctctacttcattagcaatgtgaacaacatgcttaaaatc

SEQ ID NO: 4026 - DNA, 379 bp, Oryza sativa
acagctagtatagtaaattggtaagctggatcttgggatgacatatcatccatctctaatcggtgttaacccgctaacatatctaatacgctgttttgatcagtaacatggatcctaaagcagataaatgggctctactggagaagtgatctttgctgggtcggccgaatttcacaatagtcccgttccaaccgggactaaagattacttatctttagttccggttggtgttaccaaccgagactaaagatcattcttagtctcggttcatcccctgtcagaggcatgtcagggggccaaggatctttagtcctagttgatactaccagacggtgctaaaaatcaccaccttaatcccgggtggtagtaccaaccggga

SEQ ID NO: 4027 - DNA, 264 bp, Oryza sativa
tgagctacctgccgattatggagttagccccatgttttacattgcagatttaaagccatatctgggagaagaagatgaattagtgtcgatgacgactcaaatgcaagaaggggaggatgatgaggacatccctttcaacgatacaaccacgcctattgcacagcaagaacctatgactacagctcgagctcgtgaacttaattatcaagtaaaggcattcctaactaatcataccaagtcttctcagaattgggtgctacaaaa

SEQ ID NO: 4028 - DNA, 400 bp, Oryza sativa
agctcttatcatcgtataaaacttcttgagcttatttcctttatagttacctgcgcgggttctcatgtggattattcaaactaccgtctctatagtctctttgcatcgtgaatctacagactgtacttgtgctcctatcacaatcttgcattgtgtctctatgctgtatatttctctaaccctgtgtcgccttataccctcattgggcttcaaagctttgttggttactgtgaaatataaacatgacctcataaacttagttatcgagaaattcattctctgtttcttcccatcgcacgttcattcatgcaacaagaagggggacggctaatgggcgggcgaccgtcacatcattcgcctccgtctcttcctctacacgcacgttatttcttccctccga

SEQ ID NO: 4029 - DNA, 455 bp, Oryza sativa
  unsure (1)..(455): unsure at all n locations
ggacctataaaactcaagcttgttatggacatggagttgcgtaccatgggttgttttatttggtctcaggagaacggagttgcanaatgatttgacagccgatgaatattataatctcatggctgatgaaagggaagacttggttcaatctagattaagagcccttgcaaaggttaccaacgataaagaacgagttgctcggcattacaacaagatagtggtgtccaagactttttcagaaggtgaacttgtgtggaagctgattttgccgattgggacacgggataacaaattctgcaagtggtcgccgaattgggaaggacagttccaaatctataaggttgtgtctaaaggagcttacatgttgcaaggactcgatggagaagtttattgacgagcgctaaatggctagtacttgaaaaaatattacccaagtgtttggggtaatgcatgat

SEQ ID NO: 4030 - DNA, 413 bp, Oryza sativa
  unsure (1)..(413): unsure at all n locations
agcttccccttgccgcttttcaacccctgatatcaaaggtggataaatacctcgcgggatggccagcccctctcttaaactatgctggcaggacaatcctggtaaactcagtacttgactctctgccgacctatgcgatggctgctctgttaatcccaaaaggcaccctaaaggccatggacaaacgtcgacgcgcgttcttatggacgggagaggaatcatgccatggctcanaatgcctcattgcttgggatttgatctgcagaagtaaaagacactgtggccttggaatcacacaccttcagacgccaaacatatgtctccttgtcaagatgctattcanggtgtactcacagtcctccccctggacctcctggatttggagagaacatgcggattctcatcttggatct

SEQ ID NO: 4031 - DNA, 440 bp, Oryza sativa
tggtgtgcaagactacatgaattcaatatctgtgacttctagaccttatattgacattataattgaaattaagatactgcgaaatttagacagcgacatcgtaaagcgatggttcgatttctggacagatacgtggaaaatttataggttaaaaactggggaactaatggtgtgccgctagccttgcctaccatttagcagtagtacatagcttcagaccctgtttagatgggaataaaacatttaagtccctatcacatcggatgtttggacactaattataaatattaagactattaataaaacctatcaataatcttggactaattcacgagacgaatatattgagcctaattaattcatgattagcctatgtgatgttatagtaaacattctctaattatggattaattaggcttaacagatttgtctcatgaatt

SEQ ID NO: 4032 - DNA, 463 bp, Oryza sativa
  unsure (1)..(463): unsure at all n locations
agcttcaaattcttatattttgaaacaaaactaaccagcagcatgtatgtatatatgctccaactaatagctgagtgagcatgacgtgatgatcgaaccaaggacagatcaagcgcttcaaccccatgtattcttctttctctcagtctcagtcatcttccttcccctctccccttgttctctacggtgatctagcaatataaggcggagggccacgttgaatcagtccaatttgaactgaccacacgaggtatgtgcaatcgtagatgttgcgtaaccatcgatctctcccgtcgctgtacacagctactacctccatcccaaaatatttgacaccgttgactttttaaaaagtggttgaccgttcttcttaatcaaaacatntaagtaattggtaattctttttctatcatttgattaatggtaaatatactnttatatatacatactagtttacacatat

SEQ ID NO: 4033 - DNA, 435 bp, Oryza sativa
  unsure (1)..(435): unsure at all n locations
tcgattctgcggtgatgcggagccgcatctactccttttgtntaattgcattggggattgaattgaattgattgttcgttcgttgggtgaatccaatcacgagtggaacctgcggtttgagtggaactttcacaaccagattccgcacgttctactactatatcagtattagcttgattattgggggggaagtgagtagtggcgttgaaattgtggtcttcgtagttgcgagggcgccctcatgatgggtgaggaaaggggatctgctacccattataaaattaggattggatactttctgcttcggcacttgtcattatcactgtttagttgggggaatcttgcggatgttactttcatttggtgttctctcattcttcacgtatgcgtgaacatgcaactagtagtactactagtagtggtattcttggggga

SEQ ID NO: 4034 - DNA, 416 bp, Oryza sativa
  unsure (1)..(416): unsure at all n locations
agcttgcaaccaaaaaaatgttcttgtcgatgtctatccaccaaagaagtgattaacaggaccggccagttctatattattgaaggccggggatccacaacacatgcattgatcagtgcttacacctagatagacgcatcacgaggtgacgagtgatgaaaagtgtcaccaccctattatctgccaactttattgggacaacaattgattaaatggtctacggcggaagagaaaatcttgatcaaacatatattgctcatttgcacttcaggttcagagattcctaagtctcaacatacatataaacccatatacgtgatacgaatactgaattgcttgctcttttcttttcccatttttaatccaagaacaaataaatctatctgctctaaacaagccgaanaaaataacatttg

SEQ ID NO: 4035 - DNA, 424 bp, Oryza sativa
  unsure (1)..(424): unsure at all n locations
tgctggtggcggcatgacaccagngatgctatgatttgtggcgtgnggggggcccacaaagggaggggagatgggttacagattatatccatgcatgaatttaaaatggttcacagttagtgaaaaaacagacgattgacaaatagctagcccctaaaaatagatattggttacttgtagttttaagaccgcgactaagcagtttcaggaccttacatgtcgtgtaaattgtacaccttatatgtgaagacattgttaacgccaaaatttggtaagattctttagtggattaggttaaggaaagagcacaatcaatcgatggaaacttatccagaagagaccgagtttaagaaagaatcgtgaagaccatggcatggcagtttttttctatctattaattagacaggaattgggaatttctttt

SEQ ID NO: 4036 - DNA, 453 bp, Oryza sativa
  unsure (1)..(453): unsure at all n locations
agcttggcttcagtggaagaagaggactaaaatgagatagcagcaacatagtttggtccaaaatgcaatctcctgtcactaggagcctctgtatntagatataaataaactagacacaaacaagtgaacaaccctgatgcttaatggggtaaatccaacagaatgaacccaaaagtctctgcaaataacaacagagcttgtcacatgcattacaggattgtctcacagttcaaatcttcagcaattccacaaagaaacatcaaacatattctgaacattacattgcacgaacttcctccgagatgagcctcaagcagaaggcggccgcagatcgtaacattccttggccatgcgaatacattgcaaccaatgcatcacctccacattagggtccttctccagaacaacatctctaacagcaatctggatcgcaccacggtacaatacaatcct

SEQ ID NO: 4037 - DNA, 447 bp, Oryza sativa
  unsure (1)..(447): unsure at all n locations
taatcatagntntttataattgtgagtgtggcagactgtctttgatacatcattcttgacatggtgcctcacttgagtagcatatcatgtttatcaaaatttgcctttaatgtgtaaaagtttcagatcttcttaaattctaaatcaattatgcttgcattgagttgttatgattatcaagtgaagaaaacaacacttggttaccatgatttaatgatgaatggtatgattggtatctcaccatgtctgatattttataaggatttgtaataaaagaaatgtttggttaccttattagcaggcttaccagaatgttttgatgaagatcgaaagctaaaactgattaacatgcgttgcctcaaattccctatcaattgtgatggttattatgtgagacgatggagtgacgattcagtactangaggaggaaagttgggatgggtcatg

SEQ ID NO: 4038 - DNA, 474 bp, Oryza sativa
  unsure (1)..(474): unsure at all n locations
aagtcacctgcggcatgcagctgctaatggaggactaggcggcttatattttctacttggtcttctntgacttagcattcttcattggagccggagccgatggatctacacccgatgctctagtgtttttcttttaccggcattggctggttctctaatgagcccttggagaagagttgaagtcttgcgggcatgatagccgatgacagggggagatggcccacctccatttggaattagacctgtggcatactctatatctctgccactattgctctggtgtggaggagaagattctgttgtctgcaaaacataagggaagattagtcaagttatgaatcggctgacaattggtcaaatagaactaatgaagtcaaggtgtacctgatggataatatcatgaaaaagatctgtcatgtacatagaagccgattgatgaaacagatgcagctttcattcaccccaccacctgtc

SEQ ID NO: 4039 - DNA, 421 bp, Oryza sativa
  unsure (1)..(421): unsure at all n locations
gcttctagagtcacagnngggtgctgtagaaggagcataatcnttttactatttttcttccccggngagcctcttacatccatgcaagagctgcccacacttctggagagccaaatagtcattcctattaacatctgtacttcctacacatgcagaaagtatgttttgctccctgcgatttgtaatgtacataattaccattgcacctttattttggataacttttttatatgtattttaatggtcctaaactaagctatataaactctttctaaatttttatttctattgtagcatgaattactccgcattctttatccactatttatccactgcttcatggatttaggggcacagggacatacacacgaaggtaatgctaatatgtggatatgataatgaatcttctgtcagcattttt

SEQ ID NO: 4040 - DNA, 446 bp, Oryza sativa
  unsure (1)..(446): unsure at all n locations
agcttgatgtttcatatgtgagaataatatgtttcaatcgtgattaacatgtgtttcaccattntgataatctgaaatatttttcatttaataatgaatcttttttaagttgcgatgaaacaacggtcaaaaagattttcaagtaaaacatcgaacgccctctatttgtattctccgcagatttaggtcatacgaataaaatatttatgccacaataaatatatccgtcacgtgattgattgctgtccaagaaccggaatcatttcgatgcctctactgtcttactcaacctaactgcttttggctatcctgtgctactggctagtactgctatattgtgagctacgattggtgagcggctaccacaccaaccccatctncatatttcttccagaccgatcttcaccgccgtttttgccttccctctcatcgtcatcgttactctc

SEQ ID NO: 4041 - DNA, 440 bp, Oryza sativa
taaacctaaatgattcacgtcattattaatttacagtctttggatcggtagattagatggcatctacaccgttggatgaacaaaactcagggtcgaacaggcctatatgaatataccgcagcccagaagacccaagtcaatctaagacagcctaatgagggatttaaggttcggtgtgtctcatctcctcctcacttcctcttagcagagcagcagcggcgtagtgcggcagaccctagttttcttatatgattgtgtgctttcactatgtaacactactcagtccaaatctgtatccacggacgggattcgctctattcctgtctgcatcattacaaacaaacagttcgcctatatatatttgaatcaacctctcgatcttaaatattatatataacccatggtcacgctcacggtcgcaccgaatatactcttgaacg

SEQ ID NO: 4042 - DNA, 424 bp, Oryza sativa
ggacctatgaaactcagctttgggcgtcactaagaggggagaatattccgtttgtataacggcccgcccactgaatggcgtgggattaacgataggattcatacccgcctgaagtgctcacgtgaatagctccaaagattatgacaaacttgagatcctttgttataccttaaaaaatcatctagcattgtcgggcaataaaaacctgcacgccgaagcaaccagattcattttatgagtgaatagaggagaaccacaaatcccttcatgagcataacccattgcaactttagactgattggcgctctaacacctagacagcacaccttagttcatcgtccaattaagcatactacaacgctttatatattaatatccgagaagccgagggtgagggattttgtatatactgatgcacatcata

SEQ ID NO: 4043 - DNA, 302 bp, Oryza sativa
tacaaatctgatgagctcgtgtagctattcagcatactggcataacgggccccacgctgccacgctctactatatccacgctgcccagcggtgcccatctcgatacctccttgtccttcacaccaccgcgcctcactagcctcgtgccctcgtagctgccctcgcgcgccaacatcatgccgtacgccatgaacatgatcaccagcgtcttacgccgatacctcagctgcttcttcgacggatcaacccaccgccgccgccgcggcgccgctgaacccgtcctcgccgagctacttacacta

SEQ ID NO: 4044 - DNA, 437 bp, Oryza sativa
  unsure (1)..(437): unsure at all n locations
tataaaatacatanaaaactcatcgtgactcattttttttcttaatcaaactctacagaatcatcatcatgcactctctgattaggcgaaataaaagtaactacttactttgcatcatatgcctctaaaactattatctctagaatgattagtttagataagcttaacttttgaaattcatgtagaacccaatttagctttaatttgagtaaatttaagttctgtaagatcaccaaaacatgtattttcatgttatgaaataagattatatacttactgtgtagtaaaagtctctaaatattcatataaggatttactaacatagagcagccattaatttgtaaaacttgtagaaaattcatttttagtccaaatgaaatgaacaaagtttctatagaaccagcaaatagttatcttcaacatagtaaaattaaatt

SEQ ID NO: 4045 - DNA, 421 bp, Oryza sativa
agcttttacacagtgaactattttagtggagcttttaacccgcataagtaggattgaatcaatctattccattggttacagaggaaaaaatagttcatcttacatcctagcgatattttatttctttaaacttttgttcttctctacatacaagtcatatttcactttgacacatcaggagatgaaggtcaatgatatataaacgaatacactaaattccacgacctgcatgtaaatgcctttaaggtgtcaatacaaaatcaataagcatttcgtataacgatatgattagaaatttcctactaatttttattttaagactcatattaacttggtatttttcttaaaaatactggaggatcctacgcataagaatcactatcttacatatgtatatttggtcaatatagaaaggtgatag

SEQ ID NO: 4046 - DNA, 445 bp, Oryza sativa
  unsure (1)..(445): unsure at all n locations
ntgggttagcatgcatagactgaataatattattgtttctatttttataagagggtacgatgttatatcatttatcgntctatgaattttactttgagcctttgaatgcacataaaacaagagcgcgtggaaattgagggaaaaacaagcggaatctgcaaatcggatggccgactttataaaaaagaatcgggaggtcaaatgtttcaattgatcatatgtgagacattaagttctacatggtgaaacaaaagaagatcagtgattgaaacattaaaaaatttgtgaaacacagtgaagacacaagttgacacatatcgccattacttatgaaacattgacttttaatagtctcaaacatatgcttttcttttatcanaatataatcatacgacatcttattctacaaaatttattagaatgaatacaacgatatgatcagatc

SEQ ID NO: 4047 - DNA, 265 bp, Oryza sativa
  unsure (1)..(265): unsure at all n locations
agctntacctagtcagcgcagtccggccgcgtcatcctgcaattgcaacgcacgcgagctatatagtaaaaattaaagatagtgaagctagcaaataactcactcgataatctgtccaagtgtgatcgatctgattaacaatctgcataagtatattactgctgattaatcaatccgatttaatatgatcgatcgatgatgtgtgtcggccttcgtggatggaccggatcacatcggaggaggggcggatccgacgtgggtgcag

SEQ ID NO: 4048 - DNA, 215 bp, Oryza sativa
  unsure (1)..(215): unsure at all n locations
agcttaaaacctcacgcgattatgtccccacttaacccggctccatacctcccaaataaccagcaaatgcgaagctccccgccgcaactccaccccaccctnctacccatactgaaccccgttctctcctaccctaaccactgccgcctacccctcttcgctcacctctggattacctctcgcgcatgccgctcgcaaaagccgtcagcccacca

SEQ ID NO: 4049 - DNA, 419 bp, Oryza sativa
ctggagaagatgtcttaagtggagtcctggcttatattccagttgagcgcctgtgaagatggagccgtatgcccgctagtccgctgctgtttatttttgattgtcaagcctgaagcgcctttgtaataatgtaaatattatcgatataataaaaatgtgccttttgtatcatgtttgtttggggaccccggcttttcctgtgacggggattaatacactaacgttcgggaaaaggcaattttcccggtcgcgacaatagggcatcttttctgcagggggtcgcctgccgtggggatcttttcactgctccatttctttttcttttttttcagctggccggcagggggtcgcctgccgtgcctcagtatgggatcttttcactgcattttttttttgcagctgaaacggtaaggcggata

SEQ ID NO: 4050 - DNA, 404 bp, Oryza sativa
gaagagatgcattcaattggaccattcgtttgaatcccaacaccgcagtgaaacagctcgaagctctcaagttttctagcagtccttgccacttcattcagttcctcatatattccacattttaggagtatttccctgtagctgctgttttcttcgaccatccaagtaattaactcaagtgtggatacccttatgcatggaaaatcagtacttggagacctgtagacttctaatatcttcttaagcttcttgatgaatgtgtgcacagtaagattggcatcttttagtgcagaggagaaatcactcgttgcgttcggggacctacaaatctgcactgcgaggcctataaagctctctagtactttgccttggttgatccacaggtcatcctttacctacatata

SEQ ID NO: 4051 - DNA, 238 bp, Oryza sativa
tggaggtcaaactccctcccatggatgacgacaagggtgaactgcctgcctagatgccaaacttctctacagtcatgcggcgacgctggactagtggtcgtctactatctcggacacaacctgctcaggataacttatgcggcagtgtacacatgcgattttcagcgccattacagtggtgcacggtgcacgggatcagtgacagagcgctttttaatcgcggtgatatcctccgagc

SEQ ID NO: 4052 - DNA, 378 bp, Oryza sativa
  unsure (1)..(378): unsure at all n locations
taaaccatntcgttacatcacacaacacagcctcatctctcatgctgtcatgctcgtggtgcacctagcaaatcctccctccccatctgtcttactcctctaatctaatccacctccccactaattcaccatctgtgtacactgccacagcagcagcagctaaccactctcactaaaaactatagcagctgcagtaacaagagcagcatcacccaccttcttcttggtcaaagccattcattccaccactcacccattcctcccagtataagccaaaccaatccatagaggaggaagaggaggaccacgtggcggcacacctaaactttgtgcagtgccattcacgcacctgcaggtttcagctttgccacattggac

SEQ ID NO: 4053 - DNA, 444 bp, Oryza sativa
  unsure (1)..(444): unsure at all n locations
agagtcacctgcggcatgcaagctnacataaggcaacgaaggatcttgtgtactatgagccanagtgtgttactgggagttctcaacattatgatcagtgctcgaacttataaggttgaaggccatatatggatggtctgatagtagtttcaatatcttactacattgaaaatgatgctaccaaagcctaactcattaccttccaacacatgtcaagcgagaacatacatctatccctgttctcttggtctagaggagattcatgcgtgtgtgaatcactacatcctatacatgaaagagtactactatgttgataaatgctcattatgcagtgctagcctggagaaatcactatcaacactaccctatatgttgattttattcataaagatgaggcatactcattgacgatacaaggaaaaccccttgctggtatgtgtacct

SEQ ID NO: 4054 - DNA, 414 bp, Oryza sativa
ccttagcttaattttatatgtggaaatggaaagtggaaatgttaatgaccccttgatcatgagagtatgaaagatatcttacacaagtcacacaaatttgacaaagttcaatataatgtcaagcagtcatatgcatgataagggtgatcaatgatatacttacatatggccttggtaggtataagataaagtcaattggaggatggagcttttaaaacaattttatttttgaaaataaattcccaagagtcataacaaagttgcaaggattcctttcatcttaatcatctctcataaagcaatcatttagatgtataaggttccctaatcatgcgatggtgttcacaagcagaagttcagctgagaataatgaatatacaagatcggtcacatgaagaatatcattatttggaa

SEQ ID NO: 4055 - DNA, 345 bp, Oryza sativa
  unsure (1)..(345): unsure at all n locations
agtcacctgaggcatgcagctngccagctacgtcgtcatgaaatgaagcaagataanaagtatttgatactctccttagccttaggaagtttggtacagagaggtatgaactagtactgaacagtagttgtagcatcgagttcatcatcaactganaacaaaaccctggttgaaacaagcaatgcatcanagtgtagattgtgctcacagctcagctacatgaagcaagcggttagcagcaagcatcacatctgcgttggtaccatcttataagtcatcaacacaccatcatgtattagcaagtgcaagcttgggtattagctacggctaccgncatcaccacac

SEQ ID NO: 4056 - DNA, 396 bp, Oryza sativa
tgtccacaatttacgggcatcggatcttttgccctctcaaataatagagcgctctatgcataaccttgtcttttagctattttcatcttgctgtggttgtttcagtattttcattgtttgtaggctattgtatacgtagaagtaaatcatcagatgatattgtgcaagctcatcatatcgttcctttggatgaaattacgagagttttgtgttactagtttcttctattcataatgattactcccgtgtcaacgcttagactcagtaacataaattttatcagcaactacgtcttgatcagatttcttaaaaccaggcactaacaatttcaaattttaatgatcagagttgagaagttaaaacgtggatttggcatgcacgtccctgaagagaaaa

SEQ ID NO: 4057 - DNA, 443 bp, Oryza sativa
  unsure (1)..(443): unsure at all n locations
ngctntgccgtgacgcgtctcatgtgtngngacgaggctcatgtgttgtgcattctcggagtgcgggtaaagtgtacatccactgcagtgtgagtaaaccanatctattcgaatagtcgtgctcgcggttattgagcaccgggacatgtattacacttggctagactctaaattcttaacttgtgtgggaggggatattgcatgatgaattnntatgctgtggagccacttcctgagaggcgggaaggtggacgtcctcagatnaccatgacgaatcaatggcgggaagctatccttgggatcacaatggatggtggacagaaccgtcgttgttaaatacaaactctggactanaattgatcagcaatgctggtctaggctgtgaaagaatacaaacttgtttgccacagaactatggcatcttgactccccttatatgcatg

SEQ ID NO: 4058 - DNA, 403 bp, Oryza sativa
ttgaatgagctttatgttgaagaggaggactatgagagacttcgtgaatcggttgatatgcatgacaactttgatcagataggtcttgcccaaaaagtaaagcgattatatgattgtactgcttattgatgttatttttccttttttattttattttgaataactaatggctggaatgccttgatcagcttgagaagcatgaattgcttgagatgaggaggatcgctgcctacatttacaagaaggctggcagatggaagcaatctattgccctgtcgataaaagacaacatgtacaacgattgcatggagacatgctcacagtctggtgaccgcgagctgtcataaaattgcttgtctatttcattgaacacgtgtcaattaagcccataaatttctatttt

SEQ ID NO: 4059 - DNA, 233 bp, Oryza sativa
gcttgcccagagttggacttgggtcgttcttgatggccgccaaacccgctgtgaccaccttgagcagggccgcgtccaccaggattggcgttgccgcggccgcggccacgttgccaccattgccgcgcccacgcatggcggcgttcgcctgtgccatcccttgacgaagctccaggcgttgctcgaagctgatcagttgagtgatcaactctgagacagagattggttccacg

SEQ ID NO: 4060 - DNA, 401 bp, Oryza sativa
tcaacttctaaagcccctatgaagaccacagagactttttatatgcttttggagaagaatgagaagcaaaggggtgagaaagctctcacccaaagaaaaagaccaagatcaccttctaaggaaggaattgggcattcaccgagaccatcgcattcaccttcatatcatcatctacaagacatggcatggggttcttattcaatgccgccaccggggtatccttatccttattatataccatggggggcaacaccgcccatgttcaaccatatgccttcaatgcaattcaacccaaggtggggaggaccaaaaatgcgcattcatgaaccgttgtgttcaccacacaatggcccgttttattggatgaaccgggcccatgaagaaaagaaggaatggaaacc

SEQ ID NO: 4061 - DNA, 289 bp, Oryza sativa
  unsure (1)..(289): unsure at all n locations
agctntatcctgtcgaaatggcgctccatacgccgcactnggcgcacgtaagtgtccatctgcgggtcagagcaccggtactccttacagaacctggtaacgaccagctgggagtcgcctaacaccagcaggcggcggatccccagtccagctgccaccctgagtcccgcaaggagtccctcgtactccgccatattattggtcgcccgaaagtcgaggcgaaccaggtatctgaggacgtctccgttcagcgaggtcaacgtgacccccgcaccggcgccctgaagag

SEQ ID NO: 4062 - DNA, 398 bp, Oryza sativa
cttgatgacttgcgaggacaagctccaccgcagcccgtgccttgaagccgacgacgacttcacgggctcgccgacctcctccttcagcctctccagatccgccgtcatcccgtccagccgaagcgctgaagcatctaagctcccatagttaattttggtaattaatgacaagcgctaattgtggactaaccgttgctattgaaataatattttaagttatgtccacgtcatgtgtgcacatggatgactatcgatggattaaaatttgatggcgcgaagcgaaaaaaagaaaacggtaaaactagtggtttaattttaaaattgatcgacgcgaagggcgagcaaatttgcctagttatttgttagtttcgccggactatcaaagggggttatgacct

SEQ ID NO: 4063 - DNA, 276 bp, Oryza sativa
  unsure (1)..(276): unsure at all n locations
tatattttggtttagttctcggtctattacatatttactatgacgttactgcattattgcagtaatgtcctatgtattatacagtaacgtcatatgttactgtacttttacaacaatgttactactagagcatagtaatatgttatgagtttcgatagtgaaagaatattagaatgataatcatatntctttctcataaaatctttaaaacaaatagtatcattagatgaattggttagaagaatgtgctntgaactatgaggtcatgggttagtc

SEQ ID NO: 4064 - DNA, 402 bp, Oryza sativa
tctcgtcagctaactttccattgatcacatgaactgctgttcctttctgatgcatgcatgccatcaaaggcattcttttatgcttaccaagctaagtaggattctttgtttaattagctacaggattctgttaactgaataggttccttcccttgttgatttcctccacctaattactactctggaaaagaacaaagagagcaagtgttcatgtagactgttgtagaagagaatcattggactgacttgtgttgtagggggattatgtaagcctaatcattttaggttaaatgaaattggactgaagttgctgtgttagctgaaaggatcagcatctctttccaacaaggcatgtggcttgaccttgaagtggtatgtaggacgattagcagagcagatgga

SEQ ID NO: 4065 - DNA, 428 bp, Oryza sativa
  unsure (1)..(428): unsure at all n locations
atcttaagcacctgggctgcagctatgtgattacctcattaaactttggtgaanaacctatatgtaatactcatacaaagggaaaagagtattatatgacgaanatatgttattctccagaggaagactactctcctgaatcctgcaaattnttaagtcgtctcataccaattccttcgacacatntaaagaatgtggagtatggcacagattttgtgaataaatcagcaagagtatcacatgacatagttggcaagatgtctatctctccatggtgctaaagctcatgacgatataaataattaggagcantatgctttgtgatattgctctaatataaccagttccatctgaacacacaagcgcattatctcatgataatgttgtgattcaattaccatccacagatgtatatgtgttaccatttg

SEQ ID NO: 4066 - DNA, 400 bp, Oryza sativa
cttggttactaacatcagtggcacctgtgtcatgaactctcttcctcatgcgctctgaacgtaacgttatcaacagtgagaggagttctggcgttccccaagtttttagaaagagaactggttgagagacccccgtcatctcaaccaagttttcacaatacacacacacttgagctcaacaaatcatttacctgcgcctcggcaaatgatatatttgcccttcgcggcatatgtttgcctcctgctcgaggacttaaataagaaccactgtacagaggtaccacctttgctagacaacctactttgcaaggtctgtcctcattctagaattgcgggcgtactcgctcgtttgacataagtacttcggcatatctatttcgactgaacagtactaccaccc

SEQ ID NO: 4067 - DNA, 378 bp, Oryza sativa
  unsure (1)..(378): unsure at all n locations
gcaagcttgatattataataaagaaattccaaagtattgggcatacgccatgcgcacactgctntaacagatgtgcttaagtccctagaagacacatggtttcaccacacctggaatatatggcatatgtggtgtaaaatccgagtaaataaactcataaaggatttaccaaccgcctagaaaatgaccacaatatataatcagcctaagccataatattggtcaataaaaatgcacacttacgtggcgaanagcaacgatattgtatccaatcaattgcttaaaaacccaaacagcaccatgactnatataaaaagtcagcggggcagctatataaagctttactggttgacacctttaagatgcattgaccaactc

SEQ ID NO: 4068 - DNA, 114 bp, Oryza sativa
ttttttttttattccaaaactaacttgaacaataggccgcttttgtgctaggtcgtccttgcccaaatcccattggtcaatatttcttggggggcccactatccaaacccaacc

SEQ ID NO: 4069 - DNA, 376 bp, Oryza sativa
  unsure (1)..(376): unsure at all n locations
tctgtgagagtaatctataattggacaaagcangctcatattcccgtaacatgaaagcatagtcacctagaactctaatctgtgactctatggaggtgaacgtatacctcgtgaagaaaaaaaaaagtgttacagcaaactacagaatttttatatatggaaaagggcaagatgtaagtaaccacttgcattgggccatttgcagcttctggaacatcatctctttttcttcaccacaagntctttatttgattcctaaagccctctcttggtgggctacctagaanaatgctaatantanntatattatataatatttcaaaacaaatggtaatcttgtggagaggtaaaaaaagatgaataagaaatactgtga

SEQ ID NO: 4070 - DNA, 399 bp, Oryza sativa
tcctattatctatataagtgtaagctagcacgggtgcttgaccaactttgttccccagtctaatgcttaatctttctagcatgtcaacgtcagctaaatttatggttaattaatgttgtcagattcattttatgacatctttcccctctctgtttacctacgagtatatcattggtgtcaagagatagaaatttaaatcaggaagctcaaaatattaatgtttatgctgcttattttgccatccaattaaaaattaaaaattcaaattattggtttgcaaatgaaataacgatattgatttgggattgtattgtggatcagtttggaagctttgagtctggtttcttaatgttgcaatggcccaaattaaaatatagtaggtccggtacaaccagtgat

SEQ ID NO: 4071 - DNA, 200 bp, Oryza sativa
  unsure (1)..(200): unsure at all n locations
gtacttcagactcactgctttctgaagaaaccctttgcagtgaagaactttactttgttgagaatttgctttctgcccactagaaccaagcgttntcttatatgaccctatctgatcctttagattgtccgatgttggctcctcaacatcaacaagcaaatgagaatcaatctccatgatagcatctggtttagagacct

SEQ ID NO: 4072 - DNA, 332 bp, Oryza sativa
cccatttacttttaaggcaccccacctaagtggaccctagaactaatggtccaatgcgactgagtgagagccctaccacatgacctgctccatctcatctctacggaagtatcatttactaccactcaactttcaactaagctcaccataacgagtatcagtttcactctctttgctcacccctctgcgcagacaccaatgctgcaatgctgctgctgctgctgctgctagcttatacctggctggttttgcttctgcaatctggaccacagtgcttgtcatcgaccgaaatgaaaatgctcctgttcactaaccgggcccacttttacctc

SEQ ID NO: 4073 - DNA, 462 bp, Oryza sativa
  unsure (1)..(462): unsure at all n locations
agctntcagggatgtcatcaacaacatctnggatntctacgtcctcgtttatctcccaagctgaaatattgtagtgccaagacataagtntacgtntaacatgatagtggcaaaatcacgagattaccttgatcatcatacatgtcactgtcatcatcactatcatcctcaaaaatgatntcaccatcacctgcattgatactgagaactatatatntggccctagtcgtattgaaagtaaacccatagataaatgagaatgttaccatcatcgcagatgaatgattgtgatggaggatcgacatngntggtaccttcagatattaaacattgattgtctgttgagaaaaacatggtagcgctatattcagaatagaacattaagcaagtgtctgagctaggattctcaccgttatttagtattncttggctcattaggggattctacaccactntctagtt

SEQ ID NO: 4074 - DNA, 411 bp, Oryza sativa
ttgaccatgcaattccttggtaccactactacataataattgacaagaatatttgcaatagtagacaccaaccagatgctgattaatgaagtgcagcgggaggaggaaaagaatctgttggagacttggagtgtactttgcttgagaagatttgcttctgacagatgccatgtgatctctccattactggtcgacgaaacagtttaagggccagggtttcgggttagcaacttgggccaaacggatggcttaattaatggtttgtacaatattgatggttcaactaatgagtactacaatgatgcgtccacacagcacacatgacacatctctctctctacttgttactcttaaaggtgattaagacgagattattctcactgatcgatgctgatcataccacaacattca

SEQ ID NO: 4075 - DNA, 524 bp, Oryza sativa
  unsure (1)..(524): unsure at all n locations
gatctcagagtcacctgangcatgcaagcttcttcagtgatgcgctagtggaggatgatntgccgagatccatcttcgatcggagatcgccggagaaagggttgaggtcgactagctagggtttcttgtgggagcgaagaagacgaagaacgctngcaggcgggaggttntcttcacaataggcagacttcanaatggatccccanaattcctttaaatagacgcactaccgacggtgcgaattccaaggaaaggagagagatagccgccggatatttctgggtccgttacgcgcggcatgtttttggacttncagttaaattcactcgtaacccgttggctttcacatggtgtctcgactacgtcctgtctctacnngtctcacaccgtgaacgacaatagcctcaacacaagaagtcacgaatgtgtacacgagttcattaaacagaaagtcggggctctgtagggtacggttangctacncttacctccgattcatatatatcggatggatacccacacat

SEQ ID NO: 4076 - DNA, 416 bp, Oryza sativa
taaataagtgcttatgctaaaaataggagcaaaataaatttacactttaaaaaggagcaaaatcagaatcgcacttgacaataaggacaagaacacagttatcctttgaagttaccgacttaagatttgaatggtaaagctgtgacatcaaagtgttaattatgaacaaatggaacagagaaaagaaaatagatgcgccgttacatatgactatatcagcaaccatattatcgtcattacgcggaccaagtactgttgaatccaaagaccaaatttagcaagattgataatctgctactacgcttataatacgcgtaaggtaaagagtcccagtcgaggatcctacaatagaactaaactacacagagtgaacaaaaattcgtcaaacggcaggcgatcgagcacgtgtattcaca

SEQ ID NO: 4077 - DNA, 397 bp, Oryza sativa
tccagccttccatgcgggtggtcacataaaaagaaacatattatgttatgcctgcgcaggtgcataagctatcaaattgatgtgctttttacagcagatagctggggctgctattatacttactaacaatgttcgtttgggatttaaaaaaatggtagttgtgtttacagattatgcctatgtctaaaaatgcaggtgggcactttttccgtaaaaccaattgaggaagggaggaatattctgctcaagtaacattccattactgtataaacactatgacggacaaagtagcagcctggtcattaaaaatcttgagaatttgaagggatcactgggtgaagtccaagagttggcgaagtatcagcaagttcgtttggtgtggtccaaaagcaatttc

SEQ ID NO: 4078 - DNA, 432 bp, Oryza sativa
  unsure (1)..(432): unsure at all n locations
agctnggtatgtgtccatcanactngttaaaatgtagtccaagatataccagttgagaatagattgataaggacgatggaataaatcctatganatagttntcatataaacctaacattgcaactgtttaagatttccaagccattctggaagggtaccagtaaagtcattagttcctaatgataaatcaatcaagtttgagaggtgttcaatgccagaggggagaaacccagatatttcatttccgtataaatgaagtcgttggagatgagtcgaanagttgcttaacgaacttggtagatggccttctagtcgattataaagccatcgaaaatattgagcctagtgccagtggctaagctgttcataaactcccaatcttcctttttgtgtgtttggagctgattgccttcaagactttaccaatacagt

SEQ ID NO: 4079 - DNA, 447 bp, Oryza sativa
  unsure (1)..(447): unsure at all n locations
accgcgatctctgagtcacctgcngcatgcagctngccaggtatggaagagtcatggtggtgaaatcactgatttgtagtggagattgcctatattgaaaatatatgtgtatgatcatggtgcttggtgctctgtcacaactgatggcgcggaagctactagattaacatgtgtcangaatgtgcaggccggtgcatatatgactgcagtcgaccactactcacctttgatgtagggtcacggttgtatcacccttgcatgatatgaattgtggtatcttcagttcaaggtttgatgtaaatctagtatttttgagatatttcttgtataagaacttngttggaatacctcaatanatgaatgtacaaattgctctcaagaatgagaaagtggatttattcactcgggtcanatatatatcatctatgctaataatcacctcaaact

SEQ ID NO: 4080 - DNA, 340 bp, Oryza sativa
  unsure (1)..(340): unsure at all n locations
tcaatggaagaaaaaaaaattacataaatttttttttataaggcaaacatgggtgaaaaaaaaataattatacggaggggcgccggccccaataaacaacggtattggctaattcttttgtaaacccgaccttgtctcgggggctcaaaatcgatggggggcggattgggccccctatccaattccacgcgggcttctgcacagatctgtccgtccatcagtactgatccgggggcgtgattgctcatacatggaggattctgncttgataacctccccatcctttccgagtcctttctggatgcttgtaagatcttgggactgagtttttttttttaac

SEQ ID NO: 4081 - DNA, 245 bp, Oryza sativa
  unsure (1)..(245): unsure at all n locations
agagagtgagagagagtgtgtgtgtgatatgacgtgagcttctctcacatgcacatggagggaggggagggcattgctggtacaggtgcaggtggtggccatgaagccggcttcgggttgttcagagcggtcgatgtgaccatgacagaggcgcaagaagcagccaaggagtaccagtcttctcctcctcgccgcgacgtctctactccttccnncgcgcgggtgctgctccgccatggagggga

SEQ ID NO: 4082 - DNA, 408 bp, Oryza sativa
  unsure (1)..(408): unsure at all n locations
tgatggaattaatatagctagctcgctaccaattgaactattgaaggacggcgagccatctgattcactctagagacatacctatctaccagctcacagagatctcgacaactcctcaaatatatgctttctcatctaattcaggccatctattaattggccacttgagagagacgacatagctagctagtatctcacatgatctcaagtctcaacaacaactggaatatgctttgtgagctactccctctgttctatattataggcgtatttggagagctttagattcgaagaaacaattgatgggaatcctgttagtaagaatttgaagaagaaaaaaaatcagcttcaggtttctaatttattntcataatcctacaactataacattttagaatctgaaaaaaa

SEQ ID NO: 4083 - DNA, 295 bp, Oryza sativa
  unsure (1)..(295): unsure at all n locations
tacatatatnattagtcgtagagatgcactatgatattgtctaataaaactatcgcaaaactaaatgttntgcaccatgttaagtgtaagaatacaacatttatgactntaacataacacattggtatgaacttaagccataacatctatagtcttgtgagaactctaatattaaatctattatattttgttacaagtcatgtgttacaactaataatctgcattgtgatgggacgccttaaatatgtagttatgcataatttgagcaaagaactgtagtttcttattacatgtg

SEQ ID NO: 4084 - DNA, 409 bp, Oryza sativa
tcatttgggcgacaatagaccccgcaccatagcaatcaactacagctttctacaggaacagagccatgacctaactgaccttgaggaccctttcatagaagatgaaataaaataagcaatctttcacgcaagatcagataacgccccaggtcctgatggcttcacaggtgcttttttcaaaaaatgttgggagattatacaggaagacgttgttctggcgataaatcaggtggctaaccacgacactcgaagcctttggttactaaactcggcctacattgccctcttgcctaagaggagtgaagcacttcgagtaggtgattatagactgatcagcctcattcatgcctttgggaagctcttctcaaaattattagcaaacagattggcccctaagctcaacagatga

SEQ ID NO: 4085 - DNA, 319 bp, Oryza sativa
  unsure (1)..(319): unsure at all n locations
cgatatgtccgaagacatcaattctaaagcccatntcgcgatccatccgtttgcttcgcgggtataaagtatatccctgagtggaaacgatgtgactaccgtgaccgggtgactttgaaagtagtgagataatttcctgacggtaattaagacaccatantagtaactttgaacctgaggatatcttgtcttggagtgggctaaaacctcgctaacgaaataaattggacgttggactttntgaatatggccttcctcttcacgctcgacaaccaggaccgtactcacaacctgggaggtcgccgacacatataacagt

SEQ ID NO: 4086 - DNA, 400 bp, Oryza sativa
ttcaattcccacacaccccccgaagcattccgggagagttctaagctatgctatactaaaatcaaggaaaaatctcagtactgttgaccatatgcacatgatgagaaaatctagagtaaattatatctgtttttttcaaggaagcttacagcttccatgctcaagaatattactgcacaaaaattggaggaaaagatagccaaaagatatgcacggttgatgatgtttgcaagccaatatttatcatgaatatcactgacactggtaaaaatatagaactccagccatttgaaaatatatgcagctactttgttccctattattaatgtaagcactcctgtgccaaaagaaaaggttgcaagttgtaatcaaaatagtaaaactggtgatcagataaaac

SEQ ID NO: 4087 - DNA, 286 bp, Oryza sativa
tctggaacaaactagttaggactaccaaatcttatctgagatgtgaacacaaagatgatatgacctaacgaccacgtttatagaacttaagaaatgaagagcagaccctgcattcaagtcaagatggtttttgttactcttgttgaattaaaaatattatcccatgtcttatgatacgctgaagtttatgacttacgagatttattatttggataatcatactcatagatggtcaacaagaagtatacagaaactctattggtaacctttctaatcagcttgttac

SEQ ID NO: 4088 - DNA, 406 bp, Oryza sativa
ttcaatttccacacaccccccgaagcattccgggagagtgcagagctatgctatactaaaatcaaggaaaaatctcagtactgttgaccataggcacatgatgagaaaatctagagtaaattatatctgtttttttcagggaagcttacagcttccatgctcaagaatattactgcacaaaaattggaggaaaagatagccaaaagatatgcacggttgatgatgtttgcaagccaatatttatcatgaatatcactgacactggtaaaaatatagaactccagccatttgaaaatatatgcagttactttgttccctatttttaatgtaagcactcctgtgccaaaagaaaaggttgcaagttgtaatcaaaatagtaaaactggtgatcagataaaactttata

SEQ ID NO: 4089 - DNA, 451 bp, Oryza sativa
  unsure (1)..(451): unsure at all n locations
gctttanacgagccgagccgatgtctggggagtgatatatatcatattaatctactctgtcgagtttttgaattgtggtcataatcatttagttgatatgtaaaatccgggtggacattcatccaagtaattaaaatccatctccacatgtggcgctcatnttttttcttccatttgaatattctaacatggaaactagacatagattgatagtaatacatcacaactttcacaacatccaatctgcacaatcagcatgaggaagacgtcatacccaagactatcttcattaaagccaaaaaaaacctctctaaaggaggacacatgntctttccagtntaaataaatcttntcaatctataatatgttaacttcaaaatcatatttctatcatactctgactactcgtcaagcttattttttgatgagactaccaaggctagagtatata

SEQ ID NO: 4090 - DNA, 400 bp, Oryza sativa
  unsure (1)..(400): unsure at all n locations
ttaagtattttcaatatttcaattcttcaacttaatatttcttgaagncntatatttatttccccccccccacgttcttttctcatggccctgcgacgcttgcgtgttacgcatttgtttgctccctcggtgccttaagttgagcgccgggtgccgtcgaagcccgggaccccctgtgttggctcttccgtagaggctaaatttggtcccgccagctggctatggtgcccagcctgtctcaactgtggacggggatcgctggctctagagtttttcggctctcacactcgtgcgaaagtagtcgtccgtgtaaaagggagagatattggaaggaggccactgaaaggaaagagcaaacagaatgtgtagtgtggggacacagtctcgtgggaacctcacc

SEQ ID NO: 4091 - DNA, 337 bp, Oryza sativa
  unsure (1)..(337): unsure at all n locations
tatactgatggatatgggagagatgagactccgatgccatctgctatgttctctgtgtcctgactcatctcagagctatcagcgcggacaatataatcgatatacagaatnatatgcaaagtatgcgtcagagcttacctcagccgtgatggaatattatcagattgcatgctactacgatgcgcacttgtgcttatgatataggccattcgactccagagaatcacaggttgtattatacttggagcacatatactaataagacacacatgctgtcttgtttatggagcaaaatcataaattcgtgaagtgtctcttgatttgacgtcgggatact

SEQ ID NO: 4092 - DNA, 372 bp, Oryza sativa
tcaccccgcgaagatctcctcgcctcggctctactcttcccgctgcgcgcgcgcgcgccgccgacgtcgtagaaatggacccgccgaactagcaacgaatgggatggcgggctcctccccttcccctctcctcctcctcctcctcctgtactttttttttccccttcggatttgtggtttaatgcgtcgatccgttcgattaaaaccacaggcgattcgtcgcggaaaaaaaattaaatggcgtgatttggttcggcgcttgggctggactggacgaggggggaggagagattttgagaaagcgagtttttcgctgacgagtgggagtctgctggaactgtggggcgatctgtatctctgctcgtggggccc

SEQ ID NO: 4093 - DNA, 531 bp, Oryza sativa
  unsure (1)..(531): unsure at all n locations
tcgcgatctctgagtcacctgcggcatgcaagctaattagttctaanattgctagatgttcttatattttagggggggattatgtatcatataacananaatggttctttgggatgcaaagttggatcaatcttttaaatggttttcattcattntcctantttattgttctcctaaaaatataggatattaatgntatcacataattatctcaagtttcgaatntatatttagacttaacgtgtagtatatcntgtgatgccgaaaacacgaggcctgngagatctgcttaactccagtgcangtccaaaatctttgcctttangttcgtgagcgtgccagttgatttgatcctgcnnatcacagaaataaagataaagaaaccgcagtaaatcataaatgataccgatcgccagccgcgatacatatcattatcttcagccatgcatatatgatcgatcgcagtgtgataagcaatatactaatctactcatcgctgagatgtagcatatatatcttatgtcattatac

SEQ ID NO: 4094 - DNA, 432 bp, Oryza sativa
tacggacctataaaactcagcttaagctagccttattaattgttttaagagggagatcatgaatgactcccttccggtcttccggatcatggctcggtccgactgaccagcagtatagtagcaggactctcgccgtgagaaggaagtagagcataaaacaatacaattaatatgtaaatttatactgttcaattgcaaatgaatccattttaagatggctggttagcaaaaaccatcttttcatgcgctaaaatgggatcggagtaatttgttccatcgtaattaataacatgcatgaagccctctggctgtgtgtgtcatgcgcgctttgcttgcaacgtttgcacctaacagttaacaatatcaacttctggggaatgggaatgacatgcatagcggccgcagaaaccattttgcaccagctagcttatt

SEQ ID NO: 4095 - DNA, 239 bp, Oryza sativa
  unsure (1)..(239): unsure at all n locations
tcactatgagcaggtacaataacaggctattagctagctgtaaacatantttaatgagatnaaagatgagagagaagaggagcgggctacagatctgtagccagctgcagcacggtattgaagacgcagtgtgtgtatgacaggtgggaccatatattaatagtatagtaaacaactattgtatgaaatgctattagatggctatagantaatggagctagtagtggcttatactataa

SEQ ID NO: 4096 - DNA, 391 bp, Oryza sativa
ctatgcgaataggtcccgtttcttctcttcacaaaaacagaattttgcaagaggaatttggcgattttaaatttgatgaacccggcaaagcgggggagaatcggatgtaactttttttgtagatgtccgtggatatattataagcctaatttcgagtccgtatgaaaaaagatatgactgttttaaggaaggtcactcgaatcagggttctatttcctttctagtggcggcaggatacaaggcaactcacaaaagctatcggcaatagatcaaacacaaatagaaagtgatttggtgggtgactgcgacggcggtgacggtggtgatgacggcaaaattgatgaaggtggcgatgtgcggtggtggcaagaactcgaaactctaatcgcct

SEQ ID NO: 4097 - DNA, 356 bp, Oryza sativa
  unsure (1)..(356): unsure at all n locations
gcgatctcagagtcacctgangcatgcagcttctgaacattgcattagtcattgataattganacacaacatatatatatatcttgattatatcctatctganacaactgtctaatgattgacaattganacanatcatattaattaatgaaaagtgcatggaactgagattcatggcctnctaatatcatattgtcatatgctaatgatgcttatacctttgtaactgaaattcacaaacagaattaaactagtgactaactaaattntaaccaaaacatacatgtatgaatcaaaagttgcaacgaacttaattaggctgatgatgatcgcctaaccacctcaccctcatggtc

SEQ ID NO: 4098 - DNA, 349 bp, Oryza sativa
tatctttgtctctgcgaagaacaagtatggagacgctgatattcttctctatgtgaaatatattaaaaatgtctgaattttaaaccctatctctgataataaaacaaaatcctatacagtgcatgggtaatcattggtctccgtatgcgtctatgatgattggtcaggaaagacacgggcctttgaccaagtgaattaatatagacgcatcggtggtcgtagctaatggttttggtgttaatttataactggtggcaggtttttccgcttttgtttagctcggtgtaggaaaaaatgttgtgttccaatcttttgtttgtacgtgtatttctacattattcctatattt

SEQ ID NO: 4099 - DNA, 176 bp, Oryza sativa
  unsure (1)..(176): unsure at all n locations
gattcttagagtcacctgangctgcagcttagcngctgatgcacatcagtcttgctaggattcngacatatatattgataggaatccactgattactataagattggcanatcaagatggacaatgaacgacangaacctgtctatggctctgtggtgcattgaatgatgcgagtg

SEQ ID NO: 4100 - DNA, 275 bp, Oryza sativa
tctaagttcgaattgaacttaaaacatcaaatattcttcgtctcggtgtggtggctcttctttggcggcgatagaggtaggagaagagaaattattagaaaaataaaagggaaacccgcgaaaacaaagaacgtagcttatgtattctagtggatgttgctcctcgcctacatgtaagttagacttcaccggttaacgggcatgggtagtgattacctatacccatacccatttaactatcgggcataacttttgacccaataagatactcatgg

SEQ ID NO: 4101 - DNA, 222 bp, Oryza sativa
  unsure (1)..(222): unsure at all n locations
tctaatttacatatatactggccagaacataatcttaattaatcttaattntatgagcctttagagtatggatccattagcaaatgcttagcttaataattcgatcctgggacatgtctntcacaaccatatcaatgtgttaggcagaaaacacacaatatgntgctactagaatagaaaaactgtgttaattagtgcacaacttcactaaaatcaatccaa

SEQ ID NO: 4102 - DNA, 407 bp, Oryza sativa
tatccataagaattacaaaggtgaatagaatcttgttatgggagaataaaaaaaaaacagatttgctgaattacataaaatgacatatgaagactataaataaacatacccgttgcatatgatgttgtgctacctccaaaaggccgagcttgagctcttacttctggggcactagttttatcaggcatcgctcctcctctaccatagtcaacagttttgtctaccacaacaaagtgatcatcgcagctgtagtaagctgcagagtctcgtgctctgatctgcatctgtgtagaatataagagatttcgtaaacactaagaaaataatttgcatgggcacatgaataaacaagttcatgctacaactgaataagggaaaagcttacttcttcacgaactggagctaat

SEQ ID NO: 4103 - DNA, 279 bp, Oryza sativa
  unsure (1)..(279): unsure at all n locations
acaagtatatgcggcagatagcttggtctactggttatggctcatgggtattattgagagctttactgaagtttctgtgcatatgtgnttttaagtcattcattcgcatattggtcaggtatatgcattacttccagtcattcggnttcattgaagaaagctggtccttggcttttggcttccttgttgnttctgtaactgcagcacttgtagagtcccatcccatcagcacacatttggatgacaacttgactggtcctttaaacatcattcctagtg

SEQ ID NO: 4104 - DNA, 399 bp, Oryza sativa
tggacaattagcactagtttcaagtttgtcttactctgcttacaaaaaagattggcccagctattgaaatactcctgtgcagtttgcgtggttaaattgtcatggaagtcgcatcgactgtggaagaatcagtaaacagcgaattgaaatcgaggtttgtgcaggacatgagggggttgagtgacaaggaaaactaatgactaatgaggtagaacaactcgccatccggcgaattggtatcgagggtttggcgccatgattgtgtgcttacactgtcggccactttaattgctcgccgcatgtactggtttgcgaaagacccaactaggacaaggaacagagaaaggatagagattatatgtgaccatgtaagcatccaaagcaggaggtcgacttggc

SEQ ID NO: 4105 - DNA, 436 bp, Oryza sativa
  unsure (1)..(436): unsure at all n locations
tcttccggaccgatatacttcaaaaataaatataatacttgcattatctttcttcccacgttactatttccgacatatatactccaatggtacattcaaatatgtagtatacttcttcttttttaccgtccttttcttccggaccgatatacttcanaaataaatataatacttncattatctttcttcccacgttactatgtccgacatatatactncaatgggtaccttcaaatatgtagtatacttcttaaccgtcttttcttctggaaccaatacttcaaaataaatataatacttccatcattnnttcccacgttactatntctaacnatatatactcaatggtacattcaaatatatactccctttcattccaaatataagtcacaaccacccttaattcaaataccaagaaataantgtatcatatcat

SEQ ID NO: 4106 - DNA, 407 bp, Oryza sativa
  unsure (1)..(407): unsure at all n locations
ccttggaatcaagatcgactggtggggacgattgtcctcttttgttgcacttgcggntccgngacgaagacttgctgatgatcggggaacatgacatgatgaggcgcctcacctccggggtcattgcggtgccgggctggattaaaacatcagccgctggtgccgctcgcccgagctgttgcatgttttcttcgacaggaaagtagtacttggcgtcagcatggtacgattcttggatagtgtacgaggaggagttgccgacgatgcgttgttgtgcccctttgccatcaaggaacttcaggcattggtgaagagtagagggcacaacacggtacttgtgaatccacggtcgtcccaagagagcagagtatgaagtgttggcttcgatcacaaagaagtgcaccttg

SEQ ID NO: 4107 - DNA, 405 bp, Oryza sativa
tgtcctctttagttattgcaatgatgtcggcctgacaattttatggaattgccttcttccttcgacgagcattgattttgaggcggaagaattgagccgtggtgccgctatgtttcaagaaaagcaagcgggcacgctgtctgagccgaatgcgctccacggaggtgagcgcgaggcaacgacctttcagagatgcccgcaatgatctttcaccagccgacagaagacgatcatcctgggccttgtccaattggaaaactacttcatgggcgatcgcgagttgctgacggagctcactgatacgcttggctccccaggaccgtaaggcagcagcagttgcatgcagcttgaagtgaaagcttgtgagcgcgttggagccggccggcactgtcgcccacgcctgac

SEQ ID NO: 4108 - DNA, 263 bp, Oryza sativa
  unsure (1)..(263): unsure at all n locations
gagtgaagggatgaccaagatgtgtatgtgagtggtgatatactatatttatgccctnttatagatatatccaaatgantaatggtgagtatattttgaatttggagtatggtaattgcaggatgaatcagcttctaaagatacatatacaataaatatattgcaatcatcagagattagctaaagaatagtacaagacagatgaaggcatgcatttgtactggatataccacctgaattgaaatgtgatactcctacgatat

SEQ ID NO: 4109 - DNA, 404 bp, Oryza sativa
tggtaaagaaagagacagggtcagaataatgaaatcagttcgtagtttcattgtgataatgaccagaaaaaggctattttctatatggccagcgtggatggacgactcaattttgcgttgtctcttttcagttacacggaagacaacacatctgtaatacacatcattacacatggactgatggacacaacatttacttagctgcgagggcacctcttaacatacacacacacacacaaaaacatttattaagaagaaattgtaaatgtgttgggattaaatacaagacctcgggttaaaatcatacacctcttgctactattctatcaagtcacacgctaaataaatgtgacttctagcaaatcactaacatcactaatattggtggctgcggacttaacatt

SEQ ID NO: 4110 - DNA, 404 bp, Oryza sativa
tgttggagttgtatctctgctataattcacacgacctattgaccgctcttgtggaaactaaccactgtattgcatagccaggaccagcattcgctaattatcagagagttagggaagatgtaagctaggactttgaaatttgaattctgaataagagtctagttgaaagatttattacagactgggtctgatttttctgtcttctgtcccactgaggtttgtacagcacctacaggaatctttagtccacatatacttttcaatttgttcagtgctgtcatcagcctgttttgtaggggtgacagaaaaggatatgtcagtttacagtgaatccacaaaattggatgttaggcacaggtatccaaaaatctcaacaccggtgtaaccctgcttgcttcccttta

SEQ ID NO: 4111 - DNA, 390 bp, Oryza sativa
tgatgccgccaggcacggaaaaagcttcttaattgggggtaccaaaaaaagagcagcggatttagtagcatcagctgcaataagggctcgttgtcattatgttaataaaaagtggttcagcggtatgttaacgaattggtcgattactaaaactagactttctcaatttagagacttaagagcagaagaaaagatggaaaaattccaccatctcccaaaaagagatgtggcaatcttgaagagaaaattatctaccttgcaaagatatctcggcgggatcaaatatatgacgaggttgcctgacattgtgatcgtcctcgatcagcaaaaagagtatatagctcttcgggaatgtgccattttggggattcctactatttctttagccga

SEQ ID NO: 4112 - DNA, 385 bp, Oryza sativa
  unsure (1)..(385): unsure at all n locations
cgctcacctagtcgtgagacgaaccggctgatctccgccatgcaaccagtcagcttttggacgtctgtgtgtgagcttggcggtttcatgttgaggatggcgttgattatctccgggttggcctgtatgcttctttgagataccataaatccgagcaacttccctgacggtactccgaagatgctactttcagggtttagtttcatcctgaaagcacgaatggcttgcaaagtctcttctatatccgcgatcaggtcatccttctgcttggtcttgacgactacatcatcaacataagcttcaacatcgcggccgatctgagttgatacacatctttgaatcatgcgttgataggtntctcctgcgatcttcaatcaaagggcat

SEQ ID NO: 4113 - DNA, 369 bp, Oryza sativa
tgtcaacggcttggcaatgttcaattggcgcctgccgccatactgtattctatcatcaaaccatggccgttccgaggttgggctttgaatttcattggtcaaatttatccttcgtcatcaaaggggcataggttcatgctatttgctacggattacttcaccaaatgggccgaagccgtgccgctcaagaatatgactcatacggaggtaattgactttattttgaagcatattgtccatagattcggtatcccgcaaacattgactacgaatcaaggagctttttttatgtctaaggaagggaagaagtttggtgaatcttatggtattaaaatggtgagttcttctccttacaacgctcatgctaat

SEQ ID NO: 4114 - DNA, 495 bp, Oryza sativa
  unsure (1)..(495): unsure at all n locations
gatctgacctcaatattntcatctacttctatctcacactcaacacacgggtgtattcatagggtctctcttcatgtgcagctttgcttaggttgactctnctccttggtaataacccatantattctctggtttcanaagaggcttcaacttgtgatataataaataatagttcaaagaggtgaacctaacacatcaaattgtgaaccaattaactaaatatatgcacatctgatagagtaaagtctctatacaaaaataatgttacatccgatcaaatgaaacaaaaacttgataggtttagagagttgagagatttcgcttccgcaaagcaattccgagatccctcccttaattgtggagcataaatggcatgtagcagacatatattgtccttcacatatcnacaaagatatcattattaatgtgaagctaactactactatacctagtacaaacttaacaaagtttaatgatccaatgttctgcaataag

SEQ ID NO: 4115 - DNA, 413 bp, Oryza sativa
tgttgaaaaaaataatcatatgaaagtaaatttaaatttttatcctttgatattatttgtatcaaataaaatttaattcctactgtataaattgttgatcaaatattttaaaagttaaatcttaaaagcgtgcgtgtcttatattatgggatggttgtaaaatggacgtatccctaatatttacacagcacaaaaaagtaaacttaaatttctttgtagacgcacggaaaaaatgacaaatttcttcgtagacgcaggtcaacatcaaaatgtcatgtaccagcgattcatggtatctttagtcaatcagattcttacgtgcacaagtaccattgtggtcattggagaaaccaagagcgtgatagtgccggatccagttcctgtgaacttggtgattcgttggtagtatctgt

SEQ ID NO: 4116 - DNA, 416 bp, Oryza sativa
  unsure (1)..(416): unsure at all n locations
cactcgtccgcgatctctgagtcacctgcggctgcagctanagtgcttctgttattaggtgcaggganantaagcacgcatcttatgaagtctcgacgccgttgttctaaaaggatagcgaatggattntccaaactttgctgagaaatngtgttcgatcagtagtgccccagaggatatcgtcaaaaaagtgtgaaatgagctaaggtcaagccttcaatggtgacgaagagtttgcgatgataaaaaccggaagtccgcagctagacgacttctaattcagagtgtgtttagttcacattaaaattttgaagnttggttgaaattggaacgatgtgatgaaaaaaattgaaatttgtgtatgtaagaaagtttcgatgtgatggaaaaagtgggaagtttgtaaaaaaatggat

SEQ ID NO: 4117 - DNA, 394 bp, Oryza sativa
tctttcaaattaatctccagctctcccccaaatagtttatatcaccacttaggattgtgagaatatatagttttagaattcagaaaataaaaggatagaagatggggaaccatcttttttctgattttcactagttaattacttagaagttagaacagctgattcttacactctcactctcctcgatcacctggcctaagtttcttaagaagcatgaatgtgcaatcaattggcctaatttatatcggctaatcgatcaattaaccgatcgatcttgcgtacgtacggccatcgactttcttgatttctttccttcgcaaagcgtgaactagtattggattctagctagctagctactccatccgtcccaaaaaaaaaagacaaaccctgagtt

SEQ ID NO: 4118 - DNA, 272 bp, Oryza sativa
  unsure (1)..(272): unsure at all n locations
gctcgtgaagaccttgagcaaggcaagtcaccctttgatcaattgtctctataatngaaaagtcattattagtttggtggcaactngcactattagaatcacacacttaactngcttggcctcgngttgcgtgccaaaccgacggacctacccagtagtcgcactaatttccgtaggtcgtactaccctgattccttgtcgctccaccctttgggtacctcggtattcgtgctctctgagcgcgtataccaaatatcccacatacaccgttg

SEQ ID NO: 4119 - DNA, 427 bp, Oryza sativa
cggacctattaaactcagcttataattggctttcaagttttgatagattcgactattcttgactgaaaattttctaggtcctctcccttatattcttagtactcttagatctttacttccttgtgagaatgcatggtaacaccaaaggctacaaacctaccaaagtcactcggtcactgaactgaagactacggaaaacagcaatatctacaattatcagaactaatgatatgaaccaaaggacaacccgatataatagcaactaagcttgatagtttttttgacatttttatactaacaaaatgggaacttcaaggaaactgagtcaaggaaaaaaaatccttatgaaaggcatttccgtcattccgtgtttcactgtcaaaaaacaatctcatcatttgaagaatttagcatctttgctgagctg

SEQ ID NO: 4120 - DNA, 386 bp, Oryza sativa
  unsure (1)..(386): unsure at all n locations
gctaatcgtcatcgatggttttatatggaataactcaaccaccacccaatcagtactggaccctganacataaatagccacaacatagaggttattcatataaattcactgatctttatcttacagaaggtgatcgagactacgatatataatcatgccttggagatagctaataaataagcagctttcatggtatgacgtatgtaaacaaatgagcatattaaccgtcaagccaagaaacattagtgaacaccaacgctagcgtaatcaacaactagtaccctctctattgtaatcctnaacagcacatgcctactgtcgtcacatctgacgactactatgtaccaagaaccaccctacgactgccgcatatcaatacctcataa

SEQ ID NO: 4121 - DNA, 406 bp, Oryza sativa
  unsure (1)..(406): unsure at all n locations
tccaaacaattntctttttaatctttttatattgcttattatcattctgaaataacttttcaaaactttgtagtagatagtttatttgtttctctcgaatattatcacaaaatcagacaaatatatcatttattcagtctgatggagtttatggtgacatattatgattcgagactaataagtgtagtttagaatggagaaacttttacatgaatttgaacattttatatatacttcctggttttagaaaactaagtaaagttcaacgaaggacgtagaaaaagagcatgaatatgtgaaaaaaaattctaggcatggtttttatttttttagaaaaacctgtactggattgttttacattttagtattttaagaacttattttataaatagacctctaaaaaaac

SEQ ID NO: 4122 - DNA, 420 bp, Oryza sativa
  unsure (1)..(420): unsure at all n locations
agtaagcatgaagctatatatgcatgggcctgtgtcaaagggatccgganatgttaagatagagctaggcgtagaataatgttgtttgggtgagccatcttatcacatttatataaaatatatataggataattaaactactttactattgtaccaacaaattccatttcataaggattangagctgggtgagagctctaccaaccgatttgcttatctactcgaaagattntcttatctctcactcatttctactaaattacaggcatttctgtagtacagtgtattatgaactacactgactttgtagttacactgtattctgaatttacatgtaatntaaatttgattgattcgtctttcttgagattgaattaaggctatgggttctaatcgtttgtttatatatatcgatttatt

SEQ ID NO: 4123 - DNA, 402 bp, Oryza sativa
  unsure (1)..(402): unsure at all n locations
ggtggtcatggtcactataagaatacatgttgttctttattctagntatgaaaggaagaagtgagtgatttttctctttccaatggattttaacagaacatggggcctattgtaatatatttcgctagcagaacatgtagagggtatgtttaattggattttacaaacactgtttgcattttacgaactctaatcgtgggggaaatagaacactttgatcttcttgttctgcacccggagcagagcaatttcttctgtttggtttgcagcagaacatttcacgtactttctgcttgagtttgtttcgaacgaatcatggcaaagcatggcatgtttttcatcttgttctgcactagtaacaaaacatgtctgtgtcacgtagtgtatgtttgattttgtttc

SEQ ID NO: 4124 - DNA, 250 bp, Oryza sativa
  unsure (1)..(250): unsure at all n locations
tatgcaaattaaagtagctcgcgaaaaatctgtctctgcttaaccatctnctcgggaacagggtagcaacttgctccaaatgaaccgcanatctttaatatttttgctttagcctgatccccagaaaagaanactacgaaaacagttttctctacctggcaaagtaaaattgaatgttgaaactattgagaaactttaaggcttcaaggtattggatgaaantgtcacatgcangggtggatttcagtac

SEQ ID NO: 4125 - DNA, 407 bp, Oryza sativa
tataaaggatgggtccgtaaaactggtcaatgagtgaatgcctataggtgataattttatgcgtgtagtttaggcctttgggctcgctaagcagaaaccctttctccttttcttctcatgattattttgcgtggaaatttagataggtggaacctcccgattggcttacctgtgtaattagctcatctgacaagcacgcgccgaatgatataccaaatgctgtgcgcctgcttagccctcgtggccttgttcctatggggtacctgatgccaagtgttgtacaatgttttgccgtgttcaaatgcaatttgttcatttggggtgctatctagcctgtcgcaaaattcaatgtgctcgtggaggcatcgagtgcgtgctatcgactgaacgaaagttacgaggcagtg

SEQ ID NO: 4126 - DNA, 287 bp, Oryza sativa
  unsure (1)..(287): unsure at all n locations
gatcctctgagtcacctgcggctgcagctataattaataattagtcagttactcatcgtttaacaatagtacgctgttaaagatcacaatggataatccgaaaattgtaaaggctccgtcataaatgatttttntaatccgtaatctaatccataaccctagtgaccaacaggtgggacccacaattccttttctctttctactgaattaactttcttagggaaaagcaaggagagggcccggcctgtcagtggctcagatggtcttcttctttctacgtctccttc

SEQ ID NO: 4127 - DNA, 408 bp, Oryza sativa
  unsure (1)..(408): unsure at all n locations
ntgaaacagatgaattgatagcgtctgccattacccaacagaggttccaacattcaccttggttgttgctttgtacttaaatattttaataatgacagaattttcaaataaaagaaaaaaaagtgaagcctctcttaatttcctttttaaatgtacatactatataatcaccactttcaggtaacaaaaaatgtgccattgcaaagaaacatatacctttatggattttacaagtgcaggagtagcatctgagattttgtatgttacaggatgccatccacgcctttcacgatctttagaagatgatagatcccacgcactgtgtgtaactgacctccgtgtaagctcttcttcaagaccatgttgctgcattcgataaaaataattgaacggtcagatgtctttgtg

SEQ ID NO: 4128 - DNA, 341 bp, Oryza sativa
  unsure (1)..(341): unsure at all n locations
ctctgagtcacctgcggctgcaagctggnaacatgtcacattgagacggtgttcatatacttatcaccatcagctggttgtgaaggctagcaagtgttcctttgccaaacaacaattggagtatctatggcatataattggtgaacatggngtggcaacagatccaacanaagttcaagcggttcaggaatggccggtgccaaagaatctgaaacagttaaggggatttcttggacttactggctactacagaanatttataaggcattatggagttatcactcgaccactaacagagttgctcaaaaaggataagtcatacaattggacagatgctcaac

SEQ ID NO: 4129 - DNA, 376 bp, Oryza sativa
aggaagcggcggtggtgactctttcgccggcgatctccgtcaggaccgccatcctttctctggtgaacggcgttttgagggatcggtgacgaagcatcggaggagcggtgcgtgctgccgggaggttgcgactgtggcggcggggactgggacgacgatgacaacggcggtggcgacggctgtgaggcggcgccgcatcgcgaggggaaccgcccgaagacagcgcgatgaggaagaagagggagacatgggagagggaatgacatgtggggcccacgtgggcccaccatatttattttttagctaacatgtgggcccatgcgggcctcaccattcttgaattacttttttgtgtgtagctgacatatgggcccat

SEQ ID NO: 4130 - DNA, 406 bp, Oryza sativa
tttattgttgctttttctcaaccatggtactccccccttcaaatttgtttcaaaatataaaggatgttataatttgagacaatgtttattctactagttttatagtactagtttattctccaccatccacttttagggcccctttgaatcacagggtagaaaaaacggaggaataggaaaaacataggattctgacaggaattgaagtgtaaaatagaggattgcaaaacacaggaaaaacataggaatggtcgtttgattggagcgcaggaaaaacacaggaatcgaatgagagagatagactaaaaggaaattttccaagaggttggagctcttgctaaatttcctccaaaatccacatgcaatgtgccattccataggaatttcatatgatttggaaagcttc

SEQ ID NO: 4131 - DNA, 379 bp, Oryza sativa
  unsure (1)..(379): unsure at all n locations
agcttctcttactgaagagggganagatngagcaagaatgagtacaaccacagtactcatcatgccacaccgaagatgcataattaatgcaaggtgggtacaaggagataataatatangngttaagtnttgcagtaaacggcatttaatagtcacttnagttgcccaaagctatttgtaaagacgatcctagctatacaatattattaaccaaggccgtgaaccctcacgaacctgccttaacccaaggcctacgatgattcagaccgaactggcaacccgaccctgggtcccagctcgtcccaagccaacccangccaaccatttcacagtntagtntgtgagcataatttaagaatataacactgacttgggtaca

SEQ ID NO: 4132 - DNA, 410 bp, Oryza sativa
tcagcttcaagagaactggagctggagctggaattgtaccaacaaacataccccaattaacacacatctaaataagattgaaggccgtcctataacctcacggtatcatattgtctttttgggctatgttttcgaacaagtctcccaagatgacatttgccatgcatgttctacagaaaacttggtttcttttcttaacaaacatagctgctctttttctgattgtttgtagactactattacattatgagtatgatggcttaaaatataggataaaatatttatgctatgcctgaacgttgggctccgaaattatcatgtcgttcgtacgttctatcaataaggctgagttctaagtgaaaacttcaaaccgcaagttcctcatttttcattagcatgtttcccgaatt

SEQ ID NO: 4133 - DNA, 461 bp, Oryza sativa
  unsure (1)..(461): unsure at all n locations
agctggggccttaacctgcatatatggcccatgtagtggcccagaatgtacttatgttgntagtaggctgaacaatatgtcttttgggacaatggataatatggattttctaggagactntaatntctaccgatcagctgaggacagaaataagccggaagccgacatgaatgatatatacacttttaatgatgtaattagctctcttggtctgctagaaattcctctaaaagggagatgctttacctggagcaatatgcagaacagtcctcttctggagcggcttgattgggtcttttgtacgccccgaatatcgtctggttttaacatattcaatatgcattcaagaaatatattaaagtaagcaattattcagtgaataatggagaataaaattccttataatcatggcaggatatttgaatatctttgcctaaatacttctaaatttctggaatttc

SEQ ID NO: 4134 - DNA, 383 bp, Oryza sativa
ttgtagatgagccactcgtccatcccgtgacgagggcattcagcgtcatattcttgcagcctttccagggcttcaggaattgtctcatgtctggtttgctgaaaactggatattctacaacaaagggcattggttttacctatcaggaagaattttgagaggaatgttgtagagcatttgttccacatgtccacccgttgcacagctgacatagaaccattgtttcgctctcccaagaagcgagaacggaaacaagcggagtctgatagcgtctgggctgactcccttcatagtgtaagtgctacagatctcgagtaactgttgcaggtgaacactggcaagctcatcaagcttgccgcataacgagctagcctgcgccattg

SEQ ID NO: 4135 - DNA, 396 bp, Oryza sativa
ttctctggagaagatattatctcaccatttcattttatatatctaagaggcatagagaggaatatatagccagagcaaataatgctacttcacatatcatgaagagacaaatcttctacagtcctatagcatagcaactaattataattcgcagatagcagagtatacaaacaaaggcctaataaaagtactgaacattatcccatctggaagcaatcacatatattgactttgctgcaactatatgaacagaagaatagctgctgatagaacgtctaacaaatcaccactagattatttcaacacattctgctcagaacaacaaaaataataatgggtcgctaggagtagtaagttacctcatataatattccctagcctgtacccatccttatt

SEQ ID NO: 4136 - DNA, 408 bp, Oryza sativa
tgataagacctatcaggtaagaaccccaaacactatatgcatcctctatctctacccttctaagatacccataacctccattgttgccatgagataaaaaggctaaataaaatgaaataaaagtaaatttatgcacttcttgtgcgtagagttacttaataaaataaaagcgtgcctgtgtttcaccccggtggaagccattttgctttctatgtttttgttgaataaagaccaagtacaaaacaagtgtgggggagtcttttctgaagtctcgacgcgcaatggcatcaacttaacatgtcaatatgatgaacacaggtccacgaccgcacacaaaatttagtagccagaaccgagtccttgatgggacggctgaaccaagtgttcgcttcatccctgcctggcccg

SEQ ID NO: 4137 - DNA, 463 bp, Oryza sativa
  unsure (1)..(463): unsure at all n locations
agcaagaagcttgtgtgcggtaaaatgggaacacaactgtttgggcatattaagctggtcgtgtcaagagagggatggaaaagcatatactanatcacccttagaattttcatgttcctaagggaggaacatgtgtgtgtggtactccctccatctactttngatagtcatatttcatcttgacacacagaacaatgataagtggntctacttatcattcatttaaatatgctactagtcattcctcgtaaacaagcgaattcattaatattacatttctcgatgcccatgtagctaatcttgtgtggaagaatggaagcacccattanatccaagaaaccttaagatgatnnagtgtagaatgaatatcctatcaaaataaatttcagattggaatatgctatcaaagtgatggaggagatataaataagacttcaatcagatatcatttacagcattatgt

SEQ ID NO: 4138 - DNA, 207 bp, Oryza sativa
tttttctgcacggacacaccaagagaacaccggttggattcgcgcgcccccgtgcgggcctgggcgttctttccgacaccggcggagtgggttgtgaatacaaatcttctaccgggtccctgggcgtctggctggccaactgttccggccttcgtaccagccggtcaggggaagggaaagggagaatctcttttcttatttttcctt

SEQ ID NO: 4139 - DNA, 356 bp, Oryza sativa
  unsure (1)..(356): unsure at all n locations
agctngagaagaaggagaagcacaagcatagcaagcatgatcgctatggccaaactcacctngngatgatcttcggctccgactccgagtcaagctcaagtgatgaagaaggagtngcacgttcgccgtcaaaccttcatcaccaccgagactcttcaactactcaagtgatgaggatgctcccattngcctcatggcaaaggagcctaaggtaccctctgccctcaagtcatttaatgttgatcttcgtagtgatgacgaggaagatgttgaggatgagttgttcaaatccatagccaaggactccataccacacttgagtgagttgctgggacaantgagatcaatatcaactc

SEQ ID NO: 4140 - DNA, 406 bp, Oryza sativa
  unsure (1)..(406): unsure at all n locations
taattataataatccgcaaatctccatataacagcattaaacttcggatgatcatatcttgggcatacgaactctgaatcgacccgttcaagtctcctaatgtttgttataacctaaagaaccctgtgctttctttttatgtattgttattgcttctttataggcttgtagctctgcttgtgtgcttcgcgtaacttttgtcattccggaggttcccgaagcgtggttcgcggtcgtcgcccaaagttcggaaagccgttctctctgagcaaggcaagacacatcatccttgagcatattgaatcctagtttataaaattattttgatttaaattaatgcattaccgctctatttaaatntccgcgttatcactgttttatttaaccatgcctatttatcatttgt

SEQ ID NO: 4141 - DNA, 329 bp, Oryza sativa
  unsure (1)..(329): unsure at all n locations
tcaagccctagaagaagcagtcgaatacccgcatcactcatagactaaatctaanaccttgcagcantaggttaattcaacaacaagagtcagcacattattagaaataatgtactggcaagcaccaagacanacctaacactctactngcaaggcatataatcaaggaaggcataatatggttctttttagcataaagcaagtnntatttgcatanaacatattcaaatcagatttgcttcaaataaatttcagcaagcctagtatttagcatatgggcatcaaagtagatattaatcatgtgtaaatatgcacctcatttgccatca

SEQ ID NO: 4142 - DNA, 397 bp, Oryza sativa
  unsure (1)..(397): unsure at all n locations
taaggatgtgcaatgcgtcactggctgtatggtcgtcctatttcggntcatatcgaggctgggagagaaggcgctacccctatttaagctcctcaaacgctccgggccgcttatctggacggaggaggctgaacgggccctcactcagttgaaggcgtacctcagttctcccccagtcctggtcgccccggagccagatgagccgttgctactctacctggcggcaaccccgcaggtggtcagcgcggcgttggtcgtcgagcacgacgaggacgaccctcgctccgcgcatccccaccctgtgtcgactcgacccgggagagagcagggaggagaggcccccgagccgaacggtggcccaaggtccctgacggccggagttggccctccgcccgct

SEQ ID NO: 4143 - DNA, 357 bp, Oryza sativa
  unsure (1)..(357): unsure at all n locations
tagatgtcgttttatgattcacacgtacgtgacgatgacatgggagaaagacanattaaacatgttccttanacgagaagaagcgatatgattggttccttgtctatgtgccaaaatatataacacttcataaaacacattgagatagagtatctcgatttgcgtgtctttattcctctcatgtcaaactgatactcattagaagtttgaaccttgctaatccacactagctactcttggcgtccttgtcatggatgaccgtttcggntgcaggcttatagcttccttaccaaccaagtcacgccatagttaatcctgtntgggttggtttgctagctctcctgaaataaaaaccac

SEQ ID NO: 4144 - DNA, 400 bp, Oryza sativa
tatctcttacgctccaggaatggatcagtcagaacatctccaccggctcgcctcgaccgccgccgactggtgtttccgcctgcacggctggcctattatgccgccgttgttgggcgtctacatcttcaccgaccggcttgccttcgccgccgccgactggtgtttccgcctgcacggctggcctttatgccgccgttgttgggcgtctacgtcttcaccgaccggccgcctcgaccgccgccgactggtgtttccgcctgcacgtctggcctattatgccgccgttgttgggcgtctacatcttcaccgaccggcttgccttctccgccgccgactggtgtttccgcctgcacggctggcctttatgccgccgttgttgggcgtctacgtcttcaccgac

SEQ ID NO: 4145 - DNA, 217 bp, Oryza sativa
  unsure (1)..(217): unsure at all n locations
cctatatgtatgngaggatgcgattcttctatgtggcatgaggtaaccctgngtcggcttgagatatgctttgttgccaacctccgataccgatgggtgtttggaataaggtcgtatcttatgggtaaagtggacccctctgcagaggttaacttactgttcgaacagtcgtgcccacagtaatgggcggatgataggtgcgtcccgtcgcgtagat

SEQ ID NO: 4146 - DNA, 316 bp, Oryza sativa
  unsure (1)..(316): unsure at all n locations
ggggtgcgaccttttgtggtttctagaagcctactctggntatcatcagattcccatggctatggaggatgaagaaaaaactgcattcattacccccataggaacttattggtatacgacaatgcctttcgggttaaagaatgcaggtcctacttttcaacgtactactcgaatttctttgggtagccaaataagacgtaatgttgaggcctatgttgatgacttggttgtgaaaacacgcaaccaggagaccttactctcggatctagcggaaactttcgaaagtctccgcaccgcccgcataaagctgaacccc

SEQ ID NO: 4147 - DNA, 270 bp, Oryza sativa
  unsure (1)..(270): unsure at all n locations
taatgtagactcggctggcagtanatggaactccaatccatctccacgcctgcgctgnngcttctcttccggcgctgtccatttctactaccaagcttgtaaatgaagactcggcaacaaacggagcggcaggctcgccggagcanggtgaaatccgatctgcagatcaagcaacccaaggtttgttccttntnntgttttcaatctatccgagtacacatgagtggcttcggattgtgctgggcactggacatgtagcagatgtgcatg

SEQ ID NO: 4148 - DNA, 408 bp, Oryza sativa
  unsure (1)..(408): unsure at all n locations
ttccattgaanaaccaatgcctgctgtgttcactattggattgtgcgatatcaaaaagatcaacaggggttggattccttttgatgtcatctctgaagaggtgggtatagtacttgatatcttgttcatcaaaagcaagtcccatcttcacatttatttcttccaaagcttcccttcccctttcaatgactggaacaatacggacaggttcaggaactacatctgaatgaaatgatgtgagcttgttaggataaacacactctgtcattctatcatgaaccaaagcagcaaagtcattaagctggctttcatcaagtggaccattgccaggatccacgcacaaaaggtatcttcttgatctctccaagcgagttacttccatcaacgagagagattacatatngagac

SEQ ID NO: 4149 - DNA, 225 bp, Oryza sativa
gaactcaccattctggatctatcacccatggaactcatgaatttatatacaccacatgaacatttgtgatagtccaaacctacattaaagtccagcaatttccggttatttatatttcttaatttgcattaattatgttctaaacatctctcacgtacgaaaaacagaacgatccatcaacacatgattaattaagtattagctatttttttaaaatggagtgga

SEQ ID NO: 4150 - DNA, 396 bp, Oryza sativa
tcgacgagataaaggaaacatgccccgacggaagggagatatctaaagcccgttgtagaatatgtaggcaaaatttatctgctcgttcttctggtggtacaagtcacctcaagcgccatgcggagtcgtgtgccaagaagcaaggaatacaacttcggcagcagcaacttatggttaacccagaccgtacggtacgcagttgggagtacgatcccatggttgctcgggaatctctcgtccggttaatcgccaagcaagaattacccctgaactttgtggagtcccctgcttttgaacattacattcaacaatctcataaccctatgtttaaagctgtgagtatgccaacatctactagagaattatagaatgtttatcacaaggaagcaactgcac

SEQ ID NO: 4151 - DNA, 411 bp, Oryza sativa
aactataaatactaactgccccaattcggcagttacacataaaatctttgtacttcacatgcatggttttaggcaagtactggcaaccaaatacgctaataaactcatattcccaacgtacttcacataatccccaaatataattcatattcacaatgttttcacctaatatgttcatatgacagtataaaaaaacatataccacggtttcacgcacggtaaccacggtatcaaccacggttaccgcggtttaaacaacgattaccgtgctcaacaatagcagcgaacgtaaataacaggctacggtttctctcccaaaccgcacggttaccggacaaatctcgcggtaaccgccccctttcatgcgcatacctgttggtgggcgagccagtcggtaaccgcctcctacca

SEQ ID NO: 4152 - DNA, 237 bp, Oryza sativa
  unsure (1)..(237): unsure at all n locations
tatattctggtgatttgcctgtggataaaggcccattttagagctttacagaaatatacatctaacatatgcgtggaacatattgttttgaaataaacaatattgctatgaattctggtgttggtcaaatcaacatttcaaggaaaagntatcgtatcttaaagctgcaatatgaaacaacaataataccaaaagatatattttcaggcagtaagaaatatggaaaatgatcaagtc

SEQ ID NO: 4153 - DNA, 403 bp, Oryza sativa
  unsure (1)..(403): unsure at all n locations
nttggcacatctagtgggacaaagttttgttattcaaccatgtcgtcactgtctgacattggtaaagaaaatgttatacctgctaaggttgaagatctgtctgaagagcaaaaggcagagatggagcagaagatgcaagaactgaagaaggcatatattaattctttttctatgactcggcaagggaaagttattcaaaagtacaagtgccaaatgccgaagttagaaggagaaggagcatctggtgccaaaggagagcagaaagaagatgataataataaaaaacagttgatgactttataggatcgtcttgatttagctgtgcaccatgctctcatcaaccaatctggaatcttggtcaccacattgtcaaatttgatcaactcagtggttgatgggtcga

SEQ ID NO: 4154 - DNA, 462 bp, Oryza sativa
  unsure (1)..(462): unsure at all n locations
ngctntgctaatgtaagaagacatcatctccacagttgccttatccaatctactttcctgtngtagtggntaatatatggcatgtctgtatgtaacaggtgtgcggaaacctttgaacanagtcctctcactgtctntcgtttcatttcaactctagttggatgggcgttgaaacaagtgatcacatgtatccaggtattgctgaanacaactntcaaatttcttgcagttgcaggcgctngatattcggatgtctgcaagtatcgaagttgaattatgacactaataataggtctgatctagaggtaaagatacagtgtcaatgcaatgtgtacctcatatattttacatttggtagctagatcaactgctaatacatcgtattcttcattacagcgtcatttatatgaactagcaataatatagtgctctttataatgattgttcttacattatgatctt

SEQ ID NO: 4155 - DNA, 408 bp, Oryza sativa
  unsure (1)..(408): unsure at all n locations
tataatcgnttccgaatatttattggtttggcaatcatttttttttcaattgctttagcatactatatcatctatattcagtgcaattttttcgttaatactgtgcaatagacgtagggttttggacagctacaaatgctggcattgcctatactataattaattgctggttgcttctttgcagaggtcccagtatatggaattgcactgtttctaatgatagcttttgctgtaattccgacgattggatctaagtaagttcttactgcacagcatgtactactttatgaattattttatattacctgtcagtttagtcatctatggactatggagcatatgaatccagcaagcttctcttggaatcaactgtaaaaatagatgtggtttatttatcaattcactctc

SEQ ID NO: 4156 - DNA, 485 bp, Oryza sativa
  unsure (1)..(485): unsure at all n locations
tgtgatgggtaatgcgtaagacgaatcttgtgttgcagtcttcactaacagcaggagtacctagctgctaatgccagctactaccgtgatataatgctacgctatcgtgtctgttctacctgtcggccatatgggttggtcactatcttaggctttgtgctggaaaagcgtggcctaactactggagtaccaagcaagagtgtcgtaccaggcgacgatcgaacggcccaatcacatgtagaaaacctgtcatcttgaccattacgaatgtcgtaatggaaaccccggaatntgatggacttgaccaacgagacatcgtngccgtcatcccgcacatgatgatcctgcattatgttggagtctctttctataaagagtttatcttacttctatagcatattttcttgccaaatttctactaagagtatctcanatataatagattatgtctacaccatataataaaggtaataatcatgtctaat

SEQ ID NO: 4157 - DNA, 398 bp, Oryza sativa
tcacagtaaccatgcacaattgagcgcatcacttaggtcttttttataaccggcatagccagaaacaagtcacataggttcatctgtattcagtcactaactgaaagactaagctgaaacaaaggtcacaatcccaacgaaaaccagacttctcgaaccggtttgctataccacaaaccactcggttttttctgcaatttgtttttttaagaaacaataaaattattcaaattttatcagtttttaccggtttgctaacggttttcatgaaaaatggaaatattgaccgtgagttcttttcagttcgataagaagctttcacagcacacatacttatcgtttagctccaacctgccacattaaagatttcacgctatatctgtctcttctattaccaa

SEQ ID NO: 4158 - DNA, 413 bp, Oryza sativa
  unsure (1)..(413): unsure at all n locations
gatctctgagtcacctgcggcatgcaagcttgtctgcgacatgaccagataataagttaatgaaatcaatcggtgatattgtgctagatgtntctctgtaaaagctgagtttatttcaccttctggttttttttcttgacttctgcattatcatgaccacatactaactaaatcctctntgctatatggntnnggtggtctcgtaagtttaggcaagttcacaaaacttcacttttctctttcttacctcatcatntcctggttcctacaatgtggtatcttcagtatatcttcatgaagcgatatcacattgtcagatgccacaaggcccacatcgttctgaacataaccatcctggacaaaacanaaacattgtaacaccaaaactagttgcttgagaacaatgacggatc

SEQ ID NO: 4159 - DNA, 394 bp, Oryza sativa
ttggagaagatgtctttggtggaggcctggcttataccccattttatcgcctgtgaagatggagccgtatgccgctagtccgctgctgtttatttttgtttgtcaagccttaagtgcctttgtaataatgtaaatattaccgatataataaaaatgtgtcttttatatcatgtttgtatggtgtaccccggcttttcctgggacggggattaatacactatcgttcgggaaaaggcaattttcccggtcgcgacaagctggtatcagagccgtctcgactgtaggataagccaagtggataaaacctaaggacatattttataaataaaactatttgcgaaagatcctcttttcttcttcccctaatgctatttgcaaaaagtttacccttttc

SEQ ID NO: 4160 - DNA, 425 bp, Oryza sativa
  unsure (1)..(425): unsure at all n locations
cactaataagcctgcactactatgattgtagatgctccctagtgtcgaanacactcggtaacaatgccaggacgctaggtaactacttaaacacncagtaataatggtgcagagtggtacagcacgcccgggagtgatacgaggttcccgtgctgtctttcggtgtggtttctgaacaaacacttcgtaacagnttgggaggtacggagtgtctacaatacactcttganagttccactaacggcatgatgactatncanacggagacactgagcttccccgagtntatatattgacacgtggacataacgggtatagccacgtcaacagcacgttacggtgtgtcttagctgcactctgtatatcaaaaatattangcgtgtcttttgctgcacactcggaagcctatagacccattttaaaat

SEQ ID NO: 4161 - DNA, 287 bp, Oryza sativa
  unsure (1)..(287): unsure at all n locations
ttggtgaaatgttgatcacggccagaaaatcatataactctacctattttgntgagaaagggctttatgctgcttggaacatcttgaagcagaggaatagtttaatttttgaaaacattgttccctctgttccctcttggagagttctctttaggaatgaactctcccttttagctcatataggtcaaaattctgagagagatacattattacagcggttaaatttggtgtaatttttttccccttattaatataaaatcttaacggtggnggctttccctaccgta

SEQ ID NO: 4162 - DNA, 184 bp, Oryza sativa
  unsure (1)..(184): unsure at all n locations
agcccatggaagcaaaagactggctacgcatcatagataagaaactgactctagtcanggtacgcgaagccgacaaggtgatcttcgcagtgaaccagcttgaaagacccgctggtgattggtgggatacctacaaggaagcccgagaagacggtgctggagaacccacctgcgaggagttcac

SEQ ID NO: 4163 - DNA, 404 bp, Oryza sativa
  unsure (1)..(404): unsure at all n locations
tagctgaagttctgaattctgaccagagcaagtttgcttagtagagnactagagtacggagtacctttaattctgtcatagtgcagatcattaaaaactttcttgcacatcttgattaacctccaaaactacagctttggttagaacttgaatatgggtgttgatatctgattttggatggcagtaagatgacatttgttaggatgtgtttgcccatgttatgggaatgaaaaacaaaatgcattaggcactgtggcctggaacatcagatatatagcaaagatctagtttcaagtcttatattaatcagattggaatcatgatgaaccttctactgagataattcactattcagcttagtgttggttgtatttatagttggtttaccttatgctcaatgacac

SEQ ID NO: 4164 - DNA, 409 bp, Oryza sativa
tgtgcctgtttggagagatcatcataaattatttaagtattccgctcgcggtacataaaatactcagccagggctgctcccgtataatgagcgaggtattgtaatgtagcaggggaatccgccatttcagctactacaatagtgtattccatggccccctcttcatggaaagtagttactacttgagctacggaggatgctctttgaccgatagctacataaacacatattacatcttgccctttttgattgagaattgtatctgtagctactgctgttttgccggtttgtctgtccccaataattaactctcgctgaccgcgcccaataggaatcatcgaatcgatagcaataagccccgtttgaaggggttcatatacagaacgcctggagattatacccggagcac

SEQ ID NO: 4165 - DNA, 400 bp, Oryza sativa
tgcgcagcacgacgatgaaagagggctcgggttcctgcacatttcccatattctttgaaagcatgtagcttatttctaaatcctgaatactgaatgtgtgttcacacagagtgtacctggcacatttaacaaaaaccgtatatgtaccaactattttcccctatacctacaagatactgcaacttctttcgctctgaacggggttcaaaaaaagcgatgtatctattcgagctttaattaattgccctccactgggagttcacagggaaaatattttatccctcattcgtcgaggaaatgtcccctcgatgattgaacttcactcccacaactatgaaaaacatctgtaaacaaaatgcacaagatgtgctaacatgtgatatatcacttcacaaacatg

SEQ ID NO: 4166 - DNA, 357 bp, Oryza sativa
gcactgagctgcactttgtgaaattggagaaatttaagcaatctttttccttaccttttagaggatttcgatcattctgcagggcacaacccaccgattgattgcgtccaattaaagaatactctgttaagacatcgtcttcaacacgggcctcctgcatggggctcttatggaccaggccattaatggtgagactcaatgcgtattgaactgcagttcttctggctagagagtttaccctgcaaaaaatcttcttataaaaacaacctgagagatgactgctagacattatacttaaacatccaaatagatttaagactattcaacaggcttatatatctattatttactactgag

SEQ ID NO: 4167 - DNA, 301 bp, Oryza sativa
cttgtagtgacgatgaaatgaattgtagattatggtttcttcctggtttccaaccgtcgcctgtggtggtgggtgttaatatcgtggttccgctgctgctgctgctgatggagttttctcgtccgcatcgacgggtataatttcaagctgggctgcgctgcaacctcaattaaggtaaataagatctctattaaatttaaagattgcaatgtttcatatttgtcactgtggggaccaccgctatgttctgagactggtactgtgatcaccgtttcttaagaagcagttcgcgccgtttttc

SEQ ID NO: 4168 - DNA, 405 bp, Oryza sativa
ctttccagattccaatccgagttttagagagattctgtattacaatacgcttgccgggagtatcctgtattgcccatttgcgcaaacgctttcggccaaatgtgatataggtaacgcgtcgacatagtcaaatagcgccatggaatctgctttagcccttgccgaccaagccgtgtactcccttcgtccaaaagaaaaaaaaaaagacaaaccttgggtttccgtgccaacgtttgactgtccgtcttatataaattttttttataattagtatttttattattgttagatgataaaacataattaatactttatgcgtgacttatttttttaatttttttcataattttttcaaataagactgactatcaattattggatacggaaaccagcgtttatcttttt

SEQ ID NO: 4169 - DNA, 233 bp, Oryza sativa
cagattacacaatccttgtttttctgtcaagctcatgagatggggccacacactacctggtagtaagagagagagagatagagagagagatgtcatattttctttggttttcaagcccatgcagcttgggtttatgtcagtcctcaactctgtgaaaaaaaatattatctagtaacatacagtttcaagtttgttttggtgcacaaatgcaagatcacttatatatacaaaca

SEQ ID NO: 4170 - DNA, 407 bp, Oryza sativa
ctggggccgaaggccgggagagtagctgctgctggtttgccgaggcccacgcgatgtgtgggccccacggccgcatgcagcaggatggatggcaatctgacttctgaattccgatgagctctctgacctgatcactcgaacaaaccgggctccggctagccagggccaggggttgggatgcagccgtgcaggcagagagagatcaatcatttgggcacactttgaaaggagccagccagccagaggcttgttcgcttgagcgtgattgaccagcttgcgaaaaatggagctggagagcgaccttacaaagcatgccacacttttgtaattctatagcccgtgataaagcgtacgtgcagctacgtactacgtaccccccatatgcatgatgcacgtacggatgaata

SEQ ID NO: 4171 - DNA, 389 bp, Oryza sativa
  unsure (1)..(389): unsure at all n locations
gatctctgagtcacctgangctgcaagcttgatctggaaaagggcatgattacanatntatgacctcgaatttgaaccaataagttcaatgggtcaatcgagtacacatgtgtagtatgtgagatcatggngccatgtctgcatatttgaattccgagaagtgtagaaaggggcaaaactacagaatgggagagactgatagagattatgcaagttagcaggtggcaggtccgtccttcttgttatatgagcgccttagttngtatcatgtttcgcanaanaaattatatggttataaaataccatcaaacgaatgtatgtgaacgtntaaacaagaccagattgtacattcaggagtatgcctangaggcatcgggagcttccactat

SEQ ID NO: 4172 - DNA, 394 bp, Oryza sativa
tggtgttcgagagatgattctactcgctcgctggttctcgaaccagtacgtagcaatctcccgcaccgcaagctccctggttctcgaaccagagcgtagcaatctcccgcaccgcaagattccattggtgttcgagagatgattctactcgctcgctgggtctcgaacaaatgcgtatcaatcttccgcaccgcaagtttccattggtgttcgagagatgattctactcgctcgctgggtctcgaaccaatgcgtatcaatctctccgcaccgcaactttcattggtgttcgagagatgattctacttgctcgctgggtgtcgaacaaatgcgtatcaatcttccgtaccgcaagccttcattggtgttcgagagatgattctactcactcgct

SEQ ID NO: 4173 - DNA, 427 bp, Oryza sativa
  unsure (1)..(427): unsure at all n locations
agcttatatggtcttagttggtatttcttctctgatgattctgtacatcaactgtccatagctggtggaggcgcgggtggagtcggcttacttgtgagcagtggagataagccttaccacaatgctcatgtttgggcgaaactcagcttcgtattggacgcacaatgctgcaaccgctgcnagctgcatcgagaaagtgcagtactgagaaatgtgggggaaaagagaaggaaaggatgactatcatgactcatgtgataaatatgggtcatgatagagatcagaccttggcactcttttggtggtatcaccattcaccgggatctatacactgcttacttatcttcagtatcttgtgagcctgcanacagactgnacatgctaagacttgaaaagaccctaagatggctgtatgtcatgctataag

SEQ ID NO: 4174 - DNA, 386 bp, Oryza sativa
tgtgcgctattgagaggttgttttgtttgatgatagagatgaaccatggatatgtgattgttggaggatagccccacccatcacttttgacgatcgaaaaatgacaaggtcttccataattggacactatttgacaatggaatggatggattacaacgagttctccaaaaagaaaaaaaatggctcgtggagaacttgacaggtaaaaacgtcttggcaatctaagaaggatgttgtcaaaagattaaaaaaaacaacgataattctgataaccttatacacaaaaaatagacgacaagattaaaaaggatggagtattgaaaagcaaatagaccactcgagtatcaagcaatccatataagaccatggaatggcatggtcccctc

SEQ ID NO: 4175 - DNA, 450 bp, Oryza sativa
  unsure (1)..(450): unsure at all n locations
gtgatcactttccgccttttaagcaccgcngctgcagctatgcctatcctgtntggaaaatatggtagttcactcattggaattactctgtttctatatatatnagccttagcctctctgttattgcgttatgatagagggaaagagactagaaataatagaactngcgccatgtttcccgagagaggctgtcttctctcacgtcagcagttctataattatagttgactgctcaatgacgatctgaccgttctactcactcgtctacgctccgaccaattcagtcaaaatcgataaatataaatgtttccttgaacaagtctacgagatactactattattcaagaagcgcactgttcgattatagggatcccttatcttatctctatccacgatgcctatcttctgtatatatagtatagggttgctgacagagacatgccggatcat

SEQ ID NO: 4176 - DNA, 414 bp, Oryza sativa
tgttgatttaatccccgagagcagcacctttgggaggtactatttttttcgccttgcatcgcattttgacaaacataaacaatcaatattttgggagatgtttggtcccctgtcctgcattctgtatttttagtgaagtaccaccaaaatgctctacaagttcacactaaactgagaaaaaattagccattttggcaagattatgtgccaatcacttggccaagtttatcatgtggtgaggtctacagtggtgaaatgggtttcccctttttcttgtcattcaagtatacctgatttttttcattgtggttgatacactggtcctttcctgtgatgaccactgaatattgttgatggtatgctctgttttaacgtctgaaagaggagatgctgtgcataccagttgttctaaaa

SEQ ID NO: 4177 - DNA, 473 bp, Oryza sativa
  unsure (1)..(473): unsure at all n locations
gatctctgagtcacctgcggctgcaagcttactannatgatttggttattacaattcttttcatttgtctgtccacttcattgatttaacgtttcctgtaggaatagtgtctatgataagttatttgatatatttgtttttaggaatctagttgcattttttgacctttcaaacatttgtttgaaataaattatttcaaaacacagatagttgcaaagttgccacgtatcaacttgcttggtacatgcaatacattcaacgcataatacacaatgtaggttggacgttggtgacagtgatctacgggatgattgaatcatacaggatatgctcattcgtcttttacttgacattaacaggacaaattatgtgtttaactaggaagacccatttattactccaactattaacaaaccttaccctaactattttctatttaccctgacatatcactacttcctacatattctttt

SEQ ID NO: 4178 - DNA, 492 bp, Oryza sativa
  unsure (1)..(492): unsure at all n locations
cgctttctggtccagtgagaacacagggtcctgaacaaagggaacanatgagtgtatgcatgcgttaagagcatgaacaataccagactattaggccattcccaacccaacaagctgccacctattgataataaaataatataaccaagtgaantaaataagaaaagatgcatgagacatnggttctacacaacattccaaatatcatgtgagataagtagcactataatttagtatagaatagtggcgcttgcattggaagagagtgctagtactaatttctaatgatgtgagttatagaactgctagtgtctgggttggaatggctaagcagctacacatatgtgaagaataaaaaggaagagaaaaataggcttgttaactcagactatatcgatgactatggatcttaaatgtgagattattatagtaatatgctgatactttggctacatgataataactacagtgcttacataactgcttatgctg

SEQ ID NO: 4179 - DNA, 373 bp, Oryza sativa
ttaacgcaaccttgtgggttaagtactccactacaatatgttattttttataacattacaaaagttatttctaaaggtagcccatgagtccgacgcaaaagggtcattacacaatagggtgtacatttgaggaacatgtgaaaagtattattccggaaatcatttgtttagaattgtgatgaacataattgtacactcaattaataaagtaggaaaagcggcttatagttgtcatttcacattgatcggatatgaaaataatggtttatacaaatatttgtgcccatatcattgtttgtcaacaatcaatagaacttgatagttacttttggtgtgtcttttggtatgtactaaaatggatacatattctaca

SEQ ID NO: 4180 - DNA, 399 bp, Oryza sativa
tgcatacttctctcttccatgtgtatacaaatatttaaatgtgtaagacttgcaactacagtcttgtacataacccgatacctgcaaatttcaagtaaggatactgacgtggttgaatgtttttactaccttaccgatagcagtgagggtagtgagtaacctttttagcatggcttttgttccgatcggttgcttgtgtgggattgttggcacaccacgggttttgcttttgcttatgtgaaattatgagactttcactgctatcttttgtgttgtatgacgattttataaacccagttaagtcatatgtaccttgttgccctcttatcaatatttatgcatttgtgatgtttatcaactgcttgcgatgaaagtgcgagactaattgctgttccttgt

SEQ ID NO: 4181 - DNA, 138 bp, Oryza sativa
gcatatatataaacacacattctgatccatctcactctctttatctttgtaattcacactctcttactagctagctaaccattagtatcatcaatcagagagtgtagtagtagctaagctagctactgaccatcgatc

SEQ ID NO: 4182 - DNA, 397 bp, Oryza sativa
tgtcaagggcttaagggggtattgcgagttaaggtgtttcttactcgactcgggctatttgtggttatggcgtaaaccatagcgatgtcctaagacaatgctatgctagagaataaaggataaataggaaataaattggtatgtataaaatgcaaaatggcaaaataacccatcaaaaccacacctatagcccaacaaaagtccaatggtctttttttaagaatagtccaatagttggctaagcatttctaccctaaagacatagatccaacatatgtccacagctatcttcataggagaaaaccaaggaagctaatgtagcaaaatgaagtttgttgttggcattgataagctgatagcagacaatatatatatctagaggtagaggaggagagca

SEQ ID NO: 4183 - DNA, 189 bp, Oryza sativa
  unsure (1)..(189): unsure at all n locations
agctngctcgggtagctggaggaggaagaagacatatatataggggttggactttagtcccngttggtagcaccaaccggngctaaagatcaccgggatctttagcnccnggtggtgcttctactcgggtctnatgtcccacctcttatatatatgttaatatacttctctatgctctcgtgccagctt

SEQ ID NO: 4184 - DNA, 407 bp, Oryza sativa
tgtgtatacttacaatatcaagtagatatattgttcagtttatatgccggatcgctatattacataatttatatttgctaatttaaaacaaaaaactaaaagctacaatgtaagttaatacaataaagttatataactgtaactacttacagtataaaactgcaatgtaatttttgttttgcctacataattatatcaaaataacgtgcttgctcagttggtagctagctagacaccctgctctttcatagtggacatggatcatatataggatcaactctagcttcacctccgtacgtgctttgatttctttaagatgatcgatatatataagggagcactaattaaactgtgtgattttagcctgctaaaagtttaacgtcaaattaaccggccagtagcaaaaa

SEQ ID NO: 4185 - DNA, 271 bp, Oryza sativa
ttggatgtaattatacccactatcaccatgggtttccttctgtgttatgctggtgtgaacttgtcatgctatctgtctgacctccttgatgcttctagatggcgcccccgatggaagttgcaccactggagccttattctcatcggtgcattgctcttgtatagggatgtgttcccatccttaaacttacatttgataacttggtactattaggtaacaataactataaacctgcataattgtctataagtacatatatatgttatcgcta

SEQ ID NO: 4186 - DNA, 368 bp, Oryza sativa
ccttatgttgatgatgtattcatcaagaccaagcatatgattttctgatcgccgatttaagagaaacctttgcacgcattcgtgctttcaagatgaaactaattcctaaaaagcgcatctttggagtaccgtgagggaagttgctcggatttatggtatctcaaatgggcatacaggccaacccggagaaaattaacgccatcctcaacatgaaaccgcctagctcccaaaaagacgtccaaaagctgactggttgcatggcggcgctcaaccggttcgtctcacgactcggcgagcgggggatgcccttcttcaagctgctgaaaaagactgacaactttcagtggggaccccaagcacggaaagcc

SEQ ID NO: 4187 - DNA, 432 bp, Oryza sativa
  unsure (1)..(432): unsure at all n locations
tgtcactgacactcgccggacttagcactgggctgcacttggtcagtgccgataatggaaattccttgtattaaaaaacggtgctttgacacagttgacattctcttattctaaaattatgtaaatgtatagaatataaatcatgcttaaagtatnttgagtgataaaacatctcacaacacaataaataataattatggttttttaataagacgaatggtcaaatgttcaacggcatcatctattaagaaacagagttagtaagacatctgcttagggggttccttttcttttgttttctgaaacaatgctacgtttgctatggttggtaaatcagcgctgttacttatttggtgcatgacaaaaaaggatattaaataccttagaaatgatacttaacacatcgctgtctacaacaaatactgcattgct

SEQ ID NO: 4188 - DNA, 284 bp, Oryza sativa
  unsure (1)..(284): unsure at all n locations
gcaagcttctatagtctgctgatggaacatatgaaccatgttactgtcttgctgtcatctacaacgctaaaataagtgcgggcgtgggtattcgtgtctaacgattgaccgtctatcttatctaaaaaattatgaanaattaaaaacaaatagtcatgcttagagtattattcatgttgtatcatctaataacaataaaagtaatactcataaaaatatttcacataagataaacgggtaaacgttggacatgaacagtgtaanagtgcacttattttgggact

SEQ ID NO: 4189 - DNA, 399 bp, Oryza sativa
ttataagccgacgaggtagatcgagaaggcggtattgttcgaccaccgccagataaggttgtcctccatccgaggttgcagctggatatgctgtaccatgtcccagagcaggaggaactggctaaggattaatccttacacggagagaggatatactccctccctccagttccatattagctgacgttttagacaaggttgaggtcaaacttttataactttgaccatcaataactttaaaaatatttagtttaaagaaattagaacaacatatatagatttgtctttcaaagcactataataaaagtaacatacatttatttattatatatattataatagaaaaataaggtcaaaaatatattttataaaccgtgtcattgtccaaaacgtcaatta

SEQ ID NO: 4190 - DNA, 215 bp, Oryza sativa
  unsure (1)..(215): unsure at all n locations
ngctacacctgctgattcatctccagctgctgctgctgctgattcagtattattatgtgtggagatgtacagtagatgaggaggaaggaagtagctactggatagctagctgagctgagctaagctgagctaagcttcttggctaggtaagtagctagaggtgaagtgaggtgtgggaagaggggattggacatggacgatctgtacagcatcca

SEQ ID NO: 4191 - DNA, 380 bp, Oryza sativa
ttaccaatttgccattagcaaacgtacactgtagcaccctattgtgtaatcatggagcaattgggcttgagagactcatctcgctaatactcgcactatgtgccattattttttttttgcctatatttaatacttcatgcgggtgttcaaatattcgatgtgacggggcataaaagtctgggtgaatgggcaggccctcaagggaaagaggtcaccgatgattagatgaatttattttgaataaactagtggcggagcttgctggaacaataagaggggacttttatttctagctgtggctcttattgtctgcggttgatggctcgactaacaggttctgacctgatggggatcgacggagctaagatatacactagact

SEQ ID NO: 4192 - DNA, 416 bp, Oryza sativa
  unsure (1)..(416): unsure at all n locations
tgaggcagcaactgcataacttgcaagaatatcatcggtatgatcttcatccaacctacaataaatcataaatgtgcatgagttctatgaatttgaataattgataaattgataaaagtaaataaataatgaggactgtgtctttcattgttttctagtatgctagggcatatgattcacttgagaaccattaaacaagttctaggttccaaaaattaaacagaacattaaaaaaaataaattgtctccgtattatttccatctcactactcatgttctncctattcctgagatatttgagtgtatgttcatatttaactccactttctcttggttttatactcttcccaattcttgtgcccactcaaaataagccttatattttgaaagaagggagtacatggtttcactatgaa

SEQ ID NO: 4193 - DNA, 301 bp, Oryza sativa
  unsure (1)..(301): unsure at all n locations
agctngcctaccgtgtgacatgtacaanatcagacatagtagatccataagtttccattgctaattcatacaaacaaccaaattgcactactatccatacttctntactgctcacctttcttgcatgaggtgcttatgttattgntatgattnttcgttagaatatctacgaccagatactgctatatctcctatcttactgcttatgtttccttaccttatttcttcgtacttgatttatataggcctgtgctggaacattccttcatcccttttcatcaagctggtaagcatctttaca

SEQ ID NO: 4194 - DNA, 417 bp, Oryza sativa
tccctgttgctacgaccatgcacaatgcaagcagctggttggtctgtccggccggccgtaaagttcaccgatcgagagtgcgtgcgcgcgagcgtatatgcgcgtggttggctggaaagtttgcatgcaggccggcgacgatctgaggagcacttaaggtatgcatataccacaacctactatagctagccacccggctgcaggaacgaataattttggactcttgtgttgtgcgtgtagttgcgtgctgtccaccgactattttatattattaggcttaatcgaattcatgtcagtgtagatgtgctgatttatgaaactactattatattattcacgatatcagttagctgatgctgatttttgtaaattagaaccttgctagcaatggcatggtctctatcttcttccttcttt

SEQ ID NO: 4195 - DNA, 332 bp, Oryza sativa
tcaccgccgccgggcgctggtgcatacgcacctctcctttcctcggtcttcttcgctctgtggcggcgctacctcccggaatgtattgtctaagtgaagccccgccaccgcgttttcttcgctgaagatagacgaaacagcgccgcgttgctgaacaaaacctcgccgccctttcaagactgttggcgggcatcttccgttgtcgttcgtcgtcgcgtaaatgttggaaagaacgtcgccttccgctctttcttccggtgcccacccgttgcatatttttgccgtgggtcgccggcgaccgccggtcccatgccgttcaccggcgaaagttt

SEQ ID NO: 4196 - DNA, 376 bp, Oryza sativa
  unsure (1)..(376): unsure at all n locations
gcttgctttctgttacatgaatcctgactgctgacttctgaccattccatttccagntggatagtaactcagccaatgacaggatacagagcccanaattattgctcanactactatagttntgtacttgatacagtgcttaactntcttttgacgggtaaattgtgattatcttangatatgtntctgggagaactccttgngcgctgttctttggtggaaggatcaaatatcaagcagtcattacaacggaaaccaataagcattgttgctaacagtactacaagcattgatgggcagactgtagttgacaaccagagtgcanatttggtaaaagtattactcganttcaatagtgaagaatattataaacggg

SEQ ID NO: 4197 - DNA, 397 bp, Oryza sativa
ttgttagttttaagcgggaataaaaatggacttgtctgtatcaaaaccaggggagttggtgcagagcccatcgttaattatcactagagagaaattaacatgtacaggaggggtgcacgaaattgagcagatcatgaaaatgtaaaatggttagtgtgacttataataggtcgaaaatgcaacgtaatgtgctccaacaaactagagaagagccaaatatctttacaccaaagttacttttgctcgtgtgagcaacgtacgcttcatcggttgtatgtttctggtgctcaccgcttaagcagtgtacatatgacatgggcacatagtaacactagtgttgacacaaacatttttgtccttataaaaagttggggtcaacaacaaattatgtcaccaa

SEQ ID NO: 4198 - DNA, 262 bp, Oryza sativa
  unsure (1)..(262): unsure at all n locations
atctctgagtcacctgcggcatgcaagcttacacncttctaagagaacatgtactaatgtgcttagtcttcatgtaagtnggcatacaggcctgcgaagaagggggctcagtggcgctaagctacaatcggccctttttgaaatagacccgaccatggagaaagacctgccgttatacaccgagcgtgtcaagaagtcgtgccagatcggtaattgaggacttgagcatcgtggactaatcaaatgttcgcattgatgttgt

SEQ ID NO: 4199 - DNA, 516 bp, Oryza sativa
  unsure (1)..(516): unsure at all n locations
atccttaagcacctgcggcatgcaagcttctgctgcctctccttgatcctcttcagcttgatcttgtcttctctatccgtcgggccagctcctcggcatcaatctcctcatcactgacatcattctccgtgaggttctcgacgccatcaacctcaaagtcagacgtatcgcctaaatccttcgtgagaatagaaggacttgcccattgaattactgcttcctaccttccttaaccaaattatctcatcacccgagacaactccttgtgcttagttggcttggtcaacgataccatcaagagaggatatctgctcaattatgcatgtggtcagacgcaattactaacaaaataagagtatatgatagaattgcaaacatacatggaatgcaaaacccattaaaatttcctggcttatctgtaacttgatcattaaccatagaacganccgatcatcaccatatatatcttacactacgacttaatccacaaaatgattgcctgatcaactcccttac

SEQ ID NO: 4200 - DNA, 392 bp, Oryza sativa
gatattgaacggattctttggtgttgaacagagtctaccttgtttccactggctgtctcccattctgtagaaaccttcttgataacaggtaaatcttctgcttcggatttttgctctttttttatcatgttttttcttttgaagaattcttccaagtgtctgacttggctactttcataccaatcaaagaaaaagatgttcttcctttgttctctcatttctttatgccaaaggtctcttatctttagtctaaatggttcatcgaccctttcaaagaatcttttcatcttgggtcggctcttttgaagcctgagttctcttttaagcaaatctttatcaatttcaaactcatcttcttttatagcaataacaaagccaacatcaagctcgat

SEQ ID NO: 4201 - DNA, 309 bp, Oryza sativa
  unsure (1)..(309): unsure at all n locations
ctgcagctatctcgctcaatagaagtataacatggaactatgtntgaagacattancatgcanatcgtcgatagtctatttgaatgacatcaagaggtcacntttaggtacgtgatcattgctatggaccttagtctacttgcaaagctagnataattgtatggcctgaattgacaaagcgccatactgtatgtccttcacacatcaatcctcaagttctggctttctgcactatcatacttacaagttagcattagtgtattcatgtaagcgaatgaggtgctcttgcactattcatctgaatatctg

SEQ ID NO: 4202 - DNA, 406 bp, Oryza sativa
tcggaagaaccctacgcctactatcaagagggtgttgtatactatggcgctcactaagtcttaattacggtcattgcctgtggcaatggcgtgccgctgccttgactccgctgccttacctacttctgtttttggaatgtattcccgaccgctcatttcgatgatctaaaactatgcctgtgggcttatgatgtacaaattcgtactacacactcgtgtatgtgcacttggtatttcagctatgaattcgcgtgtaccagactacttgatccacggaaaaggtactgtctacaccgttgactcctgttataaaaaccgtggtccactacaatggacaaaggtacgtggcgtgaaaaggaagtaacggctacgaacatcatgtggcgctggagtatgtatctgatgg

SEQ ID NO: 4203 - DNA, 359 bp, Oryza sativa
  unsure (1)..(359): unsure at all n locations
agcttanntctttatacttttgtggagaacanaatgacatactaatcttatacaatgnttggcaagataatagagtgtatgatatgtatatcaagtggctaagagttaggtgaaatatgagtgtggtagaaaccaaacactgtataatgaaattgtgggttgtcaacgttaagtgtcggttagttactaaccaaacaatagatgtgttcttttccctttgtgtgtctgaggatttatgtggttgtgtttacagggttgcaccagatggcacaagagtattttattgaattttacattattgcacaaaataatctcacatgttttccgcccttcatcttgctgaaaagangggatgggtg

SEQ ID NO: 4204 - DNA, 347 bp, Oryza sativa
cgctgctccttggcgaaggagaggtgcacgctggcgggcatgctgagctgcccggagtgggagcccgaccccttccatcaagtggcggcgggcctgaataacaagccgctcattcccctcggcctcgtgccaccgtcgcccgacagaggccggcgccgcgccggcatgacggacaactctaccatgcggtggctggacgtgcatccggcgaagtcggtggtgtacgtggcgctggggagcgaggagcctctaccactggagcaagtgcacgagctggctcttgggctggagctcgccgggacacgaattctgggggcgctgagaaagccccatggcgtcgatctctc

SEQ ID NO: 4205 - DNA, 281 bp, Oryza sativa
  unsure (1)..(281): unsure at all n locations
gctttatctagtgtgcaatgccactgatatctcaagttaacccctcttggttttatataatggctgaaccatagtgtattngcatctatgaacatcttatcgcaacaagccagccacctgattctttnnttttaatgtagcctagtggaagccacgttgtcgttggtatctcatggaaggtagaacatcatgtctaaatatttagaggtcaactatgaaactaatctactgtgggcgtgttgactgatgaataatctaatgcaatggtgctgataacatat

SEQ ID NO: 4206 - DNA, 393 bp, Oryza sativa
cacctcgatgcccacgtgccctcttctgtctcacggagggttgacttccactagcctccttcttctggttcccctccacatccctttccacgtgcccctcctggttcccctccgcatccctctccacgttcccttcctcattcaaatactggtttgggtcctcgttcccctctttttcgttccagtactggctgcttccctccgcgattgtatcgtacaatatctgttcctcatcgtgatcagccatctgttcatacaggaaacatctgctaagtcatgagacatttatgttttaacaatcttatatgctaacaatcatatgctaagtctaggtgacgtatattataggaccctagctagtcaatacattatatagtaagtctaattacaaat

SEQ ID NO: 4207 - DNA, 275 bp, Oryza sativa
  unsure (1)..(275): unsure at all n locations
catctcttcactgtcctgttacccctatcgccactacccttggcccgtcaaagatcatcccaactcctatattggcttgcgctgctccctctaagccgctcaactcgctctatgtcaaanatgctcttaattntctggtcagntcttcggtttccgctttctctggttcttctttgggcttnnggttgttctttctcatgttgcgaacaaagatgtggctacccctcgtgttcttggcgggtcgtctgttcttaagtctgctggtntgccatcca

SEQ ID NO: 4208 - DNA, 277 bp, Oryza sativa
aaaggaaatataaaagaaaggaaagaaaaagaaaaagggaaaggagaggaaaagagaaaaggaggggaagaaagagaaggaaaaggagaagtaaaggggggagagaggaaagaaaaagaaaaggagagagagaaaagaaagagagggaaaggaaaggaaagagaaagagagaagaggggagaggggagaggaagagaaagggaaaagaaggaaagagaaggaaggaaggaaagggaagagaggaaagaaagggagggaagagagaggggagaaggga

SEQ ID NO: 4209 - DNA, 449 bp, Oryza sativa
  unsure (1)..(449): unsure at all n locations
tgcagctagagtgtgtgtgacnattgagctgcctgtactttatattttgataggagcgcgcatattcttgtgtatgtttcttgtttgctgctaaccatggcaggattgcgcaaggggaaacaagatggtcatgctcaacgtcaacatctacaccttcgacgagatatgacaacttcttcacgtgatgcatatgaggtacatgactataattttgcacaagttgcatgtaagttaccagtctatgatggaaagtatgattccgctgcatacattaattgggagctagcagtagaaaaacaatttgatgagtatgatttttctaatgctcaaatgattaaggctgctagtaataagtgtaccggttctgcatcattttggtgcatactgtgtggaaaagcttgaacttggatgaatgcaaatactgatgagaaaagattgtgttttatact

SEQ ID NO: 4210 - DNA, 425 bp, Oryza sativa
gacctttaaactaagcttgttattacgttgtggtttagatgaatgcgaagaatcttaataattgaggtttttatttgggcttaacaaaaaaattcatgacatgcttgattgtcaaagatatacatctctttctcatttgttacagcttgcttgcaatgctgaaagtaaaatagaggaggacatgaagaagcaacatgctatgtttttgtcttctattactaaccatttgcaggaagtgcataatcatgaaaaggaggagagagacatgaaagagccgctagtcccattgatcacactcaaagtcgaggcacctccattatctgaagagggcatcaaaggtaaacttaatggtgctgaaattaataaaggtgagtgtgttgttaatgaaatgaattcgtccactttttatgctatagcagagcaac

SEQ ID NO: 4211 - DNA, 414 bp, Oryza sativa
  unsure (1)..(414): unsure at all n locations
ntctcagctaaaccttgtattgtgttgattgcaagatcatattcttgtttaacacgattccgaggatgtttcatggggaagcagaagagccagcggacggcgatgcttccgctggaaagaagcgaggaatcgcgcgccgcaatttcgaggaggtttcactgggatgtataggagctggcggatgatgctcgcgccggtggaaggaagcgaggaatcacgcgctttctatgaggatttgccatgatgcggagaaaccggcggacggtgcgcgtgccagcgggaggaagcaaggaatcgcgcgcgaatgcgcgcgctttcgaggaagtttcgctgagatgtatggaagcctgcgtttggcgagcgcttgtcgtcgttcacgttttgctgcaatgcacgcatgtggcggacgacagt

SEQ ID NO: 4212 - DNA, 411 bp, Oryza sativa
ttccgggtctgctctgaatttggcttgatggtgattctacccgctatctttccttttctatactgtttctatgtgctcctttttctccacttttgaatgacatcttttaattatgaatgaatgtccacaccagcaccataatctgttaatcataacacgccatattttacactgacaactgtgacatgttttgtttctgaagtcttgtagagatttgaactgctgctggtgtatttgagatcttatgatatcaaattatgcttagctctttcttgttaatttggttcttggatgaggttgatcaatagtgtataaacgctggacatgcttgggctgcggttagttcacatcaaaatatgaagatttgttgaaattggaacgatgtgaccgaacagttggaagtttgtgtgt

SEQ ID NO: 4213 - DNA, 388 bp, Oryza sativa
acctatgaatactagctgtaaatttattgaatattaatacattaattcttgtggttattagactattagatcgggtatgaaaatttgatagaatcttctattatatactaaatagccattaaacttcctaccaacgctctcaaatcagcacatatgactcctacaaacgctcctaaactaccacatggcttcctaataaaacaatagcccactattttcatctattagaattaatttcgaaggcccactattctcatgtattagatttatttttataaaaaaaaaacccacaatccagctccctcctctcttccccaccaacccacccttctaccatatgttacggacatacgtaaggaatccttcccctatcaattcttttctctct

SEQ ID NO: 4214 - DNA, 355 bp, Oryza sativa
  unsure (1)..(355): unsure at all n locations
tatgagttcgaataattcacaggagcttgctatttacgccgatgtggtagtttaagtgactaagcgtgtccaatataacggtattgtgccacgtggtgggttcccgttgtgtccgctaccacggccttaagtttaaggcgtggggccgncacttaacggttctatgtcatataacatgtatggcttatgatggagagacgtatcatgctggtgtaaggctaaatcattaattttggaaaaagctctattgcgtgtaataaatcgggtacttatgtatcacatgtcatactcttgcatgaatattatttcacatcatgtgggtaaagtgtacaaactctgcagagttaaaactaat

SEQ ID NO: 4215 - DNA, 287 bp, Oryza sativa
  unsure (1)..(287): unsure at all n locations
atccgttctattattgctataagacgaggatctggatgtcaccaaatggcgtctgagtaccctggctggtcctggacagggatttaatgcacacttcccttacaaaatctggttcgagaattcctgggcgcgacaacgtgngaaacaaatggaagcgagggcggtggcctgagctacgaaaggaggaattctatgcagaggcccacgacaatggggaagcgccggaacatttgcgtatgacaatgaagctgcgacagacggcggagcgagcgtacatggctgagatc

SEQ ID NO: 4216 - DNA, 453 bp, Oryza sativa
  unsure (1)..(453): unsure at all n locations
agctgtatccaccaccaccactagatccttttattatataaaccaaaagatcggagaacaaaaaatagccgcagttcggttcaattcatccacctgttcgaaactaacatggttaagcagcaaaaacgttcattattttcgttggaagggggaaaaagagcaagaaatcgtccgtgcctagcatccaactccctcccgaatcagacgcttcataaacaaagagcaaacagtagttggtatctactcttgatgacagcatgatcataaataagcccacccactaaggatntaatatattcacgcgccaaagtaaacaagggcttgtacgaacacaatatgaacgacaaaacctttacaccaacgcaaaatccggcagaagggaaaaaacaagtcgcataattntctcttttgaaggatactcgcacaaatttcttcccttcagctcagaagcgt

SEQ ID NO: 4217 - DNA, 402 bp, Oryza sativa
  unsure (1)..(402): unsure at all n locations
tcatggtcgtcatggcttttcttgtcctggtgccgcttggatacttgtttggtgtgctttttcgtgggagaaccaacaactttatactagcaggtatcgtcatcttaatctctgaacaataaaagaggatccagctgttgattgcactggaatcattacgagatattacaccattcattcattcattcaagaggatttcctggatgacgcctgctgaaacgttggcgggtgtctcgcagtctcttcacgcctgccgcgagtctcgggatccaggaaccaggatcgctcttcttcagaaattaggatcagccacctgctgacagggtccctgttcctttcnagccaaatctaatctatatagtttcatgtcatgacgaaatgttagacaccacatgtcgaact

SEQ ID NO: 4218 - DNA, 388 bp, Oryza sativa
  unsure (1)..(388): unsure at all n locations
gagattctcgctgcggcaagtcaagatgcgggctgttctggcgcacacttctgatctagatgaggcgctggagagcttccggaagaagaaaacgactgagtggaccgctgaggagaagcggaaatatcgtaaggctccgtcgctgatccaacttcatctatctaatgatattttgtcaaaagtgtcgcacgaaaagactgctgcagaactttggctcaaactggaatcgatctgcatgtctcaaaatctaaccagtaagatgcatatcacgatgaagttgttctcncacaagtggcaggagatcgttgccgacctattgtctatggaggtacagcttgatgatgaagagttacgtcttttactgttatgctcactgtctattccatat

SEQ ID NO: 4219 - DNA, 451 bp, Oryza sativa
  unsure (1)..(451): unsure at all n locations
agcttccacgacaaggttttattattattattattcttcttttctagaaggataagccgtgttttagatggaaaagtctagcccgaaggaaattcctgctaatttggttgataacaataagtatagttattttggtagaagtaatgatggtattattgtatagttatgggtgcatgattctcgggtcctggtgtccacgaatttcagcgaggctaggaatttacagctgattnttatctctttgagaatgtgttaatgtgcacattcatgaattactttaatcggtgtataatgatttgagaatgtgttgaggtgcacattcatgaattactttaatcagtgtacaatgatttgggaatggtgtaaggtgcacattcatgaattactctaatcagtatataatgatgtatgtgcatatgggtatttcatgtaattggaaaaaaaattacct

SEQ ID NO: 4220 - DNA, 325 bp, Oryza sativa
tcatcttgttgtctgtagcatcttatgctgtggagaatatgttgcacaacttttcaaatcttgttcatcttcgttacttaaggattaataagggatattttcctgaactaagtctgtccaacattatttcaagattttatcacctgaggatccttgatgtgagacaatgcagtggtcactttggtttaccaagagatatgaatcaccttgtaaggatgcggcattttcttgtcccaaatgataatcttcactctgaaactgctagtgtgggaaagctaaaatgtttacaagagttaaggagatttgaagtcaaagacaagttgag

SEQ ID NO: 4221 - DNA, 322 bp, Oryza sativa
  unsure (1)..(322): unsure at all n locations
atcaacacggcgtggctgcactatgtgttattgtccggcgaccagctgttattaaataataatggcccgctgaattcaagccggtaggatttgagtcccacggggatggccatctcgcagcatcccgcgccagagcagtagccgttcctgatgttgctcccgttgccgaagcatgtggacatgcagacgttcatgatcgggtcgactgacgncctctctccggatagcaagacgagcacgttgcagccgacggtgacgaattggttgttctcgtaagagaagcggtacagcagctccgtcacgtcgaggcccatccacgagc

SEQ ID NO: 4222 - DNA, 375 bp, Oryza sativa
gaagcgcgcatgctctctagtaggaacgataaacagacaaggatgctttgtgtccagtacaacacatttactaaacaaagttacttactatgatgaccttcatgctttcaagcacacgttcaggtgcttttgggacgaactagtgaagaattgtcgatatcaagtgggaacttcgtctcacttgtatcatgcattgcatgttaagtactacatacaactaatgattatctaatatggtatttatagtgactggaggaacacaaagtgcttttaaaattgccgtgaaatccaacgtccaaggataagccaaaactttgagaatatatatggctctctgacataaaggaaaaatgtgagagatatatttgaggctta

SEQ ID NO: 4223 - DNA, 67 bp, Oryza sativa
tccgcggcatagctaccatcttggaaatcttcggtcaggggtagctgacaggctatcgtactccact

SEQ ID NO: 4224 - DNA, 356 bp, Oryza sativa
  unsure (1)..(356): unsure at all n locations
tggagaaaaatggtactacttttgatgacatgacacaaacaagctggcctgtgtaagctacaacgaacgcgacatgcccggcacacggatctaaataaaatggaattggcgccttattacaatttacagaacccggataaaaattaagtactcccaatgttaactactcttaatggagtgaaaggagagaaaaataaacctaacaaaaggcgggtagttcgatatttaatggttgccagctccacatgtatatgttatggtcagtgcttgaaggactcgactgcatatattgcctgtataagtccacagacaaantcaaccatgggagccaccagcaccgtcagtactaacggatt

SEQ ID NO: 4225 - DNA, 451 bp, Oryza sativa
  unsure (1)..(451): unsure at all n locations
tgtcattaatacatccatgaccgattcaaacacgaatgtatttatattggagggaactaatcacctagtaatctaaaattttacggactttttaaacaaccgcacaacaantttaagcattaatataatattgtccatttctaaaaaataaaaataatcgtcctttcatccaaatgaaaataaatttaatacaagcaaacccaacttttcaatgtaggtactaaatacttttttaaacaagtaaaagattgcattatttatttgctaacaaaataaaaaacacaaatgtgcctacactatttcatttataaaagtgcaagtttcttcgtattcaccaatgaaaactgacaaaaatggaagcaaatgaaggatgagaacaagctctacatcttttatatggaacacaatcaaagaattgaggtcgaaaaccttcctccctaaattgtggatg

SEQ ID NO: 4226 - DNA, 277 bp, Oryza sativa
tggcaacccaaccaatccgtatgaggcttgtatgacaggtaggtccgctaacgaatacgataccctataaacattcttatcgatgggataataattgggcaacactagcatgccaatccttagggttacaaacccagttatcgaccgataaatatcccctagggggtgagcagtgggggagctaatctttaagatataatacacaaccactattttccttttccactcttcaagtgaatcctgcctttctgcataagtggctgtttatcgacaacaa

SEQ ID NO: 4227 - DNA, 351 bp, Oryza sativa
ggtatgatgcaagatattcacaaaggaaaggctataaaatatttgcacataaagcatcatttataaatcataatttgaatacaataaaacagtagatataattaagcaatgttagatatcactgccaacactaaactacgttgcaacactaaattttctgttgcagagttccatattaccatatcctgataagcttttttcggcaacaactaaacatgtcctaaattcgttttataaatggaaatgtcctaaattcttttattcgaagggaaatgtcctaaattctctatactaataatgcactataactgtcctagcttatgtaagtgctccataatattccatggtagt

SEQ ID NO: 4228 - DNA, 423 bp, Oryza sativa
cagcacaggaatccattctccactaaaaagaaaaataaaagatatatcaagactagattttgtacaaataaagttagtacataacgtataaaaagcaaaaaaaagtgggctagattctatctttcaaatacctaattatacatcaataagtggatgataggatttggtacttacttataaatataagcacatattttctggcaacatgtaatcaaataatacactaaaatatgccacatgtataactagtgttagcataaaataaactcccgcctaccttcttctggaggtctcgcctttgaatatattcgtcctggattggagggttgatccataaatagctcaacttcaggcttggagcggattgttgcttgcgattcccgacgatgggaggactaacaaaaaaaatatcatggaatcaca

SEQ ID NO: 4229 - DNA, 310 bp, Oryza sativa
aaaactaagctaattatccgtcttagtaaataattacggcagcattatattgtctaatcatggtgcaattatacttaatagattcgtctcgcaatttatacgcaatcagtggaattaattgcttttctatattcaatactatatgcatgtgatgtgataggatgaaaaaacttgccagggatataaacaggcctaaacatcgaaaaaaccaatatctatcaacgctaaataaaacttcctgtagaagttaaatattgacaaaatttagcatcaaaaccgtagagacaaaacgacagaaggtataaggttt

SEQ ID NO: 4230 - DNA, 372 bp, Oryza sativa
tcgtcaatgtcctcttcaacctccacacatgtcgattcgtcttcaaccaacactgctacctcgacctggtcagatccatcaccctccatctggatctttaccatctgcctacctccgggccaggggcctcatccctccgcgtcgaccctctttcccacatccattagactcatgcagacctgtgtgacgtctccttcccgaacctcatgctagctagcccacgcaaatcgtctccactggcagcctccccaactcccctccaccggatctccaatgtcgctattgggaaggtcatccttggccacatgtggctccacggctcacttcttcacctaagccttcttggcatcctcaccatcgtcgcacacggga

SEQ ID NO: 4231 - DNA, 469 bp, Oryza sativa
  unsure (1)..(469): unsure at all n locations
aggcatgccaagcttgactcattgtatgaaactatggctttattattgttttctgtntcatctgcacaggtattacaaatgaacgcactcataaaccatcccaaaaatagttcatctgaatgtgggcagcacaatgtagttgtgtgagcgaacagtttacgaaaggtaaaatggctcaacagaattggaaacactgttccttcatatgcaaaagtacaaaacactgagtagtctgcagtgcatccctctaaaatggtctaaggtcaattaaaagtgctgtccaccattacaaagctaaagatcgagcaccttctcaaaccacaatagaactaacaggtcaataacaaatagctcaactattctacattctggaaatatctagcatatgtgacaaaagatggctcaattattntctgaattccaataatatgcaccatgtcatcctaactcgatgttcatgcaagtaact

SEQ ID NO: 4232 - DNA, 416 bp, Oryza sativa
  unsure (1)..(416): unsure at all n locations
cctatcaaactaagcttaatctatttagcaacatggagcagaagtcaatatgccatttctatcagttgncagnngaattcgtccccatagcgacgatcaagtcttcttttttttaaaaaaaaaaaaaaaaactgaatcgacggtcaagtcttgtaagctcattcgtgcacatatcatatgtcattgtaacaatcatcagntaagctgaaccggtcccaagaacctgacgcaggcttttcaaattattaaacggtgatttgaacaactttgccaatttcactctttcgttttctatgcacacgccttttaaaactattacaagtgtttttttttttttgcaaaaagattctatataaaaaagtgtgttaaaaaatcatacctatctatgttttaagttttttaagcctaatctcact

SEQ ID NO: 4233 - DNA, 484 bp, Oryza sativa
  unsure (1)..(484): unsure at all n locations
taagcgacgcagctgcagctttctacatgcgacaatactatatctttgntttagaaaaatacacatgttgtgcaatattattatatctatgtgcaaagtttcatctttaattntattatatttaaatcgtaaaaaagataaatttctgacacattaattcgtacatttaaaacgggtagatttttcatctttntttttgttgtcatggtcaaaatgtaatgaatttaaagttcatactacatatatgtataatattattaaaagtacgtacatgtacatcttttaaaagatttttcagttatacttattacttcctccatattttaatgtatgacgccgttgacttttcaaccaacatttgaccattcgttntattcaaatttatggcatgcttaaacatttgatgacgaatcaagtcacaataaaataaatgataattacataactttcttgaataagacanatagtcaaacattgtataaag

SEQ ID NO: 4234 - DNA, 436 bp, Oryza sativa
  unsure (1)..(436): unsure at all n locations
gacactatanaatacctcagcttacccaaaaccagaaatccctccgctgagcattcattttgcatgctgaccagcgtgaactcatcagccaagaagtcctgacgtcttatccactcaaacaaggagcacgcctccctagtatttccaacctgcgcatatccgttgatcattgagttccatgacaccacattcctgtccaccatctcatcaaagaaccggcgagaatcccccagtgacccggccgaagcataaaaatgcagaagaacattcctcacaaacacctgccccacaaatcccagcttaacaaccacgccatgggtgaccatcacatgcgtccacccctgtaccctctcgcacgccttgaggaggaatggcagcgggaactcgttcggcaggatgcctcgccggatcatgccacgaagaaaaagcacgcttc

SEQ ID NO: 4235 - DNA, 463 bp, Oryza sativa
  unsure (1)..(463): unsure at all n locations
agcttgctaccacagcgagccggccccgttcttctctatgacactcctatccaatattcgtcggtgccgctctccacatcaagctcgaggaggtcagctttcattggtaagctcaatcaatggtgaattgtgaagtgacattgattgattctaaatatcggcatgtgtgatagcattccattatgggcaggactttgtaatgggccatggcccccctctagttttctcaaatggataaaaaaaggtccatttggcctccatcaactatatgctgagtttaatttgtgttctttaaccgcaaatctggctatagaagaacctcaactatntaaaccaggttcttcactttaataggatctactagtttctacatgcaaagccttagagcaagtacaatagcaggctacaagttagctataagcataaatggaataaataagagatgagagagaaaaaaacgggc

SEQ ID NO: 4236 - DNA, 429 bp, Oryza sativa
  unsure (1)..(429): unsure at all n locations
cgtatagcacgaactatgcactcagcangcccagcttgattcatacctatgaacatgcacagtagtgagattaacagagcaacaatgaacagctcaaagtacacatgacattttagtagatctgctgacccagatcaattggatggaaaagcatctctggcactaagaacctctcattggtcaacacaaattcctgaataggaacaacccagttagatgatgccaaataatattaagcatgtaattatagctcgagatgttacattttgactaagttcaagctttttcttatcctcaaacttgctcctatcgctgtcagaactatcctttctaaccgattctccattagcaggcagagagctgtatctgcatgcctcatccaagtccttcacaaaccctttcttgtatgttataccatcagggagaatg

SEQ ID NO: 4237 - DNA, 463 bp, Oryza sativa
  unsure (1)..(463): unsure at all n locations
agcttgngaagcgtgcatgttaatgcaatcttctatttcatgaaaaagaaaagggaaaatgtgtcatgatcttgatgcttatatttagcaattgatggtgtaagatacgctctttctctccaaaaatcccaaaatataagtgtggtcctagcatccaaattttgtttagaataactacttacgtacccaaccaatcgcccctaatttaattggttggaacgttaaagcgattntattaaatgttagttcgtgtagcgaaaaaatggttttgttttgatgttattcaatgggtttacttagaaatatgggcaacatagttntcacttaatttctcctatatgtatgtatgctcctatctctctatttcctattataagtagataataaaatatttttaatcataattctcttatactctgtgtatagaaaatttatatataatattgaactactctctcataaa

SEQ ID NO: 4238 - DNA, 337 bp, Oryza sativa
  unsure (1)..(337): unsure at all n locations
nccttgacgcttactccggatattaccaaatttgtatgtgaaaagagaatgacgagaagacagcattcatcacgccgctcggcgtattctgctacaatataacgccgcttggactgataaccgcatgaaataccttccagcgtacggtctacagggcacttaacgatcagctgggtaacaatgttgatgcctacgtcaatgacattgttgtcaagaccaagacatacgactcattgattgacgatctactggaaaccttcgacaaccttaaacgatatcgactcatgctcaatcctgaaaagtgcacggttcgagtaccctcgggcaaattgctcgg

SEQ ID NO: 4239 - DNA, 408 bp, Oryza sativa
  unsure (1)..(408): unsure at all n locations
agctntgcgaggtgcccccgccccatccactttcttttctccgactctaccatccgccaccacctaaccagttggacgagattcgtccaccttggtctcctttttcttagttggatcctgccacgggatctaccataaccgtccaccgctacctaaccactcgaccgagatccccctaacctataccctcccccttcgtcttcaatggctcccatcattagatacgccaccactactacccccccccccctctttgtacccactgtttcgattgcaccaccgccgtctcgtcgccttctcaccaccacccaccattgggccacacctccccggcctttctctaagccggggaactcccttctcttcctcatcctactgtgacctacaactgtgaattatattctaact

SEQ ID NO: 4240 - DNA, 307 bp, Oryza sativa
tttaacttgtttgacgacatgtccttgggggacaattttaactcgatgaaaagcaattcattggagggttactttttttctttgtacctccacggaaatcgattctcttttttctcttttattacacagaagacgcccaagcttacacactcctaaaaaatgttccaaagaatactataatagaatattgatgtggcatgttctttcatcagcaaaatataaatgcgttactcttatattattatataatgaaaaaaatattggccctgctcggctacactttgtccggtgtggcgcacccaacatg

SEQ ID NO: 4241 - DNA, 414 bp, Oryza sativa
  unsure (1)..(414): unsure at all n locations
cagctatgancncgggctggggcacttggcggcgaaatgacccattccttgacaattgaagcaacagatatcttcccggactcggcattttcttttctatcatcaggttggntattaactcgagggtagaacatagatcctctgaaatgagaccctaggtctcctttgacagtaaacaattatacacataattccatatcagcatcttccaaaataaccctcctagaacttgctnttattacacatgtctcccttattacatgaatacaaggccctgccttaaacaaaaagggaaggtgcttaacatcggtacattgtatcctcaacaggaatcatccataaacatagcaagctcactggttatagtcatgaatatatttatttattacatgattgctgcaactttctttacac

SEQ ID NO: 4242 - DNA, 355 bp, Oryza sativa
actcagcttgatgttgtgataaagaaatttccaaagtattggtcatacgccatgcgcacactgctttaacagatgtgcttaagtccctagaagacacatggtcccaccacacctggaaatatatggcatatgtggtataaaatccgagtaaataaactcataaaggatttaccaaccgcctcgaaaatgaccacaatatataatcagcctaagccataatattggtcaataaaaatgcacacttacgtggcaaaaagcaatgatattgtatccaatcaattgcttataaacccaaacagcaccatgactatataaaaagtcagcgggccagctatataagctctactggttgaca

SEQ ID NO: 4243 - DNA, 458 bp, Oryza sativa
  unsure (1)..(458): unsure at all n locations
catgcaagcttgtgtagctggaatgaacttatgcttatttcgtgtattaagnactggatttgtgttccatcaaagaaaatacttntttttgtctgttcaaagatgcaaaggacatgtacgtatatataaaggcgatctatacatagtgatgtttggacctagctagagtttactactacctccgtcccaaaataagtacagccgtggatatccgtgcctaacatttgacagtccgtcttttttaaaaaatttatgaaaatttgaaaatatttagtcacacaaagtactattcatgttttatcatctaatagcaataaaaatactaatcataaaaatttttcaaataagacgaacggtcaaacgttgaacgtgaatagtgcaaaactacacttattttgggacggatggagtacctaatatggtcatatggatcaagtatagatatattntattatacg

SEQ ID NO: 4244 - DNA, 439 bp, Oryza sativa
gactctcaaggatctgctcgtcatatgaaatcttatataaaacaatctttgttggcaagtaaatacactatgtttgcattgacgaggataaacttggagcaaacataactgtatttgctatgatccaaaaatgttctctgtgcatcgggtacaatggagcaaacatgtttttcactttcttcgcaggataagatgacaagccaaaggaatctcttcatatcattggacgatgacaagcaaaatgaagggtttcggcttcaaggtttaagatgtgactacctactcgtataatggttggatgtcatacttagagtggtatagaactcagaatactgtcatagaacagattaaatttacgttaccttccttgtattcaagatttgtgaatatgccttctcctttatttatgacgccgtgcaaaaatattctgaagataaaa

SEQ ID NO: 4245 - DNA, 447 bp, Oryza sativa
  unsure (1)..(447): unsure at all n locations
tgcaagctntttatcattctggcatcgagctatttngtctgtttgtttttccctacagnatcgncaccgcagtagagtttaaccaccaaattcgggatggattggtgtggttcctctacgcctaggacaccagaatatcgaaccatgaacgaggaaaggcatgagagaaatattggctagtaattgtgaagccccaattcttgactggaagggacaccaaaggcctctgccctccctctctatctatccaagagatggaagggcagagctnttttttgggtttttcatcttttcatcaaagagttgaacaatgaagatagatggcaagtgcctgatcgatttgatcaggtcgtgtaggaacaaggttcaaatcgttcgttcgttaggatgcctcagctgcatacatcactgcacttncacttgacacctatttaaacggctcgtctc

SEQ ID NO: 4246 - DNA, 474 bp, Oryza sativa
  unsure (1)..(474): unsure at all n locations
agcttggacagnaggacttagtgagaggtctgtgtttctctttattataacttctggctgcttccctgaagctctgactataccttgacaggataggaagatattactaaaagaacaagtgacattatctatatatgaggtcatttaataataaaaacccttcaaaattacatgtgcatgtaagtgagactaccaatatttaggctcctcagtcctcaccaacccatctgagttacagctttcaagtaaaagacctgacactntcaagtccgtaccatgattcttcaatggttgagctagtcaatgttatagataagatcacatagaagtaaccactgagctaccatctcgtgtttgtgcagtaaccactaaccaacaggctcatgattccattataatgcaaggttttagacagattacatggatttggtatacattcgatggatatgggtagttgattactgctcatgtaac

SEQ ID NO: 4247 - DNA, 334 bp, Oryza sativa
tactgacgacttgacaaggctcatcagctaatctcatgacttcgaagccgatgactactccgggcttaccaaatattactgttaacaaaaagcagcatatcatgatcataatgtttagcagaatttgaacttatacgctaactacgttcaaggaggttttaaatgtcttccatttgtcagatttctcttagtgagttattggtaggatttagcgtcggaaaccatgaaagatgtactttctttcctttgtgttgtgaaacatgtacatggtcttttcctttgtggtgtttgttatgtgtgaacctctttgatctcaatgcaataatgatacaca

SEQ ID NO: 4248 - DNA, 419 bp, Oryza sativa
  unsure (1)..(419): unsure at all n locations
gcttaatactaaagagtaaattangnccattttttttattctatcatgnattcttaccacttcagataggtgaacatctcaatttgcagaattgtctttgtttaggaggttacactatataaagaaaaaaaatgcactggacaatattttgaatatacatactgntctctcattcagcatttgtttacatattggaataagaggtaacacgttgaaagttcttgaagagaaaatgatcatagctgtagcaagagtaaacaaggaacggcgccgacatggtggtaatgaatctgcaagacttacaaaaagaaaagttaggcatcctcattcatttacaacatgggaccaagttttcatgacgcatggaacactgcatttcaatttactattagtgctacttcaagggcaacttggtacct

SEQ ID NO: 4249 - DNA, 471 bp, Oryza sativa
ctcaagcttgtgacagcccagggccaatacacactgattacctgtcttcttgctgtgcttttctccagggccgtcggatcatgaaagtacgtcctaaattaatttggatttcttctttaaaatttctacactctcacatgtggaatacctttctgaactcatcgctaccttgtacatatactttctctatttcacattataaaatattttaagttttgaatagatttatacatagatccgtttacgtgctttatatatgtttaaattcatataaatgttaatgaatctagatgaaagattggacagatatagacatattattatatgaaatgaagagagcatatatctagaattatgatatgctgatcttaccctatgagccatggagaagaataatataaaagaaacagtatacctctgtaattaaacatggtgatctcgattaattaagttccaaagtaatcactccta

SEQ ID NO: 4250 - DNA, 474 bp, Oryza sativa
  unsure (1)..(474): unsure at all n locations
catcaagcttgcttnacacctaaattcccgcgtcttgttgtgttttatttgtactcacccttgctctatataaatatatatagntcctccgcctcgaagagaagatgaagtgaagtgaagagtacggttttgtcctatttcccagccgtcgcctgtggtgttgggtgttagtccgttagatctgctgctgctgttgttgatggagttttcctcgtccgcgtcagcggttgcattctcgggctgttctgagctgcaacctaagttaaggtaaataagtcctttattttatttaaggattgcaatgattcatatttgtcaccgtgggtaccagcactatgtcctgngactgatactgtgatcgcgcgtttgtatgaagacggtcgcgccgttctttctatgatacgcttctgttaggtgccattgtacggcggtgccggattgaggtgtgacatatacatgtcgtattatgatata

SEQ ID NO: 4251 - DNA, 410 bp, Oryza sativa
  unsure (1)..(410): unsure at all n locations
cactatagaaactcagcttaaattctttgaaaacaaaatcttcctctggtatttaaagaaaggagtgattctcacgaaggacaatctagccaaaagaaattggaagggcatcactaagtgttgtttttgtaaccacaatgaaacgatacaacatctcttttttgattgtcatgtggctagatttgtttggagtaccctttttataacatttgggataaatccgcctaacagtgttgctaatatgtttgggatttggctaaagggtttacaatctatgctaaagcaccaaatctttatatggattgtggcgttgttgtgggcaatgtggatttgtagaaatgatgtggtcttcaatggctccaatttaactcttacttgagngtatttcaggggacgattgggctcacatg

SEQ ID NO: 4252 - DNA, 323 bp, Oryza sativa
tatcaattgtgcaaatgcagatacccattttatttaaacaacccgcacaagatagtatgatatttctattgatatagtaggaaaaatacaagtctatagtcctggaagactatagtcaggaaaaaaaagaaaaagatagtcacaacacgcatttacgtctgatcttgctactaaaaataaaccaagcacacaacaccccagaggaatggttcttctgaatgacgctaagagcgctgccgtcatccgtcctagagaaccaggacgtggttttcacctaaagaaaccattggataggagaaacgcaacaacaccccaacaagaat

SEQ ID NO: 4253 - DNA, 338 bp, Oryza sativa
gatggttgtgggaagcggtggcctgtttgtttcattggacccgggcaagcggtgaggtgttggtggcggagctggaaccatggtgatggaggagggcggtgggctggaattagtgacgagggcaaagcaagtgtgtggttaggaggtggcagccggtggtggcggatctggtgacggggagccgttagagacggagaagacgacagggtgggggcaccttgtggccaccaccttgtggaggaagagagcacgaaagtggggtgggaaggggagaatgctggctggggaggacctcgctggcgccgctggcgtattccggctatctggtgaagctgggc

SEQ ID NO: 4254 - DNA, 424 bp, Oryza sativa
  unsure (1)..(424): unsure at all n locations
cttttcttttccaaggaggaagtataaatcccatccctctttccttttcttttccaagggatttattgaatcctttttcctttgcctccataaaccaattctccattccaaaattccctanataatttcccttggtcccgcacgtcagtgactgtcaataatattcttgagaatattatttctataaattccaataaatcatttcctttgtccataaattccaattaaacctccaaaattcatatctcttgatccgtaactccgatttaccccgttccacttccaataattccattaaattgtgatctatctaatggcactattaattagcctaaataggatattntatttggtctttngttaaggttttgactgattgcgcctagatgcggttaccggatatttntcttcaagtggaattctc

SEQ ID NO: 4255 - DNA, 433 bp, Oryza sativa
tgggctctctcccacggaggaggtgggccctttccatgcatgttggactttgttccaataataacgctgcgtgatcaccaatgacgagctgagccaaggtgcaaagaacttctgaggtgaatgcaataagcacaaatgtcattcatcggcctaaacgatgagcaaacagttcgaatggagagggaaaatcatgtggggatatcacgtaagtgtataataatttataaaaatattgtggccctattgaaaatttgtaactttttctttctttgcgaacacaaaatatgctaacttggaagtagaaaagttctatctatataaatttcttaagaaagtattcataattcattcggggtaccctcggatagggatcaccaccatctttaaaaaagtaattcaataaatattcgtttattatgaacaactataaaca

SEQ ID NO: 4256 - DNA, 295 bp, Oryza sativa
cacttcgtcttaaagttcgtgctacagctggctacaaatctgtagcccgctgctcttctctctcctgatttatcttcttaaaatatgtttgcagctggcttatagcctgctattgtacctgctctaaagctcagtttaactcttgtaactacctcgtttattacgagaacactgtgtttttttaaaaaaataattttcttggagaggcttcttttaaaaaattcaataaacatatttttattaaagatgtaactgttaatatttaattaatcatacgttaatacatattcttact

SEQ ID NO: 4257 - DNA, 401 bp, Oryza sativa
  unsure (1)..(401): unsure at all n locations
gcttaccagcagatgcagacacctcttgtttatcagcaaccgncagncaaggtatgcacaatatctgacaaaactatttcctcatagtctgtacaaaggatatctagttcttgtatgtggaattagtgctcaattttgtataatatgtagggattgaatgagctcaaggactcaacagtccaaatggcttcaagcatgggcaacatcgatgcgccagttgatgagacagtctttgacatcgagaaagaaatcgatgacctgctgcctatcgaggtcaaggagcagaggttgagcaacttgctccaggccacaatggttgggggttgtgttgctgctatgccattgctcaagaagatcccgacttctgtcctctggngctacttcgccttcatggccattga

SEQ ID NO: 4258 - DNA, 445 bp, Oryza sativa
tggcaagataaccctctcccgctttcgtcttggtagcgctgcgggagccacggttgtcgtatttggcagggagagagagctggcgcgaatgtcctgctcgatcttgggctatagtcaacgatgtcgacgcttgtgggtgtcgttttccttcttgaaggcatcattactttgctctccccgtttcttcgggtgaaaaccttgttccgattttcagaggacgttgtttgcgtttcaatgctatcttcctccttggagactttgtcttgaagacactgccttacgttgtctgtggtctgttcataagaagtcggagctgttcttttgagctaggcaacgatgacctgtgctttaaccttcacatgtatcgttgcaagttttagtttgtcttcgtgtgggattacctggtttccacaacaaccgtgcttatgtggagttttggatcccg

SEQ ID NO: 4259 - DNA, 465 bp, Oryza sativa
  unsure (1)..(465): unsure at all n locations
agctttatgcgacacagctgtattttcagttttgtttagagaggtaccatggaggtggtgtgaaagaccacattcttaggatgagcaacatggcttccaagttgaagcaaaaagatttgggcatctcggatgactttctggtccatctggttntgtcctcattgccaaagagctttgacaactttgttgtcaactacaaaataagtccagaaaaatggaatcttgaagagctcatctctaattgtgtgcaagaggaggaaagactcaaagagaccaatggtggctccattaaccttgttaaagataacaaggaaaagagctagaggtcatcctcctcaaaagctaaacagcctcagcatctgcctcagcaataacagttcacagttgagacaggatcagtgtctccactgcaagaagacaagacattccaagaaagatcgtcctgacttcctgacagtgatcatg

SEQ ID NO: 4260 - DNA, 447 bp, Oryza sativa
  unsure (1)..(447): unsure at all n locations
tgccttgcagaaagagtatgaataatccagttcaccataaagtgatatctaatttataaactaagtattatttataggctgcaccggaaaaatgattctccatatatatgtattatatcttaattaggtattcatgattaaaactggtccatatcactattcctgcaattagtcttacatgaattatctgtatgaggaaccattggctacattatatcgcttcattcaacagttctagaaagatgaataaatgataattntgaaataacttgtatatcattgtaagaagccaaaattggtcattttttttaaaaaaaattagggaagtccttagtaccttcaactatgtccagtctagtaataagaaatcatgacctccgaatgataaaagaaataaaatatggtcattttcactagaaaagctccagcttaatgtgatggtttgac

SEQ ID NO: 4261 - DNA, 325 bp, Oryza sativa
  unsure (1)..(325): unsure at all n locations
cttcttccatcactgttgcaaactagttggtatcagccttgttatgcttacagttccatttgcaaactattgaaatgctctcctctgacaaaacaggatgtttacatgggaatagnggggtcattttctttcaactctttcctttctggcgtgctctcatgcatatgaactgcagtcctcgctggtagggagatcttaaccccttctcaattccgggtaccctgtttcggttgtacgatacataactgtcaatgtttcgtgcagtttgccttcgtattcaagttaacatagataacaacggaagcaacgtgactctactttcacc

SEQ ID NO: 4262 - DNA, 433 bp, Oryza sativa
  unsure (1)..(433): unsure at all n locations
cgcacatatcaggccttntctgttagtgctgccgctgcttattctcacctcttccattntattattattattccattttgctcctactatactagttcgtactctcaaattgcagttatctcaattttatttactcctacatattacgaaatatactgcttaaaagacaatcaacttttcttcaggtaaaccttgaacgaggaggataaggagttcctgttttatattaaagagattaaaggagtttgatatatttttagaaaccagactccaaaaccttcgaaatgcacggtcaattaaaacaaaaccagcaatcaactttggtcccgtcagatatataaacaaaacttttctttttctgtttgccaaaatttaaatggaatcgatggattatnttgttgttggggacagagacaactactagtatgcatat

SEQ ID NO: 4263 - DNA, 437 bp, Oryza sativa
tcattctccaattgagatacttgagggatggacacattattattttcatcaaactagagatcagaatcatcaggaggaccaaagaggcctttatcataagtggtaatatgcgactttaaatctgcatcaccaattatcaattgatccccatctagaagttgaaaaattctggcttttctatgtttgccgcgagcaaccaaatgaaaatactttgaatttgaatcaccctctaaaatatccttagctttagccctttgataccacttaaattcttcttctctcataagagtcaaccaattatctctaaaacggtgaagtaggtcttccaatattcgtgtgctttacgtgcacaccagttatatacatagacatgttcagtgcatgacatgtgcttgaggactcatgtgaaactgaaaataagtctgtaaaccgtgatg

SEQ ID NO: 4264 - DNA, 466 bp, Oryza sativa
  unsure (1)..(466): unsure at all n locations
tgcaagcttatttccagntttcactgaaagaagtctttttttgtttcttatatatgaacttgtctgttcagtgcattcatgaagctttgtgattcattagtgacttactgatacatatgtgacgatgtgcgctggatatgaaggttcattccaagcactagtcatatgtaaaaaaaaggtgcaatatgcacctgataattgtagtgctgtgtatgtacatttaatctaacatagttagtagttcattagagtaattagagtggttcatgatattagttcattagttactctaaacatagttatatgatgtgatctttcttgtgatttctgttgtgttacacagttacggcatagaatttcctgctataactccaacaggtcacgatgatgccttccccgatcctcacagggtcgtctncaatcacctaaagtatatgtaaatcatactcacatagttaatagtttc

SEQ ID NO: 4265 - DNA, 333 bp, Oryza sativa
tcctcgcgctccttgtgctgacgtcaacttttaccatcattcctcccgtcttagcacccctgccagcagcgatgcccaagatgttaacaacatcatcatcgaagcaactctaggccgggtaacacatacgcatgcgacctatggacaatgaagaggttgccccttgaccttgagcctcctccctgtgttcatcaccgctgttgctgagcatgatgctatgaagcaactcgtaatggtgactagggttggtgtcaagatggacttcacgcgattcagcaatgcattcacagcgccagtcgtcccatgaagtgaccgggataagcatgctccatg

SEQ ID NO: 4266 - DNA, 422 bp, Oryza sativa
  unsure (1)..(422): unsure at all n locations
gtaccgccccgggtggaccactcggtctggatgatccgaacggtcgaacttgatcgttatctccgaccaccaaagatactgcggcgtatcagtctggacaacattgatctcccattcagtcaacttttgctttcttttagactcgtaagctagagggccgccaaagatgtaggtgagctccttgcggtggtcttgaaaacctgtcggggcatcatcatcatcatctatcttttttgacgtgctttgtcctccgtcagaggtcttctgtgcattcttagcatattgctctgcanactgcttgtagacgaagcaatccttatctgcgtgttggagttgggatgatgcggacattgngagttcatgatcttgtcaaaagtggtgacacgcgaacgttgtcgggagaagtgtgtagtagtcgcaac

SEQ ID NO: 4267 - DNA, 445 bp, Oryza sativa
  unsure (1)..(445): unsure at all n locations
agcttcttcttcaccggcggccgcattgctttgctcttcttcttcgcgcgacgccgnggcattgctagctgctacagcgagaggaggaaagacgaagagcaagacagcgagcaagtgagcgagtgggtggcacactgacacagccagcaacggcaagcaaggcaaggcaaagcaaaacaacggcaacagcaaagcaagccacacagatctagtgagagaaagagagagatagagagagagagagatcaactgaattttctctctctactactactacttgagctctgcttttgngccctttctctctttctctctctgtgattngngggggggtttagggggaagaagagaagaacaagaaagagaaggttctgagggctataaaaatggcgggcaattgttcggtgcgatggactagtagtagcagtaggggtttattagagct

SEQ ID NO: 4268 - DNA, 419 bp, Oryza sativa
  unsure (1)..(419): unsure at all n locations
taacatgcaaccatgccacattatcacccactatcaattattacatattcaacctcgtgcaagcatgcaagatcatctacaatctatttagttctataaattaacatgcaagcatattcaatcgctacctttcacatcatttccacaatagttttacaattatctctatcatttttataatatttaatataaagcgctttcatgattaaaaaaaattgataagccctgagatttgattattttttttctttttactcctagctgaattgtaacgaanaataatattgaaaattacttagtaattcccgtagcaaaggggaatcctctagtgtcagaagggataaaggactgggttaggatatgccctttggatctctataattttcacttgaattatgctatggaatctggatatgccc

SEQ ID NO: 4269 - DNA, 452 bp, Oryza sativa
  unsure (1)..(452): unsure at all n locations
agccaccccgaggaagtataaancccttctctctttccttttcttttccaaggaggaagtataaatcccatccctctttccttttcttttccaagggatttattgaatcctttttcctttgcctccataaaccaattctccattccaaaattccctaaataatttcccttggtcccgcacgtcagtgactgtcaataatattcttgagaatattatttctataaattccaataaatcatttcctttgtccataaattccaattaaacctccaaaattcatatctcttgatccgtaactccgatttaccccgttccacttccaataattccattaaattgtgatctatctaatggcactattaattagcctaaataggatattttatttggtctttgtttaaggttttgaatgtttgcgcctcagttgcggtaccggatanttttcttcaagt

SEQ ID NO: 4270 - DNA, 408 bp, Oryza sativa
  unsure (1)..(408): unsure at all n locations
tgggctctctcccacggaggaggngggcccttgtcatgcatgttggactntgttccaataataacgctgcttgatcaccaatgacgagctgagccaaggtgcaaagaacttcggaggtgaatgcaataagcacaaatgtcattcatcggcctaaacgatgagcaaacagttcgaatggagagggaaaatcatgtggggatatcacgtaagtgtataataatttagaaaaatattgtggccctattgaaaatttgtaactttttctttctttgcgaacacaaaatatgctaacttggaagtagaaagtctctatctatataaatttcttaagaaattattcataattcattcgggttaccctcgaatagggatcacaacatcatttaaaaaaagtaattcaaatatcat

SEQ ID NO: 4271 - DNA, 466 bp, Oryza sativa
agcttccattatctaaaaaagaaatattacttaatttatctcaactagacgacgcttttgaaaaactcatgatctcctaattctgaagtcatctactttattttcctgttgttcttactctacgcaacattgacaatagtcatggtagccagatagcttggtatggtagctttaagatcaccccgtatgagtatgaggtataatgcatcttgttcatatggagataatcaatatgttgaaaacttggcactttgcaatatggcattgtaaaatccagtgctttcttagcaatattatatctagtagtacagtagttactaatgttaagatgtctttatctttttcttgagatattatgttatccttttgcagtcgaacaaaacatggaattgttaccttgaaattcatatacatttgcagtaatcttgcatcgcagagaatctattcttcgatgctgtcattcact

SEQ ID NO: 4272 - DNA, 408 bp, Oryza sativa
  unsure (1)..(408): unsure at all n locations
ccgccgncggncgcctcacgcaagtatgccaccacgcctgctcgagagaggagagaaagaagagaaaaagaaaggatgtggggcctacaccgccccgccgccgcctcgccgtgggtgagccgtccaagctcgggccagccgccgtcgcacactcgcacctctgctctgctgcaaggaagaagaaggggaaaaaaagatagagagaggaagaacagtgtccaggggcattttggtacttacacaactctttctctctccatcttgaccggaaataataaaataatgggaagaatgtccagcagctaattaccactttnttacagtgttcacgagcaaatacacgatcttcgggtgtctcacagcaaagaccacaatctttgagtgtcctggtagcaaattacccttcac

SEQ ID NO: 4273 - DNA, 433 bp, Oryza sativa
  unsure (1)..(433): unsure at all n locations
atgcaagcttaaacagtggaggagaaaggttttgtttctattatgctttaccaccctcccctcagaaaacatgctttaccacccctatctcatcaacctaatcagccccaaccatgaagaacgacatgtgacagcacttggaaccccttaagtaccaccaaccgatgaatgaaatgcaccggacgtctgggctttcatacacaaacaaactcatcccaaaaaaacatgaactattaagcaaaggaaagtaatcccatttatagtacaaaacatgtgtttttgttctgatttccatgctatgccacctcatagaatcagtagcagttaaatgggaaaaagatatcaagtactcccttcctcggnggaactgtgcaaatgatcgtgacaaattcatgaaagagaatggcaaccttgacacaaaaatcaatctatc

SEQ ID NO: 4274 - DNA, 443 bp, Oryza sativa
  unsure (1)..(443): unsure at all n locations
acctataaaactcagcttgcacatanaaaaaaaagagtactccttatgtcctatatcttatcgtgaaaagttacgtatcttaactgcttcctccgttccaggtcataggacgtcttgactaactgtttaaagtttgactaagtttataaagaaaagtaataatatttttaacccaaaataaatttatgataaaaatatatgtaattattgatttgacgaaattaatatagtattataaacttaaagcaatttaactttgtccaatgtcaaacgccttgtaacctcaaaccgagtgactgaaacggagggagtatgaatcaatatataacgtgtcatatcaacttattgctgtgtatgcttattagtacgaattacgagtatgattgttgatgctgctgctgctattattatttcttctaccacactcaaaagcatttacagat

SEQ ID NO: 4275 - DNA, 441 bp, Oryza sativa
  unsure (1)..(441): unsure at all n locations
atgcaagctggagctcgcaagatgctctttctttttcgttatangcttgattcgagctcggctcgaatactagacaagctcaagctcaagccaagctcggctcatatacttatcatcgtgcttgacctgctaaagtctcaagacctcatcaatgcttctcaataaagcaattatccggctgctagtaatagtactactaacctattagatgtagtagctagcttttgttaattgcaacatttcaaatccatgaattcatgagaaaagctgcagaggcttcattcaagataagtagcactcatntaatttgactaccgactaattgcattaatatctcttatacaagagtaagttctttggagtttcaccaagtcaagctgtcaagctcaagtaggctcgaagctcgctcgagctcgaactcgagctcacttccaagctcga

SEQ ID NO: 4276 - DNA, 331 bp, Oryza sativa
  unsure (1)..(331): unsure at all n locations
agacactattnaatactcacactcatgcaagagagatattaacaaaataaaacgtgttttcctttatataatagcgcgctctacctatactctaagataactatatttaaagtgagagaaagagacaggcaacatattatatgtggtgattctatgagctcatagcttactgtgagctcgatctatctactactctgagtgttagatgaatggatatgtcggttagggataatagtcaaatcccgacatatagataatatatatcctatacatactatacgagtctagagatagaatcctagagataaatctactcttacttgagtatact

SEQ ID NO: 4277 - DNA, 417 bp, Oryza sativa
  unsure (1)..(417): unsure at all n locations
tcttaaatgggtgttgatcctaccggtggtgacggcaagtgtgaaaagggtattttctgcaatgaatttagtgaagactaaagtgagaaatagtatgagtgacaagttattgaataattgtttggtcaccttgattgagcgtgatatcttctccaatgtacgtgaggaagacataattcactctttcatgactatgaagaagcgtaaagcaaaagctcttgagtcttgattagtattgtaatatcctatgtatctaaagaccttatattatgtttgaacaatttacattttgatttaggtaagatttaaacttaattgttattttctacttgtattgaaccatntagagttatataccgtatcgtttaccacattatatatcgaattatattgtattgcattncgaatttttttggg

SEQ ID NO: 4278 - DNA, 385 bp, Oryza sativa
tagtctcgatccatcaacggctatactctcacgggctttaggaacacatgcacataaacaacaaagaaactccgtatctgagtacaagctcgcaccaatttgactcactttagtacgcaatagtatgacctacgaatagaaaccatctagaagtcatattcacgaagcaatctaaatatacatgaagacagatatatcaacgcaatggcaagaaaaacactccccttttcaaaagaaagaaatttttgaatccctttcgctatatttgcaatcaatcacagaatcgagatatgatcaaaactactacctcgtacacaagcatatgaaaaaactaactaacgaggaaggtgaacacaatatattcacttcaaagtatattgatgta

SEQ ID NO: 4279 - DNA, 442 bp, Oryza sativa
  unsure (1)..(442): unsure at all n locations
agcttcaccaatcttcagaggcagagggtgttgttatcttttggatcgcctcttctcaacctgaacgatgaactctgcggagccggtatctaaatcgtcgtcttcgccattctccagttcttcttgatttggcagcaacttcactgaaaaaaaaatggtagcaaagtagcaactttgttagcttctgcattgcataatctcaccctttttcaggtggttagaagatagatagtaccaccttggtcagcaacatcactgctgagctctatgcctctactcctgcanacaaacgaattgtacttcttgacatcaaaggaaggtctctcgaagaaaaatcacattggtagtgctcaaatgcatttctgaatcctgacatgcttagcttctcctcctcatccttggcatnggaagagtggacagcacagccgatgaagatagcgac

SEQ ID NO: 4280 - DNA, 418 bp, Oryza sativa
  unsure (1)..(418): unsure at all n locations
ttagcccatctcatgtggaacgatcctcctgatatttttatcattctataattaatcacctcccagcatcacagggcattggacattcagtaacctgttctgtactatctcactcangaaactttcctttctgtcattctctgtacagggccataaatatttcattaccatccacagttttttgtcactttttgtctccagaattgtcataggtaggggtcaaggtcctatcccgagattagatagngtcctttcctccatctacataaagatggatcgtatctgtgttctaatctaacaatgaattagaattagtctccttcaaaaacctagtcatggtccctcttgtcagcagaagtgaaattgatgtagcgaaataaaagttaatcttgtgtacattttcactatctattcgcat

SEQ ID NO: 4281 - DNA, 469 bp, Oryza sativa
  unsure (1)..(469): unsure at all n locations
catgcaagcttctcttactgaagaggggaaagattgttctttattgtttacaaccacagnactcagcatgccacactcgggatgcacaattaatgcgaaggagtacaaggggataataacatagaggttaagttttgcagtaaacagcatttaaaagccacttagttgcccaaagccattttgtaaagacgatcctagagctacacagtattattaatcaaggccgtgaaccctcacgaacctgccttaacccaaggtctacgatgattctgaccgaactggcaacccgaccctgggtcccagctcgtcccaagccaacccaggccaaccattccatattntagttgttgagcaaaatttaagaattaaaacactgacttggtacattgctaggcttgcccatatccgagggctcggctattcgaatagaattactctgatcagaggtgtacatctttacccacaagac

SEQ ID NO: 4282 - DNA, 394 bp, Oryza sativa
gagccggaaaggcttcttccgcccatgaggtggtgatctggacatggcaaagccgtccttcttcgagctggctgccagggcgaactggtcatggcgaagccagccttcttcggtaggtactcacgcgacgacttgcctcgcatcatccttggttcatagccttcgccacgggtgtcggcagatctggtcaaagggcctaatgccatccgccaacatagtgtgcagaaatacagggagatcaaatgttttaagatggtacaaataattggcatttgttattggatctaccccttgtatagggatgattgcaccggcctaaccgtgccaactcccggtctaaccggcgttcagaggcacggtcatactaatctgaagtcaatttgaccagcggtga

SEQ ID NO: 4283 - DNA, 474 bp, Oryza sativa
agcttgctggttcggtaagggacatgcgaatatttctgtgtttgagatgcaatcacatctcctaatgctgaaagtgacttgtttatgtactgtgcttccttcagcctgtctcctacaacctcagacttatcaactctttcactaccagctagatccacaagatgcatgcaacctctcaacattgccccagatgttaaatattttccttggacatgaacagacaagcagctgcatgtagattcctcagccataagtacagagctcaaatatgaagttttctggacgttctcagtatgaaacaattgcatacctatgagagcggctacttcgatcgttgatggctggtgaacccactgcacgattcttctggccttgattcatcaattcaacaacatcggccgtagatgtgacaggaactatgcttgcatccggaacagcaagccctttctgtggagtatttcttatttctaatgt

SEQ ID NO: 4284 - DNA, 461 bp, Oryza sativa
  unsure (1)..(461): unsure at all n locations
ntgtgttagcatgcatagactgaataatattaaagtttcgatgtttataagagggtacgatgttatatcatttatcgttctatgaattttactttgagcctttgaatgcacataaaacaagagcgcgtggaaattgagggaaaaacaagcggaatctgcaaatcggatggccgactttataaaaaagaatcgggaggtcaaatgtttcaattgatcatatgtgagacattaagttctacatggtgaaacaaaagaagatcagtgattgaaacattaaaaaatttgtgaaacacagtgaagacacaagttgacacatatcgccattacttatgaaacattgacttttaatagtctcaaacatatgcttttcttttatcaaaatataatcatacgacatcttattctaaaaattntattataatgaatacaacgatatgatcagatcgttgatcggataagta

SEQ ID NO: 4285 - DNA, 391 bp, Oryza sativa
agcttttcgataacctcgcattggcagaactccgtttcattaacttaaatcctcatgcactctaggcgtccatgtttctagcagagagaggagttttggcgctcccgggaaagagaagtctcacacacatattaaattatggttcaagttaagttctctctctcacacactcatggcagtcctaccaatggcgacaccgatgtagggcacgcctctcggccctacctcaacggctgtcccaccgtagcgcacctgcctcactcaggggtgaaccatctatgcagggatactgcctccgctcggctatctaatccgctaggtctatacccatacgagaagtgcgggtgtacgggggtcgtttcatgcttaacttcatggctcggcccttaat

SEQ ID NO: 4286 - DNA, 425 bp, Oryza sativa
  unsure (1)..(425): unsure at all n locations
ntngaagggcattattgtaacttcatgtgtacctcctattgctatataagctgacccaatcctagcgaactaaaatacattnttactggtacaatgacgacaagtgttttattgacacatcttgatttcacttcaccttaaggctagacgggaagagaagtactttcctgcctatccccaatttcttcatgaccaatatgcatgcctagtttacataaggttaggccccaactaatattatttagctatgtaatgggatagacatgctatgtgagatttgatctccaatcctgtataaatttgttagggtacatctatatgagtgtgagggcgtgcatgtggtatatgcatatgaaattngcttaaaaaccctttatgggatgtttatcagtccaaccgaaatgttaagctatagttgaagctta

SEQ ID NO: 4287 - DNA, 477 bp, Oryza sativa
  unsure (1)..(477): unsure at all n locations
catgcaagcttctaataattgatgagattcatctacttcttgatttcagagggcctgttctggagagcattgtttagatcagtcaggcagactgaaacaaccaaggaacatatccgtctagttggtctctcagcaactcttccaaactatcaagatgttgcagttttcttgcgtgttcactctggtggtctcttccattttgataacagctaccgaccttgccctcttgctcaacaatacattgggatcactgtgaagaagcccttccagaggtttcagttgatgaatcagatttgctatgagaaggttatggctgctgctggaaagcatcaagtgcttatatttgtgcactcgaggaaggagacagccaanactgctcgtgccatcaaagatattgcattatctaataacaaactgacctgctttccaaaggttgagagcgcgagcctagagattcttgccgatcatgcaaatcat

SEQ ID NO: 4288 - DNA, 434 bp, Oryza sativa
  unsure (1)..(434): unsure at all n locations
gctcagctttcgcgtcgagttgttgcgacgagttatttcattaatacttgttcgaagactgtatgcactctaaggacgagaaattggattatttcaatggatatatgttcagacgctctcatatggacatcatcaagagtagccaacaaatcagcaatcatcaatgatatatttaatctctccacacaacttgacaagctcatgtactcttatataaaacacggtaaacatacaataccttcatatatttatcattcgagatgaccattaaacagtacggtatatacacgctcatatantatgttgaggaatgtccgccgcgacctttttaagatgagggaccatgactaacattatcttatatcataattgctgggcctgtggaaaacaacacagagcctaacccaactaccgacaataacaaatgaatctat

SEQ ID NO: 4289 - DNA, 460 bp, Oryza sativa
  unsure (1)..(460): unsure at all n locations
tgccgaccctaaaatatatagttcatttattaaaaatggggccccttcctaccctatgctcaggctatcagttaggtccatctcacagaacctcaatccctattgaccccatattagaaaaccctgaatctcaagtacaaccgttacatatatgacacattaagatgtagaagacactaatttttatatcagtttttaataaactgatttgacaaagctagccgggtccatttaccattttatcataccagataaactaacacacacacacacacacacgcatattctcttccatgaagatccaatatgcatgtttgttttgttccatttttctaccaaaattcattntgtagtgcattccctaagacccaacgatccccagtcatgcatgatacaagggtgcattaanaaccctaaactcaatattttntttccaaaccacaatatgaaaccatacata

SEQ ID NO: 4290 - DNA, 396 bp, Oryza sativa
ttctttcagagctctgaactagatgtagttatactggctgagtttgaggagaaagcgagaagtatgcatgcagacataatgagtcatgtaagttcactaagaagcctgatgaacttttatgcgtcatgcagtacattctgaaattgtttatagattctagaccaaattttcttgtttcctaatcactattctctatctgaattcccattgctatgttcttgtattaaaaaaaatatatccaatactttggtgacatgtttaaaactatagattttcgcagtgtaagttcatctgttgatagtattagaagtgacaaccaacttattgtttgttattcttgcagtggatcaacaaggaacttcagagactggaaaaattgattgaaatggcaaatga

SEQ ID NO: 4291 - DNA, 478 bp, Oryza sativa
  unsure (1)..(478): unsure at all n locations
ggcatgcaagctgntnctgtatctgctcagatttatgtccttgtgttgttaaaaaaccgatcgttctataatatataatgggaaaaccaactatcaattcacacaaatttacctgctaaccatctgatgctttctcaatggatcaccaaaatccaacgtataggtgtgtgatggtgagggaataccaagaggaacctcacatccatacatcacaagagggtttgagtgtgttgtgacatcataaacattgaccaccaattcctggttaccagctaactgtctcaacaaattttctactagtgactccacatcaaatgctcctccaaggtatctgccgaacaaaaagataaagttaaatggagccatatcgtgcacatgttgtacttaaaataccactgcaattgcttatacatctagacatatcagctctattaatgcaaaacattttcagtcaggtatgagtgaaaatgttgcatgt

SEQ ID NO: 4292 - DNA, 416 bp, Oryza sativa
gaacatcaggcccttcctatttagcttgagtgcttttcattcgtgtagattcagagtatggaaaaccaatcaagaaccaaagaagaaaacaaatcagtactagtttttattactgttgtttccaaaagtagctatttcttgtcaaatccacttctccaccaaatacaatttatagttctcctaaatagatagcaacaatctattcaaaaaaaaaaagatagcaacaggttaagatagctatgtttattttcctattctctgatcatgttagttggaatgcttcatgattggttctttggattttgtgttgataatcgatcccgagtattattctagggtacgttatactgcatgtacttgtatttggctatctcgttaggattctttgtgatatgtgggctattttagtaccatgg

SEQ ID NO: 4293 - DNA, 457 bp, Oryza sativa
  unsure (1)..(457): unsure at all n locations
agcttcagagagttcatatgaggcttgtgttttttatcgctatgggtctgtgctacaagcaaaagaacttcgctactgcagagcactttgcaaggatgcttctggagaacaaccctaatgaggcccaggcaaggagggctcgacaggtgcagcagcagtgcagtggcaagaaggatagctctgagctgaactatgactacagaaatccatttgttgtctgtggcgccacatatgttccaatctaccgtggccagaaggatgtttcctgcccgtactgtggatcccggtttgttccttcgatcgaagggcagctntgtaccatatgtgagcttgccgtggttggtgcagatgcttcaggcctcgtctgctcgcccacacagttgagataagtggtgctaaggtagaagctccccattntcttttagtctcttaaaattctagggattctctatctcac

SEQ ID NO: 4294 - DNA, 397 bp, Oryza sativa
actcagcttgagcttctttaggtaaacatttgctatcttcattcttcttggagtctataataattcagacatgcctaaaattactttttttttttgcgaaccagtgaatattaaaagttgcatcaatgtggcaatagaagaacagaataggctgcggtgagacatacagtactttgaattcctgttacacaaaagttattcccttattcatagttcatacaggacgtgaattaacaatcatggcaagctagattagcttattgcttacaaattagtttagattaaattaacaattgtgtttaattctaactcaggacaaaaaaaagtgcatgccatctacccacaaagactgaggcatatgttactaataaaagttataagtaaaagacttcgttga

SEQ ID NO: 4295 - DNA, 347 bp, Oryza sativa
ccaagcgacgcagctcagctgacgtccggctgccgctacttctttttaccgctgccccggcgacgggagacggctcatacctcctgggacccgcatgtcgtggttcatgcaaactacgttgccgcagaagaacagccgcttctatttgcatccaaaccaccaccgtgtggcttggagggcgtgccaagcaacctcttgaccggacctcgcgaagggcatcgtgctcgggcgggggcaaaggcaccttctaccaccctcgctgaccacacgagcgccgccctgtatgcagcaccgacttagcgcacgcgaatggcccgggccgctttattgagtagtatgacgcgcta

SEQ ID NO: 4296 - DNA, 310 bp, Oryza sativa
  unsure (1)..(310): unsure at all n locations
taatgctattctcctctacccggatctggaattaattatcacggngaacaaaactaatcagctggttaataaagataatacacgaaaagaccgagattggagctcaacaatcaaatcaaatcaaatcacctggatgtaaacaaagcgggccgatgtgattttcttcttcagcgaatcaataacacatagaacatatcccgattcactgctcccttcctcgcataacatctgctgcggtgacagaacaagctaaatttcatcacaaccacaagcatacacagattcaaatctcatcctagcagtaaaaaaa

SEQ ID NO: 4297 - DNA, 345 bp, Oryza sativa
  unsure (1)..(345): unsure at all n locations
agctctggagaagatgtcttaagaggtgttttgtcttataccccagntgagcgcctgtgaagatggagccgtaggcccgctagtccgctgctgtttatttttgattgccaggcctgaagcgcctttgtaataatgtaaatattatcgatataataaagatgtgtcttttatatcatgtttgtgtggtgtaccccggcttttcctgtgacgggaattaatacactatcgttcgggaaaaggcaatttttccggtcgcgacaagctggtatcagagccatctcgactgtaggataagccaagtggataaaacctaaggacatattttataaacgaaactatttgcga

SEQ ID NO: 4298 - DNA, 431 bp, Oryza sativa
ttcttactctggatgtagtgtgtatgagtgtcttctcacttcgcgactttgatcagtcgtttgagttatacactctccctagcccccagccttgtcatcggagaattcttctcggaagataaggctcttggacctttgacctgccttggttgaacaagcactgatcctagcccccagccgtgaagttggaaagtttatttccgattacacggctcggttaatacacacggcgagaactcttacacgaccagatcttacatggtctttcgtctctacaggatccgacaagaccttatcggctctgggcgtccccagccgaagttcccttatgttcctcggaggccttggctagacagcgtaaagggacatgaggataggtttcaacgctaggtgtcatctgtgtaagggatcatcgcgaaggaacaccttga

SEQ ID NO: 4299 - DNA, 230 bp, Oryza sativa
  unsure (1)..(230): unsure at all n locations
attgagttcgattgatctcgntgctcgctctgtgtagnataattaatcatcattaatttgatcatgatgttgtagttgtaggtgatcatggcgctgcgctgcatgctgatgagggcgaggacgacggctctcctgccaccgccgtcgtcaggacagacgtcatctccggcgagcatcctcgccggcgccctccgctccccggcggccgtgctgatgacgccccacacatc

SEQ ID NO: 4300 - DNA, 419 bp, Oryza sativa
ctcttctcgccccgagctccgcccggcactgttcccgtgctcccccttcgccactgcttcttaatgatggatagatagaggtgccaccgctttgtccaagctctgcctttcgcccgtcccctccgtcgtcccgagctccgcctctgccgctgcctctcggtgacggagagctagaggtgccgctgcttgtcccaagctccgcctttcgccagtcctgtccgccgtcctgagctccgcccgccgctgtccttgataaagagagatgaaggtgagggagggagaagagagagaggatatttgaaagagagagacagagagatagagtattgagagatagataggtgagggatagagagagggtgagagaatgatatgtgggccccactggattaaaaaaagatttctgatgggaaacaacg

SEQ ID NO: 4301 - DNA, 390 bp, Oryza sativa
tgggcttctatgttcacattcatcgtccattgtgatgcctagcatgcgcttagtgatgcaatacctggaaagggaagcaacgctccaggacttcgcatttagtttcttcagcatcaatgaagctaataatgaagtttatggtcagcatgttgtatcaaatccctctgtagcaaccaccataaccactctttctggaggaagatgacggttgttgcagcatgtattttctatatgatcatatacacatctacatcattgtgtcgactgtaatacaatgttgaaaaaatactaataattgttaatccgcgctcctgttccttgtgagatacaccaaagagctgttcaaattgtttcgctagcacattacgaacaatatgagactttgttcac

SEQ ID NO: 4302 - DNA, 451 bp, Oryza sativa
  unsure (1)..(451): unsure at all n locations
ctatcaaactcagcttcactantctaagtgaggaattaagtggatttggtgttatgcttgcaacgaaatgtgacactgctgaaattttagatgatgatatgtgctatttcttgatatgcaaacaagccttggtttctttagatgatattgctagttcgatacctcctgttgttactaaccttttgcaggagtatgatgatgtctttctagctgagatacccccaggattgccacccatgagagagatagagcatcaaattgatttgattccaggagcatcattgccaaaccgtgttgcttatcgaaccaacccagaggggactaatgaaattcagcggcatggtcaagaccttttggaccgcgggtatgtacgtcaaagccttattccctgtgcagatcctgtaatatttggtcctaataaagatggttcttggcgcatgtgtgttgattg

SEQ ID NO: 4303 - DNA, 320 bp, Oryza sativa
  unsure (1)..(320): unsure at all n locations
ctttcctataaatgaaagtggttaagtgaaattgattggattaaggaagatggtacatcattataagagtactacatttcagaaagaacacatatttatgatcatagttgcacaaaaaagccatgtttctttagtcattatcagttaagcccaggtttttatggtcctaggtttcactaaacaaccccatataacaaaatctattcctgcttcaagcagcctttgctatctttgacagatctccagcaattcattccaaggctaacgagtcgagatttagttaagcctggggttntgtgaaacataatgacaataaacaa

SEQ ID NO: 4304 - DNA, 424 bp, Oryza sativa
tccacgtcaacctctcaaagatcagccacaatcctttgtttggctaatcagactcagacagtggaagagttgttacagcagatgcgacgtcggtaccagatctatctgatgcagcagatgcaacggcaatgtcatgagccgcgtcaagtccaccagccacaaatgcaagtccaggtgccagcccggaacctgaatcagagtcaggagttcccaatatcggcacctaagacccctgtcaaaatgatgtccagatccccgaagataacttcagccaactcaccgtcggaccaaaggaaaataagtgctacctgttatgactgtggtgagcaaggtcattatgtaaggaactgtccatggaatggtgttgccaggtcacctgaaaaagacgagaagcagtgcgccaggagaacccagctccagtcag

SEQ ID NO: 4305 - DNA, 471 bp, Oryza sativa
  unsure (1)..(471): unsure at all n locations
catgcaagctgggtatggacatgaagctatnntgctatgtgattttataatcggctctagaaggatagaattgcaagacgaattgacggccgatgagtattataaccttatggctgatgaaagggatgacttggttcaatcgcatttacgagcccttgctaaggttaccaaagataaggaacgagttgctaggcattataacaagaaagtggtgcccaaaactntttcgaaaggtgaacttgtatggaagttgattttgccgattggaactcgggataacaagttcggcaagtggtcaccaaattgagaaggaccatctcaaatctataaggttgtgtataaaggggcatatatgttgcaagggctttatggtgaagtctatggacgagcgctcaatggcaaatacttgaagaaatatattcgaagtgtttgggtaacgcatgatcgctagtgtgccgatcatgataccga

SEQ ID NO: 4306 - DNA, 461 bp, Oryza sativa
  unsure (1)..(461): unsure at all n locations
tcttcancacccgtgagcaaaggaaattccagatttccttttatcctattatccaatggtagttggttcaccaccaaacttattatgatgaaatgcggaggatggctttctggtatgtggtttaccgtttcatctaaccatgcnaaccaagtgagcacaaagagaacacaaataagtgaataacaattggtcagttgtggtgttgggtgggggtgtatatatatgaatgcatctcctgcaaccaagtaccaacttagcattgagatagcacaccatggggaattattcttttttctaattagaaagaacaatagaacaagatgcatgtgtttaaaagtggctcttaattactgggtacacacttcagtaactactccacagaaacggctattactatcgacccatcacttaccctgtcatgaccgatccacttcatattaccgttcttaaaaatacaaaat

SEQ ID NO: 4307 - DNA, 396 bp, Oryza sativa
  unsure (1)..(396): unsure at all n locations
aaatcgtgatgcacattctgactatggtaaactactctcatatctttattactgctgattggtctaccaatcgccactttttgttgcaatgcgttttcatttagcatttgctatgttaaatgatacaatattaaagtgcttacaaatatcccttctgtacaaccccccaacatgcacattcatgtcttggattaccgtagctgtgatgatgcaagttgttgatccgtcaaactctgacatggaaatgaatgtcttttattagatcagagccatgagagatcaaagaaagatccaggagatagctttcgagtctttgttcatagggcagcttctgctgcatcaaagctggcagagcatgcctacgaggctgcatctaccaacaaacgatntgatcat

SEQ ID NO: 4308 - DNA, 352 bp, Oryza sativa
ctggctcgtttggcgtacgagccgagcgagcgaacctatctttatccaggcccgagctgagctcacgaacccgagcttttttttcacccctagattaatcttttaagatgcaagtagcctatgaaaggccatactaactcggtttgggctcataaaacaaaatagctaatcagatctaccaggatgcgcctctacagcattctaatggcaaaccccgataccaactgctttgtgaattacagaattcattgccatggagctgatgagacactctgaccacggggtggtagaggaagaaaaaaaacaaaatttactttggaagacgggcgcctgcttaatcatgaactgagga

SEQ ID NO: 4309 - DNA, 423 bp, Oryza sativa
tttgtgatactatacagaactgtgcttgtttgaattctgaaaatgctccaacacaaatatttctattttaatgaagaaatgaatgagcgtatggttggattggaaactttaacctgaactctgcatataaacaacacagataattttgtagtactcaaaaaagctagcaatatgctaaagtgggtgagaatacatgtttctatactggctttacctcaatgtaaaataggatgtagtggtcggagaagctttctgggatggatcaccatggtagagaagagtcacttttatcctgccatcactccttggtggactatagaaagtcacctatgtcttcaattgcaaatatttcgtgactgtgagcttgcatgttactaatttagatttaaaggatatactaattaagtatatatcacatggact

SEQ ID NO: 4310 - DNA, 433 bp, Oryza sativa
  unsure (1)..(433): unsure at all n locations
ntatttagtgtttaccaccataatccgatctcatatcttcatttgattttagcattagtgtcttaaatttcttataggaaatcggaggtcgcttatgggtaaacatagccataaaaaatcatttgttggctaatctcttaacttcgtgaaattttcacttaaagctaaacaacaccattaaaatctaagggaaataatatctctatctcatgagacgttccaaactcccctaggtatgtgacataagcgacaatgacacaatttcaatgacgtcttacttccatcattatagaataattattctcctcattcttatttaagcttagttcactaatgacgcagcggaatttaaaacatcatcaatgtttgattaagtccacaaatggatttcttaagtctgtaccctatatatgacttgtatttcataacaaaa

SEQ ID NO: 4311 - DNA, 459 bp, Oryza sativa
  unsure (1)..(459): unsure at all n locations
ctgcaagctgctggaatgaaacagagtttttttttttttttganacacgcagaatcagcagagggctgaagcgagagattatggatgtctgatcaataattaccttgctattgctaaccagggagtatgatgcagcgctgcagagaagagagcgaagtggataaaggagggacggctacctgatgtttgccgagcccttccactcctcctggagactggagcaaggaggagcagtggctttcttccccacggctatttcaccattcgattggtgtggattgagatgagatgagatgactcgtggtggctggacggcgcgcgattcctcccttggatttgggagactgacacgtttggattttagtctcccncttacgtgtggacacacaggaagctctgaatttataatccgaggttttgtactgacatgaacgatgatatgggcctgagattgtagca

SEQ ID NO: 4312 - DNA, 416 bp, Oryza sativa
tctgcaaccctgccgatcttgagcaggcactctatgttgtatttccaggagttagaattcgggccgaagcccgaccttctcattttgtcgaacacctcgcgggcgccatggaagtccccagttttgcacttcacggcgatgagggccgtgtattaacgtgcccccctcgccggctcctggatcacaaacattgccgcgtcgaactcaccgatcgaagctagcgccttgacgagcgagaacacgccggacgcacggcaagggcccccgacttcatccagcgtcgctagaatcgctatcgccgtattcctggcgctggcctgagacgggttcaagaaagcgaacgcccgttcggtcatgggaacccgccgcgtagacatgctcttcatggcgcgggacatgggccgatagtacgcgag

SEQ ID NO: 4313 - DNA, 374 bp, Oryza sativa
  unsure (1)..(374): unsure at all n locations
gaatatgtgaaaacaaaagaaatatgccgaatattcatggcctcaatgtattgttctaattacaaaacacacggtgaatatctaattattacaatctctgacattattcaataatattaaatctaaacttaatattgatctgcatgatgattccacaaatgttcgatgaggtcttctcttagttggttgtgaacttccttgttttgaattattgcgtactgactaataaaatcattaaagttgggcgtatgttcttgngaaccacccacctgttctcccatcttatcattaactaaatcaaaatcaccatcgtgctcatcctgcacgatcattgtatacatgagtatacaagctcctattatctaattcagagt

SEQ ID NO: 4314 - DNA, 453 bp, Oryza sativa
  unsure (1)..(453): unsure at all n locations
cttgacgagttcctccgcatccgcccgcctaccttctctatctccaataactcccgttgatgccttggactggttgcatgccgctgggaaaaagttggacaccgtccaatgcaatgatgaggagaaagttatcttcacaacccatcaactgcaagggcccgcatcactatggtgggaccacttccaggctacgcagccagaaggacagccaatcacctgtgcccgcttcaccgccgctttccgaaggacccatgtgccagctggagtcatggcccttaagaagagggaattttgggaattgaagcaaggcaaccgctctgttatggagcattngcatgtcacgcccggaaattcactagtaatttccgaacttatttgtgcataataccctcgctcaggaatcagccgagatacacaaactgacgatttaatatacacatccatcaaaataac

SEQ ID NO: 4315 - DNA, 374 bp, Oryza sativa
tcgaggaaagaattgaagagaaacttggtagttgaaatggcacgcatatgtcagaacgagggagattggttttgattaattatgtgctttcaagtctagttatgtttatgatatctcttttaattccaacaggggttcttcaaaatattgattattatagatcacgtttcttttggtaagatgatgatcataaaaagaaaaagaagtatagacttataagatgggacataatatgtcaacccaaagatcgatcaagggggttttggtgttcataatttggaagataaaataaatgtctttaagtaaatgttggttaaatttattaatgagcaaggtgttttgaatgacttattgatatgaaatattttaattat

SEQ ID NO: 4316 - DNA, 450 bp, Oryza sativa
  unsure (1)..(450): unsure at all n locations
ctgctttagnattcttctcttccgcgatttttttggttgttgtctctcgaaaanaggatgcctgtgtacttatagagcaataatgagatcctcgctgcatctttacatataagtgtagcacaagtctctgaggaacaacaatgacagacctgaccattccttgagataacacagcgngaatcaccagcatttgcgacaacaagttggctatttcttactattgcaacacaagctgtgctcccacaggttggcccagacaagtcagagtgtggcccctggtattaaaaaagtgttgtaagactacatgaagcacctaatgtcaaactgtgaaaatatgaagaaacaccaatatgatagcattgctacaggcacgcgacaacatgacaatagcaaacgaggacaaaagatattcatatgcttgtcaagagatctcatatgtggtatcataag

SEQ ID NO: 4317 - DNA, 382 bp, Oryza sativa
  unsure (1)..(382): unsure at all n locations
tgaatgccttttccctcataaccaataggcaatnntttgtacttttgtttataacagaaataatgaccgcatcatttcagaatggatgagatgatgcgaggtcaaagaggctggcgagaactacaagcacttggagataagataaaccagattagtggcatgatagaaggcttgatctggtctccaagaggcagtgattcaaatgatcaacacgatgattgggctnttgaagaggtacttgtgcacttggcatgaattgactgatcaaacataacataacatgcaatctacattgcaagatggtgccttaagcatttgtataacttaacgctcatgtgttatgactagacatatggtatccaccttcactaagtgtttaaag

SEQ ID NO: 4318 - DNA, 228 bp, Oryza sativa
ccgcgaagcgaaaccgagcccctcgtgggagctctacgaatacgagtcgtacaagtcctctcttgacacggccaacaccaactgcgattctgtgacaaccgcgtcagcaccacccctcttgacctgataacgagtctctgccgctattggaacaaacgttgacgactctgagcgcggtcaacaagaggtacagtgcggcgcctaggataaaccccggcgggtaaaagc

SEQ ID NO: 4319 - DNA, 441 bp, Oryza sativa
tactaagcttggcgcctgtccagattggcaacggcgagaatttttcttatcgttaaagaagataatgagcccgactagtttgagaatgactaaccagccatattgcccattcaggatgtaagaatgcacaaacgctcacacatattatctaccaggtcatatgaatgattgatatcttgaccatgactacggggaggaacgaatcaaatgttctacacttaatcagaccgaacaataactgaaattcccgactaaattgcctgctttcgacagatacattctgacatgcgtattaactatctaggtgagcccaattatagtatagatgcgttggacagcagatagtgttgttaacgtgggcacccacaccctcacacggtgatgaaaccttttttttgttgagagatatatttaaccttcataacagcaatactcccaaat

SEQ ID NO: 4320 - DNA, 275 bp, Oryza sativa
  unsure (1)..(275): unsure at all n locations
cgcangcatgcaagctngatgggacctacacagagctgngcgttattttttatgccttaaagggccaatcgtgcgtacaccacaaactgtgggtagggaatggttntgtgacaattacaaagggtgaaagtatcagaaggttttttgagcatgctgaataagctgatgaagaggatgtacccgattaccactaatggtggactatatctaactaggctagacttaattaggacatttattattggtgctaaaagttgccattctgagtttctgac

SEQ ID NO: 4321 - DNA, 334 bp, Oryza sativa
cactataggaattcggcggtgaacttcggccgaagtgggataaagcgcttcttaattattttgggccccaaagtttctctcagactctgacggctgaagagattattacactgtcgatcgagaattcgagattgtagcgaattgaccacctgatgaacggatcgatcgatattgaggtgtgcaatggacacaagaatggcgggccggcggtttgttgagatggcctctcttccgtcagatacttgtcgggagtagctttttgccgggttctccctccgcgaagatggtggcggtcatgtgaatgaacactcgaaaatgaatatctgtaatgacc

SEQ ID NO: 4322 - DNA, 424 bp, Oryza sativa
  unsure (1)..(424): unsure at all n locations
accttatatgcataaaaagatgtaagttaaagcatttttgctaaaaagaaatagcgccacagtttcgattcgatttcagtcatttttttccctatgtgattgctacatttttttttcttatatggaaatatgttttctatctcttacatctcctttatcagggagggaatcaatcgatattccctctttctcttatatggtgtgtactcgaaaatttacaattacaatgtcagtactgaaattgacagtgtaatntttataagttacaacaaaattactacacaatgtaaatatatgttcatttgcagtctcttttttggtaaaagaaaatgtgacgccataaatatagttagtctcaatctaaacggcggctttaacttaaaagagggcttcaagtaaagacgatagtttcaaagtcagcaca

SEQ ID NO: 4323 - DNA, 373 bp, Oryza sativa
tcggatgtgcatcgactacaccgaccttaacttgcttgtcctaaggatccttaccccctgcctcgcatagatcagattgtcgactccactgcggggtgcgaccttttgtgttttctagatgcatactctggttaccatcagattcgcatggctagggaggatgaggaaaaaactgcgttcattacccccataggaacctattgttatacgacaatgcccttcggggtaaagaatgcaggtcctacttttcaacgtactactcgaatttctctgggtaaccaattaggacgtaatgttgaagcttatgtccatgacttggttgtaaagacgcgcaacccagaaatggtactctcagatctaacggaaacttttg

SEQ ID NO: 4324 - DNA, 324 bp, Oryza sativa
gacgaaatttcggttttcggaactatacgcgaacaagtaaaaaccgacgcaagacacaaaagaacgaacctatttacccgaattgaaagcgccattacatagatcacaactttacagaattaccggaagtggaacggaagcaatcgaacaggcggctgaggagatatgaattctggaagcttgaatgggatataccggacgaggaaaagatccaacgggataatctggaagacgacaaatgggcataaaatgatagaaaaataatcgcaagatattattgacactaactgcgagcaggaacatgggtggactgaataaaagggg

SEQ ID NO: 4325 - DNA, 419 bp, Oryza sativa
  unsure (1)..(419): unsure at all n locations
tttttttttgaaaccatattgaaatctctaggtgantgtatttattttaagcttgggccgaaaagagacttgagtctcgattcgacttaagagatgcttctcaacaactcacatggtgatgtaccgacctcccgggtcagatcattacttctcggctcccggagctatttcacttgattaggcggctcccagagccttttcattttctcggactccccgagtccaactgtccagcaccacaacaatccgcttccactcgggaagcctagtctgtgatgcccgtagacatcccgaatcacacagattcgtttcttgaccactcaggtcatccatctgccacatatgctgattctggaacgattcccaaccacaacacttttccaaagccaggcaacaatctacctcaggaacactacatc

SEQ ID NO: 4326 - DNA, 424 bp, Oryza sativa
  unsure (1)..(424): unsure at all n locations
tggctngactacccatccacctgcacgaattagcacttaaccctagctntattttcctctataaataactttgtacatcctcaaaaacaattgggttttgtttagttgaattttgccaagtgccattcaccttgtctctagtccttgctcgattagtcggcgactatagattcagagcccccaatagttagtgtgttgatttgccgggtcgattagatctaccacttcaatcgcaactattcctttgtgcttaattccctattcgcaatatttagattgcatcttatcttgttcttgcagtggtctctcgtttgcattgtaaggatcatcaaccgcgcgtcacggttggtacgacatcgtttgtggtgtagcgattgcacggcgtcctggattagtctggttggtagcacatcgaaacgtccac

SEQ ID NO: 4327 - DNA, 442 bp, Oryza sativa
  unsure (1)..(442): unsure at all n locations
agcttacctgccgggaccaactatctagttttatatctaatccttaagnatattaaaaactaattgagttctgggaaaagatcatgatatcgtattcaatcggctagaaagaatttaaatttcgttttatcatgttccaacagaacgagcagaattattaaaattgtcccatctgagaaaatttaaattagctacaaagaagcgacaagggttccagcggaaactcaccctagtttcagggatatatcagaaccatcatcattatcctgcgagcttcccgaatttaatgcagtcatcacagattcagatgattgtccatcttcagtaagaacattttcagtatcaggaaccgccaagccagcagtaggcacctgaggcatctgcatacaagcaaatgcacagaatataaatgcatattccgccgtgcctgatatggagaaac

SEQ ID NO: 4328 - DNA, 459 bp, Oryza sativa
  unsure (1)..(459): unsure at all n locations
ctgcagcttatggtggccctttttcttttctatctgagcacgnngatcttgacgggttctggcgcgaccaatgcgtgcgccagaagatagacgccatgaattcngttctcttctctgnctgtgttttttttttggctcctggtttgcagttggtgtgttgcggaggtgtcagtttctgaatttgtataaaccaaatgccctcttcttattctttttgctgttcctgatgcaatctgcccgtcttccttacgtattgatcaagtagaacggcgcctcgttctcttcttcgaatttaaggcgtttcggaatccgaaatttgctaagaatttacctggccgcgatcattnttttccttctgttcttggcttccctttcccgtgtngntgntgcttgatgcttttgaaagtggtgtgtgagtttcttggaggaggttgaagagcacggaagcttcatggtgat

SEQ ID NO: 4329 - DNA, 238 bp, Oryza sativa
tcggcgctcatcaaccttcttcttcaacttttagaatattacacccaacctcaaacttctaaaccatcaaagcaacaaaagcacgggtacgggaaaccaagaacaagagggaaaaaaaaaagatcaaaccgctgtgaaccttgccccaagtttcgggtgccgaaacgcctcaagattcaaagagaggtcgagacgcggttgctgctcgatcaaatgccacacagcgaagacatgatcg

SEQ ID NO: 4330 - DNA, 374 bp, Oryza sativa
  unsure (1)..(374): unsure at all n locations
actgggaatggtgctccctcccggagtctgcttcttcctcttctcgccggcgatcaacctggccaccaacgaccaatggcgcaccctgagagacagcgtcccccacctgacggtctacaccgccttcttctacttctccgtctcgtgtttcgccgtcggtatcggcctcaacgcccggctcctctaccgcccggtggccggtgtaccgccgtcgaccatcggagcttatgccggagactggaacggcaggcactgggcgctcctggcagggctgctctgtgggtttggcaatgggttccagttcatgggtgggcacgctgctggatatgcagctgctgatgctgtccaggtgatcctctncttatgttcatatc

SEQ ID NO: 4331 - DNA, 460 bp, Oryza sativa
ggcttctgatgcagaagccaactactcatagtcgcctctctttagtatcttatgctctccgctaaatgatgagaagagtgattttataatccacaacttattcaattatctcatataaacttttcatcattgaaactatggtgctttcaaagggaaatgccaaggacaaatggaaaaagtataaacaataatgattcaatagaaagaatgttcttgtaggcctttaaccagatgcagcatccagtatgtaacattcacatgtaactatgtatttcatgtttgagttgcacatacatgagtttctatgtgacatgctgcgagatgctaacagcctaacaataaacggctttaattcgttcgaaaagatagcaaggcagtttatgtgcaaattacatcaagagagatcaacctctacaagccactcaatgataatgcctccatgcctttgtgatgcacgatg

SEQ ID NO: 4332 - DNA, 285 bp, Oryza sativa
atttattaattaattaattaatttatacactcgaatgattatcatacatatactccctccttacctaaatttttgacgccgttgactgatataaacatgtatgaccgttcatcatattcagaaacttttgtgaaatgtgtaaaactatatgtctacgtaaaagtatatttaacaatcaatcacatgataggaaaagaaatgatagttacttgcatctttagaataagatgaacggataaatcattttggaaaaggcaacggcgccaaatattttggaaaggaggg

SEQ ID NO: 4333 - DNA, 342 bp, Oryza sativa
gcatccggcaagcacttagcctatctgaccaaatctctgaacgtgatcccaagcactgatgcatccgatgcccatatcatatatgaagtagatcacattaggcataatgtaatatccgccatccacagatatgtgtctggaagagctaaatcttgtaacttaaatctgctaacttaacttttgagatgtgataactttctgcttatgaaaattgctctcaaattttgctgttgaaatccagactcttcatatatatttgaccccctaattgtgcaatgttgaaggcattgacaaaattataattgaactaatggccatatactaaatattggccatcataca

SEQ ID NO: 4334 - DNA, 424 bp, Oryza sativa
  unsure (1)..(424): unsure at all n locations
acggagnnaagccaaatgcatgctggaccacgctgttaatctacctttatcattctcgcaatgatgagccaaaatatgagctatttttaatatatcagatcatgtttatccggggttcaggacgaagcctgcgagtacccactaagaaatctgtaactagctgaagaaaaacaattataccagttcaacgcaaaaaagaataagcataccaagatcaactcagatatcagaatgcatgcatgatgcatcgtccaggagttatagggacaactaacattgttatctgaagatatcatacatatattcagacacccctgaacatgcatggagagttggagactatgaatgaaaccaaaccatatggtgacagacacagtttgcatgcagcttgatggcaaacaaaagcttgggatttgggactgga

SEQ ID NO: 4335 - DNA, 293 bp, Oryza sativa
tgcgaaactggattcaaacgaggccatgaaagcagtttctttattctagcctcttcatctgtgcttaaaccggtctatacccgtgcccaatacgaggcagaccggtgttccagtgataataccatctgcagaagcagtgtcatgagtgttgatattggaaaccacatcaacagtcggtctgtccggaattctcaatacaagttctcttatccacccagcagagcaagtgcagatgacattgagctgtatccccacacaccaagtatttttaaagcaactcttatactccaaca

SEQ ID NO: 4336 - DNA, 66 bp, Oryza sativa
aagcgacgcagcagcagctataaatccgccgggcgcctctttctatgcctccaagagcaatcagaa

SEQ ID NO: 4337 - DNA, 428 bp, Oryza sativa
  unsure (1)..(428): unsure at all n locations
taattgacattatataattccttgaccaagatagttctatatatatttaaatgatcgaggaatgtatcttatgcacacaaacttctcatacacaccaattataaaatgtcacggaaaattatataaaaagttgaaacacatactttcagattntttttgtcatgcacctttcattatatactagtcgtaaaaaaataaaaatctgacattttttacttttaagcatgtcaggttnttttatttttttgttactgttaaaatataaaagaattgaatatgaaactttgcatatttgtgtaggactattgttcaattttcctagaatttttcctaaaaattcttaactaatatacaccgacttaatacgagaagtntgtatgcataagatatgtttccacgtaaatatatatagcacaactatatatata

SEQ ID NO: 4338 - DNA, 403 bp, Oryza sativa
  unsure (1)..(403): unsure at all n locations
ctaatttacatatatactggccagaacataatcctaattaatcttaattttatgagcctttagagaatggatccattagcaaatgcttagcttaataattcgatcctgggacatgtctttcacaaccatatcaatgtgttaggcagaaaacacacaatatgttgctactagaatagaaaactgtcgttaattagtgcacaacttcactaaaatcaatccaagggaaagaatatcttcaacttatgagacgttctaacctcccctagaaatgtgacatcaattacaatgtcacaatatcaatgatgtctcatcttttgtcattacaggcaattattataatagtcacatgatcatncaaaagaacaaatatgactgtcgtgcacaatgacaagaccaatcactt

SEQ ID NO: 4339 - DNA, 334 bp, Oryza sativa
cgagactaaataactagtatataacattttgacataaattttgaaaataaaaaataaaataaattaaaaattttattttgaattataatatgacaatggagttttttcaaagcattcataaaaaaaatattatgagcattggtagttctatctttgtatgaatgctcctcatttctatgatcttttaaaaaataaaataaaaacatatattttttatttcattatctaaaactaaattttgtcatcacatagcaaactcataactattatagtttcatgcgacaaagtattgcattttccataatgaaattcataaattttatgttcattccaa

SEQ ID NO: 4340 - DNA, 391 bp, Oryza sativa
atcgggactaaagattgttttagtcccggtttttaatacaaccgggactattgtgaaatctgctggaccgatcaaagatggtttctccaccagtatataatcaactcttcgttttgatgccgctgcttcctatcgtttccatcgtacgtgctcctctccacttcgactgtcaaccctttcgtccacaccattgcccccaattagctgccctcaagctcaaaccaattgtgtaccccatgcttgcaatcctagatctcctcctcagccagctggctaatttagattcttagatctcaatcccaattataatgattaattgcgttatagtttgggaaatggcactggaggagagttctcttgcatcatccctctaatttcttctaatcttact

SEQ ID NO: 4341 - DNA, 458 bp, Oryza sativa
  unsure (1)..(458): unsure at all n locations
ctatanaaacccaagctaagaaaagnagagcgcctgataaacgaattatattgttgtgaaagcagagagcgactgaatttcctggcagccagagtttactttgcagatgttgtctggtcttttaaagtcataacgactgtagaagaaacgtttttgccatacatagtctggtggcactaattccatactattgtgatattgtctgaactgcacatggctaacctaaaaggttcactcactaacattacagggagaaatgttaatattcacagcactttgaaatgttttgtactgagtgggatcacaccagagaaataaacgaaaccatttgggagaactaattggaacgaccaactcacctgaaagacacctgaggaatgtgagtcctacaggccaggcataaaatgcttgccgactgaaaggtacccgataatggaatcatttgtcagataatgcaa

SEQ ID NO: 4342 - DNA, 458 bp, Oryza sativa
  unsure (1)..(458): unsure at all n locations
agctngaaggatgtacatgccncngttggctgntttatgctgannggagcaatcagaaaccaggtatgacttcgctgatcctgtttgttaagcattgacactttgcgttgtaatggatctgactcaagtacatgatcactggatgaacttgtttccagagtcctagtaatttagatcaaacaccacagaagcaaatgtgtgctagcctttttacaattgatgatgactaaataataaactgaacatgtgagggaagtagaatttttaaggctggacataatcaaataccatacttcaacaacatggttacctctaattgccacatctatttgcgaaaagcgtgacaaaacgtcttctttttgccacggtctgaatgagtttgcttcagcagagccatcggttccttgcaagcggctagcggatggtcaaaacgtgtcaagtccacacttatgctcgac

SEQ ID NO: 4343 - DNA, 448 bp, Oryza sativa
  unsure (1)..(448): unsure at all n locations
tgtacaaagtaatcaaaacatcaaacatgcatagatttatcatagatgcatcaccttatcctgtctgtaccctcttgcagtactgtgcacagctaatcaagtttaacacatgcccaacagtgtgaagaaatgaggctgtcatgcatgatctaacagtgatttacacacacagatctgacgattagtcaatcgactgtacgccaacagtgccgattaatcagagctagatcatgctggcagcttcactcattcacactagcaccatcatcatcatctcacttataattcatccactaatttcatctcactctttggagtactagctagcaataactagagagatgcacactactgaaacaagagcatagtatactgaagaagctacagctacatacatgggaagcagaagagntnttgtgctcatgatatgtagtatactaatatatac

SEQ ID NO: 4344 - DNA, 348 bp, Oryza sativa
  unsure (1)..(348): unsure at all n locations
gctgcagccgggtgctagaggattacttttttttggngcgccatgccgcttcatcggaaaccgcggccgctgattatgaatcgcaacgcaaccctgctgcgccggccgctaccaatttatgttgacagtatatcaattgtgcattcatcgttatatcactatcggcgacaaccatgcgtttaaggcccaataactgcttaaaaaataccccgcctgcttcttgagtttgtgtatcataacattctgcgactggagcatcactacgctgagactgatcgcgccgctcaccctgcgctggttaattgcctgggaacgggcagaatgtctatgcagttaatgaatggaata

SEQ ID NO: 4345 - DNA, 430 bp, Oryza sativa
  unsure (1)..(430): unsure at all n locations
tgaggcaatcacgtcgacaatagcagtttgtggactttgaattggttggntattggtttaaggcttgaactattgtggcacactgagcccttgtcgctgccgcgatgtagttgcacggtttccctcgttgtcgtcgccaccgccgctgcgtcccaccagcgcaaccacctctcgatcaggatcacgtcaagaaagatgaaaggagatatgtgtacgtccagaaatcatattaggtgttgttctataaaatgaaatagttcttttgcatcaaagccgatgcggcaattgtgctaaggtggaatagtaacgtggcaatttttggttacgtatcaacttttgcaccatgagcgcacccatctagccaaggtattataccgctacgctcgggttgtcaagttttacaccttatctcaggcagctgcgcagtttt

SEQ ID NO: 4346 - DNA, 462 bp, Oryza sativa
  unsure (1)..(462): unsure at all n locations
ttgcgacgctcgccaactggtttacatacttttganaaacaangacagcaaacatgatgcttatctggagtgctggaggcacatacttccacttctctgatctctctttcctgcaggggaatcgttcttttcgttgagcgagactagagtagaattctgaatatccaacctgacgctcatgctatcttcttaaacatcaacagggacctttgtgtcctacatggtcgtgagtgctttcaccctcgtgttcgtcatcctttgtgtgccagagacaaaaggaagaactctcgaagagatacaatggtccttccgctgagccttgtggtcttcgaaaatatggccattttttcaagtacaaagggaaggattgatttgcgcatttgcaaatcttgtgtatactatgttccgagtcaagtatactgggacaaacgcaaagcattccttctgttcatataatcttgt

SEQ ID NO: 4347 - DNA, 405 bp, Oryza sativa
tcttctctcccatttgctactaatacatgctttcattaactcttatagccaacctctacgccagttcactatatgcaatgactttctcaaatgcttaaaatgacatggccaccctattgcgccaggggccggcgaaaccattaaccatgctctcatgggctctgagttcaaagtggattctgagatggtcccctacccagccagtggtggacaaaacgctggagctatctctgtgtcaacctctacggcggcgatccctatatctatggccctgttcggtacccataattctcaacacccctttctcgtggctgcacgcatatttttaaactgctaaccatacgttttttataaatatatatcaaagttgctaaaaatatattatcattttgaaaaaaatatgta

SEQ ID NO: 4348 - DNA, 345 bp, Oryza sativa
aaaaaaaaagaaggcggcgaaaaaagggaccaatgacggcacgggcaacaggaaaggcggaaagcccccaccaccaagggaggaccacccgacatccaaccccgcaggacggagcacggggacggcgaacagggcgggcggcaacacaaacggagagggcgcccctaaagcgccaccccgcacacctgagaaaagaggcccaagtacgcggcgacaaccacagaggacgaggcccatacaagcacaaaggaaacgccccgacaagcgcacggcaagaaaaagcaacgaaaagacatgacccagaaaaagaaaaaaaggaagcaactcaccgagcgaagcaaggga

SEQ ID NO: 4349 - DNA, 222 bp, Oryza sativa
tgggtctcctcacatagcaaatgggtggggccatgcccacttgctaaaagcctaaacactgggcgccagcacacagttaggaggacgaccactactaccagtactgcgtctgcattgcgaggtgaggcaggatcagacatcacattaccatgcctcacggctgcgggtgcttgcttggacacgctgcctggcctcacagcagttactacacgagtactaccc

SEQ ID NO: 4350 - DNA, 350 bp, Oryza sativa
  unsure (1)..(350): unsure at all n locations
aactaagctcgagacccgtgactgtctataggagtgttgagtgagtgagtgatcatacattctgggcagcattgctaagacttattcagtagacaaagctgtgctgttatgcagagtaacacgcctgttacttgtaaatattcagaaaagacgagcacaggcagctactatggtctacaagggccatgacatagcanaagcttgcgattaaaatctgggcgcctttggctattttgtccttattagtntactctttgctgtatctctcgcacccctgttaaggtgattctgaactctgaagtgattcccttgtaatcctacatggtaactactcctcatatcatacagat

SEQ ID NO: 4351 - DNA, 464 bp, Oryza sativa
  unsure (1)..(464): unsure at all n locations
tagacgcactggttggaatatttactcgtctatgaagagatatggaggaaattggtgttcacaaaagctacaagttggctganaaagtagcatcaataatggaagaagcgcagcctcttctttcacgggtacatttttctcatcgntctgcttttgtatatagcttccatatccggagaaatacttataatttgtcctatttagttaatcagatctctttgcaacctattttttttctcactgccactcaataagatttcatggttcatatgctttacccctatggtgaaattttcgtaaccatgctcggaagtgcaacagccgttcctgatcctgtgtaccttttaaatattgaaaagagtggttactctggcagttagtaccactggagtctcatcctttataccctgacagttttcctacatgtcaatgatcatgatatgaagcctaaatatgtaatatcg

SEQ ID NO: 4352 - DNA, 316 bp, Oryza sativa
cttttggcacgaaagaaatccaccgtatgaagaggtctcttctcttctctcccggtgccgccactaagcgcgcgcaccgatcaaggagaagaatacgccctggagatgcttgcatcacatgatgtgtatcgtatatccagctatccaccgctgcacgtagcctgcaaacagagaagaagcatacaaatcctggggcttatgctactcaacaaatatatcataaaagcaccacgtttttcacgacctgatgatctcgtactcccgcttgatgagctggtgtataccgttaaaccaaagccgaattttcaccggagca

SEQ ID NO: 4353 - DNA, 253 bp, Oryza sativa
  unsure (1)..(253): unsure at all n locations
tctcataagatttctagtgagatttgggagncagaaatgataagatacattattttgctttttttctttcttggagaatactcgaccccttgctccatatatacatcatgatgaccgccaattatgtgttgctcaatcctgaagagaaaaccgacaagacaattgtgcaggtatacatgcttttgcaactatgtgttgataattagtcatgtcatggataagtcatttctttggccatataccagcagaaatg

SEQ ID NO: 4354 - DNA, 466 bp, Oryza sativa
cgatcaactatctgaaggcccaatcaagactaacatagattgtcttgatgctcgcaagattgaccttttagcacaactcgaagaacgtaacgctgagctggatatggaacacaagaaactagccgatctccccacgctattgaagaacaaaagcgagactcagatcggctattaaacatgttgctgaactgaccaagttcctgtaagttatctcacgaaccgatgctcatgatgcccacgccaaagaggaagtagagcacattatgtagaaggctatatcggctatccagcgatacttattcgcggaatcatcgctaaaacactctgttactgtactggtgaacgatactctgcgccgataatacgactttgaaatttgcgcaccaaaattaaaatctatactgccgctgaatcaattattatatattatatatataattatactatgatatatatataatataat

SEQ ID NO: 4355 - DNA, 366 bp, Oryza sativa
  unsure (1)..(366): unsure at all n locations
tacccgatttgacgggggctaggggtataaattatcttggagaatttatggctaanattcttttgcaggagaacatcttcacatgtccgcttacgaaaataagattttgcatgtggttacggtgccagcccataacaatcagtatttttatacatgtttggcgtctgtttgataaagctgaatatatatgatcgtttgagaaaaagctttctgtaggagagcctttctctttatagtgttgtctgttgtagacattggctctaacgagctgtatataagtattgtacagctacaatttctgtacgatttaattgccaatactcggactatagacaaaatattnttggactgaactataaactgatt

SEQ ID NO: 4356 - DNA, 276 bp, Oryza sativa
tttggtattctctagtgagatatcaaattttaccggaaaaatggtcaacgtgtgtaagaccataaaatgtgtctaagacattagttatgctattgctatgagagggcataattaattatcatgattcatggagcaatagcataaaattttggccataattcattcccagtccaaaatataacttatagtcactacattagtataaaataattgtcactagacattattcgatcacatccaaacttaattgactacttcctccgtttcacaatgtaa

SEQ ID NO: 4357 - DNA, 460 bp, Oryza sativa
  unsure (1)..(460): unsure at all n locations
ggttntgcccacattcttcttattgatgtgcgagaattcaagttaaaatatagcgaaattcatggcaaaaatattttatgtcataagatgcccaatatcacaaaaagtattcatatatgtatgaaaatttaatcctcaagtgcataagtgtttttgacaccatcaagtcatcttgacggaatatgggaaacacacgctttatttaaaagaagagagaaaaatcatgaagttgaaaaagataggaataggatcgcaattggagttgcaaaggtaataatacaattgctccataggttattgatgttcggttataaattgtaagcttgtcttgaaatttttataatatttatttgaaatccactacaacgcagatgtgtattgatttgtcttgccatatattngacatggggcgtttaangtgttgtatctatctcaaccattncatcatgactaagcattc

SEQ ID NO: 4358 - DNA, 372 bp, Oryza sativa
  unsure (1)..(372): unsure at all n locations
cattatagggtaatagcactagcagggacatggcttggtcatgagctcattaattagtggtggtgagtgtggatatggaagtagtgaagttcagcttgaggacatggagaagatctcatcaagtggctgatgtatcaatcaggtccaatgtgcaacaaattgtaagtccatccgattcaaagtgaaaatataagatgagacctagtccattatgcaattttggtaaagaaatctagtccaaactgtaattaactcaagtnnttttttataacgttaatatctgctacacaattaagacaacaatctttttaaaatcttttactggtattatccatataagtagtatcaactgtncagtatgacacgaaaaac

SEQ ID NO: 4359 - DNA, 445 bp, Oryza sativa
  unsure (1)..(445): unsure at all n locations
ntatgtactccagaattgagtagctcttttcgtttgtgtggattanacttccaactaaacccaagccacgggcgaggctaatgtganaatgtgcacttaataattgtctaaaaaaaagttggatatatgccttctggattaataattggctaaaagntgtccatgaaggtatggactccaagccccagttacgactggaaactttgcgtaaggaagaattcgttccaactgtcacgcataccccctagtgttcagtaggcactttaaagaanagcaagatactataatcaccactgcagacaccaatatcgaataattacagcgaagacattgtcaggatnaagaataagcaaaattgcagatatacatatattgtcagctatctagaaaggtcttcttccactgaatgagctatattttacatggctggcttggacttctactc

SEQ ID NO: 4360 - DNA, 387 bp, Oryza sativa
  unsure (1)..(387): unsure at all n locations
cagaagatcctgagaacagtgacagtggcagcagtgcgcgtgcgccgtacggtcgaagagagacgggctacgtggaccgggcaatcgggcattgaccgatcgtgagccgcaggatcagcgtggccgttagggatggacggttcagatccgccctggtgtggggattaattaatatgataataataactgggacgcgattcgtcctccccgacggcggatctcggncgggatctnctctgtcgctttcctcttttcttcctttcccacttactcccctgtaataatacttggtatcgttctgaataacgatacgttcttttaaaaataactttaaccatttatttctattataataaatatataatattaacanatatatgattttac

SEQ ID NO: 4361 - DNA, 314 bp, Oryza sativa
  unsure (1)..(314): unsure at all n locations
taattaaactaatcacagngtgtgtgcatatgcatcgtcactgcatttcttggtttcaaagcccaagaaaccaggaagaatctcaagagaaaactaagcttattaaacaagaagctgattaacttgtcatcaaacagacagggcgctgctcgctgaaattaaatcaatagtattaagagggggacagtggcagaggccgtatcacctaagaaccctacagccgctaagcaaagcatcgccattgtctcgagctgaactggaaccctaattaaagaacgaatcttgtgttgctcagcttgagctttctcctcttt

SEQ ID NO: 4362 - DNA, 62 bp, Oryza sativa
accaaggacgcgctgcactacgcagccgtgagcagctttttcagggaaaagcgaaagacctg

SEQ ID NO: 4363 - DNA, 386 bp, Oryza sativa
  unsure (1)..(386): unsure at all n locations
ttaactgcatcaaaccaatggcattcgatttactcaccgcgttcggattaccacccgattcgatagcgataatcgccgtgatcaattgtggatcgacgccccangctgcaccggctntctggcttattggcatccactgcatcgcacgttgcaccggaactttcgcgttccacggcgggttcgtatagtcatgctttgatgaacaacccgctaataacacaatcaaaaaggcaaaccatctcaatttcacttcttctatccttatagcctgnaatcgccgntgaggtgacaacggcacacctaagcggcatgatatacatttcgtttctgttgtcagcaaggaattgccatgtctctggttcacttaattgccccatcgggttact

SEQ ID NO: 4364 - DNA, 365 bp, Oryza sativa
  unsure (1)..(365): unsure at all n locations
gcttgtgtgcataggatatgncttatataacatttatgttatactactaacgaaaacatatgataattnttaataactaaaaatataattaattggttatgtcatataaaaaataattctcttttataaataatatccagcataacaaactaataaatataaatatgtctcacacaacaaattcctatactctaacagtatataaatttatatgtttcttcgtaccacagtgtaaaatgaacttttcccttgtaatttaacgatcaacgaaataaataaggtatgaaaggatccaagctaaaattcgagggtacatataggaatgagcaaaacttangatcatacatgagacttgtgtaaatttc

SEQ ID NO: 4365 - DNA, 452 bp, Oryza sativa
  unsure (1)..(452): unsure at all n locations
taggatccataccttgcaccttctttaatgatgcaaacggccaacaaatgttcaaataatattgggtttatcaccatatttgttntctcggaaatataattgaaattgattgtgaagccggatacaataacaacaatgtcggtactactaaaatattgcgaaatactggatacaaaattatcagaatagttttggaattaacatctgtcaatggcaagcgagtaaaagttatatttacattataaattacacaaaatctacttcgaaaagtctctctgatttggcttaatgtctgacaccagccatacgtgagagaagtactactacacatctacaaacatgcatgtctttttcttttagtcatgcatgccttcnttttcttataaaatttctcttaaatattaccgattacatccgatatactatgtgttgtcaataaatcttaaacaaat

SEQ ID NO: 4366 - DNA, 293 bp, Oryza sativa
  unsure (1)..(293): unsure at all n locations
tgaattaagttagctctgacctgcaagnnttgctntgtggtctcgtgatccaatattctgatgtgtcatgtgctgtaacgtggtaaacagaggaaccgatacgcggcttgtgaattgtgatactactacctccgttttgtaacggtgtgaggctccaatcttctcaaaatttcagtttgaacaaacaaaggtatccccaacgaagtatttggttcaacagaaagtcgttgaaaaaaaatcgaagtaaaccggatgaattttttggtttccattccttcaacaaaatttcgttt

SEQ ID NO: 4367 - DNA, 366 bp, Oryza sativa
  unsure (1)..(366): unsure at all n locations
atctccgaactatgaaagggcattattcgtgctgtcagggaaaatactaatattgtaattgcagctgttgaagaataattacattatgcttacttttactctcttgaaatgccgtgccaatctttgccaaaaggagatgatagaaaacataatattcttaatcataaggggatatacatgcatgatgtgttgattagtgtgtncctgccacatactccctccatccacaaatccaacctaataagaatgagacataaataatttagtacaacgaatatgaatctgaacatgagtatataggttccagattctccctactagggtatggtccatatttgccctggtggattttntcttttaagggag

SEQ ID NO: 4368 - DNA, 425 bp, Oryza sativa
  unsure (1)..(425): unsure at all n locations
tcccccttccatttttaagaaattaattcaatagttttggttaccatttgatggtattttataaaatttaaacttcttggcgttgcctgtcggtattctctaagaaaataaatttgaatattccgcttgataaacccagtaaccacctggcggntgcgggactggcagtgtttgccaagatttatagcaaaatccatatagtaatgatgaaaacttataaatnttcattaattaagggaaatggagaacgatatgctacttattttggtgggaatagaatatgatatatgctgtaaaatataagagggaaatgctctttatatatctccctgantcacttttacaaagataataagagttcaatctaatagcaccgaacaactagattgagtccaatggctagatctatgtctcagctattccgt

SEQ ID NO: 4369 - DNA, 274 bp, Oryza sativa
  unsure (1)..(274): unsure at all n locations
ttacaataatagttggcacttccttctgtagcatgcttgaatcaattccgtcgcatatataagaatctcagagatgcatctccctttgaggaaacccgtttggtctaaatgtatcatcctcaggaataccctttgcagccgtgttgcaagcactttggaaagaatctttactgagcagttctgaagagagatcggcctatatccatcgactgtgttttctttcccgggcttttggattagaacaatatangctctgttgattcgctctatgtct

SEQ ID NO: 4370 - DNA, 481 bp, Oryza sativa
  unsure (1)..(481): unsure at all n locations
gcagatgaagcttatcgaaagggagctactccatgctgttttactgtattcgacgtcacaactcatgaaacattgaacatgggttgctatactggatatctgaggtttcaatgacttgagcagtcgtgtaatgagaattgttagccatgtttactaattcaatgcacattttatgtaaccgcttcccttgatctagctagggaatttgactaatgtgtatccaccggtgaactcgggagaggaaaaatatgcgaacacaaaaacttgccttcttttttcttattatgtcttgggtatgncgttatagcaacagagtattacctggctgtgcgttggatccgtgataggagatgtagctgagataagaggttgctgtgaaatggatgtgttgatatgctgggttntgtagtctgtgctggatccagcgaacagggcttgataagaggatattgattgttacaaaaatggagtaggcttgtta

SEQ ID NO: 4371 - DNA, 240 bp, Oryza sativa
  unsure (1)..(240): unsure at all n locations
aactaactagcgctagatcacctgctgtcgcggagttttctatatctggccctcangacacgaaccaaacagccccttccattttgaatggtcgtgaaaaatatgaaataacactcangccaacatttctatgtgaccaacccacatcacggaaaaaaaactaaaaaagtaactgtgttcttgcagtgccaagttgaatccataccattgggaggtgcgaatggcacaagaattggatat

SEQ ID NO: 4372 - DNA, 439 bp, Oryza sativa
  unsure (1)..(439): unsure at all n locations
ntcttccttngctggcttataccatttccattgccaagtatctctagtgtgctgcgcttacctgccagctccatttgtagagtggcaatggacttatctagatatctgaacagaaaacgctatccaaattagtctcaatagaataatccaaatctgcaaataggtaaggaagaacattnttttcaggatgcatgtaacgtactgtatggcttcatgagtctttgttacttcgctcatcacgtctctgtcgtccgttggtttctgaattaaagggtgttagaaaagaatttgaattaagtccttctttcacaanagagagagaataagtcagaagaggagactcaagagaggaagttcatattcagatagccaactctactctgcattgcattcatatataacagctggcttcaaccttatgttctttcttttttttcat

SEQ ID NO: 4373 - DNA, 321 bp, Oryza sativa
ggaagttagcagtcaaagacgaaagatacaaacgagatgcctaagcatattatcgacgaaggtgttcaatattccaagaattgttgatgagagtaccatcttcgcgcttgagtcgataagaacctggccgagtgacttcggcaattatgaacggtccttcccataagggagataatttacgccgatcctgtgtggtttgaatattcctcagaaccaggtcgccgactaaaaaggctcacgatcgaacattccgattatgataacggcgcaaccctctgcaatatcgagtcgactgaattaaagctacttctcgggcttctt

SEQ ID NO: 4374 - DNA, 316 bp, Oryza sativa
  unsure (1)..(316): unsure at all n locations
atgtatctatctatccctctgcattatactatgtcatttacaatgcgaagaggtcatttgttctatccaaaaatattgattctttctatcaatatctactggaatcatgactgttctgtattccatcaaaagtactccttgtggaaatggaagcgagatgtcgttttgtggctcatgtcaagtgatagtttcttcaattctttggctagtgtgggcttccacagtaaaatcctcctgcagtatatagagnattactatgatcagaatgatatatgactgactgattgcaggttgttttttcatgatgctatcattt

SEQ ID NO: 4375 - DNA, 392 bp, Oryza sativa
  unsure (1)..(392): unsure at all n locations
tcatgttcacatcttcatcatatatctttatggctggaaaatgttcatatttccttcttcctcaaccatttcattctcaggaaggaagatatttatctttggagcatcccctagtaaacgaggcccaagcttaacactttgcgcatcattatttcttgcacagtacagtcgaaaagaagcttgtgcaagctgaaatgcatcccatgtatggctgcaggagctacataaaggaacactcgattattggatgaaaaaacaaaactaaatgggacttacgatacatacaacaaagacatgatgaatatgatacctctgaacaactgatatcaaggcttggcgaanatgagatgctgcatacgatgaaaatgaatttcttcaatataatacatatg

SEQ ID NO: 4376 - DNA, 231 bp, Oryza sativa
ctaattttgctgttgggatgatattcaattatgggttcaaatcccacttatatgtgcccttgtatcagaaattctagtatgagttagaaaagtgtgaacccacccaattctgttggattataatacgagattgggaatatctagagatatgtggacttagctcttcatttaaaaaggaagtaaatttatagaactaccgatattttgacagaactatcacagaactacaga

SEQ ID NO: 4377 - DNA, 374 bp, Oryza sativa
tgccaactgctactgggttcgccttcttccttatgacgagatgaccatgtatgagctccgtgggtcgaacttttttgttgtaagttgccgaagtgcttgtggcgtacttgtgcatgtgctcgagcgctttgactcttactccttccaagagttcgagcgatacttcgcgtccttcttcgcccccggaaaacatcacccttggtgagttagcccctagctctgctggggtcattgcctcatcgccatacagaagcataaacgggctaaacttgggtggtcttgtgggggtcgtccgaagagcccagagaaccgatagcaattcctctgggcatttgcctttcgcccgcccctcaagtcttttcttcagtgcttct

SEQ ID NO: 4378 - DNA, 393 bp, Oryza sativa
  unsure (1)..(393): unsure at all n locations
taagattntgctcaattggtgtagaggccggtcgacaactatttatacctgtgtcactgagcagattcaatgcatactttcgttgtgaaagtactatccctctatgggatcttgcaatctcgatgcctactgacccacatccttgacttcaaattccttacttagaatttctttcaatcttgctatctctatagaatcatcccatgtgataatcatatcatccacatacacagcaagaatagtagtgtgacatcccttatggcaatagaatactgtatgatcgccattacattgcttatagcccataccacacattgcacgtctaaaacgatcaaaccatgctctcggtgactggttgagaccatacaaagatttcttcaatctcaacacttt

SEQ ID NO: 4379 - DNA, 221 bp, Oryza sativa
tccttgtgcaagaacgactctctttctttgtgcacaatccttgggacctgtgcttattgactatacaaactctgtcaataactctgcccgtggacggtaccagtattgtccccaataaacggacctgttctgtggtacaaacaccttcctgtttgatgcaagatcgctcttcatgctgaacagcggggctatggtggggctaaagggcggtaccaaaatta

SEQ ID NO: 4380 - DNA, 298 bp, Oryza sativa
  unsure (1)..(298): unsure at all n locations
attctgctggtcgctttttgtttgaccggattttagtatgttcaccattgtttcgctgcaagaaaatttgcataataatactatgaaataaccaatgttacaggaggttgaccaatgcgatactttaatctgggtagaccaagatggcatccaagagtgcagaagacattcgagaagctttggcttgcattggatcatactagcaggacaaatacaaccaggcggcaatatgaatggtctaactatattgatagagcgaaagtngaggaagacaaaatgaaacttgaatttgagatgg

SEQ ID NO: 4381 - DNA, 432 bp, Oryza sativa
  unsure (1)..(432): unsure at all n locations
ctattagcgacctatgaaactcagctttgtttaattngacggcagctgatacgtacagcaagtttcactatagctaagtttctaaaactagaagttgattccctgtgttntgctgcggaaaatcctaagaaaattttaatatttttttaataattgagctcaaagtaaaaattgtattatctattaacaacaaataaaactgatttgtcagattatgtttgtagagaaatgcatttagtacactcagtatgagaatgtaaatgaaatatgatatcccgcactttgattatatggatgaatatatgctcaggattataataatgatggatatatatacatgttgaaaatagtgtgaaaaataatgtgaagaaagatgattggatgttgatgggtagaattcaataaattatagatgatgttgcatgcttacat

SEQ ID NO: 4382 - DNA, 254 bp, Oryza sativa
  unsure (1)..(254): unsure at all n locations
gcttgtagtactccacctcatcgccacatcctctgtctctttacngatccctgagctgccaaagccaggcatcaagcgcctcgctctgatcccttatcctctccatatcaattgcatcaaagacaacttggacttgtgggagagtcctctcaagccgctcctgcaccgacttcatcccctccgccttcgcatacttctcaaggtaatcgaaagacttgcggacaatcatggagatggccgacacagccaccgat

SEQ ID NO: 4383 - DNA, 353 bp, Oryza sativa
  unsure (1)..(353): unsure at all n locations
tctttttttgcccactggcacttcatactggcagctgtggagccagngcctggggaccctactaccctatgcagttgcccgggctccgccggctacatgcaaccatgtcccattagattaaatctaattactccctccattccataatataatataaggtacaaccactcttttttcttaagatgtttcataatataaggcatgtatgcatgcaagcaattaactataaccttntctctattanattattactttcttaaatcctccactctcatgttctctaaatctattggatgcatgcattatatttattaagatgatccacactacgagatgataataattatttcttg

SEQ ID NO: 4384 - DNA, 332 bp, Oryza sativa
  unsure (1)..(332): unsure at all n locations
ttgtctgaactgcccctcaacagncatcaggagagcatctggagtggtcacaccaaaaccaggatccaacgacattctacctgggtcggccaaaccagtggtgggccagatggcctaccaaacctggtctgagccttctcctcgttctgccttatccaattcttgcaattttggctatttctnttggcgagttaaagcccattcttgcatggatagatttctccttcactgttagtctggatttccaccctacttctggggttatcacctgcatacaatatacaccaacacttgtggaatatgataaacttacccccgtcactatgctggat

SEQ ID NO: 4385 - DNA, 271 bp, Oryza sativa
gctctactacgtacccggacagggaggacttaagtgatctcgaaggttgtcaccacctctacacacaccttaaacatactatgggatacacaacaattactggataacaattacataaataccacgtctaagcaattaatatctactttagtggttataactcaccaaagcaatcactatattttagttgattatagtgaataataatcccgtatgctatttatgaactaaccaagagataattttcacaagataaatctaaatttgatgc

SEQ ID NO: 4386 - DNA, 303 bp, Oryza sativa
  unsure (1)..(303): unsure at all n locations
tggatatccgcctactcgtccaagaaanaagtataaaaaaccggtgaacatacacaaatagagaaaacaaccatgggaaaaaaagttgaaacacactaaaaaactgaaaacatactatagtagagtggaatggagacgttaacccctcttactatatcccgttgcaaagcacaatatatttgctagtaaactaaaaatatatcaagtttcaaaaaatctaaatgttggcaagaactgataagatgaagcacagaagatggaggcggaattcctccgtctcaaaaacacnataattacctgcta

SEQ ID NO: 4387 - DNA, 274 bp, Oryza sativa
cagcgacctataaaactcagcttccgccatggtgataggccccgagagagggtgtggctcatcgccgtttactaccctgatgcgacctatcgcctcctcgatcgacatcgtggagaggtccagcagagactcgatcaagcgagcgatctacctatacttctttgggacgcagcggaagagcttctcgacggctctctccttgtcgtaggtgtcgtcgccgtactacaccatcttctgcaaaagagtgttgagatggaaggcaaagtcatcaaca

SEQ ID NO: 4388 - DNA, 347 bp, Oryza sativa
  unsure (1)..(347): unsure at all n locations
tcaatatcaatatctttgcatctcacacatggatcattacttgtgacatttttataacaagatggctcgctagagagagactattatttaaggtttcgaacttctcttcaagagaggtaagctntgttcaagccatccactctctcttgaagntgagcgttcgccacctcaagattaacatgagactctttggtttgcttgtaaagccttaccaaagcctcattnttctctctctccttagcaagctcactcttgagttcatgagaccgctctttctcacgaatgagcaaacctcttgcctctcaagagtagcatattggtcctcaattcttccaagcaactcactc

SEQ ID NO: 4389 - DNA, 261 bp, Oryza sativa
  unsure (1)..(261): unsure at all n locations
actcagcttgtcagtttngaaggggttntttgagagaaaagaagaatctacttctaccgatatgcccttaggcacggccatacataacatataaatcacacgtggaaggggtgggcaattatctagagcagcaggtgctgtatcgaaactgattgctaaagaaagtaaatcggccactttaagattaccatctggngaggtccgtttggtatcctcaaactgcttatcaacagtcggacaagtgggtaatgttggggtgaa

SEQ ID NO: 4390 - DNA, 440 bp, Oryza sativa
  unsure (1)..(440): unsure at all n locations
agcagncggnatatcacgtcggatcatgttatttggaggggtcacaccgcatatgctatatattgatatcaagtcacttggttgattacgattatcaaaaccactcggctggttggattatatattccttgactatatgnctggtttggtcaattaaccacattgtcggcggctacacctattatgtgcatctagtcggcgcacctgactntattttcagccctccacagtcttcagaatttggtaaagtacctcggagaccatgacaaagatgattgaagcactcggctntggagtaatctgattcgagagaagaatatctnttctactacgaaggtctcacgggctactgttgatattatgggtaccccatacccatacngcatggtatncnactagtcatangggcataactatatctatggaatatgtaacagatc

SEQ ID NO: 4391 - DNA, 316 bp, Oryza sativa
  unsure (1)..(316): unsure at all n locations
aaactatgtcgtccagcggttgggttgtgcggataacgtgcctatcaataccgcgtactggcgaaaaacaagggcgcgccgagatcatgagagctctgttccanatttcgagaaagagatgctgtggaccacaatgctcgagacattcaccctttctaccggttcagaggacaaagggaaaaggttgactctttagaaaatggccgaatagtctcacagcttctagggagatctgtccacaagtatattctgtaggggcagacaccgaacttcgacacattcttaagcttatggacactgggacagttcgttgcta

SEQ ID NO: 4392 - DNA, 370 bp, Oryza sativa
  unsure (1)..(370): unsure at all n locations
ctcagcttggctccataagaccacaaaaaggccgatagcgtcccaccacttgtcttatacaagaagcgtgaacgcggcaaggggaaggtcggtgagttggcgcccgatcccaaaaggggcaaggctgcgacgtctatgcccgtgagcaaaacggcgaaggtcgtgagggcgccaccccaatctgagctatgcatgccattggttgaggacaatgtgttagccgtgatgggtattgcttgccgagagctacatatagcatacatatagctaagcaatgccaagcggaaaatgagggagtcatccatagntggacatcacgaccaccacccgttcctattgtcgcctgcctatataactatgggctttgatg

SEQ ID NO: 4393 - DNA, 303 bp, Oryza sativa
  unsure (1)..(303): unsure at all n locations
tangaacttcctctccgacttcgacagtcttgcccaaaacgtctactatgagtacgtacattccatgagtgggtggatcgattgaaataattaaaactcgacacatgattaattatacagatttctctaaaaacatattttgcacatatttacgtgtgcgcatcatagtaatagacaagcactaatcatctgccaattccaatctgtcaccgctgttggtttgggaaaaaaagagagtaattaatgcccacgtgtcagaagtactccacctattcacctttcatttatcaacaagagagagac

SEQ ID NO: 4394 - DNA, 379 bp, Oryza sativa
  unsure (1)..(379): unsure at all n locations
cacactatgggatacacatgtatttggctattcgatgcttcacanaaaccaggaaaggaacagcgagatgcggagctcgccacgcagcaatccaggcggcgcatttattcgttgcgcatccacatcggccggcggagagagggacgcttccccagctcccacggtgctgctcagttgcttcccgagctcgctgacaaagcaagacaaggaccggtgcagatgaacctgatgggtgatggcagatttcactttccaggtactaggccaacttatagagaattgtctctgctttcttggctttcttgtgtctcgattgaancatgtgggaacttgaatcttgccactataagatataacgccagtttttttcttacactat

SEQ ID NO: 4395 - DNA, 287 bp, Oryza sativa
  unsure (1)..(287): unsure at all n locations
tgtgtggagagttcanaatggcatncatctgattctgaatgactggtgtttctactgtcatttcgccgccgactggcctcgttggtggccactcaccgccggctggttctcctgtgtgtcggcggttggtgtttctaatacttctcctccttggcttccctgaggggcatgtcaaggaccccatagccttcctcatcgatcgagcccgctgccgccgacgaggtcttcgagtcgaccgtcgacccagcttggatctccttgaacattgccatcaccttcagcatcgt

SEQ ID NO: 4396 - DNA, 312 bp, Oryza sativa
  unsure (1)..(312): unsure at all n locations
gacactacgaaactaagctntntcttanatacccatttgcatcctacaggctcgcacccatatggactctctactacttcccaagtaccattaaacataattgagtccatctcactgcgtacagcttccttctaatagtcagcatcaggagatgaatatgcctcttcaatggttcttggagtgtcattcacaacgtatacaatgcagtcatcttcaaaagactttgcaatcctttgtctcttactctctcgagttgctacaatgtcatcctcttgaagattttcctcacgcgttngatcaatgtgttctatc

SEQ ID NO: 4397 - DNA, 161 bp, Oryza sativa
  unsure (1)..(161): unsure at all n locations
tagcttccactcggatccatncattctacaccgatgaaccatcacattgcttaacgtttatccacaaaacaagagcatatggcatatcaattgcagcttcttcttttttttttttttttgcgaggattttcccaccaaaaccccactaacaacagcagcag

SEQ ID NO: 4398 - DNA, 270 bp, Oryza sativa
tccatttctatcagaatggggatagatttgataaaatgcggcgagcaaaccggttaaatttggtggttaaatctaatacgtggacccctgaatgtggcaaaaatatggtctatctgtttggacggtcgctcatatgatcctatgtcatgctgtccgttacgcggatgcaacaattgatcacacagtacagtgcacggcaaatttgatgtcgatcatttatttttagaaaagtcaataccccgactatagtcacgatatacccactctaac

SEQ ID NO: 4399 - DNA, 250 bp, Oryza sativa
  unsure (1)..(250): unsure at all n locations
actaagcgcgcgcgcgtcgtcgagcgtccgcggagacgagagcttcctttcgtgtggacacacttggccgagacacgcggcccgtaccttccgaactgtcgtgaatttgcgcgcgcgagaaagcgccgccgcttctcctcttggagcgcttgncggattcccttcgcgggcgcttgccggcattgcagctcgtctcgacaggcttccctccggtgtcccttcttccggcgactcgagctccggcgggcgc

SEQ ID NO: 4400 - DNA, 423 bp, Oryza sativa
  unsure (1)..(423): unsure at all n locations
caccgcagctgcagctttcgcaggttttatggccacagnattattgacgctgtcgaacctggccggcgatgtagagcgtgtcaattccacgccaagcaaatccatcagccggcccaggccctgcagaccataccaactttcgtggccattgctgtctggggactcgacatcctgggaccgtttaggcgggccccgggccgggttgagtatttgtatgtcgcgatcgacaggttcactaagtggcccgaggcttatccggtcgtcaagatcgataagcactccgcacttaagatcattaagggcatcacggcccgcgttggagtgcctaaccgtattattacngataatggcacccaattcactagtgaactcttctgcgactactgcgaagacatgggcatcaagctcttgttccgctcacct

SEQ ID NO: 4401 - DNA, 382 bp, Oryza sativa
  unsure (1)..(382): unsure at all n locations
tgaatcaagagcaccttgctctgataccaattgaatgtgcagagatgtatcctagaggnggggtgaatangctttcctgaaattttgtcaacaattgcagcggttaaattgacagggcccggaacctcctggtgataaacactggaactctcgggcaggatgagtagcccggaactttcgaagntcttgagccaggaacttccgggcaacagagaaaagcgaaattatgggaagtaaaacaggtcctagctagagatgatcaggcacagagttgcacaagatgtagatctcaagataccagcagattcaaacacagatcatgcacaagagagacaaaggcgattttttcccgaagtcggatcacaccgatcctactctccat

SEQ ID NO: 4402 - DNA, 315 bp, Oryza sativa
aaataaattggcagtagatacacatttaattcaagtatacacgccatctaaacctctttacattgcaagtgccctcctttctaatctgcaagctgttcaccccactattttcattcatcaatgttcaactcttcaacaggtacacatgcatactaacgattcacttcttcatatttcttaaactaacaccatgaactcatatgacaaattcgtatcacttcaatggtagtcttctgctacggcgtgaatgctgttcattcagtaatggagagtatgttaaagctgggttggatgagctagagcactggtgttttt

SEQ ID NO: 4403 - DNA, 319 bp, Oryza sativa
  unsure (1)..(319): unsure at all n locations
tcaggtagaanaggagagcanaatcataaaacctaaagggtatgtgtatattcacaattacgtgggaagaacacaacttccttttctaaactactccagttgacaaattcagagccgtggtggacattcctaacccatgacgtggctgtcggctctcatttacagggcccatgtattgacgcccatgggcttgcatatgaattgtctaagatctctctaanaatactactactaatggctggacagcaccgaactgctacagtcatgcaataaccgggaaaaaaaacttcatccactctggaaaatcatgctacaggct

SEQ ID NO: 4404 - DNA, 222 bp, Oryza sativa
  unsure (1)..(222): unsure at all n locations
ggagaagtttgacgagatagaagctaataggcgcaaatcattcgaggagacaactaacatcatcaaggcgacaacctccatcttcaattctgcatcatcttcaacacccccgacctcgcctactccagtgctcgccaagtgttcgtgggcgtgttccaacagtgccagtgcgtacacgacaancagtgcaagccacaacatcgatgttcctactccgacagt

SEQ ID NO: 4405 - DNA, 393 bp, Oryza sativa
  unsure (1)..(393): unsure at all n locations
cggtctaataatntagcaaagctcccatagaccatgcatgggtaaaatttgaatggttcaacgctagaaatttggagttttcgacactatgcatgcatgcatggatgggtgcatctagacgtgcatgttgtggtagcaattgtcaacacacacgagagtgggagcagaatgaatcanagatacatggaatatattgtccaggtaattaaattaataccctctattacatataaatacgtacactcctacattggtgtttcaaaccatcttcttgctcaatgcangatagacttattattattatctttttgaaaatgtgagttntttttaacaacttttatgatactctcttaattaattatgtcgttactcattcttttacccagaaataat

SEQ ID NO: 4406 - DNA, 373 bp, Oryza sativa
  unsure (1)..(373): unsure at all n locations
taatagtgtgttcttgatgaaaacattagtaggagtaactgttagtacagaagatattcaacaccatgtctagaaagcagattgaaagtagactanaaaaatacctaaatattaaattcgaatatttggtacagttgctcctttttgccttgacatttgacctttcacaatcttcaagatgcaactttgaccattaattattataaacttacattaagatgtgataataaaattataaaattgtganagcatctataataacaaatctaatggcacacattntattaaaaaatctaaatagtttcaaacatgtcagtagtcaaactttatataggttgaccacatgtatntcagggcttcgaataaaaagaat

SEQ ID NO: 4407 - DNA, 366 bp, Oryza sativa
tgtatgttgtgaataaagaaatttccaaagtattggacatactccatgttctcactgctttaagagatatgcttaagtccctagaagacacatggttccaccacacctggaaatatatggcatatgtggtataaaatcctagtaaataaactcataaaggatttaccaaccgcctggaaaatgaccaaaatatataattagcctaagccataatattggtcaataaaaatgcacacatacgtggcaaaaagcaatgatattgtatccaatcaattgcttgataaacccaaacagcgccatgactatataaaaaagtcagcgggacagctatataaagctttactggttgacaccttttaagatgca

SEQ ID NO: 4408 - DNA, 464 bp, Oryza sativa
  unsure (1)..(464): unsure at all n locations
agcttggtgatcggcttagctcaaaagtttctcatttcagagtttanagngaagcaggccanaccgtattcaccagctcattctgattctggctggaatacgtagccaaatataccattccatcacaaaatatgacatagagaattgtgacgtatccattccagccccaggtttctttagaagacaccaatagagaaaaaaaaatcataaaacttagttgcattctctgtaaattcctcanaagtctaaatattgtctgctacgtaccgaatattaaagccatcttacatatgtagataccaggtaaattatagggtataccttntatatatgattccatctatcgaatattattaaatgtaatgcatttttgaagtaatgcatncatttcaacaataaagaagctttatgctntgacacggatattaattataatactatgtggaactatataggagaggatt

SEQ ID NO: 4409 - DNA, 396 bp, Oryza sativa
  unsure (1)..(396): unsure at all n locations
agcttgaattttctaataaatttctctaaagtgtttatcaattatatntattaattaaaaaggtattatttaatctctcgaaagtacaattaattaaaactctcaacttattggaacttggtatttacgaattcttaaattcagaattaataaattggcattaacgtataaacgagacttcagacgtagtacatgcatgcatgcatgcgtagtataacttggtacgtattttacgaattttgatttttagaanaatataaatcatcgaaaactataatttagactccaaaccaagtataagaatttctaattctagaattatcaaatcatgatgaagaanaataattaaaacttccaacgggagtacactgatataataaatccatatattttatg

SEQ ID NO: 4410 - DNA, 306 bp, Oryza sativa
ctactttgtaatttgcttttgaaatcaagactcttcatatatatatatttgcccccctaattatgcaatgctgagtacattgacaaaattataacttggactaagggcggtataccaaatgtcagccatcatatatcggtaaagcacaaccgattatgataaaaaaaaatgctaagggtgatataactcatattggccatcatacatcggtgaagcacaaccgattatgataataaaaatactaagagtgatataactcatatcggccatctgaaggcaatggtcatacatcatctaacatgtatc

SEQ ID NO: 4411 - DNA, 457 bp, Oryza sativa
  unsure (1)..(457): unsure at all n locations
agcttaagcttcagntgggggtgccttttatgtttatgtgaatactgcgngcgagctgatgatatgtgttgcttggtaagggtgaaacaatgagagagttaataaatggtttgtgctgtgcagataatgagcgaatgagaaggctgtatactgaaactttgttcaagttcaccaatcagggctggtgctatttactctgtgcaatcgtaaggaggatggaactgtactgctacaataatgtgcagcaaacttagttgatctatttcagtattaactgagatgcacttgataatgcagtggcaaggggtgtgtggtttaaccctaaatcccgtgttaattccaaaatgctacaatttctcttataaatgtttggaggacgctctcctccaaaattcgttttatttagtgtaacttggtggatagataactacctatnacacatttacctggctgtgat

SEQ ID NO: 4412 - DNA, 295 bp, Oryza sativa
tagagagttgatcaatgcagtctgggagctttccaaggttatatcaattctacagatcaagatgtgccagatcatgaagttgacaacaagattctggcagcgagttgagtttgtagcaatctgatatgctcagaaactgaagtctattcagattgccgaacgacattggaagcgcctccaattcatggcaacttgctaagtttatgaagagaagactactaaggtccccaaaagaggtgggaagctcattaaggttggcacaccctgataggtcaaagtattgcagcttttggag

SEQ ID NO: 4413 - DNA, 267 bp, Oryza sativa
actaaagctggacatggatgacagtgaagaggaccagaggcttcctcatcatcgttatctcatataattcattcctcttagcaaactttcatgttggtgcatctattgctcaaacaatatgtttagcctttgtaactaactcttagtaaaactagtgccaaattgccaaaaaacttgccagatgttaatgtggtgcacaattgatacaccagagttaggaataataagctggcgcccgaatgctgatgactgggagaatgatgaaaa

SEQ ID NO: 4414 - DNA, 385 bp, Oryza sativa
  unsure (1)..(385): unsure at all n locations
acccacccgntccactgctaccaagccaccatntcttactaacattgctctaagctggggaacatgttcttctctaccccttcaaaccaaccctaccctgaacgctaaacttaactcgtcagactattgttgatcaccggagcatcggaattggaggaagagacatggcataaataatcgcaaaacacattataaggtcctaaagattactaatgcaagaatttacgtatttcttttgtcgaaggtgaattagcagtgaactgatattatggtgggaatggttgcattcattttaaatgctaaaccacacttttatgtgcttttcatgtgagactaattactccagcatcacataaacatgtgagccacattggttgttactaac

SEQ ID NO: 4415 - DNA, 281 bp, Oryza sativa
  unsure (1)..(281): unsure at all n locations
tgcactgctntgcagatacggcagntcagccgctcgattagattactcattagaaattctgaaaatgatgccgatttcgatgactaaaaaaaactgtcacgacacggagaacaccttcttttgttttcctaatcatctgatgagaaaaagaactagtagtactatattgggccccctgtggtgacagggtcagtttgctagattgacacgcaaaaacgagtgaagaatccggccatgcatctcggtccaaagcgcgcacgcaagcgtgatgctcacatgac

SEQ ID NO: 4416 - DNA, 336 bp, Oryza sativa
  unsure (1)..(336): unsure at all n locations
tganggagcaagagacgaagtcgncaatgtcgctacaccactcggnccttctatgtttcttaataacagtgggccgagtgcacttgacgcaaccgaaatctttgacaagctgagagntgcacccgatgtatattttaagaatatcaagaaagctggaagtatgggagctagtatgggattggcgatgaccaatccttgtcccgaggattggaattgataccattgatggctttgcagaccggacaagtgaagaagctgctcttgatcttatcagtaatgctcanagtgccgctgaccagattgcaagtgatgttgtagagcaatttccgaacaacg

SEQ ID NO: 4417 - DNA, 282 bp, Oryza sativa
  unsure (1)..(282): unsure at all n locations
acaccangactggnagccgcgcaacaggcgagggcagctacggtgaagaacgcgctgatggtgtgcaccccaacggtgattctggcaatggtccgccaccacttaccgagaatccgacgcttgcccaagctatggcacatcagactcaaatgatggccgcgatgatgcagcagatgcagcagcagcaccagcagatgcatcagaggatgatgcagcacgccgaacagcagcacccgcagtttggtcccccttctcctcagtccaagtgcctgagttttacgt

SEQ ID NO: 4418 - DNA, 394 bp, Oryza sativa
  unsure (1)..(394): unsure at all n locations
ataactacacatataaggatgccatcaacatgtaagctggcatcatcagtctactggaatgccataagaagcaaggtccaatattgctcaaatggccacattacaccaacatttttatacatctgtatgaacaatgcaccgagtaacatgaacttgatntctttgtactgtaatacaacccatatatatataatggatggtatatgccacgcttcaaaacaaaatcaataatttgccaaaaatgcttgatgctcttttaattcccttctggatggatgcaatctcgtggacaagacatgtgtaacaactttgatgcagaacctaactttgagaattctaattaacatgatcacagaaatgatgaactgcaatggaaccaagctgatgaatatat

SEQ ID NO: 4419 - DNA, 351 bp, Oryza sativa
  unsure (1)..(351): unsure at all n locations
cggaagagaggcaagggtgttttgcacatctttcatttgaagacattttgaaatcactaagggatttatttctttctaagtttgggccgaanagaaacttgcgtcccgattcgactttaagagatgttgttcaacagctcattggtaatgtaccgacctcccgggtcaaatcattacttctcggctcccagagccattccacttgattaatcggctcccatagcctttttcattatcttcgactcccagagatcagcttgccaacagcacaacaatacgctttcactcgggaagcctagtctatgatggccacagacatcccgaatcacacagaatctgttctgaccactc

SEQ ID NO: 4420 - DNA, 303 bp, Oryza sativa
  unsure (1)..(303): unsure at all n locations
tattgattataagcattaaaggtgtaccatctttgctgcagtaccactggaaaattcaggtcaccatgcaacagaccaatcaaaacacaagaattgctctggatcgatgaggaatgattacacagggtgcaattgaagaaaggtgttacaatggaaggggatgtcctgaaatgctagagatctaaagcttcactcanatgaatctaacaccaaatgcaccagggctataagaattgaanaacagaacctaatgtacacaggtaaactacctgagctccttcacaggctataccacccgatgtc

SEQ ID NO: 4421 - DNA, 324 bp, Oryza sativa
tgtgtatgtacacacacacctagataaacttgaatttctaagcgatattatcatgatcgcaattcgcaagccatattcaggccctatattgtttacgtgtataagccaacttataagccgaaaagtctaagcctaaacaaacaagcagcttatttttgtttaagttttttaagccataagccactctaacactattaaaccaaaagctagggtggagaagcttttttggcttatgtgagggtgatgtatgactccactactaaacttatgacattaaatccaccggcttataaatcatataagccaataaacctaagcctaata

SEQ ID NO: 4422 - DNA, 394 bp, Oryza sativa
  unsure (1)..(394): unsure at all n locations
agcttgatagtttccctcaagatcaaatctcttatttgcatttatacaagnnngcttggagaaactaactggcgggtgaaactcttgtcattcctaacccccgtcgagatagtccgttcttgcttcattgtacaaaatgaggaggcgactgtctcgtctattcaagggatccggctcttcatcaagtcatcatgacgagtctagtactcgctcatcaactgatgtttcgatggaggatgccgaagttccgcgacgactcctgaacgacaccgacctctactctgtcagtgatcgtgagagacaagtctactatatgctgagcgacccggagtatgctgacacgcaccggagctgctgaaaagataggtatggatgttgacttcgtctatttgaa

SEQ ID NO: 4423 - DNA, 406 bp, Oryza sativa
  unsure (1)..(406): unsure at all n locations
ctctatattntntaattgctaggaccccatatgtttaggtcttatcatgcttttgctcatcgcagngtgatatggcatctatctagcaggacttcatttacttcagnttgttctattctggtgttatatcttaactatggcaatctgaatatgagatggagagntttgacatgtttcatgttatactaccaagctggccatttggtaggnttttgggcatgtttattggctttggaactctgattctcagacttaattattatccttacaagtggcaatgttagcttgacgattacggaggtttggccgcatcttcagcattgtatagctcattgaggtataatatttgcagagtatcttcttgctttatggtataccgacattcttgtgttcggacatcatatct

SEQ ID NO: 4424 - DNA, 372 bp, Oryza sativa
  unsure (1)..(372): unsure at all n locations
gcttagtcgcgcgtgcgcgcaatgtttgatgtttgtctataatatnnnggcatgtgcatagnccatatatggaatgggggtaggcaatgcccctgtgttcaaagatacaacgcctgtagtattccacgttgatgataaagtggttttgtaaagccgccaagacaccaacttgcattatatgttagccgaaataattcaacgtgctctttctactcaaactacgggtgtgtgtttgttcttaaaaaaaggtaaaatttaagaaagttagaagtttaaaaaaacagttaaaagttcatgtgtgtaaacaanttttgatgtgatataatatgatggaaaagtggaaaanggagaaactaaacacatactcctacg

SEQ ID NO: 4425 - DNA, 337 bp, Oryza sativa
  unsure (1)..(337): unsure at all n locations
tacatcattgngagnngtttttatcttgataaatccattgaatttttatgctaactctgtgcggcaaattaaataagaaatttacctgtgcagcaatgtttccatgaatttcctgacaggagcaataccatctgatggttcacttgtgaatattaatgaaacttcgtgagntatcttctctatgttgnttattcttgtctaattcaatatgtatatttgagcaagtaaagtggcggatgtcatgtgataaagtgcttttgtttacctcttcatgatgcgctacactacatcacactctgaatatatcatatgaatttgcatgttgcaatgcagcttc

SEQ ID NO: 4426 - DNA, 187 bp, Oryza sativa
aagtccacgacaaaaacaacttcagatgtcagattttgaaatttatgattggtgggtacattaaggtcatagtgacgtaattgacatctcaaattggctctcttgttctaaaaatcagcaggatagaactttgaagctagagagcacactttatcaatgttgaatgaactgaatgaatcacttggat

SEQ ID NO: 4427 - DNA, 411 bp, Oryza sativa
  unsure (1)..(411): unsure at all n locations
tctcctctntaatcttcttgtctcacacttttgaaacatataatggcttattgggcacgcatgcaaaagctctgcttggcatagacctaatatggcagcagtatttacaacaattttcgggattttctgtaataaacaaaagtacgctatgatgtatccgatgattttgatatttttgttcatatctaatttgatgcagacttctggttgtatcattttcattgaatttctttttgtgaagaaccgacactcacatttttttatataatggaatagaatgacactcacatgaataatttgtttgtactctccattaaaaaaatttgtggtttaacatttctganatgaataatttgggaatatatacaccggaaaaatatggcgtgtctgacgttatatagtcaaatgaca

SEQ ID NO: 4428 - DNA, 327 bp, Oryza sativa
ctgggagaagggttcgtcaggcttttttatttcaaagcctgatgcttcatgctgggtatagctagtataagatataactcacataggacattctagtcgcgacttcatatatttgcaagttcgctaatttcttgatgagccacatcgtacgcgtcgttattaaaaattcgtcaaacgacagagtttactatacgtctcctttgacataactaacaaaaattaaaataaataatagtcatttatggcgagggtggttttcagaatttacacttcacgagttttacacagattatatgtgaaacatgtcaattttgttaccccataaga

SEQ ID NO: 4429 - DNA, 232 bp, Oryza sativa
  unsure (1)..(232): unsure at all n locations
ttctagatgtatatgacgatctctagacagatggatcttatatgaatcgtatgatgaagtaccacatgagtggatatatatgaaaggaatccacatctgccgaatcgctcatgttatgatcttctacatcctangtctccgcgttccggcatctggcttatgttcttcatgtagcattcagatcgaatgactctatgaaattacgtcgatacttctacatattatgggtaac

SEQ ID NO: 4430 - DNA, 249 bp, Oryza sativa
catacataacccccaagtctcatcccatcttgcacgataagtgccatttatgtggatcattaatttgacggtacccgatgcctgtaaagtgagatcaacaaaaaattgatgatatggttcaatggtgtcaatgttcacagctaatgagggtataagacttagaagaatagtcaaacctcatgaaatgacacacgctcagcccacccacatagtgaagcttcccatatctgccaagatgagatacatatt

SEQ ID NO: 4431 - DNA, 462 bp, Oryza sativa
  unsure (1)..(462): unsure at all n locations
cactacannaaactcaagcttaatatatntcgtattcanaatggcactaataactctctaagagcagttgtttatatcatgtgncttcttcagcacaggaaattcagacaatttcttgcaggatttagaacacagcttgtgtctgtagctctgacttatgctcttatcaaanactctacgcatttcatgatcctcgatacatacattttgttgtacatggaagaacctcaatgaaacaagtgttaacttgtgatcacaagactagaaggcccaaacatttcagtatgctatacctattcgacagaacttcaggcccaagcagaccgcaatgtgatttcttacctgcacgaataccccacttgcaatcgacatccttcactaatcgactgtaccgcgcattgccatacacagaaatctataatcttctatccctgcacccacattagtagctcctctttgctt

SEQ ID NO: 4432 - DNA, 445 bp, Oryza sativa
  unsure (1)..(445): unsure at all n locations
tactacgtgatggggttcttgctctgcatcaaaattctgcgcctatagtatctgctcggntgntgcatcggacactggatgcaaatctgtcacttgacgctttgctcctcagcagcggcagagagcttgtacttgaggtangctctgatgaaggtgtccagctcgcccgccatgacgccggtgatgtccgacgtctcgcaagcggtgcggacgtccttgacgagcttgtatgggtggaagacgtatatgcggatctgctgcccacactccgcctttaccgcgtcgccgcggatctgcttgatnctcgacgcccgctgctccttcgcgatcaccagcagcttctgcttcagacggcttaaggcctttatcttgttggcaactggtcctctcctctgcgagggttccacggaaaagatgtggaaaattactcatgtagctacaagtc

SEQ ID NO: 4433 - DNA, 416 bp, Oryza sativa
  unsure (1)..(416): unsure at all n locations
tncatgttcttagcccatcaccatacaatttccttgcgagccatgaccgctacaccgatagaaatcgagagtgaatgagatctttgaacagattggaatcgacaacacgatgcatccacaggaaagaattgagccccctgaaagatacacccactccttgcattgtgggagcaggtagattaaaatctaaaagctaagctataccagtagtcgtagcttggctccaatcangcatgctgatctaacagatganagcaaccctggtaaaggctgaaccaaatagaggcttgatagtgatcagatggatggattagtagtagtagccatgctaagctctgaacctggctcttgcaattgcagatgagagacaaaagggcacaaaaagaagaatatgtgtncagcatatacaggtacta

SEQ ID NO: 4434 - DNA, 384 bp, Oryza sativa
  unsure (1)..(384): unsure at all n locations
gcttattgcattagtatgtatggaagtgagnactattgtttattgtggactccatngngnctgtctcaactcaatcatatgtatgtccctcctatagntgngttaactggctaactgctcgatgcccttcatgaaagaaagagaagatagaagtgaagaaaataattctttccataaaaatatattttctaccgtttgagtagagacaatctgtctgtattggtaatcagtgctgcttaagttcttatggcatanagaacatattctcttttgaaatgagtgaggttgattattaagacatgtatcgctaaatatacatacgaccgtgacaatcntttaaggaagcccgcgcggntgcgcgggcatcttatttattgttctatg

SEQ ID NO: 4435 - DNA, 301 bp, Oryza sativa
  unsure (1)..(301): unsure at all n locations
gggatcagttcagtggcatatattaagttttcagagatgcatctacctttaagaatacctgtctgatccatgtgaatcatccttgtaagaattatttgtagcctaagagccagcactttggataggaattttacctaaccaatttggagagagaatggtcngtaggcatctactgtgtttctttggccggtctggattagaacaatatgagctctgttatcctttcgagctggactggaatttaacagaaccctgtagtgagcttgaggacattcttcttaataacattccacgtcgcaga

SEQ ID NO: 4436 - DNA, 240 bp, Oryza sativa
gctttacacctatcaaaatgcaagtacctaaaagaaagaaggaaaagaaaaggtcatacgatatcttatacataacatgctctctatgacctatttcccagtactacaaatctggacgggtggctattatattcataatactatggacagtccctccgttatattccgaccactagaatatgtcacattatattctagatttgttattatgagactgatggagtaacaataacgcaacat

SEQ ID NO: 4437 - DNA, 283 bp, Oryza sativa
  unsure (1)..(283): unsure at all n locations
tattgcagttaagaaaatactgcagntntgagtggtgagttgttattctatgtttntacatgtttgcatggtgacaaacaatattccatagcacgccattcatttctaaaagaaattgacccttcattttcatgctacaaacagttcttttatgtcaatggagaaggatgcattttaatgcaaaataaacattatggcagttaaatgtggctcttttttttttttgccaagtccaagcgagcaagatttattgaggaaaaaaaggaacgagaatgcattatga

SEQ ID NO: 4438 - DNA, 358 bp, Oryza sativa
tctgtaccgcaccggctcgtcgtcactgccggccgtgcgctttgacacctgcacctcggcagagtgcgttgaggatgagccgagtgtatgcgtgctaagcaaggttggtgagaacctcgccgggcttgccggaggcgttccccgctgttctgccacttctggctccttgccggctcgccttcctgtcggcggcgcccggtaccacagtaccgagcctgcctgctctgctggcgccggctgctctgcgccaacgggttcttctacctcgaactcagtggaagtcacctcttctgcagcaacactccactgccaaggtgtgtttcatcaaaaccacgtccgacttacaatgatttgccac

SEQ ID NO: 4439 - DNA, 378 bp, Oryza sativa
  unsure (1)..(378): unsure at all n locations
ntgtggaacggtaggatcaattaattgggaaggtctgaaagatgatgacatatggtcactatctaaagcatatgctcttggtagtgataaacatagcaataatccaattttacagaatcttgggaggagaatagctaaggagctaaatggcaacccattggcggcaaaaactgtgggctccctattacgaaggaatcttaccgtagatcattggagcagcattatagagaacgaagaatggaaatctctgcaacatactgatggcattatgcatacatttgagttcagttatgatcatctacccagccacttacagcaatgtgtctcttattgttctcttttcctcaaggttactcttttagtgaagcacaattgata

SEQ ID NO: 4440 - DNA, 406 bp, Oryza sativa
  unsure (1)..(406): unsure at all n locations
tatggataanagggcccacaagacagacgtaaccgttatgtanatcgcctctgcatccatagccgncaatgggacccacaagtcagtgcctctgtcgaaagagagggtgtgtggagccaaccatggtcaagccggctcggcttccccttacacgtggacatccaggatgagtngcttatgatggttgtgagggcagaatggacattacgcatagctacaaccgtcatattggccctataaaaggaggagctcacttcacttcttaagacactcaagcaagctcaaaatcctcttcatactttagtattagtatcttagtactaagcggagtagaatagaatagtattccgagtcttctgaagagtttcggtatggctctagcagctcttgattctcttctgaatac

SEQ ID NO: 4441 - DNA, 350 bp, Oryza sativa
  unsure (1)..(350): unsure at all n locations
ctcgcaaccacatgtgtatgctggcatgaggttatcacaatctttggccctgatgaatcggtagcgtgcaacctatacaatacaatacaattctctgctaagactaattctgatgagaggcatattcatcttctagtgatcccacatatccctagatcgtcaaggtgagtttccattaaatatctgaaaaattgcagacgtggagccaccaagcatgaacaggcccaacgcaatacccaaagacattctatntctcatgacaccattccatgctatnttagcaagagaaaaaatacaatctaggatggcaacagatagaacagaaacccacaaaataactgcaagagagc

SEQ ID NO: 4442 - DNA, 450 bp, Oryza sativa
  unsure (1)..(450): unsure at all n locations
actcaagcttaagaaatattatgaggatgcatacaacgtcgtgaggaaatacaccgcgaatgcctatgttatcatgtcaaaccggctggcaggggagtccaacactgagcttcttgatttcgccagtaggttcccgggcgtagtcatcgacgtgcactactacaacctgttcaatgacgacacattcaaaaatttaaacgtagagcaaaacattgaatttgtgaagaacagccgcaaggctgagttcagcaacatcacgaagcaaaagagccctctcacgtttgttggtaagtagtgaggtggctctaacatctctnggtgaattcctcttcctattntcttgcttgaacggtctccctcttctctgctgactggcatatattgaaaagatggaaatngcctttcaatcagaatttagacatcagaaggttgttaattctctaaatgatc

SEQ ID NO: 4443 - DNA, 228 bp, Oryza sativa
  unsure (1)..(228): unsure at all n locations
aatcgtcggggagcttcatcaagactggtgggtaagccccatcatcttgatctggtgtcgttggagaagatgcgatctcngccgagtggtttgaagccgactcggttgagatggtctcgacgtagctttcatccgcgttcgggaattcaaacgggaccgaattccgttctctctcgactggtctgattcccagtcaaggagagaaatcttgccgaagttgttggtgat

SEQ ID NO: 4444 - DNA, 244 bp, Oryza sativa
  unsure (1)..(244): unsure at all n locations
ctttgcttgctacaacgatcagactattcattccaaagaataagacacatgtttgagaacatatgggccctgctgggctatgaaaattttcctgggcctacttgtcagntgtcaatgcctgttcataacactcttagaagtataacattcttaatttattatcgaagagaattttgatgaaggactccttccttttatgctgaaaaagcaagccagagatacctccttgacatctgaacgatga

SEQ ID NO: 4445 - DNA, 316 bp, Oryza sativa
  unsure (1)..(316): unsure at all n locations
tcactaaagaatacccatgtgcaccagcaaaacgcttggaaatgaatgtatgggttgctccanaatcaaacaatattactgccggtgtcgagttgacggggaatgtgcccaatataacctttggtgctgactgcgcctcctctgcagatgcatgattaacacgggcctgaacgaacttgggtccggcacgtcttggcttctggcactattcaaccgtgtgttcgggtttgttacaattgaagcacagttcgggtgtttctcccaacctcttgggctgttctggcagagctggctgaactgattgagctggaatctt

SEQ ID NO: 4446 - DNA, 367 bp, Oryza sativa
  unsure (1)..(367): unsure at all n locations
tcaagacggagcanactntatcctgctttgggcaagacatcttcaatcttgtttggttaaagtttaaggagagacaaatgaaaatattccttggactccaagattatttctttgatctcttagaaggaagagaaagaaacccagccataagagtaatcatatatatgctccctctcttaaggctagatgaccaggcaatctctgacccatcctatagattcctggttctcaaagctgagaataatatccaaagattctggaatctacccacatacaaccatgaagaaatatctctcccaaccattatagatcatggtcttgtgaattccatctatgcaaccctcgatcagatccttcaatctaattt

SEQ ID NO: 4447 - DNA, 247 bp, Oryza sativa
  unsure (1)..(247): unsure at all n locations
actcaagcttcttcccagcatacggctntctanatgtatatgatgatcgctagacagatagatcttatntgaatcgnatgangacagaccacataagtggatatatacgaaaggaatccacatctgtcggatcgctcatgttatgatcttctacatactangtctgcgcgcaccatcatctggcttatgttcttcatgtagcattcatatcgaatgactctatgaaattaccgtcatacttctacat

SEQ ID NO: 4448 - DNA, 357 bp, Oryza sativa
  unsure (1)..(357): unsure at all n locations
aaaaactcagctctggtggtttgtacacgttctgatctgatcagaacggtgacaactgtatctggggagganagatgaataccggcgaccggccgctatctcttgacggcccacactgggtgccggcgtcnaaaacagccggcgcagtggcgttcgccggcggcgggaaccatataacaccttgacatgagcgtcagcgccacgctcaccttcacgtgcaccggtccctccgcgggctcgcgctccagctccgccgccgtgccgccattcaccgccaccacgccgcggaacgccgggtgcagcacctgcatatccgaaaaaaagtcatattaagaacatcatcagaacgtggagcta

SEQ ID NO: 4449 - DNA, 449 bp, Oryza sativa
  unsure (1)..(449): unsure at all n locations
ctatgttcggcgcagtactaatactggaacttatgagcaagaattgctctatcaatcaccatctactttagacatatcttctgaaacttttttcaaatccaaaagtccagtatcttcctacccattagtgaattatgaggagctctctgtgccgaaaaagaaagagcatggcaatattttcaacttgcattcgaactgcgaaatatttatacaaaggaggagagatcaagataatgcagcacggttggttatctaattggctagtcaaacatgaggtggttcatagatctatgggcttcgatcatcgaggaatagagactttgcaaataaaagcagaggattgggattccattgctgtcattntatatgtatatggttacaattatttacgttcccaatgtgcttatgacgttgcacccggtggagtcttatctagcgtgtatcatctt

SEQ ID NO: 4450 - DNA, 363 bp, Oryza sativa
  unsure (1)..(363): unsure at all n locations
agagncacctgcggcatgcagcttatctaccagccttcaggaatcatcatttcttttgcatgtacccaacatctgaggctcgaacttctcaagattcattcctagctcttcagttatgacctgaatcattaaaataaacaggttataatgcattcaattggttaaatatatatgcaccaacttggagaggtgattgttaaacttacttctcctncagtaaggatcgcaaggtcctgtaaagttgctttcctgttctccccaaacccaggagctttaacagcacagacctgaacaacacatccctcatttatgacaactacacagattcaaatcacaaatgcccagtatttactgaccttgatg

SEQ ID NO: 4451 - DNA, 345 bp, Oryza sativa
  unsure (1)..(345): unsure at all n locations
ntgacggtgaatagagtacaaggtgatgcttattaattactaggtttgttatattgaattaatcaaaacaatatattgaaactgcaccatgagaaaaatatgcagcgagtaattcctaattttaatattatttattaaataatgaagatcatataacttacactccaaaccaagctatatacaactcagtacttgctaattatgaatcggaaaatataaatcatggaaagtctataaaagatgctccaagccaagtacaactcaatacttatcaagaaataaattctaaattaagactcccacacacaaattaataagtgccactatatacttattatattccaa

SEQ ID NO: 4452 - DNA, 333 bp, Oryza sativa
tatgtgggcgtacaaagaaatcagacatgcttgttggcaaagattacatctctttctcatttggtacaacttgcttgcaatgctgaaagcaaaatacaggaggacatgaataagccacatgctatggttttggcttctattactaaccactttgcacgaagtgcattatcatgaaaaggatgagagagacatgaaagagcccgcagttccattgatcacactccaagtcgaggcaccctcattatctgaagagggcatcacagggaaacttaatggcgctgaattaataaggtgagtgtgtcgttatgaattgatttgtccattttcatgctt

SEQ ID NO: 4453 - DNA, 428 bp, Oryza sativa
  unsure (1)..(428): unsure at all n locations
ctggactntttgctgaactacacagcannaaatcctcaccttcatgtggagatggggggtggctcgcaacaaggttaatgtggcggagaaaatgtcgtcaacttgggacatttgccagtctgtcgagtttcatctgggggagccagagaggatatcaaagaagaactcttttgccaaacaacctactgtgcaacgatagattccgccagcgaatgtgtataaggggaatattgatgcatctttctttcattaatactgaagcgggaggatgaggctttgttgccaacgatgcattcagacaatctctataagccggcgctggtagtctggtccgggtgacaagcgcgttgcaagcggaagctctgatctgttaacagcttgaacangtggacaactggcatgatgacatattgcgaatggtgctctac

SEQ ID NO: 4454 - DNA, 340 bp, Oryza sativa
  unsure (1)..(340): unsure at all n locations
acatcttgctgcttgagatacttcggctcttcgagatcgaattgccccaacttagcccgtgcgctctggttcgggtcgccatcttcgactgggcatgtcgaaccgcgggtttcgagccgaccgctgagctctttggggcgatcttttatgttattgtcaactcgaagacggtggtcaccctggccggcacctggaggacggtcttcgggagcacaaactntaatttccgccctgagctctccgatttgtggcccgtgaatgcatcgatgcctaagtgggatcgccattggatgccgaanaggtnttacaacagcattccttttgaggccgcatcggatgc

SEQ ID NO: 4455 - DNA, 345 bp, Oryza sativa
  unsure (1)..(345): unsure at all n locations
gcttccagagaggggagtgganggagcaagaatagactttctcgggcaatacatggcatatgacttgacagggagaaggaaggaataagattactaagctcttcttttttagaagaccataaanaaaagaaactcagtttaagaattctggtataaaagaaacttcaaataaaaagaaaattggctgaagaatcggcacgatgctgagattgagatcgatctccgaccttaactatggcaaaaacacaagttgttacattgatattgcgaaccactgggtctagtaccacggggtactatcccgggtggaccactcggtcgggatgatccgagcggcaaacttga

SEQ ID NO: 4456 - DNA, 327 bp, Oryza sativa
  unsure (1)..(327): unsure at all n locations
tttttncatcaacttctaaggataaccattactgacacgctaaatgcttttgctttggtgatgnaantcaggatatggtactgctgcaccatgaggtggaggtggaataccctgatggccgaccaaccgaatagcaccaagcaaccctacttgagtttggaaaggttgaaaatggcaggcctaccactgccatggctctcacggtcggaataccagcagcaataggagctctggtaagtagctctcttgaaccacattacacttgtcatacgcatacctgatcaaagaggaaactngtactcattatactcgatntcatgtttcagc

SEQ ID NO: 4457 - DNA, 358 bp, Oryza sativa
tgaaatcagcgtcacagctgatggcgcaaccgttgagaagcccaacccggcgtacgacgactgggaagccgctgaccagcaaagtttgggatttcttctctcatctctgacgagggaagtactcatgcaggttgcaacttgcgacactgcagcagaagcatggagtgcaatcgaagggatgtactccacacacactcgagcgcgttcgagtaacactcgattcgctctcaccaacacaaagaagggcaacatgacaactccggagtacttcgccaagatgaagtcccttggagatgagatggcaatcgctggagtccgtcccattgatgaagaggagttgatccagtatataattact

SEQ ID NO: 4458 - DNA, 438 bp, Oryza sativa
  unsure (1)..(438): unsure at all n locations
gacctatgaaactcagcttgtagcacaagcaaccttctgtgggtggttatttttctggataaaatgttatcattcaaaagctatgagggtgttgtcggttatcaagcggccaggaacaaaggcactctggctntggggtatgaggtcatccagtataggtctcaacctattcaccaagcacttagaaacattcttataaattatattgcacaaactaataggtcaaaaatccttcaactccactggattctctattttcaggataaggacaatcgttttgtcattgattccttcaggaagaacacttcttctgaaaaaaagacagcaccgcccttaccacatctttcanaataccccaattacaatggtagaaatatcccgggaaaccgtctggacccggcactntcagaggcccaatctgaaacatggcagtagcaa

SEQ ID NO: 4459 - DNA, 340 bp, Oryza sativa
tcttgcttattccgccatgacagctgtgctcgccaccaacatcaccgccggcgaccacagaagtggcatgctgttgtcacagagcctcgcttcagtatatgcagtgtgaggattgagagacactataatagatgagaaggctcatgtgtgctatctggtggtactgggaactgatgttgaagataggtcctaatgattagtaaatgaatgcgatgtgatgcctgcttgtgtgctaacccggaattggtgtaaattgtgatggaaataagaagtaaatgaatacacgtagacaagaaaaaccacgctcactcgcataagtatatcacgccctgtgtgacat

SEQ ID NO: 4460 - DNA, 329 bp, Oryza sativa
atatcaacggcggcgaatatttagagacagagagaatattaattaatgaagtaatctgagattatatggaagcagctgctgcacgcaacaacactgcagagagacatgatcttcccggccgttgccgccggcttgttgggctttatcttcgttcgatcgcttacctcgccggccgcttgtcttcctcccagcgccggagcggagccgcgacttctgatgtaacgagcagagacaggaacagagtccgtaccaatccaagccttctagcccagcatgataaccaagccggcctgcacagacagcacgggccattgattatatttacacat

SEQ ID NO: 4461 - DNA, 261 bp, Oryza sativa
  unsure (1)..(261): unsure at all n locations
gagatattcatttatgtgcaaacataaatagtgacttttcaattcaaaaagaaaatacccgttctataggttgcagtgaataataattactcataaatgaagaacacaactggattcattattggaaaggcaaacatgatcacaatgtgctcacttgttatggaccaacgctattggagtagatactggtggcgcacacgcgaagaagatgctgcacccacaattacatatcccggctacaattagataanagatatataa

SEQ ID NO: 4462 - DNA, 302 bp, Oryza sativa
ctgcactacccctattgctttcatttttatttcaaaagaccaaacccaatgcaagcgtctattaaacctaatatacatcccttctccacttacacctggaccactgtctataagaaaagggcttccatctctacccaaatgaatgctgagagaggaggtctttgggggacccccggaagaatcatggaacgggggcctgactcaaggataacacgtggctcaaccacggtcgggtcaatcctctcgcccagcttccaagggaggcttcttccctgaggagaaacctgacgatacggctaact

SEQ ID NO: 4463 - DNA, 416 bp, Oryza sativa
  unsure (1)..(416): unsure at all n locations
ctctttagcgacctataaaactcagctcttatattctggatctactatttgccgcggaccttttctctgtatcgtcaccgcagtagagtttaaccaccaaattcgggatggattggtgtggttcctctacgcctaggacaccagaatatctaaccatgaacgaggaaaggcatgagagaaatattggctagtaattgtgaagccccaattcttgactggaagggacaccaaaggcctctgccctccctctctatctatccaagagatggaagggcagagctnttttttggttgtttcatcttttcatcaaagagatgaacaatgaagatagatggcaagtgcctgatcgatttgatcacgtcgtgtaagaacaacgttcacatcgttcgttcgttaggatgcctcaactgcataca

SEQ ID NO: 4464 - DNA, 393 bp, Oryza sativa
  unsure (1)..(393): unsure at all n locations
actcagctcattattctggcctcctgagacagaccttgattttacttctgctgtgagagnagctctccctagaatgcctcttacccgacgacctgctgcgcgacggtgtcctttcactgtatcttttccttggagaataactccctgacctctgagaatccggcgaacagctatgggagtagctcctctgaggtgatacactgcgagaatagctccgtcctctagcacttggagaataacaccttctatagtatggtgaaacagaatggtcataggaacatgacctctctcttctgtaacggcgtggagatcttgtacggtagcgtgaaccacggtaagatgagtatgaccgacgccgtgaaccacgtgtgtcatatggagagtatgatcgcc

SEQ ID NO: 4465 - DNA, 360 bp, Oryza sativa
  unsure (1)..(360): unsure at all n locations
agcttatagtcgnaccactcnttcgtggtagtcattcttatggctggagtcatgctttataagcttatagccagagggaggatagcgtaagcagactattgaagagaaagctgagcagaattcctcctcacgagatcgacttgtctacttacgagaatatgcatttcgaaatgaaaagctatccccagaaaacaaagaaaacgaataagggcgtagcgaaggcgcgtagcgatgataatgttaacaatcttctggatgagctcattgctcggactcgcatatacttgttctatgctctacaggctaatctgagtaaagaggaggcgcgaagcgtgagatggacgagagaacacacacgat

SEQ ID NO: 4466 - DNA, 358 bp, Oryza sativa
  unsure (1)..(358): unsure at all n locations
caccgggtctctaacaacgatgatgaagaagaccaagtttaactggatgcagaatatgatatttcttccaagattctaccagtggcctgagaccgctcacgttgaccttggtgctcgcgatggcgaattggcatttgtaccacagttaccggtctgcgcagatacgtaccttgatacatgtgggacaaacatctggtcttatgaattagcacacggagcagcaacaaaagaattntggnggacagagagggcagattacagtatatgggttgactttggtgataattgatttatacactggtttctatagtatatggtaaattggttatatactcccttcggttctaaatatttaaca

SEQ ID NO: 4467 - DNA, 438 bp, Oryza sativa
  unsure (1)..(438): unsure at all n locations
tctgctgcattgccctcttctgggcatggaggttgcacttggactggtgctttatcangctactagtgccactggtgctgntgctgacaaaaacttggtggcagtgcatgcactcaacctttgcaacctttccatcgatgtagatgggtgtgaagtcattccacgcctttgatcggagccttttcggccttgtgcccaagaacaatgggctaggcgcgctgcctgagctttcctcttgttcagccatgtcattggcattgtcaacattatcttccattcctaagaatcaagaaacacaataattgcataacagtgcattcgagtaaatttatgttttcgagtgaacaatggcctaatttattntaacaaacatttcaantaaaaaatgattgaatagattcagtgcatatcagatntgaacaaaatctattatatact

SEQ ID NO: 4468 - DNA, 271 bp, Oryza sativa
  unsure (1)..(271): unsure at all n locations
ctataaaccgctgagctatatagcanacagcagaagcgtacaatgccattgtgggttgaacgcggtgtcgatgtcgtaccccgaccggtcagcgaccagcgacaggggaaggaacccggcagcgccaccgccgtcgacttcacccctctctcggacctcctttggcccttccacgccggcgtggccggccgcctcgctcccgtcggcggaggcgggcgagcacagtgcatggtgagcggtcgatgggcgtaacagacacgcggagcagtga

SEQ ID NO: 4469 - DNA, 193 bp, Oryza sativa
ttttttttttgatttttttttttttttttgattttttttatttttcttgcttttttttttattttattttttttttttatttattttgttttttgtttttttctttattgatgtttttttgctttgttgtagtttgtttgttttttgttttttttttttatgtttttttttggttattttttttttatttgtg

SEQ ID NO: 4470 - DNA, 433 bp, Oryza sativa
  unsure (1)..(433): unsure at all n locations
tttagtcttttcggtgtgagctcggatcacgattntcaagttgcaatctctaccggtaatattctactgtcaggaatactaaatgatctttgttataaatccttaccgatctttttacggtgatctctacttctacaaagccaaaggacgtttattttttgtaaatatttgctacttccagctttaaaaacaaagctaacagctgctggatatctttcacaaaagaaaaaggagaacatcaataaaggatgtttgtttcacccttcatcagttgattccaaggcaagtacagatttgttccaaacgtcctatctcctgtccttgccatcaagtgaagtgaagtgcacttctgaactcatgcaaaattacggcagctcacagctatctccacacttcacacatcaagccagcanatgatcctttcagtgactaa

SEQ ID NO: 4471 - DNA, 445 bp, Oryza sativa
  unsure (1)..(445): unsure at all n locations
ntctatatgaaagtgggtctaatatatcagagtaattcatttttaagtttgtaataattaaaactcaattaatcacacgttattaccatctcgttttacgtgaaacacttaatctttatctttatctttatgttcaggagattcaaacaccaccttagtttcattaaacgtaaagttgaatatattttatactatattatttttgtgaataaattgcattcacgatgcatcaacttggtaacgagggtgccatttggtgcaaaaatttgagaaatgagtatccttatgcaataacttactatatgggtgtaattagtggaagaactatataagtgagcgataagttggtaagttggtgcaatattggtgatgcgataacttaattattatgagtattttttataccaattcattngtagtacttattaaactctactatatagaa

SEQ ID NO: 4472 - DNA, 411 bp, Oryza sativa
aggcgtgcaagcttattatagggttacttgagctattgcctattcttttgttattctcagaactccatccaccacctaacttgatgcttccagggagaatcggtgtgctattagatcattttaattttagttccaagttgtagaattcgtttgtagtgattggttgattgcctttcttgaaggatacttttatgggtttttatcaagtgaagtattttgcttcacggattagaattgtattaaacattattttccttggtgttacttgtatgctctaaaacattaacttatacttttctagtgcaaggcagagaagtatcaagctttcggtttagaaattacgtttggtgattcttaaaggactctcatgtagtacagtatcaacctgcatgaagccctactgctttcaat

SEQ ID NO: 4473 - DNA, 381 bp, Oryza sativa
  unsure (1)..(381): unsure at all n locations
ttcccnacaaacaaggctgngactatgtcttctcgtctcctctggcagcattgatgggccgtcattgggaaggtgaaggctattgaaggtggtggtagactgcgtagtggcagaagtgagcctagaactgatgaaggttgcatgcatggcatgctgccgtgaccgtgaggaaaagatggctcgccgtgcagtgcaggaggtagctagctggacttgtgctgtgtagggaggccatatgctgatgtgcatcactcatcagttgagtggagttctgtttcagagcaaacgggagaaagattgtattgctgtcgcttttccggtaaagagaaagaactgtcacgcttatgttggagggttgccagcctgggccctgggtaccat

SEQ ID NO: 4474 - DNA, 406 bp, Oryza sativa
  unsure (1)..(406): unsure at all n locations
agctntgcaaggttcggtctgtgcagntnggccagtgngttttctctacctgaacacctatgatggtcgcaccatccgctaccctgacccgatcatcaaggcaaacgacacaatcaagatcgatctggagaccaacaagattgtcgacttcatcaagtatgatgttggcaatgttgtcatggtgactggaggaaggaacacaggccgtgttggtgtgatcaagaacagggagaagcattaatgcagcttctagaccattcacgttgaggatgccctgtgccaccaattcgccacccgtctgggcaatgtgttcaccattggcaagggcaacaagccttgtgtgagcctgcccaagggcaagggcatcaagctcagcatcatcgaggagcataggaagcgggatgct

SEQ ID NO: 4475 - DNA, 387 bp, Oryza sativa
  unsure (1)..(387): unsure at all n locations
tgaaggaagagcntttgtagcaccatggtatatggtttgaatgattagcagcccttgctgccagaataggtcttccttcccctccaaagcaactccctgtgagccagactccttgggaccttcatcttgttcattcagtgacatgaacagttctttattttcctctttccaagtgcttgcatcattattcttcttttgcagtgtcttcacatcctctccaagagcaacctttcgagccttaagcttgttaagataggtaagctccatgcgaagatactcaatccacatatcctctgattctggacaagatctaagaccagtctgcataagagcacgtgctgcagcaacatttaagttctgatcaaantcccatgctgctgcatagat

SEQ ID NO: 4476 - DNA, 358 bp, Oryza sativa
  unsure (1)..(358): unsure at all n locations
agctngtcttcgttntcgtccttcggtgcattttctccagattttagttcttcctctttttgtctggtggtggatttccccgtgcaaacgttcggctttgttcttcttcggttgccttggcgcttcgtgctgctactggggttctctagctaatcttcatgttaaggtcttacgagatcggtgctatttgttcgatgtttgctccaagctcggtggtttttcaatttatcgtcttaaatcctatacttgcaaggacttcatgatgaggtttctcctttggagaaatagaggccgtgattggcgatgggagtttgatttttggagttgggaataggctaatgagtgtgatttagtcact

SEQ ID NO: 4477 - DNA, 427 bp, Oryza sativa
  unsure (1)..(427): unsure at all n locations
ntaggaattgcgatattgatggaataatccaagcttatcctctgttattagaggagattaagaagactaaaggagagtacgtgtaagtgcgtatatatatttcgtgatggatcgatcgctcccaaggcaaggcagctacaggccaccttccggatgtttcctagtcaccactgcctgcctctacgacgactctactccatttcgtgctctgcttgcctaatttcttcccttagatgttactcgctattcgttggagaagtgtctacaaatatatatatatatatatgtacccatccattctcaactgcatccgcgtgtgtcactgtgtgtgcgtgcataatcatctgtatatatatatatatatatgataaatggatagtttgctccattgccaagcgatgaaccgaccgatcgagacagcataaca

SEQ ID NO: 4478 - DNA, 162 bp, Oryza sativa
gtacggctttttttttccagagcagggttttgtgggatctttgggaggcctttgcaggcttgaaacttggttcaatgatataactttctcctgggatttcacccttcaagacaaatggggatgtgtcgggggaaatcatttaatattccaaaactgagagtc

SEQ ID NO: 4479 - DNA, 375 bp, Oryza sativa
  unsure (1)..(375): unsure at all n locations
cctcccccccccagagggnnttgatcgtctgcagcctaataaaaaccagcagattgcggcgcgaaccaggaacatgatttttccgcacggacaaaccaccccttctgagacatctttaactgagaaggacttcaaccctggcgcgggggaaaagagagcaagattgagtactacccactgtactcaacaagtcataccggaagaggaggcatgacgcccgaaatatccaagagaagctgtaggttctttgcataaagccggcatatcataacagcacctggaagcaattaaacacctgtagcaattaatacactataaccaatcactgaccaacgctacaccacgttgtagcatgcccaaaccaccacctgaacc

SEQ ID NO: 4480 - DNA, 308 bp, Oryza sativa
  unsure (1)..(308): unsure at all n locations
cgggcccggacgtggcgctgatggtagcgccgcaggctctgctggtagcgcgcggctcagaaggccgcgcgccgccttctctctttcaagtagtcgaggtcatctctgcgaagctgattttgatcagcctcgcaatacatggtagcccgaggagacctcacggtgagctcggatgggagaaccgctttcgcgccgtagacgaggaagaaaggcatnttccccgctgctcggcttggtgtagatcggtttgcccagagcaccgctggcaactcctcgatccatgaatcgccatacttcttgactatgat

SEQ ID NO: 4481 - DNA, 444 bp, Oryza sativa
tcaaccatccagcttgtattggaatgaggttcaagtttcattttgagagcgaagatgttaatgagaggtttgcatttttcagttgaactatctttttttgtttttgcataatactttcttgggtcttactatctgtgttgtaggcgttctggaatgattgccggtgttagtgaagtagaccccatcagatggcctggttcaaagtggagaagccttctggtatgcatttgagctgcttttttattaagcttgttgactacggaacattaacttttggctacctgccaagtctttgaaacatatattagggccccacatatagtcaatttcagctactggtttgtctatcggaataaatgtgaggttattccacaccttaaaataaatgcatcacgttagctgaagtgcttgactcttgaatatgggtgcaacaatcttcttgtc

SEQ ID NO: 4482 - DNA, 411 bp, Oryza sativa
  unsure (1)..(411): unsure at all n locations
agctngtaaggctcatggaacagctgtttgtttttctttgatgatgacatgggtaacagtgaggttgggcataacgcactcggtgctggtcggatttttgctcaagggtacatgtttctcctggttctcttttttattagcacactgtcagttataatctgtggatggccaaaaagtattgcgtttgtttctaaaggtcttattacatcaggtttctgttgcttggcttatttgtgtgccagatatagtaaaatcaaatggcaaccattggttccttttggcatcttaagtgttagatttacacagatctctccaaatgatgtggattaccacatgagcatgaaagagatatcatcattactatctcatgttattatacaaatcatgcactttctttagcagctactagta

SEQ ID NO: 4483 - DNA, 401 bp, Oryza sativa
tgcaagcttaattacaaccttagaaggcaaactgtttttctgttctatacgggacacagatatagcagcagcagagagagatggactgatcgcgacgtggagagttcatccacagcaagacacacgggcggatcactcactcgctcgctcactcactcaccttggaagggtctcccagggtagatgatgccgtcgccgttgcggtcgaagaacgcggcgtgctgctggagcacgctcatgccgcgggcgtcgcgcccacgggtcccctgcgggtggctcgggtccaccgccgcgagagccctcgcgagatctgcgcgcacgcgaacccagaaagaaaaaaaaacagcagcagttagctggctacggttacgacatcaggtttaggatcagttactggagcg

SEQ ID NO: 4484 - DNA, 353 bp, Oryza sativa
  unsure (1)..(353): unsure at all n locations
taatcttttcgatcggaaagaagaagcaaccagtctatgaataatgatatcaattccagctcatcatcttgttgcagatttccggagttagagccagccgctcacccaaccggttccctaatgcgtcattaagatttcaataatcacgtgttggtgagccgaaccagattagctcccgcacgccatcaggaaaatcaatctaccgccgtgtacagcgccagtaatgtgtcacgccgtacgtacaacgagattataagaatgtaacgcatcgtgagcgtgaaaacgatcagctcgcttacgcttcgtctgcatttcctgcagnttctggaacatgcgtatattggaggccattt

SEQ ID NO: 4485 - DNA, 408 bp, Oryza sativa
  unsure (1)..(408): unsure at all n locations
tcaatcacagcagtcgcgagtctaaaaagtctgtgatataacaaatacggagtactatccattttcattcagaaacttggaagtgaaaagatatagcaaggattcatcatttttcccctctcatgaagtcataaaccgcacggtaatgctacaattattctagattccaatttccaaatacaactcgcacaaatattaaaattcaatctaaggcagcatgtttttatactttgaaaattaccacgagatatcattcggagtgtgacccatcaaattcttaacatgatactactacatgcgcgcaacttggcacaattttgtgtgtgacgaacagacacatagcaatangaaagcaaatgcagagttcaaccgcgccatcttccaaatatctgagagttaatgtacatg

SEQ ID NO: 4486 - DNA, 369 bp, Oryza sativa
  unsure (1)..(369): unsure at all n locations
gagacatcaaattgcaattagctggtgcagctgaagtaattttccagctttagctagctcgagaatccaggtcactatctgatcaagagaacctactcctctccaatctcaaatcaagatttctaggtctctcaacccttaataaaattaaaattaggcagcgctcgaggctcacttggctcanagagggggatgttgattcaaaacttttccatatcaaagcaaactctaggagaagaaaaaattacatccaatcacttcaaactccctcaggagtggcaatatcggcacaagacaaggaagacgagctggttccgtttttcaaatccagacctgtgacaaataaccaaagatcattgggtctaaact

SEQ ID NO: 4487 - DNA, 372 bp, Oryza sativa
tcagctctggagaaaatgacttacgtggaggcctggcttatattccagatgagcgcctgtgaagatggagccgcatgcccgctattacgctgctgtttatttttgtttgtcaggcctgaagcgcctttgtaataatgtaaatattatcgatataataaagatgcgtcttttatatcatgtttgcatggagtaccccggcttttcctgggacggggattaatacactaccgttcgggaaaaggcaattttcccggtcgcgacactacgccaccttcagggatgctagcttggaggatgacgctaccatcatgcacctggcgcgcatggtggaggcgtaccacgcgggccgtatcgacttacatcatatggtgt

SEQ ID NO: 4488 - DNA, 310 bp, Oryza sativa
aaaaatcccgctagaactgagagaaaagtgtattggatgcgcagctttacaaccaagtcatcgacataagcctcaacattacgccctatttggctacccaaataaatgcgagtatgtactgttgaaaagtatgacctgcattctctaaccacgaaggcattgatgtataacaataggttcctacagtggtaatgaacgcagattgttcctcattctgcctagccatgcgaatctgatggataccagaagatgcatatagaaaacacaaaacgtcgcacccacgtgtggagtctacaatctgatatatgca

SEQ ID NO: 4489 - DNA, 313 bp, Oryza sativa
gcaagcttcttgcttgagtgtgtgatggaatgaagatttgtatccctttatatagcctcccaacgacggatatggcagttgaaattgtcagaaatgccccgcaatagtcattgtgagtgcatctgaagcgtccacgtggagggacgaactgaacggccactgtcagggttcggccgaacctgggccggtccagtaaaccttcttatttggtagaggggacgacagggtagtcctcacagcgtttatgatagttatggcggtattcaagatggttgcacctgacatgtgggcccctttattcttgagcttgctt

SEQ ID NO: 4490 - DNA, 408 bp, Oryza sativa
  unsure (1)..(408): unsure at all n locations
ctttggacttgcactagagntaagtagatctcccaggcctcgtgtttttacatcaacatgagtagaattagaatagtctgttagttattcaattcttccagagatttcgggtatagctctagtagcacttctctcttttgtaagactttatccattaatgaagtattcttctctatatagctntgctcctttattttacttatataattattcgagtaccaactttagttcatacttggctcatactattatgtaactagcttactggagatatacaatgggattggnttgttattcatttatttgattgctctatgccatctgcagagatgtagagtagtatttagtaatgtcagcaatgtgcttagattattagatgtcactaaatggtactatatgcgatagatc

SEQ ID NO: 4491 - DNA, 238 bp, Oryza sativa
ctcctattgtgatacataggtgaatgctgtcatcctttcatggccgtgaagtgatttgcatgtctactaaacatatattatgtcttttgcggtgatctcctatagcattcttgactagaccaaacataggtgctcttgccgtaagtttgatagctcaacttccaagaaatactagatattttttcgtgccaattgcattcacgattgtgtccaaagagtgcacaatattactgtgact

SEQ ID NO: 4492 - DNA, 352 bp, Oryza sativa
  unsure (1)..(352): unsure at all n locations
tggagcctgttcccatgccctcagagcatgagaccgtttcttatatcttaacacctgagcttaacaaaggcgtacactttcctatgctgcaacgcgccttgttttcgtcggtgtaaagccgatgagaacacggcaattatataatctaccatcaatcgattgttattntgctatataagacgacttaatgccattgcataatatctccgactcgaggaggacctgccactagtaggatcgttagcaacttttgttgacaacattatatctgatccacgaccactagattgccactccctgttctgtaaccatacacatttatacagataaaagctcggctactttcacttat

SEQ ID NO: 4493 - DNA, 306 bp, Oryza sativa
  unsure (1)..(306): unsure at all n locations
agcttgcttaaagcttttaatgatgaaagtcatttattttttatactnngaaggtggngctggtaatcattcagttgactagttgtgttcattgcttactcttcacctgattcttcattgtaggtcgaagtgcaccataaagacgctgtcgtcatagggtctttgagagaatatcatttagatcataacatggctgctgtcgtcgncgagaacttacctgatcttcgccctgtgcctttcaacaatgttcagaaatttgaccacataccatggtagtagctctatgccgtgatatctttgaaaata

SEQ ID NO: 4494 - DNA, 434 bp, Oryza sativa
  unsure (1)..(434): unsure at all n locations
tcttcaagtaacttcttttcagataaggtacttacagattatatcacattntatatgaacatagtgcatggaattagtttcctgtttcaaactgtcaattttacggcacaatttatgtatctgctcaaaattcagtgctaacagaacaaaaaacttatatgcataatttatgacaattgattttatgcagattagccatgcatatctcaattttgatctaaatatgtacatgcagattagttctattctggtgaccaccaaataaacttatgacatgtctaaacttgaagggtctatcaaaagaatgagaattcactcaaatgacaaacaatgtagttgctctttgttntcttgggtttcatacatctctcacagaaactatttctcgactgcacacatgctgaaaanaaatgacaagtagtcttgaacaatga

SEQ ID NO: 4495 - DNA, 386 bp, Oryza sativa
  unsure (1)..(386): unsure at all n locations
ccagagncacctgcggcatgcaagcttcacgaatcttctatagaacccgcgggtgtctgtaatattgtaaccgcaactatacgcaaacaatcgaaaacctagacaaaagaccaagaaaaagaccctatttagactaaataatagtgccattaaatagatctcatatttacagaattactgggagtggaacagggtcaatcggatgagcgcgtgagaagatatggattttctaaggattaaggaatttctgtctaaaggaaaaaggatttaataatttattaaaccctatttggaaagaaattgaaggagggatatgatttatacttcctcgggtggctcgngtgcggcccgagaggagaggcacggctctggcgaactaatggacc

SEQ ID NO: 4496 - DNA, 447 bp, Oryza sativa
tcaatatgcaatacgaattagctccttgtctttggcagggttatgcataacatatacccaatagtaggtcactaagctcagcggacccagcatatactaagtcttatatgaacttatactctacttgtagtttccgttggactattatgaggttttagtccaacggaaataagaaatactctccaaacaaattttgcaatatgataatcaaagaaaagatattcaatagtctcatttctaaaaagaacatcttttatttccattccaatttctctgtgctaaattatccttagaattaggagacctttttggagttcaagttcaattaattcaattcttttttggagtttgacagcttaaacatattccaggagtcagaatacagcttctatcagcacctatctccggtgatgtgcttatagaggatacttatcataagtcacttta

SEQ ID NO: 4497 - DNA, 400 bp, Oryza sativa
  unsure (1)..(400): unsure at all n locations
aggcatgcaagctttagaccataacataaagaaaaggatttttttatgttatttgctcacngncgcatacatctgcctaagcaactgacattccagacgactaggccgatttgaatcaccgaagactatatcgtgtgctgtaaaatgtaacattacagataagcaggcaataaatgagttacaacttacaagtgtgtcattttgaataccgaactataggaaaaccttgagacctatacagaaagaacatacccagtggtctttctcctcgttcatgggcttcattaagttcctccaatcaaggaaatttttcctcctatcattctgttgttcacgaggtatggcagcatcagcaactgctctacttctcgaaatgctacttctcgacatttccttgaac

SEQ ID NO: 4498 - DNA, 358 bp, Oryza sativa
  unsure (1)..(358): unsure at all n locations
ttggagaagatgtcctagggggagacctggcttatactctatttgagcgcctgtganaatggagccgtatgcccgctacttcgctgctgattatttatgattgtcaggccttaagtgcctttgttataatgtaaatattatcgatataataaagatgtgccttttgtatcatgtttgtgtggtgtaccccggcttttcctgagacggngatcaatacactatcgttcgggaaaaggcaattttctcggtcgcgacagcggcttcactcttcgacacgcgcccactccgcgtcgagctccatccgctctgcctgtaggacctccatctgggcacttaaaccgtacaacaccgtggtgtt

SEQ ID NO: 4499 - DNA, 303 bp, Oryza sativa
atctacttcaaccgatatgcccttatgcacggccatacataacatagaaatcacacgtggaaggggtgggcaattagctagagcagcaagtgctgtagcgaaactgattgcaaaagaaggtaaatcggccactttaagattaccatctggggaggtccgtttggtatcccaaaactgcttagcaacagtcggacaagtgggtaatgttggggtgaaccaaaaaagtttgggtagagccgggtctaagtgttggctaggtaaacgccccgtagtaagaggggtagttatgaaccctgtggacca

SEQ ID NO: 4500 - DNA, 313 bp, Oryza sativa
tgcagctgcctcatttgtctgcggcttttttcattttatgacagagagcaccagcagagataactccagcaatgaagcctgcggagaagtttgcccccaatataacagctgcattgctttgctcgccaactattcttatcagatgccttctagtctgcgcagcaagagcattaaagatatgaaaaacacagtgagctctataggtttggcagaatccaaattatctaaaccagaatagagtataccacactccagtaaagtagctcactgtgtcaagaactgtccagcatatatctgagaaggggacgtcacg

SEQ ID NO: 4501 - DNA, 451 bp, Oryza sativa
  unsure (1)..(451): unsure at all n locations
gacctataaaactccgcttggtaaggtacccatgcaagcagagcatgagaccgatgccgagtctgatacaactgtgcaaaacaaaagcgtacacattcctttgctgcatcaggccttgttctcgccgctgaattgcagatgaaaatttgtcaattatataatctagcaacaatcagttgtcattttgcatataagaaaacaaatgccaatgctaatcactctgaatctgtagtacctgccatcagcggtatcgtcaccactttctttgaacaacttcttagctgtgccagtgccaggagatggccttgccctgttttgcaaccatagttagctaaacagagcanagctaggctactttaactaanagcatggaagactgagaagagctgtaaccttttgttgtgggacttggatgtggttntcttagtagcagaatgaccacccatttggg

SEQ ID NO: 4502 - DNA, 332 bp, Oryza sativa
gcgaaaaaaaagatggccgcaaaactattttctttagtactaagaagaaaaaggatattgatgctacggcttattatctgtagttttattcattgttacactctgcaactatattacatcccgatgtaaattgaaatatatgcattggccatatgtcactggaaatctggaatgctaagaatgggactatgggagctgtattatctgaggtctcggtagattagcttgcattttaagatctggggtaccaaatagatcaatctgccggtgtgttataaattaattggttatatgccgggacgtgggtcacttaacacttgacacgatacaca

SEQ ID NO: 4503 - DNA, 412 bp, Oryza sativa
  unsure (1)..(412): unsure at all n locations
tggtatcagngggttcatgggatagcttccattntatgtctcgntntgagcagacttcatctgaccatttgtctcagttcctgtactctgtaagacgatgtttccatctggtaaaggtagtagcaggtttcacccacattgatagacttcctggttcttgatacaatttgatgtagtgtaatgtcagccatcagttcatcactagtggttagactgaagatcgctgtgacttgagtttgtagagaaaacagattgttcctaagtgcatatgtttgtcacaagattatatgtctatctaacctgaaacctgtgctagcttagagataacaaacagcccagacctgacatgaatgtgcttcgtcttactgtactctttattatgagaggaaattatgtgtgaaaacaatgagtt

SEQ ID NO: 4504 - DNA, 388 bp, Oryza sativa
  unsure (1)..(388): unsure at all n locations
acctgcggcatgcaagcttgaacttatgggattcagctggatctagttctatttgctgtgtagccgancatgatagtcttnttgaggccaaaagggaacattttgctcctgctttgtctatccgagctcccttaattattggagggagaagacatgaaggcagtatttcattgccttcacagagcttaaacttagaccttaatcttaatcaggctgatcaggttgattctgaggatgttgatatgattcagagtaatggacaaccacggataaacgcttttcctctcaacaggggcctttccattcctgagcatgatctgcgccatacaaattcttccagtgctacaggaaatccttcacaggttgcaagcttntctgatggaatgac

SEQ ID NO: 4505 - DNA, 439 bp, Oryza sativa
  unsure (1)..(439): unsure at all n locations
atgcaagcttagacagtagcacttgaaanantgttgtcttggttcatgtntatttcacatcaaactttcgcccaactcccaactttttatcacatcacatccaaaacttttctacatacataaactcctaacttttttttcctaaactaccaactttccccaaacttcttcccaatttcagaaactaaacacaaccatgggtgataatttgtggcaattacaagtgggcagttatcatctgccatactacaaaattagggagatgcttgaatatatggttaggtgtgcacattgaatgagatggtgtccggcccctagcctcacatgcatgtgagacctattttacgtcgtgtgagacatgctggtcgccatcacacgctatgtagaggggagacgaacaaanccatattttacagacggacataataatatcatacaa

SEQ ID NO: 4506 - DNA, 352 bp, Oryza sativa
  unsure (1)..(352): unsure at all n locations
ttggcaagctggacactgtgcggagtgccttctattttatatngaacacagataaatccacagcatctaactggctcgtcaatacgagtaccgaccaatccatgcaatttcctagttccataggaaacggatcgttcaatcggttacttgatatgtccaaaacctgcaacctcctcaaccttccaatctctggtggaattgaacctttcagcatattggagaacagctgcagggagcggagctcccgacaatcccctaattctgatggaattcttctcgtagacggttccgggacaagttaagcaacttcaatttgagcaagctgccaagaacacccggcaccgaacctgtg

SEQ ID NO: 4507 - DNA, 361 bp, Oryza sativa
ttcttaaagaaaactatgtgaaatcattcacggctcttgaataaatgtatattcaaagagaagtgagcttaggtgcaactattcagaagcaatcataaacacatgaatgaagcataacatgtttattatgttttgtagaggacaacagaagcctagatggccttctgtgaactgatagcatgatacagccgaaaagtggtcaatactacaaggaataatgcgcaactattaaaatccacctcaccttctttaaacactgacggccctgttcaagacctacaccatcaccgacccagaggaagacaaacgatggagtgtctgctatagcctgtgattgtcaaaaatgcagtgaagcacatta

SEQ ID NO: 4508 - DNA, 326 bp, Oryza sativa
  unsure (1)..(326): unsure at all n locations
tnctcgncgtcggcctcggcggaggtgtacttcttttatttccctttccattgcggcgcgagcatccatgtcatgaggaacccaacgaggttgctcccggtgagcactaatagcgcgatccgcacgccaatctcaggtttgttagcggcgtccacatgcgccttgtcctgtggctgcgccgcgtataggaaaccgaatgctccgatgatcgcgccggccttgccggacgccgcggacattccgttggaagatgatcggagacgcgccgggaagaactcaggcggcacgattaacgtcgtcgcgttctgtccacagttggcgaataa

SEQ ID NO: 4509 - DNA, 451 bp, Oryza sativa
  unsure (1)..(451): unsure at all n locations
agacaacgctgcaggggtgaactccgttgttttcttatatgcaaataaagcactacacaggctagcgaaatggatcacactgcagtgctcaaaatatagcataagcagtaaacaactcttttttttctgaaaggaagcaataaacatattgcaatcctaaaacagcataaaacgatcatggcactgcaggccgccacaactgttggtccgactcataacctcgaaccattgtcggctnttgcctcttaccctgtgcgataacatggccatgagagtaagtgaaccaagggtgcacggatgagacaacacactcaacgacggtgattgcggcttctcggtgtgtcaaagtggagctccttctaccagcggcgaaccaagcccgttctggaccgggtcatcgtctacctcaaagacgtcatcctctatgtcaccctcgataaaagggcctgat

SEQ ID NO: 4510 - DNA, 375 bp, Oryza sativa
  unsure (1)..(375): unsure at all n locations
tanagccatgaatcccttttatgcatatctggatctagatcctgcataacaaacatataggatgagtagtatctgatataaatataatactcgagaaaaaatcaagtattttaaaatattgataaatatgtatttctcctcttgtcaattttgatttccccgagcagatgactctgtacgtttaaacactctgtccgactagtcatagcccccaagcatcgggagtcggcctaggcatttcccaaacatgcatatgagtgacatgagttcgtcattaatggaacaaagtttcacggatcagaatttactacttaggtactttngcaattattaagagcagaaaatanatttatctcatctctatgcttttgattt

SEQ ID NO: 4511 - DNA, 407 bp, Oryza sativa
  unsure (1)..(407): unsure at all n locations
gcttgctaatgggctggatggaaagggcttttgttttgtttttaattggaaaaagtacaccaaaggtccctcaacttgtaatcgagttacaaaatcgtcccccgagcacaaaaccagatgtaacttacaaaatcngttactttaggttattcgtgggtttgaccccggttttatccgacgtggcgggtgagtcagcgtggaacccacgtggaccccacatgtaaggatgccacgtcatctgggtctctctttcccctcctctcccttcctcctctatctcacttttctcctcttagagcgagggaaccgccgctcggcagtgatgacgcgggagaaggggcaacgacagagccaggcccgcgcgctcctgattcctgaaggcgacgccaggctgataccgacggcta

SEQ ID NO: 4512 - DNA, 437 bp, Oryza sativa
tcacttatttataagtgatcatttattttttagcctttgattaaatgtcttgtactgaatcacataattttaatgtctgtaagttttgcaagaatctctccaacaccttaaatgatgttgtttgaaaatcatatgatcttcaaagtcaacattcctagagtaacttgtgagagtacgattgtgaactattatcataccattcttttgaatcaatattcctacttctagaggcgagaaaaggagaaagcatgtctattgcacttgtacatgtgaatgaccctgtaaattatgtttggtctccactcctgttgtatatgttgctattatcttttagagaacctttctgaaagctcaagtgaagctgatcatgcaatgagttttatgtgttagtaagttttgtgtgtaaacaatatgttgtgaggaacaagtatacttat

SEQ ID NO: 4513 - DNA, 433 bp, Oryza sativa
  unsure (1)..(433): unsure at all n locations
cctgaggcatgcaagcntttcctgcctcagctctccgatttttttctgttgtggaaggcgctcaattgattnttgtatgataattatgaaggcaaaatcaaaagcaattttcctaaatatatacactagaaaaaatgctaatgcgttgcaacggatgaaaactatattaatcttattattgttatacggcttagctatggtgaacttgactgtgtgaatttgcttggatatatttttcttttagaaattcatgagctgcaattaggagtctgactctcatctcaaattagtatgcgaatttttttaaagagaattcttatacgactccttttgtatatctaaaagcaaacaaacttaaaatctgactcaaacataaatatngtatttcaaaagagagcgaactttataacctactcaaatacgaatgacgtac

SEQ ID NO: 4514 - DNA, 424 bp, Oryza sativa
  unsure (1)..(424): unsure at all n locations
cttgaatatttaatactcaattgatcttgtgctaatgacttgtgtcttttcgagtgccctagataagctacgtcaatgagctagatcgaacgaaggctatgtatgaggaaaaggatattgacatggtgttaaatgaatatatttaaacttcaattttctaataatgtatgaaaagagtaaacataatatgtaaaaatatatttatgataaatttagtaacatccttttcccatatcagtattttttacaatagagagtgagtaatttttcaaattctacacacacttgaagttgtgtttattttggaaaatgtaattctaatttaacaatcacataaactatgctttttatttatttatattnttatgggtgtttcaatgacatgcgcttaatttgaatacaactcgaaataacatatattttt

SEQ ID NO: 4515 - DNA, 394 bp, Oryza sativa
  unsure (1)..(394): unsure at all n locations
agctnggaagcaatcagctccttgagagtattatttctgtgtcaaatgtgacgaagaggtcaagaaacaagctataagggttctcgcacaaatatgctgggatacatcttcggttatgggtgaccagaacaaagaaagattcattggctccctgatcgacatgtttcttcacaagagtaagggctcccagtttgaaaatctggcaggtgaagagctggcgcagctatctttcggatttggaagctgtgccaccatcatattggagaaatatggtcctaatatgattgattgtatcggtaaaactgattcaggcttgtacaacagcatccacagganaaatgcagcagatgttctgaaacacctatatggtnactattccatcgatgatgaacat

SEQ ID NO: 4516 - DNA, 405 bp, Oryza sativa
  unsure (1)..(405): unsure at all n locations
tgaagtgaagncttataattcaatctagatctttaagtactgctttgattgataattntaatggctagcaagctggttaattaagtgcaccaccaatggttcaattttctagttgactactagcaagtttagttgatggttattcaacataaatttccttgtacgacatacatcatcttacatgcacccgcaattacttctctattattttccactagttgtgcttgccgcgctgaactaatctgcttgaggatcataaagggaaagaagctcaaagtctcaaacacattcctattatgcatcattgatgttgaaagaaagaggtgcactgtcattgttcttatggactagaggtgcactgtcattgttcttaatgcacatgccatatcattactgtatcataat

SEQ ID NO: 4517 - DNA, 455 bp, Oryza sativa
ctgcagctttcgccaggtgtatgggcttctttctttatatgcgggcgacctggtccggcgatgtagagcgtgtcaattccacgccaagcaaatccatcagccggcccaggccctgcagaccataccactttcgtggccatttgctgtctggggactcgatatcctgtgaccgtttatgcgggccccgggcgggtttgagtatctgtacgtcgcgatcgacaggttcactaagtggcccgaggcttatccggtcgtcaagatcgataagcactccgcacttaaattcattaagggcatcacggcccggtttggagtgcctaaccgtattattacggataatggcacccaattcactagtgaactcttcggcgactactgcgaagacatgggcatcaagctctgcttcgcctcacctgcccacctcagaagcaatggccaagtggagcgcgccaatg

SEQ ID NO: 4518 - DNA, 438 bp, Oryza sativa
  unsure (1)..(438): unsure at all n locations
ntacctgagctgcnagggtctctgagngtngtgaccttctattcattgcatgttggntcgaaaatagaaaatattgtcactccatgcgattcttcctccacattactctgaaataagtgcaatatgtgcctttggcgatccagattcgcanaatctgctgtaattgtaattgtaattgatagctattcttattcatttcctgtaacatatgtaagatcgcacagattattgatgcagctaaaaaactgcacgatattaggtgggatttcatgcatcgctgtttaagttttggaagtcatacagccttgttgcttcataatatgtactactctttntaaggattgttgagttgntaggctgtcgaagcttttttaaacaaatcaacagcaatgtgttgaggcatatcttcgctgttgtgctcagatctcgtagggagca

SEQ ID NO: 4519 - DNA, 410 bp, Oryza sativa
  unsure (1)..(410): unsure at all n locations
gtcaattntgcacttgaaatttcccctagatgtcctcgggcaaagtgttttgaaattcaagctgaggttgggatgaaatctccacgaattcagaaaggaatgagaaaggcaagcagcacgagcagcagcactcatcggcattaaggaatgtatgtgacgccagatgtcctgcatccataagcatgggataaaatctcaaattaaggccaaatggaattacaacaagagaaaaaaaaagaacaggagaaccacatggagtatctctgccccaggttgctctctatatgattgcacaaggtgcangatggtgcaatngattgtagtccatgatataagtatatgtgcatttgttcaaccaaaatgcacatcgatgattagtttattgtgccatagcatattataaatagatc

SEQ ID NO: 4520 - DNA, 443 bp, Oryza sativa
tggtggtatctcaccttcgaaggagttgttcgataagtcgagtacctggagattgctgcatgaggacagctcatctggaatacggccttcaagagagttgatgctcaagttcaggtagctgatttgtcccaagcgtccgagctcacttggaatttttccaaggaatgcgtttcttgataagtcgaggcttgcgatggagctcagattgccgatgcaaggtggtattgaaccactgaggcctttggagctgacgttgagcaccatgactcggagttgggtctgggtgttgttgcatgaaacaccctgccagttgcagaagttctgggaagtgttgctccatgagcttaaggatccgtttggatcagagatttgagacttgaagcagagcacggcttctctatcagtgtcagtgtcatcgcttgatgctaatggcagagagcatg

SEQ ID NO: 4521 - DNA, 325 bp, Oryza sativa
  unsure (1)..(325): unsure at all n locations
tacaaagaatccagaagaagtagcctaaacatatatgaaacgtttgtactttcacatacatgcataacattgagcaaagacctacatggatacatgtaattcaaatggaaaccaaatctagaaaattttcaagagccttgattcaacaaacccatatttccatactctctacaagaaatggtcaatgtgaatatctgggaaatggcattaagaaaaagtgtcgattgttnttttnttctattataccttctcgacgatcatgcggcattgcgttcccttcccagacgcgggtgcacccgagatcatcaccttgagcggggccttc

SEQ ID NO: 4522 - DNA, 407 bp, Oryza sativa
gaccttgaaactcagctgatgccactcagcgccatggtttaggtatctttggtgagattccaaagctctgcatgtgcttgcagaaactccggattgaacgaggagtctgccatgggtgtggtcactcggattttcttcatggaaattgctagccaagatgttttctgtatgtgtagatgctatgatgagaaaggagtgatttatagccttgaacttgataaacacaaggtctttgctacctcaatccaagccaagaaaatgaatgcaatggtccactagctagcatgacatctgtcaccattaattttaccctgcaaccctccactaactggtatgccacctgtcattattaatttcaccatattacacaccactgactaatattgcacctgtcaatatttatttca

SEQ ID NO: 4523 - DNA, 368 bp, Oryza sativa
  unsure (1)..(368): unsure at all n locations
agcttanaagtcgctcgaatagaaagcatgtttttcactttattaatgancntacacagaatccataagaagtagcctaaacatatatgaaacngttgtactttcacatacatgcataacattgagcaaagacctacatggatacatgtaattcaaatggaaaccaaatctagaaaattgttaagagccttgattcaacaaacccatatttccatactctctacaagaaatggtcaatgtgaatatctgggaaatggcattaagaacaagtgtcgattgtttnttttttctattataccttctcgacgatcatgcggcattgcgttcccttctcagacgcgggtgcacccgagatcatcaccttgagc

SEQ ID NO: 4524 - DNA, 456 bp, Oryza sativa
  unsure (1)..(456): unsure at all n locations
agcttcgagatgtatgtacaagagcatgttctatatcttactataagccagctataaacacattntaaagagataaaagaaaagagagaagagcatcgggctacagatctatagctagctgcagcatggacaccaagatgtaatgtgcatatgacaggtgggaccaggtattaatagtgtagtaagcaaccattgtatgaattggctattacattggctatagatgatttggagctaggaagttgctatactattaaacttgctctaagaggttgtgaccaagtattaatggcatagtatatatttttgtgcagctacgatataattaacgtaaaatctatttcgagaggcttgtcgattntgccttaactagcgacgcctaaacatggagaaatgtggagaagtccaactactacatggcactacatgcatgtanttttttaatatacatgtacg

SEQ ID NO: 4525 - DNA, 356 bp, Oryza sativa
  unsure (1)..(356): unsure at all n locations
nttcctgttcagcccaatggccaagccagcatatgcgcacgacctctncccgagtatgagcggtgacgacggngagccaaacccacgccgtcgagctcgtactccaccgccccctccacgccaaagtcctaagcgggagaaggcgctcgagagggccgaaggatccgcgacttcgacacccacaggaggtggagatnggcggcgagatggtgagcgtcgcctcctcgtctacggcgacggcagcacgccccaggggcgcgctccaagctgcgggcgcgcttctacgtcacccgcccgtcgcccatgacccggagtctccagcccaacgttggttggacgatgtggccaaattgtca

SEQ ID NO: 4526 - DNA, 439 bp, Oryza sativa
  unsure (1)..(439): unsure at all n locations
gcttcagtccagccagactgatgtatcttttgtatatctcataaccaagaactctagaaaacaatggattgatgagcagctaggttntgctagtgaaacgacaagatcacagatgtaggatcagtgtaccttaatccactcaatgaagaggattttcttttaccaagagatcataatggcatcagataaccaaattaagaaagcaccattttttgtcatctgcgagaaagacaatgtacatacctagcaaacagccagatcgccctcgcagtcgccgcccaaacaaacacacacgaactcgtcgcgtttatctcaactgatcaacgcctccaccggcacacacataatcctgagatttatagggaacaggaaaaaaaaacgaggcccagtagattgatttttttggggccaagaatgatgggcccgtttagcacgtaca

SEQ ID NO: 4527 - DNA, 390 bp, Oryza sativa
tacctgccaatctcaatccaaaatgtcgatgatcatgtcagtgtcattggctactcgtcgttagaccacaattaatcaatcaaacaaaagagtgttcaactcgtaagcagttcaagtgtctctccagccaggtgctgtatactgcagttggctaactcagctccctgcagaggtcttgtctggtgagaggtttcagttctgaaggttaagtcgattgctgtctctcaatggtcactccaatccgaaactgcagtagactatacgtacaaaacttgtctagcttaggtccatcttaactgcacgattgaatagattgtggacagataaattcctaatacagataaataaaatgctgtcacagattatttttttgaagaagatggatttata

SEQ ID NO: 4528 - DNA, 357 bp, Oryza sativa
  unsure (1)..(357): unsure at all n locations
agcttgcattaaacacctaagttcccgtgacttgctgagtacgaaagnactcacccttgctctatataaatatatatagatcctccgccctgaagagaagataaagtgaagtgaagattagggttntgtcctggttcccagccgtcgcctgtggtgttgggtgttagaccgttggttccgctgctgctgctgttgttggtgttcgcctcgtccgtgtcgtcggttgtattctcgggctgtctgagctgcaacctaagttaaggtaaataagtcctctatttattttaaggattgctatgattcatatttgtcaccgngggtaccagcactatgtcctgngactggtaccgagatcgc

SEQ ID NO: 4529 - DNA, 380 bp, Oryza sativa
tcaaggaagcgaagctagatctatcctggcagaaggccatgttggaggaaatgcgatctatcaatgacaaccacacattggagcttccctctttccctgtcggccaccgtgccattggcctgaaatgggtgttcgaggtgatgaagaatgaacacggagtggtggtgcactacaacgcgaggctagttgcgaagggttacttatagccgccgggaatcaactttgaggaggtcttcgctccgatggcacggatggagtcggtgcacctcttactagcaatgggggaaaacgccggctatgagatgcaccacatggacgtcgagatcggagtcgctcaggtggcatcggggttccaggggcgaaatcttatccctggagat

SEQ ID NO: 4530 - DNA, 493 bp, Oryza sativa
  unsure (1)..(493): unsure at all n locations
cctgcaagctttagtgattctttggctgattgggctctctctgttatgggctatagnggngacattnttacttggcaaagggggagaataagagaaaggcttgatcgaggtgtctcatacgcgcagtggaatgctcttttccctactgcacgactggagaatggtggtatgctcaattcggaccatagtccgctgattgttgaaactgttgtgcgggcagattctgatgccaatacaaggcgaggtcctaaatgcttcgaagcacgttggctcaaggaagagacagtagtgctgcggccagaggagatgtgccaaatttctcgcataataccaagcaagtacatgaagagctccacgtctgggataaaaaggtgttgaagggacctgttaatcaaatataacagctgcaganaaaacttgaagagaatagaacgtgcccctcactgatgatagcatcgctgccaaaaggagttgttgatcccgctggactcct

SEQ ID NO: 4531 - DNA, 446 bp, Oryza sativa
tgtcatgttggttgtcaaaatgtcgcttagcttcatccaggaatgaatgcggatatcctgttggggccccactgctcagctaccgaccggagcaactgttgagatacccttttttgcaataattgacataataaacagatcgtattattattggttgatggatggaattgcttgtgtccaagctatagtcctcctagcaactgttactactagtaggaatagctgtccttgcccataactcatgtgcaaccatgtgctgtagctgcattctgcttgtctttgctgatgctttgcctaactgaaatcatttgcacacacaacttaactgggattcatagattgcaaccttttcttttcaccagataaagggctgtctttattgcttgcttttcaatataattccaccgctctcattttctttgctgtcacagtactgatagataatg

SEQ ID NO: 4532 - DNA, 353 bp, Oryza sativa
tcagattggaatcctgttggctcagcaatcctgggttcttgtaagcggtgcaagactcatggcaacggccgatccttgccactaattgcctagctattctccgcattagactacgacgtctcgctcgagatttaaagagatggagtcggagtcaagtgggtgatattaagttacaacttgcggttgcatctaaagtggtctttcggctggacatagctcaggaaactaggactttgtcagatgatgagcgcctcctggtgtctaacctcaaaaataggattctggctttatcagttctaaacaaaatgcagatcagacaacgctctaggcagacctggctcaaagagggagat

SEQ ID NO: 4533 - DNA, 444 bp, Oryza sativa
  unsure (1)..(444): unsure at all n locations
agctnntggtcagggccatcatggaacaggagtattttcttttgttccgntcttttctttcttttcttctttngttcttttctaaatgtaatttgatgatagagaaaacacgaggagatcgaattgatttgtggagggaagaagaaaaaaataatctgtacatgtgtagcgagagttttgataggaaaagaaaaatcaatgggaaattaaccgatgagttgttgattcttaagtccaaatagattgctattgcgtgatcagaagttcataacagccacatgtacatctccaaatcattcacaacttttgggaacaaagtgaaatgttcatttcaattctattgcgtggtagtagtagagattacaaatccgcatggcgtatattaatccaagtcagaaagcaacacgtatggtcatcagagaagataagcctaatgagacatca

SEQ ID NO: 4534 - DNA, 428 bp, Oryza sativa
  unsure (1)..(428): unsure at all n locations
ntatctcagacgccgccgaccagcgatcagtanactctcgatttaagccattcatgtgtgactgttattctgaagactgaagagatcagaaatcgcacatggagttaatttttgggacatttaattatttgccacttttaagatgtgtcaattaagaatttgccactcgttatctatgacatgtgggccttcatgtgtctatgacatgtgggccttcatgtgtctatgacatgtgggtccagtggtaaatcttttagaaccactcgtaagagtggcgaatagttaattattccttaattttcaggtgaacattgtgctagttttgtactttgctgaatcctgaacgacagatagcaagactgtataaaaattactatgttacaagaccacttataaagaagaaaaatgtctgaattacaaagttcttt

SEQ ID NO: 4535 - DNA, 435 bp, Oryza sativa
  unsure (1)..(435): unsure at all n locations
agctgcagctgtccattattctaactctactgttttttcttcttcggaacaacgctatctgtcactgtataggaggatcaccagcttgtcgttatgagattnttacagtataataatacagctttagtactattgtatagtaatattctttttatggaatttaatttgtaataatggtaaaaaaatataattgttgaatacttgaatcaaaatctgacatagataaatggattcataggtacggtgaatcatctcagacggtattgataggaacgaccagaattaattagtactcatattgtcctttcatgctaaaatataagatattaaagtaaactagaatacatcttatcttactattacaaatttagatagtgctagtactagaagttataatattaggatggggttcattcaatactaataactctatgt

SEQ ID NO: 4536 - DNA, 361 bp, Oryza sativa
  unsure (1)..(361): unsure at all n locations
tgcagcagcgcggagcaacggcaggacgttataccggtatataatttaataaattctaaaatttggaatccaacgggatatatacggagtatatctatatatatacacagaanaaatgaaacgtctaaattcatatacatgcaaagaaatcaattcaacgtaattaatggccttgattctacctatagctcaacaaatgggttcgctcgtcactctttctttcattcctcgtagaacggtccagattaactcgtgaaatccggacggctgagatcgatcccacatnccattggccgcactctctcgctcttcactcgcacctgcgccgcatcccaataccgctcccgcacgcgctgacgcc

SEQ ID NO: 4537 - DNA, 298 bp, Oryza sativa
  unsure (1)..(298): unsure at all n locations
tgcgtggagggacatagttgatgacaccgcttattgtcttttgacagcaagcgtatgcgctggcgcatggcaatattctggctggcggcgcacgagcctacgctggcggtagcaatcgttcacgttaaccaactgaacggtggacagatcaccaacggtgcggatattgaacgtgaaatgcctcaccagtttagcgctcggaatacccttaatttgcaacttaacgacgaagatatcagcatggngcagaaaatcgctgacaccatcaaccgcgtgcgtggatatggcagcgccaccc

SEQ ID NO: 4538 - DNA, 418 bp, Oryza sativa
  unsure (1)..(418): unsure at all n locations
agcttcccanattcaatggctttgatgaccccttctgtcttgcatcttagcttatgggcgagctcctctggcttgaaatggcccgatatgatcaccctattgttcgagttctcataaacgatgttaatgatcttctccttgtctgcttcatgttcgttcaattcaaaccacagcttaatcatatactgtaccacctttttggccttacgccacaacttagttatgggattaaatttacataattcagcaagtgcattgatccatacatacctttgagtttgttaaggactttctggatcttcttgcaacacttttcacactcgagatttgccttaatgatcaaactggccatntgctataaaagcatccatgcaatacaaaaacagagcttaattctgcaaaaaccttaatgcatatg

SEQ ID NO: 4539 - DNA, 358 bp, Oryza sativa
  unsure (1)..(358): unsure at all n locations
tcaagctccaaatgcccttgtatgttttctgaaggaaacttgcatatttgtgcagctaaggcatcgntatctgcaagtacacatcttgatgcatattttaagttcaattaagaacgagatggcaagtgctcacctcaagtacatctctaggatgatgatatcagagnttaactatctaaacataaatcaaaatggtggtggcaaaatagtagcttttttgctaacataagttcagaatacgcactggaaaccttttcaacatgtgacatgtacatcaagagtggttaattgttcagataaactgtgatccaagaaattgtatttacctcaaccgtgccttgctctggataccctgata

SEQ ID NO: 4540 - DNA, 426 bp, Oryza sativa
  unsure (1)..(426): unsure at all n locations
ngaagcactgacgacgagcattctggatatctgttcttttaagtacaacgcgagttgcaaggagttactatatctacaaagtgaaatgggtgcttcacggattttctaagcacaatgttacttgcatcacttacggataatcgaccaccatgtttgaaaaactctcacaaggattgagaatctacgttataaaaggagaggacatgtcacggtccgcaatggcaataagaacttgaaataaaacaggtgatttcttcaatgtaaatgtactgaaaatacatgacgtgctaaatcaaatagtaatgttctataatttgaagtgcatgcatgttgctgatgttatcttaacatcataaaaaagtttgatgtgctatgagttatgacgtacgcacaaacattagagttcttttctgatggatgttaata

SEQ ID NO: 4541 - DNA, 454 bp, Oryza sativa
  unsure (1)..(454): unsure at all n locations
tgcggcatgcaagcttcgccgggtntcagactctgnaagaccaattcttttggagctcgntncaactacagcttttctcataaactgcttctgctagaagctgccctaaatagtccacagcttctgagaatgtgtagttacagattctaaaaaatgaactaagaagccagaagctaaagaagctgggtttcagagcttttccagattctcagaaactggctaccaaacagctgcttctcagaatctcaaagttctccaaacaggcccatattcagctaagctagagcttgcgtagcttgacaggtgctggccggtttctgacctctttcgtcgacgacgtttcgatgcgtatgtgcagcagcggcagcacagtatatgttgttgttgggaatgaaacgcgtgtgctcttgctcaatctttctaagtcgatcgatcgatataatatctcggatat

SEQ ID NO: 4542 - DNA, 358 bp, Oryza sativa
tcgccgcccccgctcagagagaggtaagatctatgctttacatatcctagagggggtgtcgaagcactaatcccgaagaattcaccaatccacaggcgtggttttcacggggaaaacaaaaggtttcttcgatttttctaaatctagtatgcactctttcgcaatctagtatgtgtacctttgttttgcttagaaacatgccatgggtagtacaattttttttcagcagtgcatacttagctagctcttctggcatatgactaaccaaaactggaaatgatcagagaagtatgctcgatctactcatatatttttattcaggagaaaaatagagcagatctgatatgtgtgtgtgtgt

SEQ ID NO: 4543 - DNA, 398 bp, Oryza sativa
agcttagaccctggttagatgggactataactttttagtccatatcacatcgtatgtttggacactaattataaatattaaacatagactattaataaaacctattatatgaccccggactaattcgcgagacgaatctattaaacctaattaattcataattagcctatgtgatgctacagtaaacatgcgctaattatggattaattaggcttaaaaattttgtcacgcgaattagctctcatttatgtaattagttttataagtagtctatgtttaatactctaaattcatccgatatgacaggagctaaagtttagtccttgatccaaacaccaccgtacaatccatctagcagtgaccatcctagaatccatctagcagtgacacaattatta

SEQ ID NO: 4544 - DNA, 289 bp, Oryza sativa
gagggatttcttctggtgtcttgtatgcggggcatgtactgtgccattatcacacaaatcggtgggcccactggactctggctatgtatgatgggaaccacaaagttaatttagccggttactattgcaacctttagatgacccttttaatttccccatcatacagacatctggttcaacatgaggatgcgctgtatacccgtgcccgatacttgtatacaggctgtgctcccctgccatccaaatcgaggccaacgtgaaccacccacatgatgccccaaaccactga

SEQ ID NO: 4545 - DNA, 420 bp, Oryza sativa
  unsure (1)..(420): unsure at all n locations
agctntagtttctaataaaagttagtttattttctgtttagaacgnatagattagggaaacactctgaactagatatcttttcaattagcagcagatctttgattaattggacgagtaatatatattttcgtttccatcatccaaatgatcgatcgacatttgttgggaccaaggccaccaagaaatccatgatacaccgaaagcaacgtctagttataacgtcaggacgagcttctagtaaccacataagctagcccagccgggaagagttagttcaaaggagggacattcaccaactcgatctggaccaggacatgatcgcccacttttgtatgcttgaagcacatgatcttgcacagatccaggcattatacctaaataaatatacctactaattacgtggccacctcagtgggcat

SEQ ID NO: 4546 - DNA, 285 bp, Oryza sativa
  unsure (1)..(285): unsure at all n locations
aactatagatactcacactgcntgagaggggaatcgatacgggcaccgtttattgttgcaccaacggagttctggactatgctcatggtggaacgcataacccacgtgaaggcttccagggcttcagcgatcagatatgcgaggctgcgcgttcactaacggacgcagtggaagcctcttctcagggcacgtgccgacccgacagacagaaggacgagctggcactcgcgctggagactcccgagcattcaggacgaacacgagggaaatgggtgattccttgga

SEQ ID NO: 4547 - DNA, 412 bp, Oryza sativa
gttgcaaaatgctaatgatgaggtcgagcccacgccggaccaccggccgtcacggcgctagacgactgttcttgtagccggcaccggcgaaatctagctttgctctttgcctcttgcatgtgtatactccttttaattagggttcacatgtacgtactctatatgaaatatccaagctatgtactatactagcaaaagtagcaaggcgatagagtgctatacgatcgaattgctgcttctgtttccaagtacggagtaaaagttaacctaattaaattagtgaattctctgtgcactaataatggatcgactacggacgaggataatgtatttggcttcttcaatgcaaggctttctgctctaatcaattaccatctggagaagaggcgccatcgaaaatactactatacct

SEQ ID NO: 4548 - DNA, 398 bp, Oryza sativa
  unsure (1)..(398): unsure at all n locations
gacctatgaaactaagcttacgtttaccactctcanaccccgcttttcttttggcctgtatactaagtcccatgaagccaaggatcttcttgtggagtttgggttatttccccctccaaagatagtttttccttgcattatcaatcgatttgatcactgtgacaggtagttgcaaggaacacatgaagtaagttgggatggctgacgggactgaatttatcaaagtgagacgccctccttgggggagaaacattgaacttgttgttaatcttctttccactctatccaccaaaggggcaaagtccacaatcttaggccttgttgtccccatgggcaaacccaaatatgtgataggcagagatccaattgtgcagccaagtaaaccagccagatgatta

SEQ ID NO: 4549 - DNA, 484 bp, Oryza sativa
  unsure (1)..(484): unsure at all n locations
agcttatagataaatgcaggtaggcaccacatctttgttttgttttttgntagcacaacctacaagctaccatgcttaaaccaattntgttgacacgatagttttctattccctctgtttcagaatataagtcgttttgactttgatcaatgtcaaattacttcaaaattaactaaatttgtagataaatatggtaatatttacaacacaattgagaatattttataatatatttatcttgaattaaaaatattaccactttttccataaacttaatcaaacttgaaatagtttgactttgatcgaatcaaaacgacttanatctgagagggggagtatttcaattttagtttctccattgagccactttagtttccaagtttagaaacgagagaagtttatgcgaacacatagtcatattaccttggnttataacccttccatttgattttatacagctatttaaaacactaatanaaacaat

SEQ ID NO: 4550 - DNA, 445 bp, Oryza sativa
  unsure (1)..(445): unsure at all n locations
taccatgcctcatctagaagtgcaataacaccaccagtgttttgtaaagggacaatttanacaaactaattaaatgtcgtttattgacaaattcagtaaacacatggaaaataagcaagtgaaaatacatcacaaaattattggatatattacttagtcaaaaacaagtagaagaaaaagaatgaacctccctatttaaatatgtgacaatgctgatattaatcaatcttttgtgtgcaatattaaccagtatttttctattagaatataatgataatatctaacaaaactataatattgtaaacgtcttataaagaanaatctgcccatatgattatgatgtttgcaaactaaatatttggagacctactgattataaaagttggaccgaataaattcaatgatgccatatatttaaatatggagggagtcctgcctaaatcat

SEQ ID NO: 4551 - DNA, 459 bp, Oryza sativa
  unsure (1)..(459): unsure at all n locations
agctntntgccattgaaatacccttcagaagcttactttctctactgtcaacaccattagcaccacaattatcacagctagcattagtacaactacccccaaattcttctttaccacaaatatctctagagtctcggaacctgataaatgcctttactagagatggcattatttccagcacaggagctttacccacacaatcagttatttccaacctcaccaaacttggagcagaaatccgaaattggcgaaaaaatatacagtcaatcatggtcagctctttaagtgactgagacgatatcttctcaccgtctatatagcagaacttcatccatagggcctccatgctgggaagctcanagaatcaacaaaaccacataataatggcacattactaagctctaacctcgtcaagcgctgggagataagaggcagcttggctagagaaaaagatatcgt

SEQ ID NO: 4552 - DNA, 442 bp, Oryza sativa
  unsure (1)..(442): unsure at all n locations
tggtaatcattgcttgctggtttaatcaatggttcagtgaatccctcanaaaaagaaaaaggaaaatgatttagtgaatcgtttatttgaagacaaaaacgacacaagaaaatttggcagaatgaggcatcatcaacaaattatttacgacagaaatatgaacattagatccaccagttatctgtcaaaaaaaagtatgatttgatacttacagtcccagtcaacatattgacaactatgttgggcagcagttttatcaggtaggtacaggtaaaaaataaaaaatggaggcctgatgtccctattntacatcttcctagaaaaatcaggtaagctcatattgcagcacaactgcatgactgcctaaaaatatgttttnttttaaanaaaaagaaagttaaaggatgccccatgtgaactgcacttatgttctttccagact

SEQ ID NO: 4553 - DNA, 495 bp, Oryza sativa
  unsure (1)..(495): unsure at all n locations
agagcgacctgcggcatgcaagctnggaagagaggcatgatagttctgcgaattttttgtntgatatcattttgaaatcactaagtgatttatttctttttaagtctgggtcgaaaagagacttgcgtctcacatcgacttaagagatgcttttcaacaactcaattggtaatgtaccgacctcccgggtcagatcattacttctcggctcccagagccatttcacttgattaggcggcttccagagcctttttcaatttctcggactcccagagtccagttgcccagcagcaaagcaatccgcttccactcgggaagcctagtctatgatgcccgcagacatcccgaatcacacagattcgtttctgaccactcaggtcatccatctgccacgtaggctgattctggttacgaattccacaccacaacacacttttacatagtacaggcaaacaaatctacgcnacgggaaccaccttacgtacggccatgacc

SEQ ID NO: 4554 - DNA, 435 bp, Oryza sativa
  unsure (1)..(435): unsure at all n locations
ntagaattacattaacaattgagaatgttaattattttttgttctaatatctatgatacaacgtggagcctgagagaatctattanaactatacaggaacaagagtaattttctggtgggttcggaatacagaattaaagtagctgttgtgctcaacctttcaccaatcatgtatttaagaagcataaattactttagaatcataataaccctcatagtgaagcaaatgatctcatctagcaaacaaaaaaaatgtctcatacaaatacagaacaaatggtaaccagatggccatgtgccataattgcagtaccctgtgatgtctgtatattgtagtcatgcatctgtctaaataattttcttgtgaaaaaagctatatgtaatcaacttaagtatcgcactccaacctagactttgagttagtaaatgtcataa

SEQ ID NO: 4555 - DNA, 363 bp, Oryza sativa
  unsure (1)..(363): unsure at all n locations
agctagcctttgtctaaatatggtattccaatgtcgtgtttctccctgtggnatatattgggatgaaatatatacattagcaaagcttttaattgcataataatgaaattattcttcgaatataaatgataatacaatcatgataagggcttttcattctcttctctctcttttttcatagagaaattatttgtaataattatatatttgatgagggtaaaaataaacaaattaactattacaaagtttaaaaatcagtatactaatagaaatttatatatagtttttttttcttaaaaaacacatgactcacgagctcaggaagcgtgcgcattgtttcattcatcgcttaaagcacgggtc

SEQ ID NO: 4556 - DNA, 450 bp, Oryza sativa
  unsure (1)..(450): unsure at all n locations
ntactatatcatgaactacatatctatataccatatatatgcccctacaaagagaccatagaaaagtaaacaaaatcgatcaaaaaccgatggccggccggcaagcacgtcagggtatattaggaccatgcatgcttcgtacgtacgtatagtacatgcctacatggtagtaatatatatgcacgatccactggtggagaaaccatttatacttccagttggtaacttcttttagtcccggtttttcaacccggactacgaatccgggactaaagaccggttgaaataaccgggactaaagatctatctttagtcccgcgtggtgccgggactaaaggtctcttttttttcattatnttttagctagagtttaatccctatatattttccaaatcaagtgggatacatatcctcaaaataaacctcaaatcaaaataacatcccaaaaca

SEQ ID NO: 4557 - DNA, 360 bp, Oryza sativa
agtgacacagataaaacaccatcggcttcacccaatcaaaccccttcaactccttctgccccagctcatttctcgagggaaagtaccagtccctgattcccttttataaccattttatcttcaggcgagtacttattaatcttgtctttgcagaaaaagagaattgctgttaagaagaaatcggcagcaccaactcttaaaccggctccaccaataagatggacttaattctttcagcagctgatctcatccgatcttatctaagactcgactctttttagcctgctcctcctatctcccctggtcagcaaacaatgcagtgaccaaacttcatcggctataaggagtcaccgggttgag

SEQ ID NO: 4558 - DNA, 359 bp, Oryza sativa
  unsure (1)..(359): unsure at all n locations
tatgccnggatcgaccctatctggtaccgccggccgttgggatctagcgctgtctctgatctcgccggacacggattcgatgaggaagactaccctgttgtcgactacgagtcggaccttcagaccgtcatgtcaacaacagttagataggctaccccaaatattgtgcttgtgtgattatggtgaataagagcaacgaccggcttcggccaacaggatgtagggttattacctgacaattcaggggcccgaacctgtataanaatcctcgcctccgtctcttttacctcagtcttgcgtatatcctagtaccaacggtccccatactatgcanataccgaaatcgcaacattaaacgt

SEQ ID NO: 4559 - DNA, 369 bp, Oryza sativa
acactagcgttaagtcataagaagagttcactatgtaatctgtgctcaaatatagaagtatagaacaaactacggacagaaggtttcatttggatctctcatacagacacaaatacaatgaaccatctcttttcaatattaatcacataatttgaaatatacagcaaataaacttctgctgctagaatgcaactgataattaagaaaaaggggttcattggttattagaacttcagcagctatatggtttaaagaaaatgtagaatctgccagcaattggaaaagaagcatcattaaaattcgagaatgaaaatgtactcaaagaaaaacctctggtatcatggttttctacaaagatcacattgttct

SEQ ID NO: 4560 - DNA, 490 bp, Oryza sativa
  unsure (1)..(490): unsure at all n locations
cctgcggcatgcaagcttacttccnctcccaatcattcggttacctttttatcaaagaaagggggcttattgctatctaatagctgatagctagttcacgtgggctaacgaggtaattcctctacgaagccgcacaaggaagcgggattgaatcttatggagtattgtgctaacccttacctgtagcgaattaaagaaattatctatgcccggtacacgggtaatccgtactccttattgggtaaggtaggttcacctttactttgcaggggttgcatgaagaaaagaaaagtaactcccattctgggagtccaagcagtgatcgatttcttttactaattaaatcacttcttttgatcttagccgtgaagatgcccgagattcgccaacagaacagatatctattcagccctgctcgatgacagcaaataaatcttctttgattagtgcttctaatcacatcccatccttactttcttttatagatact

SEQ ID NO: 4561 - DNA, 449 bp, Oryza sativa
  unsure (1)..(449): unsure at all n locations
ttcctcccctaagagntctttctttgttccgctatttcctgctntcctcgntctctcctcgagacagattttcactacaaataaccggatagagatatttccttacttatagagccagactgtgctttaacacacgacatcccagtcagaggggggaatggtcaaaagaaactcgttccattgaagatcttttacaaagcactttcaaaaatgtgcatgatttgtgcaatgcaagtcaacttagaaagagctcttcttttccaaaaaaaacacttctctctcgaaaacaaaccacttgcttgggcgggcatcactttgcctctntaaccatccctttacttacttggttcctgatccgcacagacacatagttagggagctttcaatcagcaaatcgntggtgtgcgtggtggtcctctcatgtctgggctgcccctctcttctggttt

SEQ ID NO: 4562 - DNA, 429 bp, Oryza sativa
  unsure (1)..(429): unsure at all n locations
ccatganatagacggcatgtgcactgtgcagtacatatgtccgataatatcactacaccacagcccatgaccccaaagcgttcaattttcagagaaccactattatcgatcataaataagggaattccttttctctactgtacaatggatgcatatcatgaaactagggttgcaaattccgacatatgtactgcatgtatgcatgcatgtagcatacacagaactacctaatatgcatgcatgtagcatatattcgatcgattaatatcgcttgaaactccctgcacatcgcctaatatcccatctatatacatagatgagcatacagcacaacctaaggacagaagaatgacttccacgatgacagtgtgagaaactaaatctactaatcgagctggcgttcatacaaactcgattcccgttatcccg

SEQ ID NO: 4563 - DNA, 361 bp, Oryza sativa
  unsure (1)..(361): unsure at all n locations
tgagccaccattgccaccttcgagctaccgccattgtctcccaatgcccatatcggngagaagggtgtgcagattatccgccggtggtggctcgatcgagctgcgccgcccgtcacaggcggtggcagcctcaggccaaatctagcaaggagcacggcggcagcggctcaccgacaaagaggaaaggggccgacagtgtgcggattacggttaggttttcgttgactttgtttttgtatcgagtcggggaaatccaagtggtccctctcgcgttgggccaacgttgcccctaggccagtgcattttatgggccacgtgttcgaaatcggactgggctaaaatcatgcgcaattcgagccac

SEQ ID NO: 4564 - DNA, 407 bp, Oryza sativa
  unsure (1)..(407): unsure at all n locations
tctcaagctcaagcatttacttttctagttagagatcagcgtcttggagctaatgtgggatctgcccaaggacccacaggtttaggtaaatatctaatgcgttccccaacgggagaggttatttttggaggggaaactatgcgtttttgggaccttcgtgctccatggttagaacctctaaggggccccaacggtttggacttgagtaggttgaaaaaagacatacaaccttggcaagaacgacgttcggcagaatatatgacccatgctcctttaggctctttaaattctgtgggtggcgtagctaccgagatcaatgcagttaattatgtttctcctagaagttggttagcgacttcccattttgttctangattcttcttttttgtgggccatttgtggcatgc

SEQ ID NO: 4565 - DNA, 397 bp, Oryza sativa
  unsure (1)..(397): unsure at all n locations
agctcttcagatggatctgttatccattcctatctatgaaanatggggcactagtttcccaattatccaatatgctgatgatactctggttttgttgatggcatcccttataggttttttgtttcaaagccatccttaattcttttgctcaatccactggttttaaagttaatttcaacaagtctagcatgtaccctctcaatctcactgctgagaaatctgactcgatggctggtttgctgggttgttctattggaactctccttttcacctacctgnggctgcccatggggaaagaaggctcacagcaagttcaatgttcctcccctaaagtggtaggctgaccttaatcaattcagttctttcagcaatccctacctactatatgtgttcccta

SEQ ID NO: 4566 - DNA, 382 bp, Oryza sativa
  unsure (1)..(382): unsure at all n locations
nggcgactcattgaatttcctgaagtctatgtgctatgtttctgaaagctaagtgttatcccaacgggtctcatactgatacggtttttgggtgtaatgtttcagccagctggagaggaattttgcatgggcttgaactgctgaaacagggtttaatttggagaatcgacaatggtaattcaatgcgagtttggcgggacccgtggattttgagagaacacacaaagaggccgatcactgtgaaggcgaactgtcggatcaaatgggtctatgaactcattacagccgctggcacctgngatgtgaataaaattaatcaacattatctgggtattgatactgatgcaattctgaatattctcttatctaccagagctgatga

SEQ ID NO: 4567 - DNA, 473 bp, Oryza sativa
agcttcctgcagatcacccattatcttatatactgcgaccaacagtcaagctcacaaaggtgagttccttcaagaatgctctgcaggacaacatctttgctaattaaagccaacagaactcattaaggcatagccaacctgccttgcagctcacgagagtatatgcatcttcacttggagagggtatatatattggtactctcctctagtttattaatggtttgttcttcccaggatctaattcacgggatctccgatcacatagactgggttaccaccatagtataactcacatgggtctcaaacccatctccttcgatgcattgtctatcacatttcgtgatagtcccttcatgaagggatctgccaggtttctcgctgtttggatgtaatccaacgttataactccggaagttcttaatttcctgacagacttcaatcgtcttttcacatgtctagacgatttcatatta

SEQ ID NO: 4568 - DNA, 429 bp, Oryza sativa
tcagcacgccgccggatcgacctcgaagctggccatctgtagagagagggcgacagagaaagagatggaagatgggtcccacgatagagcccaccatttcacaagtgaaggaggctggccacatttggccagttgaggggtttggcaatccaagtagttaaggctgttggaggaagtttttttcatgtattagctaaaatatagcttgaaaagtcatttgccaatgctgttagagatgctctaaacttcttgttgctttttccctatcttgcttcttaattagcttattttttatagatatacggagtagttcattgaagaaaatccctttccatatacagtgaatgtaaccaagtaggacctttctttctcattcatatttcagagcaaatatgggactaatgtcgctggagtcctgaccaatattaa

SEQ ID NO: 4569 - DNA, 467 bp, Oryza sativa
  unsure (1)..(467): unsure at all n locations
agctttcccaccctggtctggtgcgtacaacttttttgttgttatgtggctacaaggcttgtggcatagcatacgagaggagtagggcggacaaatgacgcttggggagcaggactcaacaatggcttggcggcgtggtgtgcccagctaggattcgagcaactgcacggtggtctctgatggtgtcngtgcatgcgagccatgtgaatttttcttgcgagctcgtcggcggtaggggcactatagacttatctgcacggcggtggcggtggcagaaggaagacgctggctatgcccacacggagttagactttgaaattaacttgtttttatatgtaaaatatttccttaaagatattagtcataatcatggntatttaataatattggttgagaccatatataacttaaaattggatttgatttctttgaataacctttacttattaaattggattgattctttt

SEQ ID NO: 4570 - DNA, 437 bp, Oryza sativa
  unsure (1)..(437): unsure at all n locations
gaccttgaaactcagcttgatctgatccttttccagggaacacaattaatttcatatgttattatggtgtngattcgtccggagcaagccgaatgtactaaagagaaaggagtggtcattggagagtctatgccaaagatgatggtgccaaagaatccagaggtgggtgtttggaaggagaatatgagtgaagcttcaagttctaaagctcctaagaaggctaaggtgaccttcaatatgcttctagataagtatgagaagcaaggtggtgaaaaagctcgcaataaaggaaaaagaccaagatcatcccctaaggagcgatttggtcattcaccaagatggtcgaaatcacctacatatgattgttcgcaagacatgtcatggtgaccatatccaatggccgccgccgggtatccttttccttactacatgccatg

SEQ ID NO: 4571 - DNA, 474 bp, Oryza sativa
  unsure (1)..(474): unsure at all n locations
agctntcgatcgatatatcgtgtgcttcgncttgattatttttgtttacctcgncattagtttctcctcaatctctcaacagatatgaagtatactttggtttggttaaggctatcagtaggtaagattattacgttacatattttctatatgcgcttgtggggtgatctacatatataatgttgtacctttcgcgctgtaagctactcattacttgaacaattcggttgtgatatcatgaatatatgtaatgcaacatgatttaaggtttcgaggtgcgtgcatgctgcagtactcctgaaatatatgagattaaattaattatagctgttgatcttgcgtacaaatttaggtccatgccaacagaattttggtcttacactctttatcaatgtatacatttactacgtacgtacttctcttgaacaataattctagagatttgctccaattcaataaaaagtacttcgagat

SEQ ID NO: 4572 - DNA, 440 bp, Oryza sativa
  unsure (1)..(440): unsure at all n locations
ggacctataaaactaagcttacntactttttcattnctctaactctgctatatacatgtttatatgagtagnatatgggcctcatgggccaacacatacataactcaacactccccctcaagatgggcgatagatatctatcatgcccatcttgttacatgatgaagtacactccccaacacttaaagcttttgttaaacagtcagctacttgttcccccgacataacaaaacctagcttcaaaatcccttcatctagtttttccttgataaaaaaacgatctatctccacatgttttgttcgatcatgctgaactggattgttagcgatgctaatagccgacttattgtcacaccacaacttcatgggaatattcattagcaactttaactcagaaagaagaattctcaaccataacagctcacttaaactcactgaca

SEQ ID NO: 4573 - DNA, 386 bp, Oryza sativa
  unsure (1)..(386): unsure at all n locations
aggctgcagctagagntgctggacaacgaaacactgtttcttttatatttgcgcgccgacacaacaggatatggcatggcgcactttgtgcagatgactaacctgacgctaccccgagcgtgctgcgtgtacgtcttcattcgatcgctggtagcagcgccattttgtatttgtttgtggggagatgctatacatcgagcattctctgttcttctcataattgttgggcgactatgccagccgccggatcttcatcggacgacttccacattgtcttcttcctcgcgactcttttcttcagactatcgttcgtgtaactgtcagaccgaaagctcgacatgcaagagacgagaggtctccgtgtcgacagaccaccgcgcttcgcg

SEQ ID NO: 4574 - DNA, 439 bp, Oryza sativa
  unsure (1)..(439): unsure at all n locations
ntgactcaacatcagntggaatcgtgccatacagatcttcctatattagtgaagntagcatctaaagaaaatactatgaaaaggcaaggcattgaagcttcaaagcctaacaccaaggaaaatataaagtaaagtttgcactcaattgcatagtttacactatattattgcatacagaattatttatgttctccaacacatttaatataaactccaagtagattattggagagaacagaaagaaacagtgcataaccaacacttttgtattatgcacatgcacaattgggttgtttttcaacagtattagtacaaagtgaagaacaattttataagcatgatttggaattccaaagctatttcattttattcacctcgaaatctcggcatataaaaacagttatgcgccttaacaccgaccagttttgacctgctggaa

SEQ ID NO: 4575 - DNA, 403 bp, Oryza sativa
  unsure (1)..(403): unsure at all n locations
agcttgagctcggctcgaatccttgccgagtctttcttgtattgagcttgcgacgagccgagctcgagctgctcgcgagctctcgagctttttgacagccctactctccacctctctctctctctctctctctctcttcttttctctcactggctcactgcagcacagccgctgggtggggaggagacggaagcagatcctcatctacgttagagggatgtacttcgcttcatccgcgtgcattccgaatccaacggcgacagcgtgattttcttnttgttcgtacgttcagctgcttggttctatattgttccggccaacagcgttgcccagctgctcccttcggcccatntgcaaaccatgcggaaggaggtaaaaaagcgcgtcactggaatggattggc

SEQ ID NO: 4576 - DNA, 440 bp, Oryza sativa
  unsure (1)..(440): unsure at all n locations
cactaagaaactcaagcttcagngcatcaactgcgattctgtatcatgactgagtttatttaagcaatcaaagggaattcaatcaattactgattatttccaaatcccagaaaaaaatgttaatctaccttgctggattaaatgaagaaagaacaatttctttcggcttcatctctttcgattccttcccggcccgttctccttcccatccaatagcttcaggcacataatcacgttcatcccagcctgctattacaaagcataaccagtgtcagctttaaaagcttccaaaattactagttattttgataggatcccccctccccctattttttcttctcagatgtaccaaattaccatgaagtgccggaaatgatgcttctccgacaagggactgttgtatgtcatgacgtccttcgttctctcgtagcagaaaaatg

SEQ ID NO: 4577 - DNA, 446 bp, Oryza sativa
tgcaagcttgctctgtatgacttggatggcatattttttgttttgagtatctcgccggggtcagcatttgttgcaattgcacaaacttctctacttcatcaactctcatctttattttccagtacatgtaggcaacggaggttcacatcagcagcatcaccaggacgaacctgcatgctacaccatatacatgttcatccctgctgtagagaccaagtgtatgaacaaatagagcatgacgagactacaatacagcgaaaaaggaaaacgtaactgaaacttgatatgtgtgattgtcacgtaccacatatgacccttaaaatccagaaagtttgtggcactaacatcaggagcacaacacaagggtgtggaagttgagctgcatggcggccgcatatcgagaatgtagaattgatattagtacaatgacgaagatccgatatact

SEQ ID NO: 4578 - DNA, 452 bp, Oryza sativa
tctttctggatcaagagcaccactagcctaactgatatagaatgtcacttacatctctggtaagcatagagcacctttgcaagtcctaaatatcttgttgatagtcctaacaatggtcgaaactgaagataataaaacatatttcaaaaaggtgccgtaggccaacactaacaaatgcataaaacaccttgattattaaaatgctctctaaaatctttaaaacaaatccacagataaagattctgatctcacattaaaaagcatgttcccatcataaccatgaaactgtgcgcggtttgtatgcccatgctgttcatggatcgatatcgccaaaattgtttactgattgtacaccattgcactctcggccattatattctcttcttggtttgggatgaccattgaccttcatggtgataattcctagcagctattatctgtaaaattccaca

SEQ ID NO: 4579 - DNA, 491 bp, Oryza sativa
  unsure (1)..(491): unsure at all n locations
tgcggcatgcaagcttcctcggtcaaccatctatacatatattttgttttattactactacanaaccccagtagtcattagtcatgcactattttattttaacgagtacattgcacttatggataattcttctaatatggatggatagaagatgcataaacaggagtggatacttctaaaattataaaatacgtgacattaagttgaaaagtggcttaatggtgcgttttatactacatactcctaacttttacttccttatatttcacgtgcatactttttaactgctaaattatatttttttaaaaaaaagttatataaaaagctgattttaaatatcgcattaatttattttaaattctttaactaatccttaattaattatgctccaattcatcgctccattttacgtgttcctaacctcaaaacaacacagcctaaagcctatgtctatttgtacgtaacgttagtctatatacacaatacacatt

SEQ ID NO: 4580 - DNA, 397 bp, Oryza sativa
agcttgcgttacgtgtgtgttggaattatcctttgtttattcttccccctgcggcttcgattccctggtctcgcggcgaagcgtaggcgcagcctgcccatcggttggggcgattggtttttgagaggaggggatttttgacggctgcatgcaacgctccaaagccggatggtgcagtagatattgggtttttgtggggggtgcgtgtctgcatgcaatggtccaaagacctgtcagtgttcagcttgtccggcacggtggaaaatgattccgtgtattcccgaaggatccgaatcggctgacaaaatatgttttgcttatcgctcattcacaggaggctttacatgacaaatcaccacgtacgcgtgcatattcttaccacaagcttttatgaatc

SEQ ID NO: 4581 - DNA, 430 bp, Oryza sativa
  unsure (1)..(430): unsure at all n locations
gacctatgaaactcagctnttataaatcggaactggtttatgaccaaatatnttctattnttggattaggcagccggcaatgtactttttatatatagtcgttttcattgcaaaatactatatcaaagatatgtcagatttgtggtcaaattcctgtagaaaacaaaaagacaagtttcaaagcattttccaaaatggtttgtgatgaatactgttgaattgatatcaaaaaattattaaaaccacatgcatggaagcatcggcttatggatatggaacaatgatgagtaatgctcgtgcacatgttatgcattagaaaatgatgaggaagaaaaagaaggaatctctcgctatattgattggacgaagacatctccattttcgtccgagcattttanactatatatccagagatccgcatataanaatg

SEQ ID NO: 4582 - DNA, 447 bp, Oryza sativa
  unsure (1)..(447): unsure at all n locations
agagcgacgcagctgcagcttagatgattctgagaagcccttnnattatctngtcagaacnnnggctgggagcttaaatgattaaatcagtatgtctttctctttttcgcagccaccgaatcctttttaatagatttttattcttctatctataatgcttgtgcgcatgctccttacggattgctaattatttcacacgcgcagaataagtgtaattaactgggggagtgcttcttgaagtagatagaaagctttgctacttttgaagaaaacaagttgataatggagaaatagggtgagacatcattcattctacacaactntgagaactgactgagatgtaagcctggaaaatagtcatcctctgtgaataacacaaatgaacatcgaagttatttgttgcgccggcaatatatagaagatatctcatgctcctgtacgtgacat

SEQ ID NO: 4583 - DNA, 414 bp, Oryza sativa
tgtaggatcgaatcacaagaattaagccaactagagttgtgtgaatggttgatatacccaaaaactgataacttttaacggaaataaaagttaccctcgaaatcgatggatcgcggtctgaccgaagtagatgcgccggtctgaccgtctggatatcgtcggtctaaccgaggttgtaacaccggtcgaaccgccaagatcacttgtctccgcctgtctgcgccgtcagtctgaccgccgcttgtggccggtctgaccgccagttggatgccggttggaccgccgaaacccggtgaaacacaaatcgaagtactctcacagtagatgacaactttattgcttctctctgtggttacaaagtgcaataacaacactccttacaaaaatcttgactaaactctgaaccctaactaa

SEQ ID NO: 4584 - DNA, 453 bp, Oryza sativa
  unsure (1)..(453): unsure at all n locations
agctntccgatacatgcatgcatgcatgtctttgtctgtcttgtcttaaatngnntttatggaccgattggccatggtagtttccgggaaactagtaatcgactagttaactacagtactaggctactagctactagtaatcgattagttaatctgtttggtggtatacaccatcagtcttgaccagaaccatgccgcatgggtacgggcaaatcctttgtctccgtgtacagaatgtccaatatgttgcctaaaatgtgtccggctcggctgcttccccactccggttggaaacatcgagttgtgattgcggcggccggcacgacatatcgtgaagcttttagcttggtgaaaggattatgagacgagcgagagagaaanaagtgcgaaattgtacgacgtgcagggtacgggtacgaacctcacaacacgtgcaagacgtgtccatatgct

SEQ ID NO: 4585 - DNA, 411 bp, Oryza sativa
  unsure (1)..(411): unsure at all n locations
tggccactgcattggccattaatttgctgagtgttatatatgtgtcatgngaacccactctacctaagtatatacagctagatatataacttgatctggctaaattggctcagtggccaattaattaaatgtggactctttattggctcgtccgaacacaactacttgtatgttcagttgaaaacagcacgtgggcatcgtgccctgcaccaaggtatatattgttgggatttggatttctttcacgcttgatatattggagttatatcacaagctagtgggttctcaccttgccatttgaggtatctgagccacagaatttgaataccaccatgcactattgaaggatttctaaaaaaagctgctctaataaaataatcattcccttagataattccaaatttactattt

SEQ ID NO: 4586 - DNA, 423 bp, Oryza sativa
  unsure (1)..(423): unsure at all n locations
atgaaaatcagcactgccttcggaggccgaactggaacttatagagttacattcgtatctgatgaagtgatgttctcgtcatcatggcctcagtatggggatgaaagcccatgcagatatttttttttcaccataatgttgctattttcttttataaattactccctctgttttgttttatgttataaatcgcttttattttttctagtcaaacttttttacgtttgactaagttntttaaaacaaatatattttcaatataaaacaaatatatggtcaaatatatttgtttatatttaattaaacaaatttactgttataaatattactaatttgtctcaaacatttggtaaacgtaaatagatttgactagaanaaaaaatcacactatctagagtacaacatgaaacagagggaataata

SEQ ID NO: 4587 - DNA, 385 bp, Oryza sativa
  unsure (1)..(385): unsure at all n locations
ntggcttatntatattatctgtataaattataatttatcaatctattatatggcaatataataacaaactctagtaacttgtgaaaaaactcactaaatacaaatgtttggaagtaattaaaggactaactgctagtccattcgttttaagttataagtcattntgactttggctaaagtcaaactgatttaagtttgaccaagtttatagaaaaatatagtaacattttcaatgcaagacaaatttattataagaatatacccaattattgattaaagaaaactaatttcggattataaatattattatatttatctataaacctagtcaaactttaagtaggttgactttaaccataaatcaaaacgacctataatatgaaac

SEQ ID NO: 4588 - DNA, 359 bp, Oryza sativa
  unsure (1)..(359): unsure at all n locations
gagncacctgcggcatgcagcttgcgaactgcaaaagatgttttttgtttcgggctaattttgcctgtactgcagagcgagttctgaaacttctgatgcagcgcagcagcagatttcacttggggctcctttttgctgtgatcattttactccctggtccatttgagaaaaaaaatttcagtttcggagcaagaatgatgtttggcattcttattacccctgaagttgctcatccttcatgccctgaatttacatcctgatactcgaattcgctgaccctatacctacctagtgacatatttttcaaaaccagtgccttttgtctggacattaaagctaaaactattgacttttaaatg

SEQ ID NO: 4589 - DNA, 323 bp, Oryza sativa
tctaatgcgtatcacttttgaacagagcaaaatgcatagctctagcatcacttgtctgggtagtttataccttacttcctccgtttcacaatataagtcattctagcatttcccacatttatattgatgttaataaatctagacatatatctatctaggttcattaatatcaatatgaatatggaaaatgctagaatgacttacattgtgaaacggagggtgtacttatgagcaacaggaacaaattgtgtattgccatatacggaacactaacacacctttaagaaagcgaattacgtgatgtactccctccgtttcaaaat

SEQ ID NO: 4590 - DNA, 377 bp, Oryza sativa
  unsure (1)..(377): unsure at all n locations
aggcatgcaagcttcagaagaaggctgcacaagagcatgcttttttttgtgttctctgtngncncaagcaactcgcgcacctaccaaaagaagaggacgttcgtgtatagcaacattgtcatgttttgcgggtcacagtgcgaaagtacagtgatatatgtttgtccagagataaacgtgcctatctctcttttgctctgatgtccaacctcccttattaagggacgtgtataaatttttacttctccagtgccctttgaatggctagagttgtatagctagtccattattttccatgagacgtatattggtatatagttttattcttcaatagacgcatatagtattctttcaagttcatatgaaaacttggggat

SEQ ID NO: 4591 - DNA, 356 bp, Oryza sativa
  unsure (1)..(356): unsure at all n locations
tcgngaagacctcnagcaggcaaggcaccatttgattctttgcttctataatnagaaaattattattattttgtttgcaacttgcattgttagaatcacacacttaacttgcttggcctccgtttgcgcgccaaaccgacggacctacccagtagtcgcactaattcctgtaggctgtactaccctgactccttgtcgctccacctttgtggtacctcggtatccgtgctctctgagcgcgtataccaaatataccacatacacacgtgtttgtcgaaaacttgagaaatgggtttgtaaagccttgaaaacccgacatgtggtgtcggtgtgaataaaaataaaaagaattgtga

SEQ ID NO: 4592 - DNA, 360 bp, Oryza sativa
ccatgcgcacactgctttaacagatgtgcttaagtccctagaagacacatggttccaccacacctggaaatatatggcatatgtggtataaaatccgagtaaataaactcataaaggatttaccaaccgcctgaaaaatgaccacaatatataatcagcctaagccataatattggtcaataaaaatgcacacttacgtggcaaaaagcaacgatattgtatccaatcaattgcttaataacccaaacagcaccatgactatattaaaaagtcagcggggcagctatataaagctttactgtgtgacagcctttaagatgcattgtaccaactcctaaaaagttgagtaactgcggtata

SEQ ID NO: 4593 - DNA, 413 bp, Oryza sativa
  unsure (1)..(413): unsure at all n locations
aggctgcagctagtatatgtattttgtatagacaagttattttctttattctcggntaacttgagacctgcacagcacttttttaggactatgtatttgccacgagtataatttaaaagttagctgccacaagcagtgtgtagattgaaccgggacaccatatgttctctgaaccgccaatctccatgatgttgctgttaaagtcagtaacgacctatagattgtgacaatcaaaccatttcaaaattttataaagatgtaaatttatagaatttgaaaatttggaatagcagttatttatgtctaaattaaattctccgctctcggctgtgttctaacatggttccctctcacttaagattcttgttataactgtcggacggaagaattccacctgcacttaaatttatcat

SEQ ID NO: 4594 - DNA, 323 bp, Oryza sativa
  unsure (1)..(323): unsure at all n locations
tcttccnagcatacggctttctagatgtatatgattatctctatacacatagatcttatatgaatcgtatgatgaagtaccacataagtggatatataggaaaggaatccaaatctgccgaatcgctcatgttatgatcttctacatcctaggtctccgcgttccatcatctggcttatgttcttcatgtagcattcatatcgaatgactctatgaaattacctcgatacttctacatattatgggtaacgtaggagacatccctattttcccccggcggtcttaattaccacagcttagctttcaattcgcctctgaccatc

SEQ ID NO: 4595 - DNA, 466 bp, Oryza sativa
  unsure (1)..(466): unsure at all n locations
agcttattgtccggttcggcgacctctatanatgctttgttagctcgccaccaacactattgaatgcaccaatcagcccgtcatcttcattctcttggtatatacatactttggcttatctgcgaggacgcctccgcacgatcatcaatagtggcaggaccatcactttcttcatcattgtcatcttggacttcctctgttcctaggactgaacttgagtcctttgcatactttactcgagccatggcgctaccaaatattataagcatctcaccatagtgtgctagacgtttgtaaaataattcgcatcagtcttgcgattctncagaaacaacagttattgcataagcgaatgcacataaaagttacaataatgaaacaaagaaccctacagggtagacatttacttcaatatagcacatcgagtcgttcatcatcatgagtaataattaaatctttcttatct

SEQ ID NO: 4596 - DNA, 167 bp, Oryza sativa
tctccccttactaaaatagataactgcccggagggcgccttaaaaaaggaagcctcctccctttggctcttaaaataagaggccacaaaaatatcataacctttatgaaggcttaaccaaaacggaacggatatatggtatgggttggagggctaacttgagagaag

SEQ ID NO: 4597 - DNA, 385 bp, Oryza sativa
agcttgttgatcttgtcaactaagacatttaattgttcttgagacttgatcttgcggtctgcatcaacagattcacattaatgaatcagcatatagaagataatggcttttaaagtattgattattggtaccttcaacctcctttaaagccgaatccctctgtcttgctagctcagccttgtcattttccagagtttggatctgcttctctagttgagatatcttggcagcttgcactacattaacttcggttaatcaagattacagagataacatcacaaatcagttgggcagagtttgcgcgaaccatttgatgagccactcagttcgaaattggactcctggagctcagcaatccgatccctcagatcatgttcattattct

SEQ ID NO: 4598 - DNA, 375 bp, Oryza sativa
tgctcaatcgtaagcgcgactagacgcggcgtttgataaggtcgtggacttgcagtgatcgggcccagacgtggcgctgatgatagcgctgcaagctctgttggtagtgcaccgtccgaagggccgtgcgccttcttcgctcttccaaatagtcgaggtcatcgcgacggagctcgtcctggtccgcctcgttgtagagcgcaacacgaggcgagcccagggagagctccaacggtaggaccgcctcgacgccgtacaccaggaagaaaggggtttctcttgttgcacggctcggggtagtccaattggcccacagcaccacaggtagttcctcaagccaagagtccccgtgcttcttgaggacgttgtacgtct

SEQ ID NO: 4599 - DNA, 399 bp, Oryza sativa
  unsure (1)..(399): unsure at all n locations
actcagcttgagcctctagaacagcagggcgcttctatgttttttagttnggtctcttggaagcaggccaaggtgcactttgtgtcaagcatgagctcatggactgcgttgcagcgcgcaggtgagtttatgcctctcacattccaggagatgatatctacactttgtgccatttaaaaacgaagagttctctatatctggaccggcccttagcctcttttaaaaaaggccacttctgggcgcatggcccattaacgtttggcggcccaattcgcttgtctgtgttgaaaaggcagtctttgggcatgcgcggcctgattcgcacgcggtccacgagctggcgcatggccggtcttgtaatgcgcgcgtggccangtgacgcatgggcaatcttgccgc

SEQ ID NO: 4600 - DNA, 330 bp, Oryza sativa
  unsure (1)..(330): unsure at all n locations
tgcttcatagactctcatgagctgaggataaatttgtcagaagcaaagtcgctaattgctttcaatcaacatagctactctctttttgctccacttgaaatgtacaaaacaaatcaatggttcttatcacactccatgatctttttttctatgcataaagaggatgaanatggaatatgttatcacactataaagggatagcaataacactcacttgttgtgcatcaacttggtctgctntgttcagaactatactgtatttatcatcatgccctttgagtgacccaattacacgcttgaactcatcactgatgtcaagctatgtggatc

SEQ ID NO: 4601 - DNA, 369 bp, Oryza sativa
ggacctatgaaactacgctgaccaccgcacaacgagtgagcgtatgctttgggcgtgattttgatgctcggcaccacacacaaccacggcgacaggtcagctatgcagagaggcgtaaacttttttcgtaccagtcaagtgtacagacacgacttttcttgatactgagtactacatgtgcgtcggccggcactgtttcggctgagtcgtttgggccgcggatggtggatcaacggtcgccgtcccgtcggatgcaggattttggtcgggctgaactgtctgccgtgttaacctgcagacgacactacgaaaaacggtgctgcactgtgtgtgatgagaggggggccggtggctgagcacggagaaaat

SEQ ID NO: 4602 - DNA, 467 bp, Oryza sativa
  unsure (1)..(467): unsure at all n locations
tgcagcttaaattctcaaaagagtgatgtatttctaaattncttgcgaaatttttttggtgattatatacaaatcggaggtgtctaaaaggttagtaacttcatcctccaatgttntttgttggtatattacttttggagctatgtttcacacatttttttttgtctccaaagctttgttgtaagttgatgagagagaaaatttgtatggggaagaagaaatatataggagatttttgtttacttaaaaaagttttattctcatggtttaaaatataatgaaaattaatattaaataatagaaaacaaactaaattgaaaattaaaagaaatacaacattaatattagtttaaaactttaaaaataataaataagaatcggttgttggttaatttataattattgatgaataatgatatgtcattattgtatgactgtcgacagaagtttaatatttatcatattga

SEQ ID NO: 4603 - DNA, 400 bp, Oryza sativa
  unsure (1)..(400): unsure at all n locations
tagtgcanaattgcaaattggagaatcctaaacttatattctaaattctgatctcttactaccgagcttccgctgcctgttggatgaacaccgtatttagtcttaaattggatgtcattcaccatatcattcaatctaagtcgtggtagatggttcggcctagcttgcaaaccctgtagaacagtattcatgcttaacattccttctgcaattttggcaatttgtagcatgatgctgaaacattactcatgtttcatccatgcatgccttaattcaagagaacttttactttacaatatactcctagtatatactagcagtatatagaagggtatgttaggaatttgatagcaaatcaaataacacatttagtatattttgttcatattgaatctaattg

SEQ ID NO: 4604 - DNA, 319 bp, Oryza sativa
  unsure (1)..(319): unsure at all n locations
ccgccggcgcctncgacattgctgcggcagccggggtcaccgtcgccgccggcgaggactccattggcaagaaaaccacacgcgcagacaaagagaggggattaaccanaatgcgtgttgtgtgccgcggagcaaagcagcttatgtttgcgattgcatgaggcggctatatatagcgcggattaaccctcttctcttcgcttctcttcttcgattggaatgaagaagaagaagagagagtatagaagggtgggggaagagaaaggaagaagagaagggagcgaggaaaatgccgtggtttccttttggttttggacgc

SEQ ID NO: 4605 - DNA, 429 bp, Oryza sativa
tgtcggaatgttggctgcttcactatagagttttatttgtccaatgtccagagctcacgtgttataggtgcagtaaagtcggatgaaatcatgaatatctgtttcggtctagacacttttcttttaagaatggtcaccgggggcgaaatgcccacctgaatatgttacttcaaacaatcttacacagggcaggcttagcttatgcaagcgtaggtggccctggaggataatatggaagaatacacgggatatacaaagaagagaatacaaacgtatcacaacctcccccacctaacacaaagaggcacaatagatagaagacagaagctttgacgtttgccacctgcaaaatcacccaacaaaattccaaatcaagcaaatgctagaacccttgttcgacatcatccacttcacatgcagtctggaaac

SEQ ID NO: 4606 - DNA, 447 bp, Oryza sativa
  unsure (1)..(447): unsure at all n locations
agcttatcatanagggcttcgacacgggggtttatttttcttttatcataaagataaagatcggatagattcgaaccgcaattgcaaaggtaatcactactatgccagcccaaatcatgatcttcaccaactgggatttggttctctcgcgaaaatcgcgagttgcagagatgagaaccatgaaaagcaagatcccgaataagaaaacagaaaccgaggaaaccacaagagtgaagactagtagagtctcgtctttggtcattctttgctcctttttcactcaatgattcattcgaatttcccgaccaaaaattctatatgtctattcatagggcctcgttgctaagtgctacaagatctagtgcactggaactcgtggttatggacccgaatcctttagtatggaacattgtctttttcaagtaataacccccagtatatgaaaga

SEQ ID NO: 4607 - DNA, 366 bp, Oryza sativa
  unsure (1)..(366): unsure at all n locations
tccctggatctgggaagnctctctttcacggaattgggatctttttatcgatttccttgatcgctacttatgggcgtgcgctcaaaggatacaaacagggattcgcaaacaaaaaggggaattcgtagacactttttcctgtcgcgtaaaaaaaaggctttacgcgagagcaataaaggttgggatacatctatctcttctgagcaacctcttttggattcttaagaccacccttgcagcacgataccgtctgctttgggttctttattatattatctccttcgagggatttttacgatcgttcaggctatatttagactattttggcttttactggcttcttttctcacggaagtggttaaagac

SEQ ID NO: 4608 - DNA, 394 bp, Oryza sativa
  unsure (1)..(394): unsure at all n locations
tgcaagcttgggaatccacacgcacgcacgtaccgattcgatangtttgacgtcgcggnggggcgcctcgttggcgcggacgacgacgacaacgtccttgagcgtggcgccggcggggagccgccagtagtcgatggcgatcggcgacgcacggacgttctcgatcttgccggcctcgttgtccttgaggtacttggtgtaggagtggatggcctccttctcgaggtagccgacgacgcggtgcgcgagcttgggggagaggaggtagccgacgaagtaggcgttgaagaatacgcgctggacggcgagcacgagtgtgcgctcgtaccacctcggcttggccacctccatgaaggtcatgaggtgcatccgctcgttctcggcctcctctagc

SEQ ID NO: 4609 - DNA, 335 bp, Oryza sativa
tctctgaatctttcttggaattgttcaacgacgactgtgcgtctgttgggggatctggagtcctctccgatgaggctgcatgatcagataaatattgtgtgagatagggggttacccactaacacgggaaggagggaaaaacaaatactaatagaaacaatggggaaaaaccaacttaccctgaccctcttccatccgcctcgtcgccgcacaaggacagccacattctccgggggcggaagtgcggtgcgcggcgaaatgggtgatcttgatcaacgggaggaggcggtctatctcgtccgcatctaagtctgcgaggcgacaagaatcggtcg

SEQ ID NO: 4610 - DNA, 423 bp, Oryza sativa
  unsure (1)..(423): unsure at all n locations
cacgaggatgcagctagcgcacgcgcgggcgccctgttcttagttgttttgtcgaggcggcgggcgttaggaaccaaccactataacagaggattgacgattgctgcaagctactagccggctgatgcatgcaccatcgctgcggcatatgcatgagataataagatagaaccgggggatgcaccctgctacagctacagcgtttgcaccggaggacggcccgaggctagctagaacgaaagattcggatcctacagtccctccacgatagatatagataacagggtatctatccatcgattgatttcaacaattgaggactccctccgcctatatacggacgttntgacttttattgaacgttgacatcgtttattgaaaaatatgtaatataatagatagtcatattaagactttgaaata

SEQ ID NO: 4611 - DNA, 436 bp, Oryza sativa
  unsure (1)..(436): unsure at all n locations
tgccattaatgggcgnttccattggtcgtgagacgcggacttgcctctgttatgtagcggacctgcgaaagtgggaaccatacacgcaaaagacaaattgttcctttttcatttggagcgtggagaactggaaatacaaacgtcctggataagggcactgggattatattccttgtttttgctaaagcctaaaagactactataattttgccttgaatgtatgggtttatatgccatgttagaagtactataccatattaacaagaactcctcgattatttctattgaggtcccctttgttatttattatatatcttatgtgtacttttcaaaccggaacaaaatgcatttttataaaatcttcggattcttcaatactccttctatccacaagagcttgatagcctcttaatttctctagtacctctctctacat

SEQ ID NO: 4612 - DNA, 483 bp, Oryza sativa
  unsure (1)..(483): unsure at all n locations
agcttgaatgattgcaggcaagaacacacatcttatttatgtccatcaggttgccaaattgttgcatccgattcccaatttccaatggacgcatacatcacatcttcttttttctgtgcacttctttccttctgttcttgccttgatccatcctgngagagaataattctcatatgccaacaaatatcatgagagaatcctatggatgtccactgttcgattgtgccagtgctctatgtggtatctgactggcgtatgcttttcangtggggtgttggtgatgttgcatttgcagttggagaatatatgtagtgtttttttttcatcataaagtgcatttctaacatacaaaatactataaacatataatctcctcttaaatatattagatcgaagccattggtctattagatgatagatacataaacctatgcctaatgatgatggcagctcatctcttgcttttgaagagtctgaatatgt

SEQ ID NO: 4613 - DNA, 338 bp, Oryza sativa
  unsure (1)..(338): unsure at all n locations
ccactttcgcgtccacgacgcttgcgagatgatgatgttgatgtgtgagactgacagggacaaacagctgcgatggtgcctacacgacggtgatgggctttgcttggcgccccatggaccgcagcacatgctctgccccggttggaggttgctctctgtgaaaaggctttggaccgctcctttgttcactagtgtgtagctgcgaggtctccatctacacttccgaggtttcaggctacgtagctactccttctacttcccctatgttctaacggctaggtggttgccatttngatcatctagtaccagtatactattatagtactcctactatatca

SEQ ID NO: 4614 - DNA, 361 bp, Oryza sativa
  unsure (1)..(361): unsure at all n locations
tgtcaattccagtatggctggaaggcgcattttanttttgatattgggacactatttcgatatactcgacgatatcagnctaccttgatggggtttaacgaaagtgcagacaaattattatgcaaaatttcacaatattttgcatgtaaatgctaccttgctagtatagttttgtaagctcattaagaaaactaaatacaccgataatatcatgtttttgtttgtgataaattaaatagaaaaaggagaaaattaattgtataacatcaaaaaaattgatgaacttatatataatgtgacacaaggatttttttttcaaacagaaatgtttctgtgtataatgtgtagagtgatgtaggat

SEQ ID NO: 4615 - DNA, 422 bp, Oryza sativa
  unsure (1)..(422): unsure at all n locations
gcatgcaagctttatagggtctagaggaattatatgtttttatcagcgacagnggactgtatggcctctagaattgttgcacccgaacagaataaatgcatttaattattacagttaggaaaaaaaatcacaacagcttttcttatgtatagttgaattcagcaaataagaacctgaaatagatgatttatccggtttaaaagagaagaatatatgatatatagaaaaaacacatacctacagttatatctccactacctccgatccattcaattgaccacccgccacattggtagcccaaattgctagcatggcttccagctacaaagatacttctagctctctttggtagaggcaggaattgttgattgtgagagttgtccgttttaatanaacaagatgattcctgacggtttctctag

SEQ ID NO: 4616 - DNA, 463 bp, Oryza sativa
gacctaagaaactcaagcttgggatacggatgacaaaagcgtataaccacgttgttttccagtgccccaattcaccgtaccggcgtgcgtgccgctagccccgctatacgattatgcaatatcgtggcatgcaccggcggcgtcacacgtggtggtccaggagcacggccaatttccgaaggaaggaaaaaccgggccaaacggcgcgcatgcgaagctgatcggaccacatcgatcgcgtcgatccatggaccagaccagtttgccacccccattggggtttggtttgttaatttctggtcccggctacccagccgttcgatctgtacgtaccccttggcttggctagtactaatgtggaacttactttcctctcgagaaaaaaaaagtcaataatctgacaatatatagttcgtgagacaagcaagagcaaaactctctctttctcgatccgagaaaaaat

SEQ ID NO: 4617 - DNA, 428 bp, Oryza sativa
  unsure (1)..(428): unsure at all n locations
actgcagctgcagctgaactatttggtttcaaggtctctttttttttacttcatgttaccaacataaatctgtcttaaaagaagtgtgtgtgaattgaaagcctacccttttgggccttttgggttggactaatattactagtatttagttgataaattctgcaaaacctaggttttgccatgggtatacaaaaccacagatcttgagttgtttacaaaacaccatgttttggggtaatgtgaaacttgatgccgaacggaaatcattgttattattgaaacaacatgttaatcttgggtctattatgaggaaacactgaaatcgttgttattattgagacaactggtaaggatggaaacaactagcctagctggaaattgacactgatagggatgatgactctaagcngtatactcaacagttacac

SEQ ID NO: 4618 - DNA, 426 bp, Oryza sativa
tgtcgatttctcatcagcagacagaggaagaattatgtacctaacctgtaattctataaacttcctatgttagaaggtgaaacatttaagtgcagtttagtcaagagtgtataagggtgctagacatacagagatggtgactcctcaactatatcaaatgactatttggtgctatatgtgcagatgtaagataggctcgttgggccattcagttttttgggcacatcaacacatcctattcaattcatgcccatacttcagctgaactagtaaaaaaatcatccagcatagcactcatgttgcacatagtccagcatgtaagcagccaaacatccatgtagatactgccacatatagattattcatgtacctcggaagcaacacaacagaatgccatgaatggtcgatgtccataatatatattta

SEQ ID NO: 4619 - DNA, 61 bp, Oryza sativa
cacccacaaaacgggacacgaaaaaaatacccacaagaccacaacagaaggacacccagag

SEQ ID NO: 4620 - DNA, 437 bp, Oryza sativa
  unsure (1)..(437): unsure at all n locations
tcgtcaccggaagcctctagaaagaggactttaccattcactctctttgggcnttctaccattcactctcttttgtcttgtattaaatccaacagataatatttttcagatgatgtggatcattctcattccattttggatttcacttttcactggttaagtggccactgaaaattctgaacagtgtctaagattgtgcaattacttgccacttaattagtcctctttgggatgatatagagtatatccaaatctttactctttttttttaaaaaaaaagttcatctagttctataaaacaacaattttttttctcttggtgcaattggttgaagcattacgtctggtgggcttagctagtacagcttctgcgccactaaattaggcgtgaagtttcacgatttcctgcttatcaggtcctgtgctcgggagctgac

SEQ ID NO: 4621 - DNA, 426 bp, Oryza sativa
  unsure (1)..(426): unsure at all n locations
ctgcagctanggtgtggtagttccctctctattgtatgtttgctaaaattgaaagtttgaagaaaaaagtcggaagtttatgtgtgtaggaaagttctgatgtgatggaaaagttggaagtttgaagaaaaagttgggaactaaacaagggcttagtccattatagacatgactcaaactttcctaaagataaaatacaaacaagaccgcatgacggtctcttaccatatctctaacaaaaactgacataaataccctaattaatatatacaattgccttaattgagctctatctataattggcgatggcggttattccaaactaggccaaaaccgagcccaagtcatatcgtatcagtcatttgccatattggctaagccaagtctgtactctatntccagccgatacaataccagccgatgcgt

SEQ ID NO: 4622 - DNA, 306 bp, Oryza sativa
tgagtgatgccagcctcatctgcttgggattatatgccttgtgccttaataaagaaagaaacgaagcgaaatgagaacatggctagtaccctggaagcaatccctgaatcaagcatccagtcagtgggtattctcaattctttgtatgacagcatcgccaagctcctcagattcaccaatctgcttatgctcttctacagcctgacattcatttcacaagcatgttaatttcacaagcaagcagatgagaaatgacatatctcatcataatgacatcatgcagagcttttatgatgtcgtgtatac

SEQ ID NO: 4623 - DNA, 380 bp, Oryza sativa
  unsure (1)..(380): unsure at all n locations
aatataggctttgatttcaaattatttcctgaagacaagctgtctggagaacatcttgaaacggtattcaaatacaaaaatggcgatgatgtccgggagatagccaaaattaacattactctccaaaaagaagagggtggtttatataatttacgtggattggattttaaggggtgcttcttttctggacagaacttcagtaactatgatattcaatatgtgaactgcggaacgtcattgtttgatggtgatactccgtgtatttttaatgcgcctgcttacaacaagagtaatgaaaaatcattaaaaccctgtgagcgaaaacgggttaagtggagaattgactgatccgnattaataaataaaaatcatcaccggcg

SEQ ID NO: 4624 - DNA, 339 bp, Oryza sativa
ccctatttcttttaagagtaaagtatatggccggtccttaaaattagagcgcggtatcacttaggttcattatcggtgatatgggcccgcgggtattaagtttagagggaggagcccgctccccgatgccacgtggccctctcccgaggggagtcaagcctgaggtggggtggcggccactccttcccgaaagactagtcggaggaggctgccctccgatgccacgtagccctcccccgaggggagtcaggcccaaggtaggacggcggccactcctttccagagactggatggaggaggctgccctccaatgcaacgtggccctacccgacgagggtc

SEQ ID NO: 4625 - DNA, 308 bp, Oryza sativa
  unsure (1)..(308): unsure at all n locations
acttataaactccgctagagctcaatgcaacagggagcagcttgtgctctgtcatagagggctgcctctgtctgcagtgaatgcatcttcatctaagcgtcaccgggtacaagagcatactgaccttcgacctccacgacgagtgactgtttacctcaatcctatgcccatgagagtgctcacactgcaattgaaagcacgacaaggagcgccgatttctgtatatgatgacataagaacaagcncactaggagtatgccttcaactcactgaattcatgtttaatattatactgcgaaaccacaggg

SEQ ID NO: 4626 - DNA, 387 bp, Oryza sativa
  unsure (1)..(387): unsure at all n locations
agcttgngtttcaagttcaggcttcattgccttctgtttaagaaaacngaagacaaagnggactctgtgtacaaaanaaaaatgagttatttatttactgggacttgatgttacagacacaaaaacttcagcaaaatgttaacatcgcagaacgaccgggttgctcttacaggttctgcattatcatcatacatgttctccttctccatgttgcgacaccccaacattaacaatgcaacctttgggagaagaacactactacttgactaaacacgaagaagaaaaactgcaacaaaggataccaattaaaccaaagaattaacttgctcgcctcttcttgctctcgccgatgctggccaaattggccacattctctgcgagacagtg

SEQ ID NO: 4627 - DNA, 445 bp, Oryza sativa
  unsure (1)..(445): unsure at all n locations
tgtctgcagtgaanagtaaaggagaaacgtacacaactgatgaatttgatcttgcattctggtacagatgtacacagttttgacccaaaactggtctaagtcattagtggagagcttaattatcctttgattatagagggtgcaagaggactagaggagcaaaaccatgggcagagacaggaacagagcagctagggttgtgtaaccttactcccaaggcctgaaaacccaaatatattacactgtaaagtttcagaatagaaaatattggcaaaatgatgtaaattatagcatcttagtttttcttttacaaaacaagaaattgtatactacagtagcccagccatcatgtaaggtaagtcttgctccccgctatgcacaacaaaatttcgccacccgatcatactttcagaaggataactttataggtttttaatacgatgga

SEQ ID NO: 4628 - DNA, 318 bp, Oryza sativa
tcataatcttttgtttatttcgctaacatcacaaccacacttatgatagaaactgaaagtctgagaaccatgatattgggtgtcaccaatctccactaggttagtaacaccaacagcttcctaccacttcacctttcaacataatgaagctctatctcctccttgaacccggcatctgagaagcaagctagattgagagttgccaccaaacatacacctgcaatacaaaaggagcacaccatgaggagagtcgctactgtggcactcaacacggatctcggaaagcatcctgccctggcagagaggcagtgcaacaac

SEQ ID NO: 4629 - DNA, 283 bp, Oryza sativa
  unsure (1)..(283): unsure at all n locations
ctcaagcacctgagctgcagctangattcggggattctaattctgtttatagttctcgtagagttggttttaatatgnttacacagtcgggtacggtttagaacttagagttatattacgtgttcagaatagaataagagccacactctatcttagaatctctcttaaatacgcatgacgacttaacatattgagagggagcagctaccggcagcgtccggccgtgagacattgtaattctgatactctatatatggcggatcggggaggagcgcccgtaatc

SEQ ID NO: 4630 - DNA, 412 bp, Oryza sativa
  unsure (1)..(412): unsure at all n locations
ctgatcaattactcaattccttatagcttatactcccagtccctcaatgcactacaagaccttatatatatggatggaatcatcaataaataacaaccctactgctaccgttttcctcggtcttttgaatttcttttggctcatcggaatttttttagtacagaagctcctcgatggggcagcttaaccgttcaagcatatcatatataaaatccatgtatagtacatccataaaaaaatattagtgcttacacattgcacagccagctcgatgctgaaaagatataaccatttaaaataactaggtgaaacctcgtgccttgcagcgggtgtttggtatgataataaaaattagaaataatgtgtaagataactagacaatagaaacttgcataagctgattntttttttt

SEQ ID NO: 4631 - DNA, 345 bp, Oryza sativa
  unsure (1)..(345): unsure at all n locations
tgcagctactttcctgtatctatggcactattgttcatcgcaagtaaaatgactttatgcgattctcaataatatactaagcttagatgggagatactgaactctgcaagttgaacctttcaaatgtaattgaatgatgagccaatatctggtccgggtttttaagtcccttgcatataatttgaatttgggttatntatattcactatttctgaacctacaacaggtctattaaataaattgaaagatgaagtctagttgtataatgctattgtgttaagcaagctcactaagaaaattaatacatacctcagcgtccaaagccctcaaaaacttgtcatgtaa

SEQ ID NO: 4632 - DNA, 423 bp, Oryza sativa
tctcaagtactttcttgaacgcaccatggctcatcttcctgtctgttattcgtgcaccacggcgcttcgtactcattggcagtgggtacgttgagatggtggttgtgcagcacgcagattgccaaccacctgcaccccaccgatagcactgctgtggtgcgcccgtgcaagaacaaatgggcgttggtatccttgaaaggtccaaatcaataccattaattaccatccctatattcttcctgggaccccttctccgtggtgctggtgcattgggtggtgcgccatcctcacgaggagcagcagacttcttgggcttcttagcccttggtaccttgggttggcggccctgctgccgcttcttgggaggtggtggctcatcaataacaggtacattttcctcgatcaatggcgaggaaatgcatt

SEQ ID NO: 4633 - DNA, 425 bp, Oryza sativa
  unsure (1)..(425): unsure at all n locations
tctgattgcanggagttgcgtggactgacgtgctttctttatgtttctcggntntgggcacttgtcggcgaaatgacccattccttgacaattgaagcaacggatatcttcccggactcggcattntcttttctcattttgtttcctctgtcctggcactgaagttatgctgaaactagtatcttggcgaggatttgtgtttccttgatgcttctctccgttggaactggcgggttggttggccatcttcttcgtcagcagaaaactgaatcgacaatcttttggtacatgatcagttccttcacaaaagaaacaagtgatcctgctctgtggacaccggccgggtggatggtcttcctcacaatgaacgcatgtagaggcacacgagctggcaacatgaccgatttctccacaacgagagcatg

SEQ ID NO: 4634 - DNA, 463 bp, Oryza sativa
  unsure (1)..(463): unsure at all n locations
tatgtggtaaggcctcactntacattgataggggcttacttcttttccaaatngaatctcaacatgttttgtgtacttacctcctgttatactgattacctcttttcagtgtgctgtttcttgagtcctgattgctgatctatttctctggactttttttttcagactgactcgttagttcttttattgccattaatcggctcatcaagtgccaggtatcatccatccagttttcagtgggtttatgcctttatacctggcagtcataacctgactntgtcttcaactttntaatatattattagcactgcttttctggtgggcattactggagttctagcaccaattctggaggagactgtgtttcgaggatttttaatggtgtccttgactaagtggtaaacaaacatatactatntagctctttttagtagcttcctttcacatgcttgcatatagcaaa

SEQ ID NO: 4635 - DNA, 452 bp, Oryza sativa
  unsure (1)..(452): unsure at all n locations
actaagcttgcacgggatgaaggaaaggctagctagttttctttttatacctggaatctccatttcttatcagaatatgtatgggatcatgagcaaatagtagcagcgacagcgattagtttatattcccctacaattccttgccatgtactaaacctaattaatttgatcaaggaacaagaggggaaagaagaaaaaatataaagtggaggagatcaacgaaggaacaagcaaattaaactaaaatataccaaaaaaactcagatcttgcgatgttggatgcgataaacaaattaatggacaaggtttgcaggtttactatactgatcangaggcgcttggtgcagtgccactccctccaggttgagctgtggtagtagcagctgcaccgccaccgctgcccgcgtctccaccaccggcagctgcagctgcatcagaagacgagccggacg

SEQ ID NO: 4636 - DNA, 167 bp, Oryza sativa
  unsure (1)..(167): unsure at all n locations
gacacgcgagtacagaactgcattatggcttatactctccatgcgattgacgcgcgcagtatatatatgcataccgcgcgtcttctccagcaagcggaatagctccaggggctgaactnacccagcacatttgtgtttgacgcgcagctagctagcacgagcgcgga

SEQ ID NO: 4637 - DNA, 447 bp, Oryza sativa
  unsure (1)..(447): unsure at all n locations
ctatatttctattctcaaacgctaaattattnctttaaaaaaatgtagctatttcagaaagattaaaaaaaaggctgtagctccgcattcaatagttttatcacaatgaaaaattcgaacttatattctttctggcaaggagaaaagggcagtattaagtgtaactgcagaacaacttcactttggaacaaagatcaacagagtagtcaccactaacctgataaaccctatttcttgttgctgacgacatagttagtatttgcctttcgtgcataccaattcaatgcagtgatttccttgaacgtctacaaagatacctgaatatgctccctctttggatgaagagggtgtctgtaaggcagcattcgagcttctgttngcctttattgaagccatttctcttggaaacaaagagaacgtaactgttgcacaagttaaacaatactg

SEQ ID NO: 4638 - DNA, 464 bp, Oryza sativa
  unsure (1)..(464): unsure at all n locations
tttcagagaannatgctaattaggtgttgttcagtattatctgggttnggagctgagacggaggcaacaacttactgccaattgtagtaaatttttcgtccgatgggtacaaaagtggcagtaaactagttcgtcgtccagctcacggatgttcacatgatcccaaacgcgaagatttataaggcgggctagtgaccgtgagcaataacaaaatcacaccactacgtcgcccttgtttccatggccacaaaggacagcaccagctcacaaaaaagaagctgctttgtaggactttntgggcatcgatcgtgccaattctgctcctgcctgttgagataaactaccatcttcaagggctttttctcctcgacgacaacgagtttaggttcacgaatgtttggatgacatggaatcacgttgcgtgattgcgttgctgttgcgtctgtgtgtgtgcgcgttgcggc

SEQ ID NO: 4639 - DNA, 289 bp, Oryza sativa
gcttcagtatgaattactgagtccaagatgacccttgttaaaccagacaaaactctatggctcgtttgtcaacccagctgctgtgaaagtgatactggacgttgacctgcagtgattaaaacgaaattacaaagaacgtgatttgttgtatatactgctcctccatccaaaatattgacgccgtgacttttaataatgttgacgttcgcttatcaaaaattaagaatattagtttttctatattgattattgtaaaatactttacgctacaaggtttactattccaaag

SEQ ID NO: 4640 - DNA, 453 bp, Oryza sativa
  unsure (1)..(453): unsure at all n locations
ggtgccacaatcatcagcagctagacatgcagtgatccgttttcatcnttgcttctgatcgagaaattttgtttcttcagatgcattcagacatcacgatcagatgacattagcttctgcttctgttattgactgattaatcacactcactgaagcttgtgcatcaccatgcctgaactgaagctattaagtaaataaattatatagtaaatgtaataaaactacagatactttggtcaaattatcacaaaactacagatctaacactaaatttttcagagaactacagacataaagtggattatcgcaaaactacaaatttagtaaaaaaaattatcacaaaactatactgttagtgtcaattcaatcacaaaacttagacgtttataactcaaatatatcactaatgctcaagatttaaactccaaaatctgtagttctgtgataactttg

SEQ ID NO: 4641 - DNA, 473 bp, Oryza sativa
  unsure (1)..(473): unsure at all n locations
tctaagtctaatgtngatttgcaagaatcagatntaccatcttatattaatgcttagtgtatccgcggtgggtgaatcttatgaaacttgtcttgtccgaacaaaagtgatctctcaatatggagagtttgttttggattaattttctacgggcttaatcgggaaatgttttcatccatcaaggagatattttagtgtttcttagatgtcatcacttaaataggccatcaaaatatttaaaaaattaataacgtgaaatgtcgtggtggactacggtcagcagcggtggtggaatgcgcgcgaagaggcaagcaaactgcgatagagaggaggccctcccccgcatggatccgatggtggggcccctctctctcatggggcctcaattactgtgagaggtggactgcatcaacgacaacggtgacagccctctccctcgcanacctagtagtgggtccttggtagcagtggta

SEQ ID NO: 4642 - DNA, 329 bp, Oryza sativa
  unsure (1)..(329): unsure at all n locations
acatctaacagaactaattctggtttccgcanaggcaagtcggactactaaatcgtctcactgcccaaggcgaagacanttctttggtgaagaggaggtctgattacttcaaataatttactaaatggtataattcgaatgaacttgtattgatatttngaatacagtgccatatttatatatntagtacctcaagttctttaaagtttgtgagctgcttataactgcagcttgcatatctnccatatgaaaggcaagacatcatactggataantgaaagcatanntgtgttgttctatcgaagggatcgtgaaaaattaaagctccc

SEQ ID NO: 4643 - DNA, 469 bp, Oryza sativa
tggtattgtggttgtaaaatttcagccaggaactccaccatttctgtcatatgaagcacccacacctggatcagggtgggcaaatacgccaggagttagctataatgacgctccaactcccagggagagcaactacggtagtgaaacatattctgtttttatttaccatatactgatacatatcatgctataatgcatcaacgtttctgttctaatactgtttttctactgtctcttaggaaatgctccaagcccatatgtgccttccactcctgtaggtcaaccaatgacaccgaattctgcctcgtaccttcctggtacacctggtggtcaaccgatgactccaggcaatgttggaatggacataatgtcgcctataataggtgtggtgtcatttctactgttgcatccataaagctcctatgtattgtgctgctatctgcgtaacacagaagcaggcacgagtaca

SEQ ID NO: 4644 - DNA, 470 bp, Oryza sativa
  unsure (1)..(470): unsure at all n locations
ntgtgatgagataatgcgaagatcgatgtatcgcttctgttcttatttttgtggacgtcgctttcaaaaggatgcggagagaaaccacctatatatgatgactccccangtagtataatttattagaaaaaccattcctgacccatataactgattgtaaaaaaaaacgaatattaagaaagaatctaatataaaaaaaatataaggcttcgaatctagaccggttagctccacaaatatccctaggcgtttctctatgttaactaattgttatatatgcaccaataaattctttttttttacaagttattaatttcccaccaattaatagccctgtacacatttctaacttgacaccttctgttcatttttcaggaacattatgtattgttaataagagaatattccctgatgaagtgaatttggcttatcactgttctgaatatgaccaaacaagccagctcataaac

SEQ ID NO: 4645 - DNA, 467 bp, Oryza sativa
  unsure (1)..(467): unsure at all n locations
acaatgtctgagatattatgattatactgctagcttatctgttatatgcatnggtacgggtataatgtttgcatatgaaattactctatgtcatgacgatgatactagagtagtatctggtagtttaggcatggtatctagattactcggtatcattatttggggttatatgctgcggatgagaggtgggccgctgatggcgacagctcagtatgggtattcctccgcgcgtgtatatagtcctaagttaattccctggggagggtactcctccgtatttagccctggttgaatggttatgacgggctgtcgtaaggaactcagctgtcaggggtggcttctcaaagtaccaggagggcatcgganagggggtattagctagttaatcatatacctaggatgtatgtataatatgtatactagaagtatagaaatagattcttttctatactctntccacttagctt

SEQ ID NO: 4646 - DNA, 457 bp, Oryza sativa
  unsure (1)..(457): unsure at all n locations
tctataccagcctctagaactcaacatcatcagattcatgtttattgaaataagcatctttattatcctatcgcccagaaatgtgtctcatcagttcttttcaagaacactctatgtgcttcaacatgcccactacagctaaggtgtacaggtgctcataacccangttacaacataactagttcacaaccactagacctcttccttttcaaacacatttatgaaatttaatggcaaaaggaacactcactggtcgtgcttgcccttgccaacccggaggcctgaatggcggagcattccctggcacccccatgaacggaggtggctgggacgacggcgcagcctgagccccaaaaggcggaggctgtgttcctggccactgtggtgctccaccaaacggaacctgctgcgatggcgccggtggccctccatacggcgtcctcaacccaccagtggg

SEQ ID NO: 4647 - DNA, 457 bp, Oryza sativa
  unsure (1)..(457): unsure at all n locations
tgcanggttcgntatggccaggatagtatgccaattctgattttggcctanaatttccaggaatagagatgtgaaatctaatggatagtataattcccctcaccgagtaaaccgtagacaagtaattcaccggactatgttcatgtttactgatatacgggcgttcatcagcttcttcacatgctgtaatggtgaactggtattacctcattttcattttttgattgaatgctaagttgagaatagtgggtgataatggacactgccatggaaacatttgatgctggtgaacgaatttctggataagttgtttgaatttctggacaagatactcccttatctgtttgaccatgtggtgctggtagtttgatttgatncaatttgtttagctacctacttgtgacacgtgcaatagtgcccacacattctctcagattatgacaacgtcatggtctaa

SEQ ID NO: 4648 - DNA, 278 bp, Oryza sativa
  unsure (1)..(278): unsure at all n locations
agcttaagggagctgcagtgcanaactctaatacttgttggccataactctcagttccatgctgaggctgntcatatgacctcaaagcttgatgagagatatagtgctctcgtagaggtgcttatntaactgatagtttgatccaacgaanaancaatatgttctctggtttgaaatgtcaatcttgatgtctttgcaggtacaaggatgtggatctgttgtgacagaggagaaccgcatgcaatgcttatgccgctggagtcccttctcatgggata

SEQ ID NO: 4649 - DNA, 466 bp, Oryza sativa
  unsure (1)..(466): unsure at all n locations
ctaagcttaactctaaaaatgttgctatttaggatgtgtgtttcacatatcgnagaactagcgtagtgtttcaaccgaaattttctgctttaattttccacatactcaggtttttatttactcgactctagaatttaaaaaaaacacacaaaaattgcattgaaaaatttagccgttgtatctattatttacgcgtcacatattataaaaccgccacacaacgtagtaactactactgtaactccttacttagttctggttatttattatcaattgacatatgcaaagcttaactcctaaaaaacaacccaatttcgtactggagttttgaaaacaagaaaaaaattacatttatcaanaatttagtaaaatagaataatataagtattgaaaagcgttggaaacataatntaaaaacccatgcactattcacgcattcttactagtatattgtccaaaaagaaaa

SEQ ID NO: 4650 - DNA, 322 bp, Oryza sativa
  unsure (1)..(322): unsure at all n locations
tctctggtcatgcatatatagacttcgntctgggtatatatgctcagtcagtcagtctaatactcaaatctggtaaaaaaaactcaatccaaattaaatcttaacgtccattccattcatcacagaatataagaactttatcaatcgttaaaatataagacatttttaaagctagctatcacttagctacttctcattcaatcatcataacttggactattatnaattccttatctactcttatatcaccaatataacatattacttgattttatgacttctatcttaccatacatcatttcattaatctatcaccttataa

SEQ ID NO: 4651 - DNA, 464 bp, Oryza sativa
  unsure (1)..(464): unsure at all n locations
ntagttattatatgtgctagtagttcttcactttatacttttccggntgntgnggntcaaaccgctaaggaatattaccaatgtgtgatttgtaggctttgagatattggctttcccgtgcaatcagtttggagggcaggaacccggctccaatgaggagattgtccagtttgcttgcactcgcttcaaggctgagtatcccatttttgacaaggtaagttaacgcaatacttttaactcaatcagagtaattatcagtgtgaagcaaaatgatataagtcacatgttttatctatcgaagaggtgtttctgtggagtagcattgagtctcttttttttttatctgtcaggttgatgtcaacggtaacaatgctgcacccctgtacaagtatctgaagtctaacaaaggtgggcttttcggtgatagcatcaagtggaacttcttccaattcttggttgacaag

SEQ ID NO: 4652 - DNA, 372 bp, Oryza sativa
  unsure (1)..(372): unsure at all n locations
agcttcttaaaacccttctcaatagctgggtatgaagttgaaggaattgcttgtccaatgatcatgttatcaaactcaaatttaccatcagattctgatggaagaggctcaatgtacctgcatatttgtgcttattgtgaagacaattgatagctccaacaaacttcagtagaataatcgataaatgtatccagataacaactgttaggaacttangatagcatggctaagcaaaaggactaaagtaaaccagaagatnttgatttctaacggagtttggcggatctaaaccttctttcgtgcaccagtgtattcaagatacacgcacatagcttttgtangatgattntacacatacatcatgataccctt

SEQ ID NO: 4653 - DNA, 448 bp, Oryza sativa
  unsure (1)..(448): unsure at all n locations
tcggtgagcaccctngagtaccttaagaccacatgcatgctctatctcacatcacattgctctagaactcgacatgcacaagcaacccgagacatgccgctgtttccaccatcgccaccatctattctgtccactatggcttgtaacaagaccaccattggctttgcaaagaactcatctaaattttctatttttaccccaacgtcatccgagccacctatcgccgccggcaagctcgccaagctcacgaccactcctccctgtacatcggcggctggaggttgaagacaaggaccctgtcttgtagtaaactaaaagcttagggtttaaagcgtaaagcactagagacttacatgtggggcctagtactgcgagttcatttatggaaaaactagggacctttctgcaaaacagtaagagactgacagtggacccctggagataaatc

SEQ ID NO: 4654 - DNA, 263 bp, Oryza sativa
  unsure (1)..(263): unsure at all n locations
tggtcatgcatgttgctctattaatgtgggcaatactacacaggcttataatatgaaacggaggaagtaatttatcggcacgattcttgctagactaaaatcaaagagctcaaaatggtctgtaatcttgcgaatattatgtcgccggaagtataacaaaaccgcttaataaatggctctgtttctactacttaattataccacaaacttcngttggcaagttcagagggccttgcagttcctgcaatatctgcaaataatat

SEQ ID NO: 4655 - DNA, 449 bp, Oryza sativa
  unsure (1)..(449): unsure at all n locations
tgtctgggtnngattttntaatttctggccttatcttattatatactcaagaatttggtacaataacttttttgataaagttttataccaaacaaaccgccacacaccttcacctcatcgaaaatttgtaatgctaaaatttagcattatcaaaatttggtatgtattttaggcatcaaacagaactgacaataggttttgaatttttctttttactagcaaaagtgcctgtgcgttgcaacgggaagaaaaacaagagaattgaattaaaacatattaaatagtaattaattgaaatacaacgtctgatctgatcagttctactcgaccaaatttatagtgtcgctgaacgagtaatactatatacctgtggatgaacatgaataattaatttgtgttgtatcaataattacatagcctaaaagagataattcctgaattacatcact

SEQ ID NO: 4656 - DNA, 478 bp, Oryza sativa
  unsure (1)..(478): unsure at all n locations
agctgcagctggagaaggcaggtgtttgcaatcttattgaacattgtatactaggatattcttttagttgggcgaaagagactgcttcatcactaaagagctttcacactagatggaatgaccgactcccgggcagatattactttcggccccggagccttcacttgataatcggctccagagctttttatattctcggactcccagagtcctgctgcccagcagcacaacaatctgcttccactctggaagcctagtctatgatgcccgtagacatnctgaatcacacagattcgcttctgaccactcaggtcatctatcttgcacataggctgattctggtacgattccacacacaacactnttacaaagacatgcataaatntacgcacggaccacctacatcgccatgaccgggacggtgtcaacagtgtaccttgcaaggtcattacccagaacaactgtcatgcgacctgta

SEQ ID NO: 4657 - DNA, 468 bp, Oryza sativa
  unsure (1)..(468): unsure at all n locations
tatgatcntatgcattgaagtgttnttacgaaattgacgatcaatgtgtttcactnngttgnggtagaactntgcgacgatgacttacaagtaaaggaggttttaagcgtggtttgttgtaccgcctgcagtgtccatcggaatgtgctcgatcgtcggactccggccggccggctggctggcaaaatatttcaccgtctttctctacacgtacgccctcttccttgatgttctttngtcatcttctgtccctaaaataggccgcctgcatgtctttgcgagagaagttctcaaaccctcatgtttntagcaaagcaacactgagccgttcagattccattgnggaaaaaaaaagaaacatgagtaaaatcgttaaatattttagcagcaattttgcacgaacaaatgggaagtggaagaaaactggtgttgatttcattctccaagagaaactagctagtagcttaa

SEQ ID NO: 4658 - DNA, 187 bp, Oryza sativa
ctctctcctttcttctcttctttctatctctcattcctcttctatcttttttactctctttttatagacacacgagcacagcggaggcgggcccccgtgaagtacctgcggggtggctccaggggaagaggaggcctggattttagagtggatggagaactaatggagagagtgtatcacaaatgga

SEQ ID NO: 4659 - DNA, 473 bp, Oryza sativa
  unsure (1)..(473): unsure at all n locations
tgtatgcattgcattaatcttttgtagcactttgaaaggttcatcatctctaggtagcaacttagattttctcaaattagggaacctatcttttctcaaatgcaaccaaaccaaattaccaggttcaaaagcaacatgtttctttcctttgctcccagcaagtttatacttaatattcatgcgctctatgttctccttagtggtctcatgcagttttaacatcaattcagcgcgatgttttgcatcaaagttcactctttctgaagttgggaggggcaaaagatcaattggagcacggngtagaaggccataaacaatctcaaaagggcacttcttagtagtagaatgttgtgaacggttataagaaaactcaacatgaggcaaacattcttcccacattttaatattctttttcaaaacagccctaagcattgtagacaatgttctattcaccacctcagtttgtccatcag

SEQ ID NO: 4660 - DNA, 414 bp, Oryza sativa
  unsure (1)..(414): unsure at all n locations
gggccctccgcggntgccttggttgttcgcgatagcttgcttaattttattntgggtggccataactccggccagagtggctaagtcgggtgtctgagtttcgtcattgctggttgttgcccgacgtcggcttgccatctgtgcaggttgattgattgagtaagtatcctaattctctagctatcttttacggctttatcccattaggggagattgttttgatgtgaaccttgttttgcaagcatggtggaataaactcatttataacacagcaacaatagatatcataaataacatcacagagtttcacaaatggcacataaatcatgatgcaatcgactgcatacatacgcagtccaaataaggttcatccaaaagatacatcaaactaatcatcaatctactcgtcaatct

SEQ ID NO: 4661 - DNA, 347 bp, Oryza sativa
ctcagctgactcgcagatagccctcaatctcatgttttgacccgtaaggcccatgcgtgtgttcatttatatctgactgcttgggatgctgcagcggtatatagcttgaatagtgattttataaggcatctgatgtgtaaaaccatggaatggcaaccaatggaccctgcaccggattactatttctgagcttcttcttgtcaccatccaatcatgaactcgctctattgctaaatgttaaaagtctgcatgggagtatgaatctgaatatgaaacatgatgcctatttagacttgatgcaacatgctatatatatgagctgaaatagtaccttcatgtctacatat

SEQ ID NO: 4662 - DNA, 464 bp, Oryza sativa
  unsure (1)..(464): unsure at all n locations
tggggggttntgttgacggtcgttacagataaattttcgtttttctatataactaanataatggagaattagctatgcatacaatgcatatttgttttcaaataatatagttctacttgtacttggagaataacatgttgcaggaatttatcaaataaaataaagacaaagtggagaaaacctcactcctaagcaagcagatggataagggggcccacatgtcaggtgtaaccgtccggaaactgccttaactgtcaagaccgccatgaggacccacctgtcaaccaccctgctgaagctggaggcctgctgggccggcccangttcggctgaaccatggcggtgccctgtcaggtcaggcctccacgtagatgtccaggattgcttatcaatgacngttgtgaggggtaaatggatatttctcatgccagtaaccgtcataccgaccctatataaggacgagc

SEQ ID NO: 4663 - DNA, 445 bp, Oryza sativa
  unsure (1)..(445): unsure at all n locations
tgacgttgcgaaccactgggtctagtaccagggggtaccgtctccggtggaccactcggtctggatgatccgagcggtaaaacttgattgttgtctccgaccaccgaagatattggggcgtatcgggctgaacagcgttaatctcccgttcagtcagcttttgttttcttttagattcataagccagaggtccgccaaagatgtggttgagctccttacgacggtctcgaaaacctatcggggcatcgtcgtcatcgtccttcttttttgacatgctntgatctccgtcggaggcctttcgtgcattcttggtgttttgttctgcaaactgtttgtagacgaagcaatctttggccgcatgattnggaattggatgatgcggacattgggagttcatgatcttgtcaaaagtattgacgcgcgaacgttgtctggaggaatgtgt

SEQ ID NO: 4664 - DNA, 291 bp, Oryza sativa
tattaaatactgtgcttgctcctctattatctagaactttctgggaatatacgagcaagggaagtatcttaataaatgaaacaacatttcacacattattgtaattggagagagtttcaaaaaccccttcctaagccgctgggccgaatttggccaacttctctcttcccgcgcggccaagctcggccagtcgagcgccgcctcttctctcatgcgcgaatgtgggccacatgttgacctctctcaactccgccggtgcatgccagccgacgacccgctccgctcaaatca

SEQ ID NO: 4665 - DNA, 484 bp, Oryza sativa
  unsure (1)..(484): unsure at all n locations
ctattacggacctatgaatctcagcttatagggtggctacnnagaattttggaaaatactctttattacgttggaaattctcatagccgggcaatacaatgtttgctctatggggtctagatgttcttataggaggggaatgagcatgcttttgcatagatgaccctagagtttgctgtaattgcacaattaggtttcctttatgtgggttgtgaaatggcagcttcaccctgtagattttgaggaattatgctctaggggttcctcattgggatgttggggctggtttgatcagcctagtaaatatcattttgtttgggctaaaacttggtcaagtttcaaaaattaaaattgtacttcctatataaatgtatgccaaagtcagggaaagttctacgcaaggagaacaatcaccccaaataatcacccaagttttgtcgtacctaaaaatttgttcagttactacttgtgatagttactaata

SEQ ID NO: 4666 - DNA, 251 bp, Oryza sativa
  unsure (1)..(251): unsure at all n locations
cacaacataagcctncaagaacacggaaataagggctttgcaggaaagccaatngcgctgtgcttaattgactagtaaaggtaagctgggatattgcccattngtatatactatacaaaaattttaaaatgcaattgaagtgataatttggatgtgcccnccttcattcgcaactnntgtntatttactttcgttgggtgtggttacaactaactctaatggtggtggtgtcaaatctagtcatggaatta

SEQ ID NO: 4667 - DNA, 447 bp, Oryza sativa
  unsure (1)..(447): unsure at all n locations
tagcattacannagttttaatgttaattacaggctctttgtttttatcgtgatttcatattgcccacattntttttaggggaattgatattggccacttgcagagcagcagggcacatcatggacgaaagcgaatctcgaggcggatcatggctcatcatcctcaggatcaccatcagctatcttctgttcttcccggcccatgcaaactctctgtgcaatttcacacgcaaacatgaaaaactacaagacgagaattaacacgaatccatgtgaagcagatttgttttttgagtctaaacgaacatgtagataccacatttgaagcacagcagaatactagtagtagctttttgttcatagcaagtgatctaactctgcacctcgatgaatttctcatgttcaagtacactacacgcttcttgaattacgcgatgttgatcgatcg

SEQ ID NO: 4668 - DNA, 320 bp, Oryza sativa
  unsure (1)..(320): unsure at all n locations
cacacgctaaccttgccacatgtttagcctggagagataatatgctacactatgattactagaacttatagtattacacattanagtactcttaaagttggaagatgtactnntatttgtatggggctntaatcatgtgaggccaaagatgactnttcttcatatatgtgctaatatctctagtgattaatttgcattngctttgctaaggtcacaaataaactgcaattcttttagagataaagaaacgctgtatacacttctaactgattagctgtgcctagctagatcatcatgggatgattaaacatgatgcagta

SEQ ID NO: 4669 - DNA, 461 bp, Oryza sativa
  unsure (1)..(461): unsure at all n locations
aagaaatcgtagntntgaaagcatggctctaatgatcttttcataatccatgggagttaatcaaaaaaagaatggaacctagccatcaagagcttcagcttcagcatcagcctatcaccagttaccaacttattaagacaggtttggactttgtactttttcctagctcatcacttatgttatcccaaggtactaaatatgattcacccaagaaccaagaatcaggaagctgaagctctaccaaacgggacctttgagctcataaagatctaactggaacaattgggtcacttcagcccaaaaaaaaaagaagatatgcacactcattctcaaaatatccataagctttgcaaacttatcaccactatccaaaaccaagatggcatatctatgtcttatgcatggtgatgcaatgtggctaaagtcataaatgccaagactcccataaatataaattagag

SEQ ID NO: 4670 - DNA, 202 bp, Oryza sativa
ttcatagtgatcccaccgccacggtaccatatcgccatgttttcgctcatccaattggtgagcaccaccgtgatgaccccttcaccagtaatccaaccgtgagcgccattgtcgtggaagaacttgtggaggcgaggtagcgccgtggtcttcccggagaagcggtaatgagcacagcggacaagtcatcgtctttgtcaat

SEQ ID NO: 4671 - DNA, 424 bp, Oryza sativa
  unsure (1)..(424): unsure at all n locations
tgcaacgcgcatgcagctgctgagactgagatcatatatattatgtagnagtaacgctcaactggaggtagctacgggctccatgcaattaacggagaaatcaagtgtgtgcgtgtggccgatccatatggaagagaggattactgattactctcggatctagatctagtggtcccagtaaatacaattcattccgtagaaaaagtgcctcaaaacattagtcggacaatcccataccaacatttgttttcatacccataccaacaaactaatttcaggcgttgaaacactgtattggttgccatccagttttgacaggaacccaaacattatttgcattttgcaacgactataattaaatacttttgcccatctgaaggcacaatacaacaatcaaacattgttcccaaccttctaacaacac

SEQ ID NO: 4672 - DNA, 507 bp, Oryza sativa
  unsure (1)..(507): unsure at all n locations
gcttgtcaattgatcactgtactgcggaagagcttgaccattnttgcaactctttggttgatanatctccaccatttctgacaaatataacacaagcatttacattacanaaagaaaaggatcctatcaacagaaataattaattcaacataaaacanatctttgaataccattaactattcagtatggcaagtataccaagaaactagatgcatcagatatttaggctgtatgtacgttgcagaaagattaaattctactaattgaaaaccaaaataaatggaacaatcagcaacaccgtgctcaatgacaatagtggaacttaaataatctattgaccnatggactaaccttggaatagtgcagagtcatggtcaattgatctgactatataattacccgtatcacctagtatcattgtgacactataatgtctaataccacagatatcatgctatatttatgatagatatatacatagcataacaaagtacacacttgaacagc

SEQ ID NO: 4673 - DNA, 471 bp, Oryza sativa
  unsure (1)..(471): unsure at all n locations
tcttgcgtggctccactatagctggagctacttgagagctttggtttttctccaatgcgaacctcctggtgtttgtgatggtgtaaataataaaagaagtttacttcagtgcataataagtaatgaaagctagagaacaatgaaaagagcataatggtgcttacctccttgtgactggtccagggctgctgcttgtttgtgatggctgcacttgagagctntggtcaagctccaatgccaacctcctggtgtttgtgatggtgtaaataataaaagaagtttagttcagtgcataataagtaatgataagtaatgaaagccggagaaaaatgaaaagagcataatggtgcttacctcctagtgactggtccanggctgcttgtttgtgatggctgcacttgtgtttctgcagctacttctctagctgcaactgctctggttctttggtgtagtacttggtcatcactaaca

SEQ ID NO: 4674 - DNA, 274 bp, Oryza sativa
gagatgagcttcgcgcccttctttttattgcgacccttttttatttccgccggaacaacgcgcgcgttcgtatcggcgcgtaccgcgtaggcgcgcgaccgcctatcgcttggtcggagcaactcactgtcaccttcccgaggatcgcgcggattgatcccgcctcgaagtctccttacgcgcttgactggagtgcgcgggtatccctcttaaactttttcttctaggaccagccgtccggtgcgtattccggtcgcgacgtgcgcgtttctcg

SEQ ID NO: 4675 - DNA, 473 bp, Oryza sativa
  unsure (1)..(473): unsure at all n locations
cttgatcgggattcaggtatggttcggagctgatgagcaatgttatgttcttcttcaagtcggtgatgaagtcattcatggtgctgatcgtgacggcgctggccatgggggagacgctggcgatggcgccggacatcatcaaggggaaccagatggtgtcgtcggtgttcgagatcctggacaggaagaccgacgtcctgatcgacgccggcaacgacgtcaagagagtcgagggcgtgatcgagctgaggggcgtcgagttccggtacccggcgcggcccgaggtggtggtgttcaagggcctcgacctcctcatgaaggccggcaagagcatggcgctcgtcggcatgagcggctccggcaagagcaccgtgctctcgctcatnctccgcttctacgaccccatcgccgggaaagtcttgatcgacggtacgtatcgatctcacagcttccaaaatgaattgctctgcata

SEQ ID NO: 4676 - DNA, 347 bp, Oryza sativa
cgatctacagcggtagcaaaatccagtcttacaacagctgttggacagcttcgttcgtgacagcactggagaaatgcatgtggcatacaaagaagactctgagatgctattgcctttcatgaaccctgtttgtgaccaatgtatgagagtgcctggaacacattgaagacgatttgccaggaccttggccaataactcggcgcgacaccactgtagagagatgggtcgagagcacctattgagaattgaggggagtccgatagataggggattgacaagagtggttacatacgttctaccagatgagccatcagcgcaggattaattgagcttgaactactttaaac

SEQ ID NO: 4677 - DNA, 110 bp, Oryza sativa
tactatgttgagtgcctatgggaataataataataaatacttgggtgtcacatcctaatcattagtcctccgaatagctctgtcaatataggtgctaaagagagatctca

SEQ ID NO: 4678 - DNA, 378 bp, Oryza sativa
  unsure (1)..(378): unsure at all n locations
taagatacctatgcgagttcatactcctggaggtggcatgatcactacttactattgcccatctgtgacagttgaaatccaaggggtgattnttccagccaacctcattcttctcgagtccaaggaccttgatgntattcttggaatggattggttgacaaagcacaaaggagtgattcattgcgttagccgcaccatcaagttgaccaatgcgaaaggagaagtggtaaccttccagtctccagtaccgcagaagccacgaatcatgctgaaccaggccactggtgaggtagcagtggagaaaacctctaagaagttggaggatatttccatagttagagagtatccagaggtttntccggatgatctgacaacaat

SEQ ID NO: 4679 - DNA, 478 bp, Oryza sativa
  unsure (1)..(478): unsure at all n locations
agcttngcatgcatgcatttagtggatcttaaaatgacttttcttctatactacttatntaatctgtgatccgatcacactgttgtanttcgtgtaattaaacttttacaataagatatatcacatgattatatttgatgaaataaaaacatatgtttaaatnccgttgctctagttgattcatagtacgtagtagtgatatgtntcaacgtgtatcttcactgtgtntataaaatgttggagtgttccaattgctgaattttttcaccatatataagttaatggttcacttggttgtcaactgtaacatttgactggttcgaaaagtcgggcatttcgatgggtagtttctcctaaatatcataaccacaactaaccatcttgatgttaaatattcttgtaattttttgacggatattctgtaatgagtgtattaaatggaaagatgatnttgctaaaacacgacctcttacgattt

SEQ ID NO: 4680 - DNA, 462 bp, Oryza sativa
tgatgtctgaatagaagggcaaactaaatctctctgttctttattgaattattttatcatgtttaattctcatgttaacattactgtgagctaagtttgtgttattatactgtaatatcttaccatttctgatctgcttttgcaatttaggttattgcaaatagggccgctgagattcttggacataagcgtggcgagaagtttgtacaccctaatgatcatgtgaacagatcacagtcctcaaatgatacatttcccactgtaagatttcactatttttttggccgtcattttaatgtgcatttacctttgctgatgttatgatttatgttgctgacattttcaggtcatgcacatagcagcagccacagagatcaattcaaggtttgtcccaagcttgcaacagttgcataagtcacttgattcaaagggtattttttttgtctcttgtttcccaacatt

SEQ ID NO: 4681 - DNA, 462 bp, Oryza sativa
tgcctcatgttaccaaaccaaagtaccagttacattcttattatttcatccatgcaatcaagcatgataaggaccatcatattcttggcaatattcgagtaaccagcagtcctgccttttctcttactgctgataagagttaatctgttggatatgcatttgctatgatgtgaagaatacacagtgatacctgaaatagttattccacagagtgtgcacattagacatatgattcagttgcgctctcaatgaaggaaaataataggtcagaacgtgtgatttttttttgtcaagattgtcatgaagtaatatagcaggcttatatgaaatattactgctgttctattagcagagcatattatcttgtgtttgagacttcagagaagtggcttgtgaaattaataatgttctagcttcctactctctccattcttcagtagatgacattcaagaagtttgcac

SEQ ID NO: 4682 - DNA, 466 bp, Oryza sativa
  unsure (1)..(466): unsure at all n locations
cttgcggcatcttttgggggaattatcttctattccatgtatatcttgngttcttgagtattaggatgccgtactattaagagggctaccacatgcatataattggtagaacactagtgctcaaaatcctttatttggactgttcctattttattcctgtcggactatccgatcctgataagactatccgatgctcagactatccgaaatttcttagaacttttccctctgtctttggtctgagtgttggctaaaaaatatcggacaatccgatataaggtcggattgtccgatacatcggactgtctgaactttctcagaacttcactctctgtcttgaattgctttttattcctcttgagtgatttttcaaatcagactatccgatgtgatcggagtatcggatgacccacagactctgaaattcaatggaacttgagtctctgtgagaggatgaaattcatga

SEQ ID NO: 4683 - DNA, 326 bp, Oryza sativa
  unsure (1)..(326): unsure at all n locations
gcaagcttcgcgtacaagccgncgacgcatgcacatgcactagtgcagattgctaccagccgatgaaccaagaaagcacatgcgtatgggtgtgtgatccactctacgttcaatgcatgcacngatcagcatgcaagatgcacgtagtgacgtaccaatcgatcttcaccaatccatcgtattcttcaacaaccggacgtcatcacgccgatccgcggcgatacgctatgcattgcatccgcggatcggcgaacntttacgtcggtaaacgagataangtatcgatntaatcaattctaaaaattagcagcagcgagaataatatg

SEQ ID NO: 4684 - DNA, 450 bp, Oryza sativa
  unsure (1)..(450): unsure at all n locations
ctatgaaactcagctttaatagcagaacacacctcatcgaactcattcagttctgtgaacaagctcggggtgctggcaggtaagacaagattacttactccctccacaaagggaataaggtctgctcgggtctcaaaatcgccaggggcgaaacggggcgccgcaagagaatactccgaaacagatgtctcgatggccgcccccttccccttcgccttgactagcggcgaaataacccgctgacgcatagggctgccgaagaccctcgccgcagctgtcacgatccgttccgcggaggctgaagccccggcggcggcgctaccgcctgctccatcggcgccaagtgaaagaacggnggcggtcgaaaagtctaggctgcggccagcaggcgaagtcggagtctcgtcagaagactcgtcgtcgctgaagacgcgagcgacatcgacaagt

SEQ ID NO: 4685 - DNA, 337 bp, Oryza sativa
  unsure (1)..(337): unsure at all n locations
gcttacactgaggagaacaagtacatgatgaagtcaaaatccacaccaaaaggcagaattntccctttccaccaagtcaacacacactatgcaagccatcgtacgcatacacnagaggaaaaatctcaatactaatctgaaccacaagtaagtacaacacgcctagaaggttgaacaccaaacagatataattaggagctgaattagtcaaccataaagcaacaaagccgctctaaaccactttggattcagcgagttcatcanactgcgctggaaactnnttaactgttcacatcacagacgagatcatnccatcgagaaaacaacaagtgacgac

SEQ ID NO: 4686 - DNA, 436 bp, Oryza sativa
  unsure (1)..(436): unsure at all n locations
tcagtccttnggtggcagagatgagcttcttgccctcattctccatgaactgaccgacagcgtactcatcaatggcatcaaccatgtacaggacctcatagtccttcagcttctcaaggaagggggagttctcaacagccttcttgctctcaccagtgatttaatagatatcacgctggccctctttcatccgggctacatagtccttgaggctggtcaactcatcaccactcttggtggagtggtacctcaggagctcagcaatcttcgtcctgttggtagagtcctcatggatgccaagcttgagatatttggagaaggccttgtagaatttgttgtagtcttccttggtctcagcaatctcaaagaacagctcgacgcatttcttacaaggttcttgcggatcaccttcaggatcttgttctgctgcagcagc

SEQ ID NO: 4687 - DNA, 315 bp, Oryza sativa
gcatcatactaccttaacaactgctacacaccccaacggtaaagaccatattcttgctgaccaccttgcaacaaatatacatctaaagataaagatactatagatctgcttccaagatcagcgaggtcagcataaccataccatatgataatggacatacgtgatggatgacaaggacatactgaaacaagaatgcgatgcaatactaaactatgagcctacgtgcatgcactttgatggtgatttgtgcaactacggcttaatcacgacgaatatctgttgatgggacaaattacttgcatttatgtacttaat

SEQ ID NO: 4688 - DNA, 439 bp, Oryza sativa
  unsure (1)..(439): unsure at all n locations
tggggacatcaagtntcactgatgaaaacattgccttgtttttatttccacccaaaatgaggtatcttgtctaacctttatgattgtatgcaacaccaatatactgtactgcaggggcaatctgattcctattcttatttctatttgtagacctgatggaaaactaaatcaactagttaaggaagtcattgagtatgatctggccttacgtgctgtcatgggcaaaacggagatgctgatattcccttcgacaatgctgcctaaacagtaccaaggtttgagttctttcattcgtcagaaaatnccaacgtataaaaaaaatacacgaatgtgcacatgatctctatacccacccaatcaaagttacattcataataaaatgtgataactatcctgtgctgctggtgggaaaccaataactntntactaaactacctat

SEQ ID NO: 4689 - DNA, 425 bp, Oryza sativa
tgagtgcgtgcctgccgcggaacggagagagcactgtatgtttatgttcctatcggagacacgaccggggaggacgatcaacatgatttaccaggaattctcagaccacccatgaaacctgcaacagctgactatactcgacggacctaatcactttcggtgatcctagcaggcttcacattacgtcggcacgatgggctagactagtataacctagctgcgtgctagtgtctcaagagaatgtacgtaatgctcgccacgctcattcatagaccgaaacaacatgcctactgtatggacgctcacggatgatcagagtatgatgacgtcaactgctatggttgatggccgcgaacatcgtgaccgtgtgcacgggatatgccaaccttactgcgatgctgcatcgaccaccgacgattatgcgg

SEQ ID NO: 4690 - DNA, 423 bp, Oryza sativa
  unsure (1)..(423): unsure at all n locations
tgtgcgctggcatgccgaagaacgganagtcgatactatgctgaggctcccagcagattcagtacagtggaggacaatcgataggatttaccaggaattctcagatgacccaagaaacatgcgtttcgcaatgtgtacggacggcattaatccttttggtgatttgagcagtcgtcacagtacatggccagttctgcttgttaactataaccttcctccctggttgtgtttcaaaagaaagtacattatgcttgccatgctcattcaaggaccgagacaacctggcaacgatatcgatgtgttccttgaaccgataatcgatgacttcgaaaggctatggaatgagggcacacgaacatgggacgcatatgcacaagagtatttcaacctccatgcgatgctgttttgtaccatcaacgatta

SEQ ID NO: 4691 - DNA, 428 bp, Oryza sativa
  unsure (1)..(428): unsure at all n locations
cacagcgtngatcgcagttctgtagacatangtgtgtgctctatcggtcttcgtcgacacaatcagccttgtcaggggctcttagtcaatatntgtgcaacaatattacatcgttgatgagttgtctgctacttcctgaattccttccctggtaattggttatttgttcccgcataatttatgtaccttntgcttctggttattgaacagcatatgcangaatntgacttatttctaatggatatatctagtttccctattgcttccgcccttctgaaactatcattactatcagccttgtcaggggctctgctacgttcttgaagcttgtgagaaaacatgnatatgctcataatctgcgcgaaccagaagaattgtctacngggatcatctagaatctnctacattngatcatgatcgatctctcc

SEQ ID NO: 4692 - DNA, 472 bp, Oryza sativa
  unsure (1)..(472): unsure at all n locations
tgcacataaggggttatcgttgatgtttctgtaacaactttatcttatgaaacattgcaggaacaatcacatgatgagaaaatctttcacaacatgcaaggaatgtattttttaccattagtggaaccacatgggtgatcaaaaaaggagtttcatcaatgttatgattggtgattttgtggtatgacctantaactgtttttcccttgatacttggatgatcatacctttctgtcctaatggccttcatgagccatgaggtgcactctaaattggatgttggtcttatttgtctattcctgcaggcagtaccaacaaaatttgcaaactttatcagagggcagatatctgaagtagtcaagctagaggtgccaaatggtaaaacatatgatgttcatgttgccaaggaacataacgagctggtccttcgatctggatggngggcatntgctagagattatgagctcaaaca

SEQ ID NO: 4693 - DNA, 480 bp, Oryza sativa
  unsure (1)..(480): unsure at all n locations
ctaagcttgacataangggttatcgttgatgtttctgtaacaactttatcttatgaaacattgcaggaacaatcacatgatgagaaaatctttcacaacatgcaaggaatgtattttttaccattagtggaaccacatgggtgatcaaaaaaggagtttcatcaatgttatgattggtgattttgtggtatgacctagtaactgtttttcccttgatacttggatgatcatacctttctgtcctaatggccttcatgagccatgaggtgcactctaaattggatgttggtcttatttgtctattcctgcaggcagtaccaacaaaatttgcaaactttatcagagggcagatatctgaagtagtcaagctagaggtgccaaatggtaaaacatatgatgttcangttgccaaggaacataacgagctggtccttcgatctggatggtgggcatttgctagagaatatgagctcaaacagt

SEQ ID NO: 4694 - DNA, 281 bp, Oryza sativa
  unsure (1)..(281): unsure at all n locations
atagaacatctaacagaactaattctgngttccgcanaggcaagtcggactactaaatcgtctcacttgccaaggcgaagacattcttttggtgaagaggangtctgattactcanataattntactaaatggtataattcgaatgaacctgtattgatattttgaatacacgccatatttattatanttagtacctcaagttctttaaaggttgtgagctgcttataactgcagctngcatatcttccatatgaaaggcangacatcatactggataatg

SEQ ID NO: 4695 - DNA, 450 bp, Oryza sativa
  unsure (1)..(450): unsure at all n locations
ggtatntgtgttgntaaaatttcagccaggaacttcttttctctgccatatgaagcacccacacctggatcagggtgggcaaatacgccaggagttagctataatgacgctccaactcccagggagagcaactacggtagtgaaacatattctgtttttatttaccatatactgatacatatcatgctataatgcatcaacgtttctgttctaatactgtttttctactgtctcttangaaatgctccaagcccatatgtgccttccactcctgtaggtcaaccaatgacaccgaattctgcctcgtaccttcctggtacacctggtggtcaaccgatgactccaggcaatgttggaatggacataatgtcgcctataataggtgtggtgtcatttctactgttgcatccatanagctcctatgtattgtgctgctatctgcgtaacaca

SEQ ID NO: 4696 - DNA, 348 bp, Oryza sativa
  unsure (1)..(348): unsure at all n locations
ctcattggcagttctttcgtggttcaacatttatatataggcaatgtaagtcagntattacatttactnntaaaggggaaggatcaaagaactaattaataagaccagtgtggttcatggagaacaaggaatnagatatttcaaattcaagggttatataccttattaatttcaagggngatagtcantaatatcanggtccttgactgctcagctgtttcttcctctctagcaagtatcaatgacacanagtcttcgacaatgttctgcatctacggactctgtgaacacaactcatctgtgcctctctgaactgacctgtgccgagatcttgacatgcatactgct

SEQ ID NO: 4697 - DNA, 465 bp, Oryza sativa
  unsure (1)..(465): unsure at all n locations
ntcatgacaaggcatttccaagccgacacaggcttanatatgccgacgagaggggtcccagaccaacaacaggttaggtcccagaccatactgtgccaggaagcccaggggggtcctctccgacaccaccccggcgaatccacatgtctctcggcatcatggctcccctgataagcaagttactcagccaggggtgtcccattccacccatgtggtcgtacttgtcttatgttcggatgaaattccaaggaatcggtccttaagtgcgggagcgggaaaaccgtacacccggtacgttccccggtccgcggttttagaaattcatttagttcgcaagcactgacccacgtgtcgggttttccaagtcttttgtaaaacccaagttttacccaagttggttttcagatattaagttngaaggcgaccgtcgatactcgcacagagtgcacgaatatcgatgcgcaa

SEQ ID NO: 4698 - DNA, 283 bp, Oryza sativa
  unsure (1)..(283): unsure at all n locations
ttggtatagaccaagtatagtaaagttactaccgttaattgattgaataaattttattatggatttacaacatttcacttggttttatttttaaattatgtgtgagaatgagaaagagagagggtaagatgtaggggaggaccntgcacacccctatcacccgatatcccaattcgttggaaaactgtgacaaatttgagtcatcattgattagtctcagtacatgatccagatggcgttgaccgtatttagaaattttgacagtaaagctaaaattgatctg

SEQ ID NO: 4699 - DNA, 474 bp, Oryza sativa
  unsure (1)..(474): unsure at all n locations
gacctataaaactcaagcttttaattnctggtctctgatgttgtctnccaagatatctgcgaggtttcttaacaagaagggatgcttcgatatcttgtaccgcagtgctttgccgatttccccttcaatgcttgtcagcctctgcaacaccttcagtgatgacttcactaggaccatttgctgtgcttcactgttcattgtgtcacttctgaagcttgtaaatcctatgatcttcggaatgaggtcagttactctatcaatttccacacagttattttgatcacaactagcaagcttgtcaacaatcaacatgccaagtgcaggaagttgatcatggtatgtcaatggatgctccttgngaactgtccagtactctgaaatcttctgcaagcttctgattatgcagttctgttcatggatgtgggctgatcgagtntgtgtctccggcaggttatcagtgccttgaagtgtctc

SEQ ID NO: 4700 - DNA, 141 bp, Oryza sativa
tatggctgatgactattctaatgaggctgaacgcggaatatgctcatgatcatcacttgcatgcctgctgacacgtgctcacgatacggtacgggcgtgcatactctgtgggccacgatactgttgtcacccaagatgtgt

SEQ ID NO: 4701 - DNA, 468 bp, Oryza sativa
ctcctagagcaatgttcaataaaaagggagttacagtagttctttacctcgcaatacaatatttcttcacgtgccacctctgatgctaaccgatcacagatacccacaacattcagttgcttgcgcataccacgtttagcttttccaccacgaagtgtgggtctacgtttcaccgcaaccaactctgtatggttgttgtcccggggcgcactctgattctggaggtttgcaactccacgcgttgagttttgcagagcatcttcagcacattgcgcaccatattcaattgatccattctgagtaaaatcaactcccattggaatagcattcaatggttcaatagtcattggtgtcaattcatttgagctcacattcaatggttcaacattcatcggtgtgaactcatttgaactcgcaatcgatggttcaacattcatcggtgtgaattcacttgaacttgcaataata

SEQ ID NO: 4702 - DNA, 448 bp, Oryza sativa
  unsure (1)..(448): unsure at all n locations
atttacatccttgatcgacctaagatgtattctgatagctgagcaacaaacatttccttttctgtagcatatgctactgatgaatggtcctgtgctcaatgtccaaggacttgcagcagaatccgctagctcgttttattgctgtcagtattgttcttgtagacatttgctcatgatgaacttttgctcggttgagtatggtaatctgaaggctaaggtattttttttacacgatttgacgcaatgggcagggagctctgtgttgaagggagtactcttgtaaagcatgatttctttcgaatgtatgaatttgaaaacactggagtaagaaaaggctggaattcaatttacacgttgttcaaacccatgctatgaaccctcaaggtttctatgcattggaatnttgtagcgcagtcgtccttctatcccttcttacactgcacacaac

SEQ ID NO: 4703 - DNA, 206 bp, Oryza sativa
tgggctacacacatgtcgcttattatctcatgatgcatctgcaaattgtgatgctgcgcatttgatacctaacctgcgcgagaaacaatcccagagtcatctatacataactgcatgtgaacctacactggtaataaattctgtattaacatggaatggaacgctttatggggaagagcaagtgagtgctatggtgaatgtatgtg

SEQ ID NO: 4704 - DNA, 427 bp, Oryza sativa
  unsure (1)..(427): unsure at all n locations
acctatgaaactaagcttctcggttttggtctctacccgagcatcaggccnctctcttattatcgagctatagagcggatgcgcccccccgcaagcttaggatgtgcaatgcgtcaccggtgatggccgccctaagcggttatatcaggctgggagagaagcgctcccttatttaactcctcaaacgctccggccattacttggaggaggaagctgaacgtgccctcactcagtgaaggcgtatctcagctctcccccagttctggtccctcggaccaaatgaacccttgtactctacttagcggnaccccgcagtggtagtgcggcgttggtgtggagcgcgagaggacatcctattccggcaccccacctggctggttggccggagagacaggagagaggcccgaccaacagggccaggccccac

SEQ ID NO: 4705 - DNA, 458 bp, Oryza sativa
  unsure (1)..(458): unsure at all n locations
tctcgggtttntggtctctacccgaggcatcgaggccaactctcttatgatacnagctatagagcggatgcgcccccccancaagcttagggatgtgcaatgcgtcaccggttgcatggccgccctaagtcggttcatatcgaggctgggatagaatgcgctacccttatttaagctcctcaaacgctccgggccatttacttggacggaggaagctgaacgtgccctcactcagttgaaggcgtatctcagctctcccccagttctggtcgcctcggagccaaatgaacccttgctactctacttagcggcgaccccgcaagtggttagtgcggcgttggttgtggagcgcgatgaggacgatcctcattccgcgcacccccaccctgtgctgtgcttggccgggagagagcatggaggagaggcccccgagccgaacagtgggccaaggtccccga

SEQ ID NO: 4706 - DNA, 399 bp, Oryza sativa
actaagcttcttgccaggatggcacattataaacattattatttgtcggataaagtcggataatatggtcattatatcaaaaagtgcatgattagaaaagaattaatttccggggattctggatatcctctaacatatgatataaagagaaagtgagcacgagagaaagatggggctgttatgatcctcttataaacatatactccctccgttcacaatgaaatcattctacatttccaattctatcgaataatgaatctagacatatattgtattaatcattaacatcgcacactagtcagatccttttctggacggctctaatatgcttaaaaaccgggccgccaaggaggcatctaatcggccgaaagtgtcaattgaatatggcgcacagcatgt

SEQ ID NO: 4707 - DNA, 285 bp, Oryza sativa
  unsure (1)..(285): unsure at all n locations
gcgatcctctgagtcacctgcngctgcagctgatgcttactattcccagcatgctggaacagaatgattgtgttatctactaacaggctaatactcatcaagagaatgtcacangctagcatagctaactctgtgtctttattgtctatctctatatttcctacaccaaactcatggttgcatgattaattttggatggccaaacatttgctttatagcaccacacgcgcaacatttgatcatctcttgatacgtcagctcgcagcctgcatagtatctctgcac

SEQ ID NO: 4708 - DNA, 459 bp, Oryza sativa
taagcatagaaacgacgaagatgttcaatgttccttgagttgtctacgagagtaccgtcttcgtgcttgagtcggtaggaacctggtcgggtgacttcagagatgataaatggcccctcccataaaggagataacttgtgccgatcccgtgtagtttgaattttcctcaaaaccaggtcgccgactagaaaggcacgggatcgaacattgcgattatgataacgccgcaacccttgtaaatatcgagccgaccgaatcaaagctgcttcgcggacttcttccaatcggtgcaagtcatccactcggtcctcttcgtagcgttcttcacggaaatttcgaaagcgcaaagattcgaattcgacttcactcggcaacattgcttctgccccatagacaaggaaaaaaggtgactggcctgtggcccgactgggtgtagttcgcaaagaccaaagcactgat

SEQ ID NO: 4709 - DNA, 455 bp, Oryza sativa
taagcatagaaacgacgaagatgttcaatgttcctatattgtcgacgagagtaccgtcttcgtgcttgagtcggtaggaacctggtcgggtgacttcagagatgataaatggcccctcccataaaggagataacttgtgccgatcccgtgtagtttgaattttcctcaaaaccaggtcgccgactagaaaggcacgggatcgaacattgcgattatgataacgccgcaacccttgtaaatatcgagccgaccgaatcaaagctgcttcgcggacttcttccaatcggtgcaagtcatccactcggtcctcttcgtagcgttcttcacggaaatttcgaaagcgcaaagattcgaattcgacttcactcggcaacattgcttctgccccatagacaaggaaaaaaggtgactggcctgtggcccgactgggtgtagttcgcaaagaccaaagcact

SEQ ID NO: 4710 - DNA, 423 bp, Oryza sativa
  unsure (1)..(423): unsure at all n locations
tcttggtgtcagcttgcaccctcaccccctcccctatgactctgatagagacgaacatganagcaaccacacacaatttagtcatgattcatcaattaatcaagatgaattaatatgtaataatcaagattttttttggtcacacgtactctttgagcttgatctcgatctctgggtacttagcggcgaagcggtcgatgtagtccttcatgttggggtacccggcggcgcaaaggaagcggccggcgatggacggctgatccatgcagaagacgtgcgcgtcgcagacgtcgtcgatgtgcaccagcggcacggagcccagcagcgcctgcagaaacttgaggacgttgtggcagagctcgtcgccggtgagcggcgacatgatcaccgggatggtgctccacaggtacggctggagcgtgt

SEQ ID NO: 4711 - DNA, 468 bp, Oryza sativa
  unsure (1)..(468): unsure at all n locations
tttgcatagcttatggggtactctgaattgttctcgatgtngcctaataattgatttggttcaaagccaatggtaccaacaacactgctgtacatctcacttgccacanaagctgaagtgatgtttcggtgatacttctccaccccttgtaagtagcacttgtgctcggcacaatgctaactttccaataatcattccatttacccttatatgcatggacacgccacggacaatcttncttcatgcacctcacttcatacacantaattngtgacttgaccaccctaaactctctctgaaggaaactgccaatgcttcanncgctctcatctcatcttatgncatatcttgaccctcaatacctcgtctcttatactccaggacatgacacctctgtatacaagtcagagagtctcattgccatcagtgcatacatacttctatcgatatgcgcgcgcacttctatat

SEQ ID NO: 4712 - DNA, 436 bp, Oryza sativa
  unsure (1)..(436): unsure at all n locations
tcactcnctctataacattngaaacaatcatcaattattttctgccaatgaaaccacactctcctaagcaaccaatttatcttacgggccgattgatgaatttcacaaatcccttcatgtactactctcctagcaactttaaactgatcattatctaagtaatactccatctatttttcggcgatataatatttgagcgcttgccgccgaatcttctgatcaaccttaagtgtaggatcttcaaatatctaatcgaaggaattctccaagctatttctaactcatgggcacaaatgtccgaattcacaattaattcggccttttaatcaattgtaacgtgccccccagctctcggcccgctatcggtcagaccggccacgcaatgccggtcagaccaccctgtctgtccggtcagaccggccatgtagagccggtc

SEQ ID NO: 4713 - DNA, 455 bp, Oryza sativa
tatagccatgaatcccttcatgcatatctgttttttattctgctaacaaacatataggatgagtagtatctgatataaatataatactcgagaaaaattcaagtattttaaaatatttataaatatgtatttcttctcttgtcaattttgatttccccgagcagatgactcattacgtttaaacactctgcccgactagtcatagccaccatgcaccgggagtcagcctaagcacttcccaaacatgcatatgagtgacatgagttcgtcattaatggaacaaagtttcacgggtcggagtttactactcgggtacttttgcaattattaagagcagaaaataaattatcttatctctatgcttttgaatcattccgaataatacttagcaccttgcgttattcgatccatccaacaagcccccgggtgctatgaatcaggccaaatgctactat

SEQ ID NO: 4714 - DNA, 466 bp, Oryza sativa
  unsure (1)..(466): unsure at all n locations
tgcctagcaactaatgctcccagaaggtcacatgattgcatactatgtttaataaaaatgatatctgatttcaagttactcacccttcttgtatgaagtcgatgtgccttctctcttggtctgaatacattataagggtttgtatcattcactggtggaggcggcttcacgaaaacaaaagcaatagtcaacagtaatgcaaccgagaaacaagaatcatgaaataacagagtaacagttcctccagtcctccagacttgagcataacttggacaaaaccaacctgacaaaaacttatattctatggctgatggcttacaaacccaactattcattgtcagtttggtgcatccttcgttttaatcagactgcttcaacaaatgttgtagtttggtacaactgtatggatgtttntatgcaccaactgagtgaattagcatataccatttaatcagactgcttcaac

SEQ ID NO: 4715 - DNA, 383 bp, Oryza sativa
  unsure (1)..(383): unsure at all n locations
tgggcgccgtgcttggagtggagctggaggaggcgcgcttgattttttgcggccgccgcgcgcgacgcggagcatgttggcggcggcgtcngcctctgcgtccttggagacgtggcggatgtcgtatgccctgagcggcggggtggcctgggcggcggcggcggccttaaaggagacctgcacgacggggtcgcccttgaggacggcctcgacggcggcctggcacgcctgccactggcccgaccagagcaggccgacggagccgtagatcgggttgacgatgcggccgcaggcctcgtataggagcgagcggaagacagcggtgcggaggtggtcatgcccggcagcgagcatgttgagaagcccggcgcggccgtataact

SEQ ID NO: 4716 - DNA, 405 bp, Oryza sativa
  unsure (1)..(405): unsure at all n locations
ccgcgatcttaagtgactgagctgcagctggggctagaggactactactaatgcgtgtctactgccgtntcagcgggaactgtctgcactgcttatgatcgcaaccaaccctgcgcgccggcgttacaatttatgttgacagtatatgaattttgcattatcgttatatactattcgggtgcaccacgcgtatggcaccatactgcttataaaatacgcccgcctgcctctcgagactgtgattattacattctgcactggacctccaacggtgataactgatgcacggatactcttgtgctgcgtatattccatgtgaacgggcaaaatgtctttgcacgtaataactggactacaggatgtgaaaactatcataacttgggaagcgttccgacaccattgata

SEQ ID NO: 4717 - DNA, 257 bp, Oryza sativa
  unsure (1)..(257): unsure at all n locations
cgatgggtcattgcccaacctcctaatttctcccccacaagacctatactatgggtttccctctgctcattagcggcacgacgataggagagaaaagcttgacgaagatctgctaccggcttcttcccttcttcagcaatgacaactataaccgcaagttgctgccgntagaatttttgctgacgagctcaccgcctatcaatccaggatggtgaccaggtggagtaaccgaactcatcgacgctagatctgatgtg

SEQ ID NO: 4718 - DNA, 451 bp, Oryza sativa
  unsure (1)..(451): unsure at all n locations
ngcagaagacatttatctaaaagagagtcaatttcttccgtatacaaattctgatgttccctttcctcagttggttcctcagtagcattatcttcaggcaatttcacctcactcacaccagcagttaaatcttctatggcctcaacgtggatgtcatgatctgtggtatggctctcagaaacatcaactgcagcttcttcaccttcaatggtactgtcatgcatgccttctacatgatcttcagaagaatcagcaggttgagacggtgaagcataattacgatcttcaacaacaatgtcctcataaaatccttcatttggaacatagcgaccatcagcagaatccctgcaataaaatctaataatgttaacttaagaaaagctaagctcacaagtgaattcagatctagccgttgaacttgccataatgaatccttatagtagtgagtaat

SEQ ID NO: 4719 - DNA, 468 bp, Oryza sativa
  unsure (1)..(468): unsure at all n locations
actcagcttanataagttggcgttaagacacttcaagttgcttattgtataagctacacctttatcaagcaaggccctgaataccattgctatgcaaacttaagcaatatgtgactagtaactctattctattttgcaggacttgttagacaaatacttactcggatccaattatatgatcgctggctcacacaagaatatgcctcttgctacaagagagatggagcaacttgttgctgcaaattgccagcttatcagcatgtttagggaggatatccaagttctatgccaccaggatgtttcgatgagatctgttaagaaagttctgctctctcggtttgaagagttgctggagaaggtatgttcttatatgtatagagatcttaacatatgtagaattcttgtattctgatgctaagactgtaacacacactaatgttcactttattactggacatggaagctata

SEQ ID NO: 4720 - DNA, 181 bp, Oryza sativa
aaacgcaaaagcgtttggccaaaggcttaaggaagtcaacgacaaacacaaatagtcacaaacaatagaagcaacgaatccagtggaaaaaaaactcgataaaacacgtaaaaaagcatacaaatatatccacaaaaactagaagaccaatgtgaaggcgagacaaaagaactgcaaagaa

SEQ ID NO: 4721 - DNA, 452 bp, Oryza sativa
  unsure (1)..(452): unsure at all n locations
tccaagcgcgctctcaccctccattgcaccattcttatgtttattgactntagcctaccttgcatagtatattgaagcaaggagttgtgttataacgctgtgtaaggtaagaacagcttgcttgtacctaccttcgggtttcccgaaagggaaaaccgtatgtaagcttatctgtttaatatgaagtaattttccttaagtattcctgcacgtttgttctagacaagtgtttatgctaaggaccctataagagaaacctcttcggtttgttctcagttttagcctgcatcttgcataggcgtctggagaatcggaatccgtagagaagtgttcccttcgggtggaactgcctcgggagacgataaactcttagctagaacaagtgtgacttggaatatctgtgtaagttgcttttaagaagatagatatgtgatgcatactgtgagtaccga

SEQ ID NO: 4722 - DNA, 88 bp, Oryza sativa
ataacatatactagctgataattaaatagataattaaataattactatgtagtattggacaccacgtaaattttattattcgtcacat

SEQ ID NO: 4723 - DNA, 456 bp, Oryza sativa
  unsure (1)..(456): unsure at all n locations
tacccttatagcgaaagtcgttcgtggacctctgcatcttctctaaagctctacaagcctgngatgtttggtgaagcctttgccatctttgttccattcttgtttatggtgtagaaccagctttcttagtttgtttctgctaggtggagtcggagttgctttgttgttgagggtgtgttgaagcttggcaatgataacatattattctctctttctaagggtgctggtgctaaccatgtataggaagtggcacttgttggcttaggcttatgtccatggtgggaaatcggtggtgtttattcgttttgacaatgcctctggcaacgatgacacgatcactgtagagtcaaagctgttgtgtcgttaggtggcaagctcagcaacaatgacacatgtttgcaaagttggagctgttgtgttgtactctttacgacangattgatgttgatccttaca

SEQ ID NO: 4724 - DNA, 460 bp, Oryza sativa
  unsure (1)..(460): unsure at all n locations
ntgaccacaagcattgccgggcccacaaggtcagaggatgctcatccaatggagggtgctcaagccatgtggttaaagattcttgctgactgccggtgcacgtggcagaatttataggttgctgggccagctcaacgtggccgcagaatctatctactctctcactcactgctgctgcacagacggtgtcgctggttcgtactctttccttccgtcccataaaacatgacatagagcagtgtcacatcttgctctgatttgcattttaagagaccaagtgagtacagaagatgaagatgaagaaaaccattagctcaagattaattaagttttaattattacgaatctttaaaattaatttatttgatattttgaattaactnttgtataaatttttttaacgaaatataccgtttaacaatttaaaaaacatagtaatgaaaccgatgtaaaatatgta

SEQ ID NO: 4725 - DNA, 129 bp, Oryza sativa
gccttctcgaggggttcaattcgcttcttcattcggcatcttggcagcttggactatcatatactcaatgattatctaaacaccacatcaagtcagaatgggtccagtaggagtaaaggtaccttttga

SEQ ID NO: 4726 - DNA, 466 bp, Oryza sativa
  unsure (1)..(466): unsure at all n locations
tatcgngtgttntcgatgatagaggctagttgatagagcttatatgactagatcaatctagattataatatatgataacttggcgatttgcgtagacaggattagagtgtcatgaagatgtaagcactaatcccgagagcgcaagccgccatgacaaaatttacctcttcgtcggagatcgaactcgatgcagcccaactcgaaagcaaaaactcgtagaaacaatgaaaatagaaaagagtggcgatgcgccgaagtgtattgaaccgtcgtcctcttattataaggtgtcgggtcatatttatacccgaagtacatgatatgtccttactggacatgactcttatttctaacacaatttanaatacgaatgagtccttcaggtggacccttaccaaaatatctctaaggaaactagaaaatgtcctaattaatagatacaattgccctttttaggactcctatc

SEQ ID NO: 4727 - DNA, 463 bp, Oryza sativa
  unsure (1)..(463): unsure at all n locations
tggaagtgtgtgtctgagtgaaggagtgaagctccttatatttatgttgtatgacggncgggagacagggaaatgtacgaactaccccgcaaccgccatcatggagtcatctggagcgtcgatgccaaaccccaaatccaacggtggagatggtggttcggccgaacctatgctgggccctcctggcctggcctttggcctgtggactccctctgttctgccttatccatttctatgaattttgggctgattctctggctatttgatgaagttcacaacccatccttgtatggatacatgtttctccctcactctggtctaattttcctcccaactcctgggtttattacttgcatcaaataaacaccaacacactgtggaatatgtgagatttaatacctatcactatgttggatggtttattatctggactntatgcagatgttggcggtatagaattggc

SEQ ID NO: 4728 - DNA, 185 bp, Oryza sativa
caccacatctgagtcagggggatctgtaacttaactcaacgatatcttctttttctttatcagctggcaatggccattttaggttgaaattcacaaacgccggataatgccatgcaaaatgaatgtactccaagacggtctaccatcgtgtacacagctggtaatttgaactttttcggttatgg

SEQ ID NO: 4729 - DNA, 454 bp, Oryza sativa
  unsure (1)..(454): unsure at all n locations
tcgccgctgcctncatgggattcgcagctgcgaagtgaagtccggtctcttccttcgtgtcgccgcacatcgccggaaagtcgtcgcctccgtggacagtacctcgccgcccttcggagctcgtcgccggccatcttctgtcgctgcccgtcatcgtgtaagtgttggtaagaatcgccgtcaccttctctacctcccggtgccctccgtttgcattattgtaccgtggttcgccggcaaccgccgctcctatgtcgttcaccggtgtagtttatccctagagtcttaattccatctaatctaatcttgtttggccctagcgtcatcatcgtctccgtgtgttgtcgtcggaccgtagccgtcgcctcttcctctccgttcgctaccggttctcggtgaggcctcctctccgattcctagggtagatgtttatgtaagccacgtgtgtgtcgtc

SEQ ID NO: 4730 - DNA, 335 bp, Oryza sativa
aagcactgagctgcagcttcatactgctgcataccgctctaactattctatctttagcggctgttctacgtgaagagttgcctccgaaaaagctcatctttaataggtcagtaatcttttaccctatgagctacagggaacatgaggacctttgctactacgtgcacgaccactgctatcagggacatttcggactgctctcgtttaccgtgcatccacaaagcgtgcgggctcagctatatgtgcctatacggcgctactttcatcacaattcgcccagaacggtattattcttataggcacttggtgggttgtccacgttatctcaagtgcac

SEQ ID NO: 4731 - DNA, 385 bp, Oryza sativa
  unsure (1)..(385): unsure at all n locations
gacagacgttcatgtcatgtacaggaggataagcacgctgtacttctcctgcagcgatcaatcaatttgtgtcaccctctatggcgattggcgtgttccacgctgatggaaagataggagtgaaagctacagtgaccgattaacaaacagtatcagcttttactgagagtgggagccatgggctaataatggtgaggtacagtactggtcattaacattaatccaattnttattatgggtggctgatggacacctatatacgaagccttcttttttcgtccatgtaaatgtggctgtgcagtacctaattagtcggccaggacgatcaatgactcaataatagtctgcacactaatgcgtgtgtcagtcgaacattggagaagat

SEQ ID NO: 4732 - DNA, 309 bp, Oryza sativa
  unsure (1)..(309): unsure at all n locations
tgtacgtagatatatattactatgtgtctgtaaactcataccacttagaaaagctcaatacaccttaattataatatatgaaacgaagggagtagtgttatatcatctatatgatatgtctattcactcanacaatagtcttatatatacttgaaaaacaactaaatagatgctaacatngtatacgaatagtactgtatattatataatntgacaagtaatggntatataaataatagtattggctaaataatcctcacgtcatggtaaatgcngagaataatcatgtatttatacatacataataat

SEQ ID NO: 4733 - DNA, 388 bp, Oryza sativa
cttgacgataaaggcattaaaaatatgcagcatgacctctgtcacttcatccattgcgagtgctgtcataaggatgtaaggatggacggttcttcaacacagaagacagcctatcgacaagtgataaatacaagtctcttctggagtggaacaatgcaatgccatgatgtattaattagatagtgcattcaaaatgacaactgtaaaaattattgtaatatattgacaacacttttcactactgcaatatatgtatttatgtcagtattaaatgtttgttactatctaaatagtattatgtattaattaattaattatttgcaacattattgattaaaaattattcttaaaaaaattggcgggaaattttaaattttggcgtgcatat

SEQ ID NO: 4734 - DNA, 414 bp, Oryza sativa
  unsure (1)..(414): unsure at all n locations
tgggatgcatctcctgcccgtttctccagaatgcgcttctgtttattatttcactctttcttcgtactacactacttctaccggctggagcggacaactaaatcatcgattcccttttctttcaggatgcaaccccgattcatgtactttttacttgcgagctaantacttgataaaatggatttttaggcaatngatnggattattcattgtcactactagaaaatcgtgtttcagatggcccaaacaattnttgcngcngnggaanggactgcggatactatcgctcgcctgcgaaaatcatctcagcanatgaaaaaatcccacaccctaccacagcgccgcgcgggctccctcggtgacgtctcttgtcgcaccaatagaaggagaccagcgcgcttctctcattgagct

SEQ ID NO: 4735 - DNA, 384 bp, Oryza sativa
actaagctttgcacacaccgcaggttctcgatctcttcgattttgttttttgtcgaaacacttacgctcgcggctcctgaaaattcttcctaacctgaatacgcctgaaccggttcctcctcaaagacagccgcatgaacctggaccttctccacagatggtggagatagatccgatccgaatgaaccgtcaaacccctacatgtatgtgggtgctaaatcaaccaacgtgaacgactgtgactggtatggtaagttcggatccattctgagaatctaaaccgacactaacaaattttggaatatttatcgcactcacaaactctagacctatcttgcacggattgtgatattacttacatatttacaactgcgagctctttaa

SEQ ID NO: 4736 - DNA, 377 bp, Oryza sativa
accgcacttaagcaccgagctgacttgcaccttcatctatggagccctgagctttattgtgctgctttatcactaatcggcttacggcatgatactacccagaccaagccactcggctgcgcgcattgatcggaacccaatacatagacacctggttgaaagaccctattctttatatttgttatccagactgcacgtcgcgcaaagctcagacgactaccaggtacttgtcagtgacaggacttggagagaacaacgaatctattgtaacaccaaccatgacagctagatcgatgatctgcagcaggacttgatatgcttatgcagggcccatactaactgaactaggaaacttaacttttttacaaaactcactg

SEQ ID NO: 4737 - DNA, 461 bp, Oryza sativa
tgtcgtaagcacacttgatgtcattatcgtggtattgttctattgcgtggcttcttgatacattgcgtataaagccttgtcttgctggaaataaagatggtcgcattgtgcgttggaaatttttaccgggaatatactaattctttgtttgttttgggagaactaccggttgattgatacaagtacacatttaagtagtgttggtcttttgtataagaacatgcatacttttcttatttcctaatgaatattcaaattatgatgatctgagagtaaacgctgaaattctgctgtctaaaacttacacaaaatttatagaacttcctggttgcgtgaggatttgattacataatttatttgcgcgccttcatatatccattcattaccaatcgacataagcttggctttagtggtactggtaaactgcaaacgcagtatgcactagtagtttcttctatact

SEQ ID NO: 4738 - DNA, 272 bp, Oryza sativa
ttcttggagcaacatctttttgcctgtaaaatggtgctcctgctctgaaaatttgcggagagtgctagtgcaatcaatgtgaatgtaaaagccatctgaggcagaactgaacatcattgaacaatctacttgtctaattgaataagagtgatgctcacttagtgctatgcttgatgcaaatcttgattacttacattgcgcatcttgccctgtgtgtactttgagatcttgtggttccagaggcccggtgcatgtgcgattacataatatgt

SEQ ID NO: 4739 - DNA, 455 bp, Oryza sativa
  unsure (1)..(455): unsure at all n locations
actcagcttgccttagtcataccatcgggcagagagttatattgactattgcttagtctctcatcctcagcttgaagactcgaccataccattgaacatactctggcggtccatacggtccagtagttccaagtggaggataagcagtcctgacatcgacgcgcgaaggtgggtttctttcaatatacattccaacaggtggtggaatatcttctgctggtgcaagcatggcatcctcaccaaacatgaactccggtgtataatgtccctggcgataccttggcataatgcttctttctaaagtggctaccctggtgcggacgcgttgcagctcatcaaaggttgagtgataaagcatatctagtgagcgcacaaagtttgcaagttggaggtatggggtatgtagtcctacacctatttcagctaaccctgngtaggtagtgtgttgagctccc

SEQ ID NO: 4740 - DNA, 408 bp, Oryza sativa
catgaaactaagcttagaccagcataactgatcaatttatctcatatttattacagcgaggtttgccaccaccattggctcccaagatagcttctcccactggtcgtatggtttctgggtctaccccttctcgcctctcagaagtgatccactagtcaaaaatattatgcatatcccacccatcatttaagagtcagagtctaccaaggtatacatgcccgggctcaataaccgtgacacggtattcaatatatcggttactcacactgcagggatgacacttacccgtctcattgcaccccggaattactaataattccgaacttattggctaaatctcgtcagaatcaccgggtcacaactgacatttatatacaaatctatataactaaacataatcttacttga

SEQ ID NO: 4741 - DNA, 351 bp, Oryza sativa
  unsure (1)..(351): unsure at all n locations
atgccaacaatatttatataacatattaacagggatttacgataactattggnatgtcgtaatattatacttgttctgtaactcatccacttataaaactctatcaccttaattataatatatgaaacgaacggagtagtgctatatcatctatatgatatgtctattcactcaacaattagtcttatatatactcgaacaacaactaaatagatgctaacatgttatacgaatagtactgtatattatataatntgacaacgaattgttatataaattatagtattgtctaaattattcctcacgtccatggtagatgcaggagaaataatcatgttatctatacataca

SEQ ID NO: 4742 - DNA, 379 bp, Oryza sativa
  unsure (1)..(379): unsure at all n locations
ttgacgataaaggcattaaaaatatgcagcatgacctctttctcttatccattgcgagtgctgtcataaggatgtaatgatggacggttcttcaacacagaagacagcctagcgacaagtgataaatacaagtctcttctggagtggaacaatgcaatgccatgatgtattaaatagatagcgcattcaaaatgacaactgtaaaaattattgtaatatattgacaacacttttcactactgcaatatatgtatatatgtcagnattaaatgcttgtactatctaaatagtattatgtattaattaatatattatttgcaccttattgttataaattattttaaaaaaattggcgggaaatttaaaatttggcgtgcat

SEQ ID NO: 4743 - DNA, 170 bp, Oryza sativa
actatggttacttggtcctggggcaaaatctggaatttatgatcttcgaaagagctaaatctatctatcagctgatcagatcaaatggcattcatgctatgaacaagattagaatttgcaggggtttgttttccattcgcaaatgatcataatgcaatttgcagcccaat

SEQ ID NO: 4744 - DNA, 401 bp, Oryza sativa
tcatcttcttgtctcgatctctacacatgtacagttacattatacagtagcagcagcgaccatacaaacagtaagtagtggagtaatgacagtgagccagtgaccacagtgaatgtggatttacatgtacgcacctttcttttcttcttcctccgcacacagatcgagcaggcattgttgcatgtttggagctcgccattgatgggcacgacgcatacagctaagctagctgtctcctatgtgggcttgagatcttggaacatggactcccatcgcatgtcctcgccgtcgtcgtataggtcgtcttcgtcgtcgttgcagcggtggcagcggcggcggccatggcgacggcgcgcataggggaggaggaggtcgaggcggaggcggtgcgtccatgcgtg

SEQ ID NO: 4745 - DNA, 347 bp, Oryza sativa
  unsure (1)..(347): unsure at all n locations
caaaacgcgcgcacataacngcaaggagaggttttttctatcaatagccagagcggggcgggattcgctagaagaaaacttattctgacagaatctgaccaccaatctcgctcaggaggaaacactgtggggaaaaagcctgccacacactggaggggccagactttctatacaagatccttggcaacacacacacatgtcctgtgggtaggctatccaatacgtgacaatatgactgcccctgataaagaaaaatcacttcgaatcgagtcgcgaaaaatggaagatatgtacttataatacaacgtgaacatggagtgcaaagtcatgacactggaaggggtgga

SEQ ID NO: 4746 - DNA, 473 bp, Oryza sativa
  unsure (1)..(473): unsure at all n locations
ntactggttgacaccttttaagatgcattgtaccaacttctatttgttaagtaactgcggtataaaaggattttaaggtattgggcacttgatcacgcgcactttggcctaagcaaaaagtgcctaagtccctaaaagaacgtgacaggccacacctgaaaatatgggctgcagacatattaagcctaggccaaaacatatgccttcgacaccctttaaaggatgacgcatataacatgctcccgagtaataaatcttccgggtaatatagaccaagcgtaactcatatgaatagcttctgatctgagtggttatcccttatgggatactccaaaatagatgtaacaattgaatcccgactggcgcaagtattcagttgataacccttacggggaataataaatagtccagtctttgagcatataaaatagacccatgatcatgaattcatgttgcatgtatccggagcaagg

SEQ ID NO: 4747 - DNA, 322 bp, Oryza sativa
  unsure (1)..(322): unsure at all n locations
agcttaccaacttctgccgctgattaagtgcttgaattttgtggcgttcatactcatttcgccgcccctctttcctcaactgcattcaggaaacagtaagtgaggtttacttctcataatgcttaccacaaaaatagttcaacagaaacattacataaaaaggggttagagatgaatctctaagtagatacggtcacatcatttntacccgttccttgttctatatgaaattatttaaatgacatagcaattttgcagttatttgctttaactgcatattannaatatcatacctgcangaagttcttttcacggggtagct

SEQ ID NO: 4748 - DNA, 469 bp, Oryza sativa
  unsure (1)..(469): unsure at all n locations
tctcanagtcctcataatctctagagatcaactggttggttattttatcatcaagaccagacaaaaacttctgctgcctctcggcatcagtgcgcacgtcctcatgagcgtagcgcgcaaggcggatgaactcatgcaaatactctataactgttctggttccttgttgcagagaacgaaactctctcttcttttgtgccacaatcccctcgggaacctgtgctttattgaaactcttacaaaactctgcccaagtaacctctgtcccagctggacgggtcaccatgtatttgtcccaccaaacagaagcgggaccttgcagctggtgtgtagcaaaagcaaccttctcctggtcgttgcattgcaaaaggttcagcttcttgtaatagcatgaagccagtcgttggtctcgatttggttggtggtgcctgagaaagtcggtggctcgacacggagaaactctacagct

SEQ ID NO: 4749 - DNA, 345 bp, Oryza sativa
  unsure (1)..(345): unsure at all n locations
gcttaagcactacttncaggcccacaaagtcatatttctatcacagtaccccttaggcaaaatactccgaggcaaggaagtcactggccggctcagcaagtgggcggcagagctatccacgttcgacttacattntgttgcacgctctgctatcaagtctcaagtgctagccgacttcgtagctgaatggacaccggtacttgtccccgaccccgagctcgccgaacaattctgggtgatgtgctccgatggctcgtggtcgcacaagggagcaggcattgcggcagtcctattttcgccgaaaggtgtgccgattcgatacgcagcaagactgcagttcgacac

SEQ ID NO: 4750 - DNA, 433 bp, Oryza sativa
cactaatcacccagaataacagttatattttctctttcaacaagtacagctacaatcacctgcactgctgctgatcgctcgctcgctcgtgcatcgggatgcacgctaattacaaaacttcccgaagattagcggcggcgattatcgatcagcaagggagcaaacagaagcaacaaggtccggattaagggactaatggcagattaattagctggagctagtaggagcaggcgaccctgagcatggagcggccgcggagcatgccgcggtacagcgcctcccggatcgccggcatcgtcgtcgccgccgtcgtcgtcgcgttcctgcacgacggctcggccgccgccgggcgggacgactcattgctgtcgttgtcgacgacgtctgcggcgaacctcacccgcttgttgctcccgcgccgcgccgacttcct

SEQ ID NO: 4751 - DNA, 423 bp, Oryza sativa
  unsure (1)..(423): unsure at all n locations
tgttctgtgaagtgtgcctaaacctatttggtggcatacctgtcatcnttttccagactaccagntgatgtatctatttgcctgaaaatgttatgttgtaagcctaccacagatagctggttctgttgacacaactgataattattgcagactgcaccgattactcccaagaagattgcacagcctgatcatatgcttcaccatcaagaggaggactcctgctctgtgacttcttcgtatccttcttctatctaataaaaatacaccgtgtttctattttttttgggttgtactgtgatgatgtattctgcctttatttcttgtgaagatgttttaaaatattgcatgagaaaattcatttcacataatgatcagatatttggtttccattctagagtgatgactggaaaaaaaatcgatgtt

SEQ ID NO: 4752 - DNA, 364 bp, Oryza sativa
  unsure (1)..(364): unsure at all n locations
aaatcactatcttacaagatgtttgcacgtgatacacaagcttcacgaagtgtgtaagtttataactattgtgtatttgtgtatttttcaagtacaaaagtggttctcttgctggtttatgataattaatcacctaggcctgacatatttgttcatctttgttggaatataacattattgttttccttgtaaatgaccatgtcactatttttatgctcgccatcaagttcaaccaaaaaaaaaaaaacttctgttgatgttttngtgtcttgcagnggtccacctacagagtgtttcatgttccattctcgagctgcagtggccaaactacacactgctgatgaggtgatgctagtctaataca

SEQ ID NO: 4753 - DNA, 393 bp, Oryza sativa
tcgcagagatgacctcgactacttggaagagcgaaggcggtgcgcggtcctctgagccgcgcgctaccagcagagcctgcggcgctaccatcagcgccacgtccgggcccgatcactctgcgtcgacgacctcgtcctacgccgcgtccaaacgcgtgctggattgagcaagctctcaccaatgtgggagggtccgtatcgagtgatcggcgtcccccggccgggctccgttcggctggccactggcgacggcacagagctgcctaacccgtggaacatcgaacaccttcgtcgcttctacccctaaagggggatcgggtgtcaggtttcgggctcgggccatccccgtacccctctacggcgtgcaaggttggcacgcggctaccacatatc

SEQ ID NO: 4754 - DNA, 370 bp, Oryza sativa
  unsure (1)..(370): unsure at all n locations
gcagctatcgcgcgagtgtgatgatncaatttttttttaagacaaagcgagatgagagtgttgctctctacaaaataatcaatgttatctaatttttagatgttggtgatttgaactcaaaacgagtgtgcattggtacctgttaccgctgttgtcagacgtttatggcgcttgttttgttatacgtcaagctgcgggtttgaatgcatgtatattggctctttaagaataacaatncttggcattncaaattaatattattatatatgatcgaatggagtctatctcattcaaaatagcatttttttctattgattggttacattgcctatacctgaagatttatttttggcgacatgcccttactgct

SEQ ID NO: 4755 - DNA, 395 bp, Oryza sativa
  unsure (1)..(395): unsure at all n locations
actcagcttaatacttagntctacttctcaggtgcagcttgatttgaccgctgctttcattttctggctgcgcagaacaattctcagcttcagtttccaactctgatggtggatcagcctccaacttcatttcctcagagctctgatcatggcagttgtgttcaacactcgccatcagtggctcactgtggtcattttcctcatcatcttcactagaagatgacatagaggcgacctcaggaattagaggtgtcaagctgcttgaaggcaattttgctattgtggctcctccagatctgatcttggactcaatagccttgatcagcgaggcagcctcctcaggaggcacgacacgagcaccacaagcaagagcagtagcatgcaccagcgagttt

SEQ ID NO: 4756 - DNA, 389 bp, Oryza sativa
  unsure (1)..(389): unsure at all n locations
agctntgctntcttctaatatattgacgtgtaatcttttgtgcgttcgcgaaaaaaacagccagagacaaggagaaaaaagataaaagaaagtgtgatgagaaaaccaacgttgtcctctatatattatatttattggaaagaagagaagaagcagaggatagaaggactagtggtaatggagatgcgaccagcgtttgatcgacggcttgattnttgaagcgccgatcaccgaagagttgtgaggaagacgacaagacaagattcaagcagataaataggagcatagcctggaaaaaataaaatttcaatgacggccagcttaatgtcgaaataacatcatttccacgagcgatcagcttaagtgaccacttttaanaatataatttt

SEQ ID NO: 4757 - DNA, 467 bp, Oryza sativa
  unsure (1)..(467): unsure at all n locations
ngctgttcttgcacttcagtccaaccagctgactgtggctattccagcatcactcggcgacctaacacagcttgcacggcttgatttgagcttcaacagtctttttggttccatcccttcaaagattgctgaggttccattgctcgaggtctttgatgttcgcaataattccctttctgggagtgtcccagcaggtaatatacccttttattacctttcttgagtaaaacttttgctatgtttatatttatcactgtaacttgttgtctggatgctaggattgagaagactgaatggtgggttccagtatgtgaacaacaaaggtctttgtggagttggcttcagtttgcttgatctttgtttgtcatcggaggatggcttgaaacctagtanacccgagccttttggcccagatggtactgtcaagacaaggcaagttcctcaatcagcgaatacggacaatcact

SEQ ID NO: 4758 - DNA, 276 bp, Oryza sativa
  unsure (1)..(276): unsure at all n locations
agctntactgttgctaatggcagtaggccattttctttatttctnttgcagcatngtaaacagcttgtaatcttctatgggtgctgggctgacacaagaacccgcttaactgacactgatgttgtgcattgtaaaaaaaataacttctaccataatgagactttctacactatcttgtgagaagggaaaacgaattattgaacatagaacataaaaatagtagcgcactagatgcattttgctcaaacagggtggtttatagtcaccatgcaccac

SEQ ID NO: 4759 - DNA, 439 bp, Oryza sativa
atggactatatatatgggtatactgctagttttatcttgaagcatgtgatcgacgtggggtctgattaattagcagtctgctgttggtgagtccatttagctagctgggtttttggagcattatgtgctgcctgtactagcctgtacatgcatgccgacagaggacgtgcgcccaggatctagatgtgcgcattctgtcccaaatgcccatcagatggttgcccatcagctgcatatcgattcacagaaccgaaccatctgatggtccatgtctgaaggccatgccgacctgcctcgtagacgcctgtgtgtttatactttctggtgcatgatgtgagtggtctagatctatatgctctgattatgaatacatcgctgtatttgactcttttttaacaaaaacacaagaattcaataattaggttagacacatggaata

SEQ ID NO: 4760 - DNA, 294 bp, Oryza sativa
  unsure (1)..(294): unsure at all n locations
agcttgtgccacaatcatcagcagctagtcattctttgatccgttagcatctntgcttctgttggtttaattgtttttcttcagatgcattcagacatcaggatcagatgacattagcttctgcttctgttattgtctgattaatcacactcactgaagcttgtgcatcaccatgcctgaactgaagctattaagtnaataaattatataggnaatntaataaaactacagattctctggtccaattatcacaaaactacagatttaacaccttatttttcagagaactacaga

SEQ ID NO: 4761 - DNA, 455 bp, Oryza sativa
  unsure (1)..(455): unsure at all n locations
tggtgaaaacttaacgagtcttgctgcagtagtggttaatgagcacaagcgtcttcttgcgaggaaatcaattattgaaaaacgcaaagaagatcttgagcgccaaatattggaaaaggtgtctatttggtactgttcaaagtggccaactctgtgaatttctgcttatgtcatattctctcttttccaggaaaaggaagaagaaaaaaagagattgagtgttctcaagaaatctgcagaagatgaaaggataaggcttctcaatgatgtaaaattgagggaacaggagaggatccgtcgacaattggttgaaaaagataagatagaggcagaagaactgcttcagatacagataaaggagatagcaaagagaggagggaaaaaacctgtccttcagggggtgagaataattagtttccaatcattatanntttattattacgctgactagttat

SEQ ID NO: 4762 - DNA, 272 bp, Oryza sativa
agcttattcagatatataagaaggttgtatttctgtgttattcaatggagatcatactgcgtcggggagctattcatcaaactatgacctctagatattctatacaagattacatataaacttaaagatggggaacacagactgaccatttaacatatattggtggtcaaggtaatactaatgcttactccataagcaacatcgttgctgaggcaagccgtacactgttgaatcgctaagatatatatgtgtatatatatatgcatatataa

SEQ ID NO: 4763 - DNA, 436 bp, Oryza sativa
ctggctcgttctaagctcgattcgagctctgctctagctctttacgagccgaacccatgcctgagtaaaagctcgcgagctttaccgagccgagctcgagctttaccgagcttgactgtgtatttgcatgttcatcttattaatataataaactaatagataaatatatatattagtatctattgacacaataaattagcatgtgttagcccaatataattattttaatcattttctactcttttattagtgtgattaactagaaaataattatacttatcaaaagattatcattaaaatatatattatactacttatggccgagctcggtagccgagcttgcctaaaagctcgaaggtgcaataaactcagctcgagcttgtgtcgagctcgagcttgggcagacgagctcggctcgttgacagccctacactta

SEQ ID NO: 4764 - DNA, 251 bp, Oryza sativa
agcttacaaaagagaggagaagagcttctatagttttcctgaactcttccgaaggcttccggactcctgatttctactctgttcctattccactagcttaagaatactaaactaacttgagagaatatgagagagctcttgcttgaggtgtgtgagtgaagtgagaagaggaagtccttttataggcaagtaatgacggttgtgatggttggaatggtcggtaatacccttcaaccgtcattggggatcaa

SEQ ID NO: 4765 - DNA, 439 bp, Oryza sativa
  unsure (1)..(439): unsure at all n locations
cgtgcacaagcagcttccttgttttctccattctaaaaaaangaacaagacatcccgaagccaaccgtgcagcgctcggaggtggaattactggagtcgttagaggctgtctcaagcaatctgcggcgactaatgactaatgctcgtctgacaaacagtcctcacccacttcggaactatcgaaagaagtatagtaaggtgcaacgactgcaccagctagtacggtcacgcattgcacagagcaccgtccctgacgtggattggtcgcttaatgcaatggaattggctgacaaagtcttcaagtaccgtagcactttaacgccgccgtatgatatgttccctgatgaatgggcgcatgaaccaaacaaagtcaaactcttggtacgacaggagatcatgagagaantttggaaacgtcggtctcagaaaacaactttat

SEQ ID NO: 4766 - DNA, 350 bp, Oryza sativa
agtcacgcggctgcagctgagcgccgaagctagagtgcgactgtctttttttgtatattaccctgcggttagacaagtggcgtccgctgtgaaatcaatggcacatcgtgccgtcgtccgtccgggctgcacggtgcaagctctatggcgagaaagggttgatatgcatctgcggttgcaaggccagtacccgcgaagagcggcggaagtcgcggcgagaatacaatgcatccatctccactgcgaccgacatgtgctgcaaacatagggaggaagacggtctaccacggtctgaggaataggaggtaaacacccctgtgtggcccctgtgcatctcaggaagaccattt

SEQ ID NO: 4767 - DNA, 460 bp, Oryza sativa
  unsure (1)..(460): unsure at all n locations
tcgtggagacaagatcaaggtcagattcaagatacggagatattttagcgaattcgcgcatttgatcccacaacctanaaaacgagtgtaatgtcgtttgtggccgatgtaatgtgttctgttaccaatgatcttttgtacgatggatactggtagctatcttgtatgatcaagacatgtttttagatatccatcangttaaacttgcaaaaatttgggcatcaatttcttgtatgacatttgaattgaacagatgaatgtttcagtctataatttcagcaaagagggtgactactccaatttttttcttcagtctaaatgagactctgcatctttcattgatgataccaatggaaaacagagtcctctgctttcattgctctgtctactatactgcaagtctagagttggcctaaattagttcaaaaattattctagcttatctaaaaacgttcaaaaa

SEQ ID NO: 4768 - DNA, 369 bp, Oryza sativa
  unsure (1)..(369): unsure at all n locations
cttgagtcacctgcggcatgcaagcttcacatcctctataatatgtgaagcaatcatctattatcttcggctaatagaatcccgctcttctaagcaaccaattcatcttgtgggccgattgataagttccacaaattccttcatgcacctctcccatagccactntagattgatcttcatctaagcacttcaacaagacaccatctatatttcggcgatataaatcttcatcaagcaatgtgtatttgaatgcttgccgccgaattttccgatcaaccttaagtgtgggatctttcanatatcgaatcaaaggaattctccaatcttcttctgcttcctgggcacaaatgtccgaatcacaattaattc

SEQ ID NO: 4769 - DNA, 454 bp, Oryza sativa
ctaagctgtaccaaatcttatcgcattgcttgtgaatatccactcttttaaataaggatgtcaaacggcacccttcccttattacatttggcggcacgaaatacccaccattatcgcgccatggataataccaagggccatatatgctttaaataaaaaaatgacagcctgccaacagcaaacgggtttgtcatgcatacgcattacaatgattgtgtcaaaagttctattatagtactacaaaagtagatcagttgccttatcactgcaaaataaaaccaatgttctactgatctgtatgagcactatataaacttgtattagcaagtcaggcgaaagttggtgactaattacctatcattataaagacttgcggtgtagatatgcaattattcttgtatattgtccagtccatttgagtaaacccatgtggaatggaggacgaagacaccga

SEQ ID NO: 4770 - DNA, 223 bp, Oryza sativa
  unsure (1)..(223): unsure at all n locations
gctgtacctnggtatgtgggtacgttacgaatttttcttttctctgagaagccgcttaccaggtggagctgcccgcctccttgggcgacgcgcatgacgtgttccatgtgtcccaactcacgatatgccattgagtggccatcttgcttgccgggtctgagctaattaatattcgtgaagacttgacctacgtggagaggccagtgaaaatcctggacaacat

SEQ ID NO: 4771 - DNA, 437 bp, Oryza sativa
gcaactgcatgcaaaaatattatattattatcatatatatgtgaagtgggctagtccatagtctatagacttacatcctctgggttaaccctgtacctcccattaaccctaaagaattcgcacacgtaatacccgcagaggacagtgcctttatgttgcttgtgacacttcacgacatatcataaaagaaaatagttaaattttgcaattagtgaaacaattggaatacattaagtgagtggagtattaccggccaatatttatgtactagcagcttctcccttgtccgggtctattctccacccttgaacttgtagtagttgtatgcgctgtatggatgtcgtaccatttcacattaaggaggatatttaattatattgcattcatattatacatgcaagagtcataatcacttattactgtaagatgttagaaat

SEQ ID NO: 4772 - DNA, 259 bp, Oryza sativa
  unsure (1)..(259): unsure at all n locations
atatgctcagttagacatgtaaatcagtgtttctggaacctcagcttgtgatacaatttccactttntttggaacgcatctgcgttccacctattggtggttcacttaattgctgtgtgctggatattttgacatgctatcgattcaattatctgaagctaatactcttatcttcaaactcaggtggcagcagatcatttatccgctcatggacccttgtagctnttttgacatgccgacgagttcatctcatgagttc

SEQ ID NO: 4773 - DNA, 450 bp, Oryza sativa
cttaatggcgacaacacgttactttgtactgaaagatatactgtcatcgcagaactgaaggattgatggaagttatatgtcgtgccaagataggccttttgtgttattcccacacacacatattcagtgctagtgtctcaagcatacagagaaaacacagctcctgaagtgctcagttctcaacaagaaagtgaaaaaggtaaggcagaacgcaaggtcttccaccagcatcctgcaaaattcctgtcttttcatagtactcaatgctgtctgtgagtgtctcctccaatttccttggcttccagcccaggctcttcaatttctctgacgaaattggtgtaaatatttcagtcttgccattcacttcagcactactgcataagcaaagaaagtttcttaaaaacagccatgccaatgcaacataagagtattaccttcatttcatagtat

SEQ ID NO: 4774 - DNA, 381 bp, Oryza sativa
agcttgtggcgaatattcaaatttcctctacactatttagagccacctgttgagaggctatcattccacgaggagaatgagcaacatgtgatttttcctgactcaacagacctacaggaaatcgtaagacgaccaagatcaggggtcactatgtttactgagtggatggaaacgaacaaaaggcatgaagatgccagagaattaacatattcagaatttcctacaaaatggacgtgggataagaatgtgaagaaatgggtcaggcgaaaaggacggatgataattggcaggatctacaatgcccattcagcaagtggagaaaggtattatctcagaagtatcctcaacacggcaaagggttgcacaacatttgaagatatc

SEQ ID NO: 4775 - DNA, 425 bp, Oryza sativa
  unsure (1)..(425): unsure at all n locations
tccttaaatggngttggagtgccgtccagtcccaaaatatctgatcttgatcgatcgttagttccaaatcagtaactcgatcaaaagcaggtacatgctgcaatcaaccttattatcaccgacaagaaccatacgcgtcggtttcgttagccaacggcctgnggataatgcattttgcatttactccctccgtcccacagtattagggattttaagtttttgtttgtaacgtttgaccattcgtgttattcaattttttaaaaaatattaaaaataaaaagttgtgcttaaaatactgtagataataaagtaagtcacaaataaaataaataataattttcaaaaaatttaataagacgagtggtcaattgtgtagtaaaaactaaaattcatatatattggacggaggagacgtacctaacctg

SEQ ID NO: 4776 - DNA, 374 bp, Oryza sativa
  unsure (1)..(374): unsure at all n locations
agcttaaaggcaatatgaggcatnggatgctatatctataatcacgggactacgtaacatgtctgaagaccaagcaagagctgagaggtctaatacctcanagtcccttgttgcgtgcaggcttgcagaaggtaatccagtgagcccacatgtgatcaaaatgattggttacaccgagagtctggataagcttggctttccccttaaccgagagttggntactgatttgattctccagtcgcttcctcccagctttgagccgttcataatgaatttcaatatgaacaacctgaacaggaccttggcagaattgcatgggatgctaaagactgccgaggaaagcattaagaanaactccaaccatgtgatggtat

SEQ ID NO: 4777 - DNA, 306 bp, Oryza sativa
gcatcgatacatctaaccttcattgtggtgcttggttgagtctgagtatgtcagcatttcgcttgcttttggaaagactcggaagagcttggtaaaaagcttgagtgtgtgtgatattggagcttccactacctagtagttgataggagcgtgcatattcttgtgtatgtttcttgtttgctactaatcatggcaggattgcgcaaggggatacgagacagtcatgctcaacatcgagttcttcaccttcgatgagatatgtcgacttttccatgtgatgcatatgagatacatgactattaattt

SEQ ID NO: 4778 - DNA, 428 bp, Oryza sativa
  unsure (1)..(428): unsure at all n locations
agctntctactcatggatcgtctntactatgttatatgattatcccttctgaataggcgtggactntaaagcagtagtgacaatgacttgttcagtatgtcttatgtaaaatcacatttaatttaatcaagaactgatttgatcttttagccccaactttactgtataagttgttgggaacttgggatgcctttctggtttctacctttntaggcgttctagtttcccacccaaacgaagctgttgctctcgtacggctgtgtaatttatctctancgtgctaaatgattaccttgcattggaggaacaatattgacgcttaacatgtgttacagcggacttgttcaaactggttaatatgagtacataccatntnttgcataccctgctgatgtaatctcagatcgtctgagaaatcatagacgtct

SEQ ID NO: 4779 - DNA, 436 bp, Oryza sativa
tcactttggacagccctattgctccaccgccacctaaatctccactgatgtcattggttgcccttgccgccgcctccggctcctctcccatcgatcgaagtggggcggagtggtaggcaaggaggatgccgcccctactccccactctcctttcctgcggcctcttttcctgtcacaccccaatctggcaccgccgtacaacggcacctgacaggagcgtgtcgtatgaaaacggcatgaactgcgtcctacgaaaccgcgatctcagtaccagtcccaagacatagcgctggtacccacggtgacaaacatgaatcattgcaaatccttataattaatagaggacttatttaccttaacttatgttgcagctcagacagcccgagaatgcaactggcgacacggacgaggcaaacaccaacaacagcagcagcag

SEQ ID NO: 4780 - DNA, 325 bp, Oryza sativa
  unsure (1)..(325): unsure at all n locations
agctntatatgctcagttagacatgtaaatcatttattctggaacctcagcttgtgatacaatttccactgtttttggaacgcatctgcgttccacctattggtggttcacttaattgctgtgcgctggatattttgacatgctatcgattcaattatctgaagctaatactcttatcttcaaactcaggtggcaacagatcatttatccgctcatggacccttgtagcttttttgacatgccgacgagatcatctcatgagttctgcggatgctgtaatgtgatttcttcaccgacgccatggaggcacttggattttgagact

SEQ ID NO: 4781 - DNA, 453 bp, Oryza sativa
taattggcgacaacacgttactgtgtgctgaaagatatattgtcaccgcagaactgaaggattgatggaagttatatgtcgtgccaagataggccttttgtgttattcccacacacacatattcagtgctagtgtctcaagcatacagagaaaacacagctcctgaagtgctcagttctcaacaagaaagtgaaaaaggtaaggcagaacgcaaggtcttccaccaacatcctgcaaaattcctgtcttttcatagtactcaatgctgtctgtgagtgtctcctccaatatccttggcttccagcccaggctcttcaatttctctgacgaaattggtgtatatatttcagtcttgccattcacttcagcactactgcataagcaaagaaagcttcttataaacagccatgccaatgcaacataagagtattccctccatttcatagtataaat

SEQ ID NO: 4782 - DNA, 438 bp, Oryza sativa
tcataggtggcaaaccaatccctattcgggcacatgtgatatgtgcatgcagtatcaagaatccacttgtcactagtttgtgcacaaccagcataagcaacaagcaattctgcatcagacttctcatcagtaacaactggggctgtaccttcctcttctttcttaccttatggtatatactttccggttctcttgtctttgtcctgtagcttccaacactcagagatatcatgtccatctctcttgcagtatttgcatgacttatacctgcctctggactttgatctcccacggtagctacttgagcttttatctcttgattggggtcttgtgttcttctcctggtggctgccccgaacaaccaagccttctggttgtgaatttgaaccttcagaggtaccatcttctcatctttttttggcatgcaaagatataaac

SEQ ID NO: 4783 - DNA, 324 bp, Oryza sativa
agcttcagttcgaggtattgcagaactggcatatcttcttctttaaaggttacccaaggcacacggcaatcaaatgtgaaaccatttagtttgctgaaacttgcttcctttgtgatttctagttggtttattggcatgtgaacctgtgttaacacaagtctctgcagggagctcatcttgcaaagtatcttcatatcactctcttctaggctgcaaaccctgatatctagaagggtaacatcgctgaatttatcaatccaaccaggaacactcaaacatcttccggccaacttcaacttctgaagtttaggaggattctggagt

SEQ ID NO: 4784 - DNA, 441 bp, Oryza sativa
ggcagtacagcttgttggcgagcgtagtcttgcctatcttttcaactcccacgatggacaccaccttgagcttctcctctccgcacacatcgagcaagttttcaagcttgttcaccgcggcgttgatgccaacaagacccgcggactccatgaaccgcgtgggttgcctagatgaggtagaagatacatcacctctagtggtagtagaagtagtggtgataccagtgggtatgtttttgagcttgttcaggatggcttccacatcggggtggatatgacgcactttattggcgtgctccctgaactgcacgagagaagcagtcgggatactagcgagcaaagttttgagcttgttcaggtcattcagggcagcttccataccatcggcgtctataccgacagaacagacgttgtcggtgtgctctctgaactgcgtgggat

SEQ ID NO: 4785 - DNA, 319 bp, Oryza sativa
  unsure (1)..(319): unsure at all n locations
cattggacaactntggcgatcaatgtcttggtaattaatatattaacatgagttaaaaatgctataacatcatgaaaacacttttagcaataatgtattaagatcgctatcatgttgtttatataaggttggatctacaaacagcacatattcatggatgaagggtactaccacgttacacctaactggatgntttgtacctaccatctgtatgttgtacctaccattgaatgactgcagaattgacaattcctatgctatgtttaaaaataatgtgattcctcaacttgaattttatataaactctaagttagtgcct

SEQ ID NO: 4786 - DNA, 379 bp, Oryza sativa
  unsure (1)..(379): unsure at all n locations
ctttcttgctntgcttgctttctctctctctaggctccatcttctccctccaccactgcgtctcgaaatatccggctttcttgttgtgcgatttggtgcgaggtggtggtgattgcttcgtcggctgttgatttcttcgaggaattggagctgtgttgggggattcaggggggcttcatggtcgaagggctcggggatggattgaggcgtgggagaagaggagcttagcttcctcttcttcttcggtgatcgggtttggggttcttggaatcgcgaggaggcgggacatggcgggagattgggcttgtcacagactcaggtatggattgcattctcctctcgaatttggtttctttccggctgccctccgcgcagcccc

SEQ ID NO: 4787 - DNA, 259 bp, Oryza sativa
  unsure (1)..(259): unsure at all n locations
agctntccaacaagtactcacgtgctagcccagtcatgaaaggaattgaagatagaagtgggtctcacatgttagtgacaaagtaaaaaaaggtagggctcacttaccaaccccctgctcctctttcaatctcggtgtgtcgccctagcgtcgcccgtcccggaggagggagagtggttggcgtgcggaagcggacgatgatgggctgattgtgagggcacgcaacactgcaatgatgatggccactaccatataccca

SEQ ID NO: 4788 - DNA, 438 bp, Oryza sativa
  unsure (1)..(438): unsure at all n locations
tctgccggtttggttcagcggatgatctcatacctacgtgttggcctcctgtcctaggctggcacgatgatatgccccaacccccgtcatatgatgataagcacatcccagctacacttgacgtaaacaagggtgatgtaaataagggtgatggtttacgtcataagtcacatgtggaaatgaagatgacgtaaatcatgttgatggattatgtctcaacaagaacgatcaagcatatcatggtccaattacacgcagccgtgctaggaaaatacaacaagaggtgaactcgctctttgcttaacttaatccaaatttctgtgagaattttatactacctaaatgctctacnattgtattgctcaagtntacacccgaggacatcatcaccacgccaagaaggatgggttacgttgaggacaataatggttacatcga

SEQ ID NO: 4789 - DNA, 481 bp, Oryza sativa
  unsure (1)..(481): unsure at all n locations
gcctgacggacctataaaactaagcttactacgcctgaccattcgttccaaacctagagctattgctacaaacaaatccatgtttcagtaatgatacactatgtttcttatcaagtttgataactgtaattgcttcatgttatttttcaatgaagtgaagcgaatcaacaatgctgcaaatcccatcaccgatccaaaaccatttcttgagtcaccaattaatgaaatggagtagtcctaaattgtcctggtattaaatactagtataatataatgagacaagcaaagcgttatccaactgcttcaactatacaatctagctagtactgtccatggcgtcataatccaccacttaatccacgctttagaggcaccacaccattagagacacacagganagcagtgctatgcattgctataaagtaaaatgagtcaggcaacaatagcacttcaaaagggtcatcttttttttgtatgcaca

SEQ ID NO: 4790 - DNA, 462 bp, Oryza sativa
  unsure (1)..(462): unsure at all n locations
gctngcatatgcacaacatcacattcaatttgatatggtatgagcctatagaanaaggtattntaaccaagcgggttaccttcatcttaccacatgtattaaaccactgaatatgatatggatgtggatgtggatgggtagtcaagccaagcttcttgaccatctcttcacttgctaaattgttgcaactcccgcaatcaataatcattntgacggtatggcctttcacaagaactttgctgtggaacaaattgtgacgttgcttttgctcttcacacttctctttagcactaagtgctagcttgacaattaggctaggatattgatctagcgactctggatgcaaatggacttcctcgatgtcatcattatcttgtcctcctgcatgggcagtggcagctaaagcatattcatcatcacaatcactagcagaagtatactcaccatcagcattcacaaata

SEQ ID NO: 4791 - DNA, 482 bp, Oryza sativa
ttacggacctataaaactaagctttcgccgggtttctattggccgacagctctcaatgatgctgtcgacctggtccggcgatgtagagcgtgtcaattccacgccaagcaaatccatcagccggcccaggccctgcagaccataccactttcgtggccatttgctgtctgggggctcgatatcctgggaccgtttaggcgggccccgggcgggtttgagtatctgtatgtcgcgatcgacaagttcactaagtggcccgaggcttatccggtcgtcaagatcgataagcactccgcacttaaattcattaagggcatcacggcccggtttggagtgcctaaccgtattattacggataatggcacccaattcactagtgaactcttcggcgactactgcgaagacatgggcatcaagctctgcttcgcctcacctgcccaccccagaagcaatggccaagtggagcgcgccaattcagaaat

SEQ ID NO: 4792 - DNA, 307 bp, Oryza sativa
  unsure (1)..(307): unsure at all n locations
tgcggcatgcaagctnggtcgatctctccggatcgaatagctgatgtattttattctgtattggatggaagacgtactccggtcgagttagatctgcccacagccgaagacgtcgagttattttgtgatccacaattcatcttttgaattcatcgcatcaaaatactgaagcaccaaaatgcccctacctggcgcgtgactgtcgacgcttgatgacacgattccgttattcgcgtacaatggggatcgctggtactaggatatacnccacactgaggcaaaagagacggagaccagcgattttata

SEQ ID NO: 4793 - DNA, 407 bp, Oryza sativa
  unsure (1)..(407): unsure at all n locations
aagcttaataactnnctttgggggactatgccgaatcaggatcatgtatttccatgttgctgggcatacgngtgagagcgcatcaccaccataactcttcaccaagttcttcataaaatgccataagcattccctctgcttagcatgctcgaacacaatatgggcggacctttttaagcctttacatgcatcagaacaaaagctaatggattcacatctcctattaccttatgaagatgactcatgaaccactcccaagtatcctaagtttcagcattgatggacccaaaagctaaaggatgcatccagtgatgcccatcaacagaagtggcagctgccaaatgaccattccatcttacattctaagcaacggaatgtatactaatatatggcctgacattcctata

SEQ ID NO: 4794 - DNA, 365 bp, Oryza sativa
  unsure (1)..(365): unsure at all n locations
agcttatctcgatcgangtggcttcaaaccactcttattatatccaatatacttcaacttcaccagatcaaaatgatggggcctacccgccaatcctgatgaaactccacgacgatttggctgccgtcttcactacaagggcgtcttctccccgtaggcctaggcggaagtcggcctcaacaccgatcccgcctagctccagggaagtcggcgtcatactccagccactcagcacgatttcgacggatcaactcgaagtctaccttagctccnccggcgtcgactcacgaccaatagagatcgtggaatacgacgaattccgctaccgctatgacaaccacaacctcgatgacttcgacgagagc

SEQ ID NO: 4795 - DNA, 340 bp, Oryza sativa
  unsure (1)..(340): unsure at all n locations
aatatttntttgcactgctcttcttgcagacaagtttcttctttctatctgcnnacnggcccactaattctgccattttgcaagcttttgctgtcactatctcctcttttggcttctggacatgagcagcttcccatggaatcctgtggtgaccactgtgggcagacaaacaaagtccaaggaataacacatgcccaacatgcatttgacaaagaagatgtagtactactactagtttggatgccttgtaatcttgattgagtgagtggacataatagtttctgaagattgcaatttcaggataccttcttgcttatgatcttgtcctctcatcctatga

SEQ ID NO: 4796 - DNA, 389 bp, Oryza sativa
gcagctaaccatttatttgagaatagcatcttattttatacctataccttcttgtacaaccattatctttatttgagagctctgcgattatttaaattttcttaaagacatgtgttagtggttgcagtgactaagtagcccccaagtctgattaaatcttacaaagcgaatgtgattagtatttgaaactaagtctgttgatggctagatttattaaatgtgatattcagtggattgaggcgataaattccgtcttaacaaagttatttagtaaagacgagaaagtttgaggtctctgttcttatatgttgcacgttttttggacctatcttgtcgtcgtcttcgtgatttcatttaatagtaccatttctctccactcatagaaaatt

SEQ ID NO: 4797 - DNA, 455 bp, Oryza sativa
  unsure (1)..(455): unsure at all n locations
tgcgcgcncgagccgccaagccgccgagccgctgccgccgtctgctatgacgtcaccgctgacgtcatcgtggccgtctgctgtgagccggacgtggaccgatcgatctcggccgtccgttttggataggatcgatctcggccgtccgttcccgtgaaccgctgtcgtgcgcccggtccacctcaaaccctagccgctgacgcaataaatctctttttccttttcaaaaataattcattattgcgtcataattcaattaaaatccataaaagtgatttaaatcgatttaatctttaaaaattcataactaattcatcttagctcggttttagttggttcaagtctctaattttttctaaaattgagatctacatgttaaaaatatctacatgtactgtccatgcttgtttatgtgctggtttggtggttttgctcttttctggttagattccgac

SEQ ID NO: 4798 - DNA, 264 bp, Oryza sativa
  unsure (1)..(264): unsure at all n locations
atatgctcggtacacaacactgcacactagtgttaccacactntatgtaaatagcaaaccagtgtgatgtattacgcatatactcataatatgaaaggacaattatatatcaccgaaggacccacaatatgcagaacactaatgatcaaataaaagtatatgatgtgatggtaaggataatccatatattgcatactattacctagcagaatgagcattaggcttatatatacccataagagaacagcaccgtatttatcaaag

SEQ ID NO: 4799 - DNA, 461 bp, Oryza sativa
tccaggcgcgcacgcggtctgggtttgtttgggtcacggttcctgtacggcaggagagcccacgagtccatgcgggccgtcgagggattccttgcttccgtccacgtctcctcgcatcggttcgccgttcaacgcttcagccgcgtggtcagccagccaccaacaaagactgcccgcgggatggactgcgtggtgatgatgccaaaacggggactcaaccctacactgttctaaattcgacagtaagaatgtcatatatggccctgtttagcccacataaaatttttttcaccctatcacatcgaacgttttaacacctatatgaagtattaaatataggctcaaaaataactaattatacagattgcgactaatttgtgagacgaatcttttaagcctaattgctccatgatttgacaatgtggtgctacagtaaacatggcttaataaattcatctcgc

SEQ ID NO: 4800 - DNA, 420 bp, Oryza sativa
  unsure (1)..(420): unsure at all n locations
agcttgtcaggtatgtcagttntcacaaactctattaagttgcttctgcaatgctaatatctatatgggttccctgaatcatgtactgttctttgcattttgcagttctttgcccaagccggcttcccttgcccaccgctgcgcaatccatcggatcatttcctcagatgcataaacgcagacttcgacaaggtgaaggccactctgaaaggatcaatgaagagaagagtaagtttcaggattcagtcagtctcctcctagtacctacaactggcactcttacctgtngcatgccttgactgaaatgtgctcacantttgcatacatagtttgaaagatccgatgacccacttgatcggattatgacttcngagggcatcagaaggctgatcacctactacaagaactcacagtactact

SEQ ID NO: 4801 - DNA, 322 bp, Oryza sativa
  unsure (1)..(322): unsure at all n locations
agcttggaagagaggcagcggtggtntgcaaatctttgttttgaaattattntgaaatcacaaagtgatttatttctttctaaggttgggccgaaaagagacttgcgtctcgattcgactttaggagatgtttttcaacagctcatttggtaatgtaccgacctctcacgtcagatcattatctctcggctcccagagacattccacttgattaatcggctcccagagccttttgattgtctcggactcccagagtgcagctgaccatcagcacaacaatccgctgtcacttgggaagcctagtctatgatgtncgtagaca

SEQ ID NO: 4802 - DNA, 393 bp, Oryza sativa
  unsure (1)..(393): unsure at all n locations
tgagggtcggcacatcataacggaagtggaagattatggtctttctattaccccggccgaagccgccaagaactatgtacgtcacagcggttgggttgtgcgggataacgtgcctgtcagtacggtgtactggcgaagaacaagggcacgcggagatcatgagagctttgtcccagattctgagaaagagatgctgtggaccacaatgctcgagacattcacccttcctgcgggtacagaggacaaagtgaaaaggtggactctgaagaaaatggcagaacagtttcagagcttcaagggagatctgtaccagaagtatatactgaaggggcagacaccgaacttcgacacattcccaaagctaagggatcactgngacgagttcggtgcata

SEQ ID NO: 4803 - DNA, 309 bp, Oryza sativa
  unsure (1)..(309): unsure at all n locations
agcttccataatctcaaatacagcatatgatgatcttatcctgagaattcgcaagctggaggaagctactaactcaagtaatcttagcttcttactccccgctcggtgagaggaggctcgcgagcataaatccatagctatggagtcagtagacatccatcattcgttgatcgatcgttttctgcatacacagntgtacgctgccggattccagcactggtcaacgataagaatgatgaagagtcgaaggactccacacacgcttgaaagatggaacttctgcattgaatcgacaataccgcgtgcaca

SEQ ID NO: 4804 - DNA, 220 bp, Oryza sativa
  unsure (1)..(220): unsure at all n locations
gagatacnacaatatcttctggtgaatatgaagctcaacaagaagaaaatactcaagcgccaagatctgatcaactactagtactaagcactaacctcttgttgcaatattcatgatttgcagatacattaattgatttaggtggatttatcatcagagccacaagctcaagataagtcgatggacaagaaacactccactgcatgtctgcaccgtncta

SEQ ID NO: 4805 - DNA, 399 bp, Oryza sativa
tctcgcggagaagcacttcgtgttgctgtacccgttatgctttctagaagcgcttcatagaaaggtagcaacagttgtggcagatggatcatagagccagtgttatcatgaaatcagcttgaatttggcagatagatcatagagtcagtgataccatgaaatcaatctgaatttggcatatagaacctgtgagatcatgaaatcaatctactgactagaggattggctgttcttcagggagaggagtataagttgttttggccagagcagtctgaatttgtgaggatggcatcaaggtttggagcaacaataataccatttggagtagttggagaagatgatatatgtgatgtgagtgcattcttactattaactaccaattattaatagatgcaaatc

SEQ ID NO: 4806 - DNA, 359 bp, Oryza sativa
agcttgtgatcccgtattctgagttaattctatgttcttaactcaaaccattcggctcttgctgttgtgtagaatatatctggtgacctgctgctgtcctggaaggtttgcttgcctttgtcaccatctattcgtttctagcggtattgcatcgattgatccatctaatccagcatgttacccacggaaaaacttggctcgaatcagcggccgcgcgtgcgtacgtgctctttggtgcgatcggatctgataagagtcctggactctggacgtgtcttgttaggaaggaatcccgtcgacgaaggctgtttggtcggcgtcgctctcgatctcacgggctcactgtacgtagtactatg

SEQ ID NO: 4807 - DNA, 407 bp, Oryza sativa
  unsure (1)..(407): unsure at all n locations
gctgtccgatctgganatagacaaaggctatagatgttgttgtgtcatagacttatgccgaagccagataaaccgagccccgaaagcccacataaacaggggggcaaaggcagtagtagcagcggtattaaactgtagtacgctaccgttatgtgcaatcggttttgttaaatcatattcaacccgcaaagacagaaacatgcaaatcaagcaactaatgtatatcaagaacaactggttggatgagcttgcagcatcatgcaatttattatggcacattcctcacatcagactgaaaaactgattcagtgattccacaagcagaatagttctacacaaccaaaactgaacttaaaacatatgggacagtatcaggtatatctacactgagcttcgatatctccgca

SEQ ID NO: 4808 - DNA, 347 bp, Oryza sativa
  unsure (1)..(347): unsure at all n locations
agctngatagtttttctgagtgatctatatctatctcttatgatgaactctatgtaggtcccagggaggttaaagatgtatnttcattgttaaaagactgtgcagctgaagttaatgaaaattctagcgtggagcttcatgtttgaagtttgaacaaatgactttgaaattgcatttgtagacatgctattggtataaattgaattggttattgttgttgtacaactcttactactcattattgttgcagatcacctatggcgttcatttttctcttgtaggaactctngattctgatgccttaagtacttctcatgagaaaccattctttgtcattcttccattct

SEQ ID NO: 4809 - DNA, 397 bp, Oryza sativa
aaactcaaccttcggaattatgagatgatgactactatttattgaataagttgcttccaaagccacgaagctagattggactttttgttgtggactcacatgttagttgtgatggtgatgcaacttattgacataatattatcaccgattagtaacctaaatcatggttaatgatctcataagatcaacttacaggtttgtggtgctctaccccattttacttaaacccactttgtccactaagagtagaaatattacattttcaggtccattactatgtgcaatctcatattcagattaatgagtaccgtgatcgtgaaattttggtgagtatgagaataaagattccaatatatttatgctaatgcatagaaacttttcttatgaaaatatatat

SEQ ID NO: 4810 - DNA, 418 bp, Oryza sativa
  unsure (1)..(418): unsure at all n locations
gcaagcttggactatatgttaagctctgtgattgagtatgtatgatatgatttttgacaaatcactatctatttcatttatgcaggcattcttcagagcaacatattggctccggttttgggcacaaccgtaaaagtgtgatgaagatggagagcttttgaaagttatatgtcgtatgctcgagacgacggttatgcaactntntgccaactatggatggagattcacaaatagacttacataattgtgtgctccttatattgggccgggcatttcttttatgcttagggcgtgtgtttaattctatttgaactacactcctttgtagtgctagattgtataattggctgagctctgtgagcaaagcgagatgtatctattcatattaaaaaaagcagtagcgatttatgtgatggcg

SEQ ID NO: 4811 - DNA, 324 bp, Oryza sativa
aactaagctttgtccgagcagtccaacagagcagctttttttgacttctgactgccaaggcgtgagatagtcatgtcgtatgtagaaaagcccggagaactcccggctagcggagaatcccagtgtttgcattttggtccttgagagctccttcctgcggggtggtcggaccaacgcaccgagcctgactggtcttatggcgccagatgatctgcgcgaaccggttcttatacgctagactcgaaggaagtcaactctgctcgcacaccactccactgctcaggagttgttttatctataacaagcgccccacttacaatgatt

SEQ ID NO: 4812 - DNA, 331 bp, Oryza sativa
  unsure (1)..(331): unsure at all n locations
gcaagcttcttaagacatccaagatcttagatgctttctattcttgctgtacgcatntactttcgatattgtcaacttacatatatatgtcatgggtgttaccatcgaagtgttatattttggataagaggtcatataaagcactatccatacacaagatgccactgactataagagaactaaattgctcctttcaatccagtggaacttccttctgctgatgagagactctggataacagatcataaaatagactagccgagttcaggtcaggaagagaaaggagaatgctgggtttctaacatacacagaaacatttcttataaaattt

SEQ ID NO: 4813 - DNA, 332 bp, Oryza sativa
tgtctcccgctgtgaccagccgtctgccgcaacgcctcattatccgacaccgctgtgctcttggccgcttccaggaacatttcgacaaccacagggctcaccggccagcaacacgtcgacaacctcaccggagaagagagaaaggagggagagagagaaaggaggagcaatttggtcatgtaaaaaagtgagcctcctcttatgcccgatccaggtggctctctcaacggtggcgtggttatcctggttggcaatggcagtgaggcggcggtccacggtggtggcactgttatgcttgatgtccgcgtggcagtcccagatggcgacgtggc

SEQ ID NO: 4814 - DNA, 354 bp, Oryza sativa
  unsure (1)..(354): unsure at all n locations
agctngaatntcatagatgttattntaactgatttttctctacgtatatctggntggcattggtcatgcaatgctctgtatcgtataaagcttgaatttcatagatgttattttaactgattnttctctacgtatattttcaggcttcaggatgtctttnttgtcctattgagttaaaagatttcagtatgccttgaactatcccaagtgacactttatcatacatcagagaccaaccagcatattgttgtgcatatatatgccgccaaaaaactgctgccccttgaatccaacctacaaaacacacggcaaagaaagttaggatcgccactttgatatgtgtgtatatactat

SEQ ID NO: 4815 - DNA, 439 bp, Oryza sativa
aactaattccagtttggagccggactaaagtattattgtagcactgcaatattctcttgcactgatcgagtaggaagcatggaactactcaaatgttttacaaggatcatctacttaccattatctgatcctcttgaacccacagctggaatctgcatcacttgaaccccaaaggagcctgggccagcaacagcaaggcacagctaccagcagcgaacacatctagtatgaatcttgcattaaacagcttctagcttgattggtgcttttgtaaaaactgataaaacaaaaggtgcttcctctccaggatggatggttgtgggcacaattgttgtatcctttggataaggctccaacactaattcacatgatatctcccttgagttaacataatctgttccacccactgattcatgcatgtagatattgtaagcagcac

SEQ ID NO: 4816 - DNA, 158 bp, Oryza sativa
tcagacatgtacaatcgctgcaaccttggagtgatggggagaaaacgcaaaactttccgtgggactcgctttgatctatttcctctagccgactcttcataccgagcctcaccacaaacagtgcagttttctttatgcctcgtttccttatagaaaag

SEQ ID NO: 4817 - DNA, 453 bp, Oryza sativa
  unsure (1)..(453): unsure at all n locations
ntgacatacagaaggatgtcatcggcatgttaaacaactgttaatttgggtcactttcaatagggataggtttagacagaagtccaagaagatttgccttgttgattatggcctgtagcaattctgctccaaggacatgagcactagagacaaaggatctccctatctaattcctattntacaatgaaaaattattggctcggttttttagtgccggttaattaaaaaactgacacctatgatattggtattgatttttactatagaacttgcacctatagttgccgaaggtttcctatgagccttttcccgtgagggtggtaaatggtttataggtgtcggttttgctaacacctattaagggttttgtagtagtgttggcacccatgggtatgcacaactacgcaaggaagtacaaanaatttcatatgcatgactgaaatgttccttccc

SEQ ID NO: 4818 - DNA, 262 bp, Oryza sativa
agcttatgtggatgacgtagtcgtcaagaccaagcttaaagatgatttgatcatggacctggaagaaacctttgtgagcatccgcgcgttcaggatgaaactgaaccctgaaaaatgcaccttcgcagtaccgtcagggaagctgcttggatttatggtgtctcatagaggcatacaggccaacccagagaaagtcaacgccatcctcaacatcaaacccgcgagttcgcagaaagatgtccaaaagctgactggatgcatg

SEQ ID NO: 4819 - DNA, 437 bp, Oryza sativa
  unsure (1)..(437): unsure at all n locations
gcttgcttcttgctatggctcaaggtggggatcaaatccctgtatctgngaaactctcgccagtcagcttgctgttgttgcatcatggtgttgaagtttgcgagctgtgcaccaacagactgctgccgttcccgtgactgtaccacatgatcctccaaggtgtgttgctcattccctgcctgcagntctaagtgtatccatcctccggatgagttctcccagatcccctcgagaggagactgagcaatgcatcaagaggatggaggtagaccacttgaactgaaggagcccgagtatccctagtgcagctcctgtggctcatgcctcctgctgtcgctggcactctgccaggacgaacctccggtgtcatgttgcaggaattgtgtccaaccacgggcatgcactgtcgggccccaactgtttccatacatctgcac

SEQ ID NO: 4820 - DNA, 249 bp, Oryza sativa
agctttatgactatggacgcgcgccttgtctcctatgatggtaagatactccctcgacgcgccgtgatgactcctatctcctatcacttatgactgggcacggagccgtctattcaccaacacactggtgaagcaacactctcgagacccgacttggaccctaaagcgaacaaacaccaccgaaccgataaggcactaggggcgaaggatactatgcctaactcaactcaagcccgagaatgaatgaca

SEQ ID NO: 4821 - DNA, 360 bp, Oryza sativa
ttagctacagtcgttgcctgtggcaatggcgtgccgctgccttaactacgttgccttatctacttctgtttttgggatgtattccgaaccgttcggtccgatgagttaagactatgcctgcgggcttatgatgtagtaattcgtactacacactcgtgtatgtgcacttggtatttcagctatgaattcgtgtgtaccagactacttgatccagagaaatggtactgtttacacgattaattcctgttataaaaacgggggtccacactgacaattgtttgacttgttgcaaacatctgcttaatttgttccaaatagagtatgtgtctagaacagattttggatcgtaataatgcactg

SEQ ID NO: 4822 - DNA, 248 bp, Oryza sativa
  unsure (1)..(248): unsure at all n locations
agcttgggcctgatggtacaattaanaaatacaatgcatggcttgtggccaagggttatacccaaaaagaaggcgaggattnttttcgacacctactcaccagttgaccgtttgatcacgattcgagtactacttgctctggtagcctctcatggttttctcgtccatcagatggacgttaagacagttttcctaaacggagagctagaggaggagatctatatggatcaaccagacgggtatgtact

SEQ ID NO: 4823 - DNA, 465 bp, Oryza sativa
  unsure (1)..(465): unsure at all n locations
gacacnatnagaaactcaagccttcaancttctcgataggatacaagtatttctttctgatatatctgccgcnnnngcgctcaaaatgtgcaggcatagaaagatggtgctctgggtcttcggctatggctccctgatctggaaccccggattcgacttcgatgagaagatcctgtgcttcgtcaagggctacaaacgcaccttcaatcttggtacgatagatttactcctggttgtcttggaaaatgggcttggaaatgcagaatcagtagcttaaacttgccgctgttctatattggcctcaacttttatgtgtgcatcttcatatttttcttcctccctgcagcctgcattgaccatcggngcacgccggagcatcctgcgaggacctgcacactngagtccgacgaggaagccatatgcgtaagcgagctgtcatcttcgttttcccatttcaccgatgca

SEQ ID NO: 4824 - DNA, 301 bp, Oryza sativa
agctgggccaacctcgtccaatactactgtgagcaccctggagcttctagagttgcatgcatgcattttatccacctagatccggcctctaacgtgacatgcatcactaccccgagacccaccgccactcgtgccgccgtcgccattgattccggtaaccacagatcacgataagactaccattagcttcgcaaagaacccctcttccttttctcttttgggttcatgccgagatctgccaccgttcaccgccagaaagctcgagaacgagctcagccatggctagctctgtttcagctcg

SEQ ID NO: 4825 - DNA, 443 bp, Oryza sativa
  unsure (1)..(443): unsure at all n locations
tgaacctttgctcgccccgactgaaggacgaaaggttactttgacttggttgttgattaggagttgctactatgctgcatatctcaaagatacaggtgcaaggtatatgtactctctcttagcttaaataatctttggcacggtggcttacccttacccctgattcccacgagacactgcttttccttgccttgagcagttgaaagacagaacaataattagagcaccaatcacccaatctttattcaactcttattccagaagttttcaaatgattttgtaaaagaaagccaagtttctcaaatgattcactcagtctctctaagtgcatcaaaatgaattcctcaccaatttgcctttntgattcctactccaaggtttgatatgtggagctcgatagggatcaaacatggcatacttgcatttacatttattactaagtc

SEQ ID NO: 4826 - DNA, 277 bp, Oryza sativa
agcttgcctaagatcgagcgctactttctactatatataggaaaatatctccaaatatatgttcaaccaacagcagctctggaggctgagtatgttggataagtatagattattcagcattagacacatctccaataaagcatccaacagggaaccactcatcagcaacggcaacacagtaaggataatgaacaaattattcttggtagatgagacaagcatcggtatggaccaagccgtcgcagttggcaccgggtggcacgggttcgtgacagta

SEQ ID NO: 4827 - DNA, 452 bp, Oryza sativa
  unsure (1)..(452): unsure at all n locations
acacaagaaactaagccttattagctgccccgctgactntttatatagtctggttctgttgtttttatcaagcaattgattggatacaatatcgttgctctttgcgatgtaagtgtgcatttttattgaccaatattatggcttaggctgattatatattgtggtcattttccaggcagctggtaaatcctttatgagtttatttacttgggatttacaccacatatgctgtatatttctaggtgtggcgaaaccatgtgtcttttatggacttaagcacatctgttaaagcagtgtgcgcatgacttatgcccaatactttggaaatttctttattcacagcattcaaagctttttataactgtgttgctatgtgaattttcaatgatgtagtcaactttaggttgctctcatcaaatattacaaagccggcggtatattatcttgatcat

SEQ ID NO: 4828 - DNA, 309 bp, Oryza sativa
  unsure (1)..(309): unsure at all n locations
agctngagagccacactntggagaganatcggtctgtattcattaaccctctcaggtgttgattgtttgggaacaagagtaatgaaagatctatttaaactttccaaagctaagttaccttcacaaaactgggaccaaaccattgaaactaacaaaggatgacttagaccctgtttgattcaacttatgattattataatctggattattaggagtaagctgaaacaaacaaatagattatcatgctagattatcataatctataagccagattagtataatctaataatctcctctgaatgagctttt

SEQ ID NO: 4829 - DNA, 436 bp, Oryza sativa
  unsure (1)..(436): unsure at all n locations
tagacagcatttataactccttgatcaaaaagggtgtcatttggtatatataaagcagggatagtttttctacatagggataaagcagggataaagcagggatagcttagacagcacagtagccagcttgtggaaagcgatgtaaccatttgattatagtgtcttcaaggaacataggttttcatgttgcatggngcaaactcatatctgtatctggccgatcaatatcataggtcaatttagtcattagcagtggaattttcagttatgttccatcagaacaactgcatataatcactattatttgttggccgcatttacctaacacttcccaatgtggtagtccatattcatatgttgcatcaatctaatcactgtagtgtcatgtttggtcaaacatggcatctgtatctcttgtaactgatgacatgtatac

SEQ ID NO: 4830 - DNA, 328 bp, Oryza sativa
  unsure (1)..(328): unsure at all n locations
cgaggatcaccgatcactatgttctccacctcanaactaagctcaccaagcaaattcccaacaacatcagcatatttgtgttctccatccaaactctaacgcatacaaccatggattgttcatattcactttggaaagcttcaaaaataactggagtgtacacttggtttgcttgaaccaacataggtgtgcacattagacttctcgggagcttcttccttgccttaaattcagactctagntccttatctcttttctcttgcactaaccctctcagaatgcttcagaaatcaaatgatatcaaaatctaatttcaaatgggtctaaa

SEQ ID NO: 4831 - DNA, 410 bp, Oryza sativa
  unsure (1)..(410): unsure at all n locations
cttaatgatcaccgcattgtgggctgactatgtgcaagcaactggggaatggcccagattattctgtatgtgtgcccgtctctcggatctcggatatgtcttaccacactagatcctgagcttgcccctgtgctgtcatgatcttgaaaggcttgctgcanatactgactgcagttttatttttctggtgtattggcattctgataagacgacatatgtgttactcggtgctgaaataaatactgctatatgatattccgggagtgatctgagagcattgtgtgaggaagctgccatgacgccaatcagagagcttgtgccacaaaatattctcactatataagccaatcaagtgtatcgagttacatcttcatacagtgtgagctntctgaagtgtcctaatcatatcc

SEQ ID NO: 4832 - DNA, 268 bp, Oryza sativa
agcttaattcgttaaatagcagcaccttatgtatattctggttcctcaagctctgtaaaagctggacaaaaggccagcatgagagcaatgcctgcaaggatgaattcacgaagcatatatttcctgtattcttcaaaccatgaggaagcaagggcttgttccgaaagtcctttttatttaagcttgtcacaagctcatccactggagctgcacaaatcggtgtatcaatagctggccctccattggtcagtatttctgggactaaact

SEQ ID NO: 4833 - DNA, 432 bp, Oryza sativa
tctctctattgcctctaaatgacacccctcataaacttattctatgatcttctcctgctcaaggaaatcgcaatccctgtccacttgcctgcttcaacacatttaattctatattaatgttttgaaggaaaaaaaatgattacatgcccaaaactagagtatgagacaatatgtttttgcacctttggaactcatggaaccattgcttcttcagtctaaatatgaaattcaaatcaagatccttcagagttgtatactgatcaatctcagattgtggcttgtcagttgttcggccaagagacgagccttttagatcaaaacgcctattgatggaatgatcagaacaaaacagatttcctatgatgaccaaacgaacctgggcgggaatataatgggtaagagtcaggaacacatccgacactgtatacgaca

SEQ ID NO: 4834 - DNA, 270 bp, Oryza sativa
  unsure (1)..(270): unsure at all n locations
gcttttgaaanagccttnagtncttaccggaacacgttcttttacttatttatcacngcaacgcggaaagactaattcgaaagaactggggaatttcccatattattctgtatggactgcatgtcttatccgctatctgctatttatgaccactcttaatatgggactgtcccctttcatgtcatgaacttgaaaggtttgctgcacatacccaacgcagcaaaaaattccggcttaatgccattctgataagacaacatatgtgttact

SEQ ID NO: 4835 - DNA, 317 bp, Oryza sativa
atatacctaggtatatgaatttgattcatacatatacctaacaacaaaacaactcagactcaactttatttcacaattcattattacatacctaacgacattatatgttggatgttatatacctataaccaaaatctaacacaaaaaaaagttcagactcagttcacacttgttgaacttgttagaaagaagtaatgttatatctaaacattaaaaaaatcatattattaaattgggatatactcaatgaaatcttggagccatactcatatacactagtaactacctctcctgtgtgttattatatatataaacat

SEQ ID NO: 4836 - DNA, 425 bp, Oryza sativa
  unsure (1)..(425): unsure at all n locations
ttagcagaatttgtcgccgagtggaccgagtgccaagaagacacttctgtggttaagctggagtattggactattcattntgacgggtcgaagaggctttcatgtactggagcaggggtcgttttgatttccccgactggagaaagattgagttatgtgctgtggatacactattctgcgtcacacaatgtggcggaatatgaagcacttcttcatggactgaggattgcagtatctctagggattcggcgtctagtggtccgcggtgattcccaattggttgtcaatcaagttatgaaagagtggtcctgccttgatgataatatggctgcataacgacatgaagtacttaaattggaagacaaatttgatggcttagagttaactcatgtgcttatgcacgacaatgaagcggccgacagact

SEQ ID NO: 4837 - DNA, 316 bp, Oryza sativa
  unsure (1)..(316): unsure at all n locations
agctntgcaggggcaaagacaagatacatcaatattgtatatctcgcttacgctctagtgatggcttcgcgcaagcttaagcactacttgtaggcccataaagtcactgtgccatcgcagtatcctttgggcgaagtactatggggcaaggaaatcaccggccggctcagcaagtgggcggcagagttatcacccttcgacctacattttgtcactcgcacagccatcaagttccaagtgctagcagacttcgtggccgaatggacaccggcgttcgcccccgaacccgagtccgtcgaacaaccttgggtaatgc

SEQ ID NO: 4838 - DNA, 450 bp, Oryza sativa
  unsure (1)..(450): unsure at all n locations
nntaaaaagaaaaggaagagagcgatacctggcggttctttcccttggcactctagtgcattgntattgatgtcgttacaaagtttctgccgctatacgcccattggcctctcagaactcacagaaggtcctccagggacagatgactgaccagagtgtcttattctgtcttcctgcctcttctgtatggcctcataatatgccttcatgtattcttcctacaccgttaaagaaagaactactgaagctccacagtaatgaacacttttgactgtaaatccaactttcagatcatagcacgttttctaaactgacctgtatatttgtacctccctctccacacacagtagaactgttactgaggtgtgcttgcttaagtttcataccttttcttatcagccatgaaggccagatctttaactctgaaacacctgcatcagattcatcgtc

SEQ ID NO: 4839 - DNA, 358 bp, Oryza sativa
  unsure (1)..(358): unsure at all n locations
gctntcagtttcacgtagaagacgccattgatttttatctgacaaacacgcatcanatntgcgaaattctgattcgctatgtagtcatttcgtagtcgtaacatagattcaaacgcaggaaagttgagcactttaagcatcctgaccaactacactgatggagcagtacaatttcagtactaagtaggaccgatcagtaaagaagattcagcatggaactgagaccaaacttcaccaaaccgtccggagaatgttcttgacgatgaaacttccgganaacagagagaaacgaanagagggcgataaaaatgcgcatgggcaacaaaatattttggagcaatgcgtttcacgtcagcat

SEQ ID NO: 4840 - DNA, 454 bp, Oryza sativa
  unsure (1)..(454): unsure at all n locations
tgngcgaacacctccgttgntgtgctgataggcctctagttgtgctcatggagctttgacatgcgactataattntttttctagtatctcattctaggaagttttgtgattgctaaagtattgtgatgtcttaggtgtaggtttgtttaggttcatttgaattataaaatcgtgatactgcttactgtcttaatatatttatatatgggacacaggtttgcaaagcaacgtaagatatcccaacttatgactgctgtaacattgatgtaccataacttaaggatcctcttacctttctttttaggagatgctgcaacgttggagtcagttccggatcttgtgaaggcaatgtacataaacgttgaaagcttcccttgtgtgaggctgtngaatcactctggtcagtcggttgttctagtgagtattcggtttactcttattctgtatgcttaaa

SEQ ID NO: 4841 - DNA, 319 bp, Oryza sativa
agcttagatgtgcagtaattaaccagccaaaccatgctgttccaagcgtgtgccgcggaagcgaggtggacgacgagatcgatcccgtcagctcacctggcgcgtgcaggccacgcccacgcatgcattcgatcgatcagctaagctagcaattcaagcaaagccacaagctgactcatcgatcgatcggtgtcgactgtatgtaatacgtggcgcgcaccacgtcatatagctagcttgcaagctatatataaatctatctgcacacacgctgccttttgggttgggggtggtaaggtgcagacaaatctcaccagct

SEQ ID NO: 4842 - DNA, 379 bp, Oryza sativa
  unsure (1)..(379): unsure at all n locations
agctnggctcgaagaatacaaccaggttntcagtgctgattntttttttagagttaaatcctccaaatgcttccatgggcctacacatgtttatttctcagagaaacccgtgtttcgaagtcttgaaaaatggcattatatatcttgcaggactcaaagaggtacagtgctggaaggggtgctcacataaaccttagaagggcagagaaggcacggattntagtcaccaaaatcccaggtatgtagtgggtgctggataattatttgcactgctcagctattccaatgtatggcccatatatattctttngcagctatggtagataacctgatattnnatttgcagctatggtagctaacctgatatttattttgcagc

SEQ ID NO: 4843 - DNA, 457 bp, Oryza sativa
  unsure (1)..(457): unsure at all n locations
cctatgaaactcagcttanaatgtaatanaagtgataggggaatgatcatttatttattttgttaatagatttcacccaatagttgcataagtgcactattcggtctgtttcaaaatataaggtgtttcatttcgtcctaagtcaaacacttcaattttgatcaagtatgtggaaaagtataacgatattttcaacaccaaataaatatattataaaaacatgctcccaccttacaaaaaaatgcccctaaataattgtttttttcttaacggaaaaatatgaaaatcactcctgggttcatgagtgaaggttgggaaccttcacccctggcacgcaaaacgaagcgacggattagcgcatgattaattaagtattagcttaaaccaactttataaatggattaatataatttttaangcaacttttctacagaaattctttttgcaaacacacacc

SEQ ID NO: 4844 - DNA, 341 bp, Oryza sativa
agcttgagtctaactacatatggcgattggtactatgatattcaaacttttttttcaactggtggcaagttgtagatctagaaattttagaacatgacagaatcatcgacatcatcagttaccaatgacacattggtttcaattattagcgtgagccggtgagcccaacgtaaatagacttggtctccaccagtggtggctctagccacctagtggtaacagaaagtggatcagtcaccagcttcatgcctgtgatgttaatccagactaactctcttactatatttagttttcaagatctagacctagcttcatacaaaatgatcaaacatggatataat

SEQ ID NO: 4845 - DNA, 368 bp, Oryza sativa
  unsure (1)..(368): unsure at all n locations
nggatgggatatggcggtctttatttttatgaatgtgtgtatatggctatctatttttttgaagttgtcgggacaaacgtggatttggcggtccaactttttatttgattggaggaagtatggtggatttgtaggtgtggtcacctctcacttgagatggtgaatatacctccatcaaattaatacataatacaattttacaccactacctccattataaatacacattgaaaaaagaaaacaagaaaaaaaagaaaaaaaaaacagggccagatctgggcttgccaccgacgtcggccggcttctcccaccgacgattactcccgccgggtgcctttctctctcgtcacccacgccgggtgccgagc

SEQ ID NO: 4846 - DNA, 374 bp, Oryza sativa
  unsure (1)..(374): unsure at all n locations
agctctatatagctgctccgctgactntttatatagtcatgacggngnttgggnttatcaagcaattgattggatacaatatcattgcttttcgccacgtaagtgtgcatatttattgaccaatattatggcttangctgattattcattgtggtcattttctaggcggctggtaaatcctttatgagtttatttactcggattgtacaccacatatgccatatatttccagttgtggtgaaaccatgtgtcttttaaggacttaagcacatctggtaaagcactgtgcgcgtggcgtatgcccaatacttcagaaattttctattcacacattcaagctttttatagctgctttgcgaagtaattttcatgat

SEQ ID NO: 4847 - DNA, 444 bp, Oryza sativa
  unsure (1)..(444): unsure at all n locations
ggaccttaaaactaagcttctcaanctatntcatatgatgccttcattttttggttctttttcgcggagcacctcatgtattatcacacacccctccatgatgaacctcctagggataaaggcagtttatgtagattttttaattagttaacataagataagataagataagataagatagatagattgatagatagaatagatagataaagataaacataaagatagattttatcatcaaacttatggcaaacatagaatcccttttatttagcacggtggagggactggatatgtccgtcccaacataggacatactatcatacatccatagcgctggtgacaacattntaagcttgcatcttgcagtactacaatacgaaaccattctagtgctattatttgtaaatcatcgcaactatgcactaaggagctatatatatc

SEQ ID NO: 4848 - DNA, 352 bp, Oryza sativa
  unsure (1)..(352): unsure at all n locations
agcttatgaccaatataccttgtggtttctcagtctttattaagtgcacatctgtagaatcaaattcccagtaaagaatctggcgcagctctacaaatctacctgtggaagcagagaatccgatggacactctgtcagggagatatttgctgagatcaaccgaataagataggctggagttgccactgaattgtgggttgtcctggtaccacaagaagacactcaagttccttggaattgcctggtaagttacccaagcattggctatccgggccatcgtgatactacttcgccatgtcacgttggctacagatacaattgagtggatgttgatgcctacatggntgccatc

SEQ ID NO: 4849 - DNA, 446 bp, Oryza sativa
  unsure (1)..(446): unsure at all n locations
aactaagctgctgctcctgacctcccattacctcggtcctgtacctttactatttgctgctggncttcatcatcctatggatgtcaagccagggtcttctgctggattacaggtttgcttctcatttcagcctagatatggctctctgcgttttgacctccttccaagcactgatttcttttttaattgcagcatgctgcattgctacctccagtaccgccaaagcgctgagctacgcattggttcatcgctcagcagatcaggtacaaccagcaagtgacagcaaagatgcagaacttctggacaccggcgacggcagcagcggcagccgccgccgccagtagatcggcggcgccattcttttgtccacgaccattcaacatgggtgtggtgccgccagcggaagctgcctcccttcttggaatacaatgcaggggagctaccct

SEQ ID NO: 4850 - DNA, 172 bp, Oryza sativa
  unsure (1)..(172): unsure at all n locations
cgctgctcttcctccgcatcgaaggtccgacgtcngtgtcctcgacttcttccatgtctcccaatgacaggctcaagctcaaacggttggccccaagccaagtggagctctcctcgcgtgcaatccctgctgntacagacgatgatggtgatggatcacacgcagctggatt

SEQ ID NO: 4851 - DNA, 452 bp, Oryza sativa
  unsure (1)..(452): unsure at all n locations
nttaaccaagctcttacaagatcttaccaatgcaagcggtttggtgacatacaccgactcaaccaagcaccccaatggaggttggatgtatcgatgccttggcgaacacttgttgtacggctgcaatcaaatctgtggagctctgggtaggcttaaatatgtagcaaaggaatagcaaatgctcaaatcagagaatgcaaaattgaataattgttcaaagtcaagcaccgtgctggtcctaggctagaacgtactagagacgcgagcctagacacaaatgataccacaagatagcactaggaacaactcatgcacaactctgatatatgaagttcagctcaaacataacaatattttctcttttctttctttcttctttctttttttttggttccttttcttttttttttgggtgcggcttttcttttcttctttttttatagcacctttct

SEQ ID NO: 4852 - DNA, 341 bp, Oryza sativa
  unsure (1)..(341): unsure at all n locations
agcttatcgacctgccatgatcaacgacttttatatagagattaaattcagtaaattaaagtccaggaaatcatgggaaaatgatgatggaggaatgtgaaatcgatttttacaatcagttagagtagaaaacatacaggaggtacatcgaacgtggcagcaacgctagggtttggcttataccagacgagatcgaaaaaagaaaaaaacgcacttaccgtgtgcgaagaaacaaaccatatgaaaagaagcgacaaanaaaaaccgcacggaccaacgaaagcggaagcttggcggctgaggcggggctcgctaagcgcgtgcagatcggatcaaagatc

SEQ ID NO: 4853 - DNA, 414 bp, Oryza sativa
tgcgttggtgtagtgtccacatgatcgtaaagtaggtctgtacaccttgatgtattattaaacaattaattgggttacatatcgtgatgtcctcttaacagttacaaaaaaccttgtaggtttgcaagcgatacaggcaatactaccagcaactccaagctgtagtatcgtcctttgagactgttgcgggtctgagcaatgctgctccttttgcttccatggctcttaggacaatgtcgaagcatttcaagtatttgaagggcattatactgaaccagctgcgcaatacgggcaagggtgctacaaaagatggtctcggcaaggaagacacaacatactttgggcttatgggcggcggcgctggcctactaaggggaaacaatgtgaattcgtttagccaacctcacaacatat

SEQ ID NO: 4854 - DNA, 453 bp, Oryza sativa
  unsure (1)..(453): unsure at all n locations
ntctgttcaagagcacacaagtaattcttcaagaacccattcttattaatcaactctatnttagnccaggtactaacccaccaagaacctttggggtaagagggttaattcagtcagtcaaagcattacatgcccttgaactcggattaagctaatccacataatatattttaaatcgacaagttaaatgcactcacaatgcaatttttttagggaaaacttgggctataatccacctaaccagaaaaaggatggaacaaaagatacatgctaactggaatttttagttagtacatacaaaacctcgcataacctttttttttgggtgaggaagctagcatagtctaattaattttaaccctaaaccaaacacaacatgttagaaggcatattcaagcagctctagtcctccttttgtttctagagatttatttgaaaatactactaaatttt

SEQ ID NO: 4855 - DNA, 300 bp, Oryza sativa
agcttcaccgataatgttctccatcaatgctagttattatgacccagtcacagatgagtgctcccatctttgaggatcatctcattacatccgtcactagtgaggtctcgtagtcatggacgacacactccagtggcgacgatggcggcgacggcggcaacgtacacccacgcttcatgtgtatgagcgatcataccatagcgcatctttgaggttccacgaatataaaaaaaaaagtagacgagccaatgcatcgagcagcttcccttcgtaccctcacccccgaccaatccaagaaaa

SEQ ID NO: 4856 - DNA, 430 bp, Oryza sativa
  unsure (1)..(430): unsure at all n locations
ttagacaatntaaaaacatgattgggaaaatcaggagnnttaaatttctggggttatnngacataaacttcctgctgtataaaaccatttagaaaagcacttttcacatccatttgatacaatttaaaaccttttgaagcagtaaaagccaacaaaagtctaattgcctcaattctagcaacaggagcaaaaatttcatcaaaatccagaccctcaactagagtaaaaccttgagcaacaagtctagctttatttctcacaatcaaaccatcctcattgtgtttatttttgaaaacctacttggttccaataatattatgtccagaaggtggctcaactaaagtccaaactttgtttctctcaaaattttcaagtcctcatgcatggcgttaatccacgattcatcagttaatgcatgtgacacatcttt

SEQ ID NO: 4857 - DNA, 356 bp, Oryza sativa
  unsure (1)..(356): unsure at all n locations
agcttagtaggctagcatgcaatggaaattcatttatgtttattgtcttacacattaccaggctttctttggccatgtgcgagatgagcgactacacagggcaccaganatttgggcccccaaaatttgtgagttcaatctatgtcgagacgttctaatatgtgtaagatctcttcactcctttntttccttttgattttctctctttctgcttcactgatctggctagaatgagattnttattcttgaatccagtaagtgtttggtaataatcatggctatctcaaaaatgtgtagttcatgacgacgaagttgaacgtatgtccaagcaataataattccattcttcacttaat

SEQ ID NO: 4858 - DNA, 462 bp, Oryza sativa
  unsure (1)..(462): unsure at all n locations
tgcattaaacacctaagttcccgtgacttgctgagtacgttttttcttcccattgctctatataaatatatatatatatatagttcctccgccctgaagagaagataaagtgaagtgaagattagggtttcgtcctggttcccagccgtcgcctgtggtgttgggtattagaccgttggttctgctgctgctgttgttggtgttcgcctcgtccgtgtcgtcggttgtattctcgggctgtctgagctgcagcctaagttaaggtaaataagtcctctatttattttaaagattgctatgattcatatttgtcaccgtgggtaccagcactatgtcctgngactggtaccgagatcgcggtttcgtaagaagcggttcgcaccgttttccctacgacacactcctgtcaggtgccgttgtacggcggtatcagattggggtgtgacaagttgctctacaacg

SEQ ID NO: 4859 - DNA, 360 bp, Oryza sativa
  unsure (1)..(360): unsure at all n locations
nnagcttggtattttcatatttggtttgaacttgctatatatctaaactagtgccaaatttaagcgttaacaatttcattgggttatgagttattaactgcatagattggaccgacacggagcacggcgaaccaggatggtggctgcataagttcataagcgcggatagagatcatagcggcgccatggacttcatagagctcaacgagtaccacactcatttctgaacctttttttagattgttgagtacatcggaaattcaatagattaaactctcctaacccttggtctatgtgtgttgcatatatactatagcttcttgcatccagaagatagcagccaggagaaagtgaaattat

SEQ ID NO: 4860 - DNA, 419 bp, Oryza sativa
  unsure (1)..(419): unsure at all n locations
taccgatctcctctgtctgctgcagatacttgatggcctgtactatgtnagaatgcatattcagaataagcagtgcaaatgttcaatgcaactaatattccaaactgcatgctcctgtattttctgaactatatgttttgtttaagtcattttaagttcatggtggaactaggctctggtcctcttgagcagacttcagagtcaatttctaaaatatttacttctttgtcacaatgagatagagaaagagtagaatgcctcacccagtcaatcaaatagcctttgtccttgcaataaggaagccgtccactgatgatctccagcaaaatcactccaaaagcaaatgtattgccttggatgtctgcttgtttgtcctctgaagaatcaagtggccaaggaaagaggatttgttattgatg

SEQ ID NO: 4861 - DNA, 319 bp, Oryza sativa
  unsure (1)..(319): unsure at all n locations
tcatcaatggactcctgttgtctactaatgagtgtggntcgctcgacaaattcctacctctatatctatctctgaggtgtttgggttgtgcaaaactccatagatatgcagaagagaaatgctatccccactccgaccaagacagaacgtttaccaaaagtttattgtgatctttntgttcaaataacaattaatgtgaagcanggtcaggaacaacgaatctctttatgatagacagatccattttgcaagctcgttattacgggtagttcctacaaagaatccgactaatgacgtatacaatgcttgaagtatcgac

SEQ ID NO: 4862 - DNA, 449 bp, Oryza sativa
  unsure (1)..(449): unsure at all n locations
ggaacccaagtcctacagtgatggatataagcgcaattgttatttctgtggagttatacattcgtgtattgataagaccgttcacaatttcttgaagctcgatctcccccccagatgaaccatatagccaagagaaaccatgaaccagaatagaagagcttgccccacccatgagtaaatatttcatagtagcctcattagaccgtagatctctcttggtatatccagacaataggtaggaacataaactgaaacattctggagctacaaagatagttattaaatcgttagcaccacataaaaacattccccctagagtagctgttaatacgaataacaganactctgttatagccatttctgtacattcaatgtactctacggatagaggaatacatatagttgaacataataaaataagaaattgaaagatttcgttgaaattgttc

SEQ ID NO: 4863 - DNA, 315 bp, Oryza sativa
  unsure (1)..(315): unsure at all n locations
atcctatgagtcacctgcggcatgcaagcttncttggggcttactgtggctaccacctttatattatggcgaaagaggatgaggagaagtgtcacgcccggaaattcactaataatctccgaactaatttgtgcataaaatcctcgtccaggaatcagccgaggtacacaaactgacaatttaatatacaaatccatcataataataacgttacatacttacaaaagaaaagaaaaacagcagcggaattaacggtctagcgatggcttcagctgcactcccacaggcagcttaactggggtataagccaaacgt

SEQ ID NO: 4864 - DNA, 265 bp, Oryza sativa
  unsure (1)..(265): unsure at all n locations
tccatgcnaccctnccatgaccacattntctttactctgcaccacatttaatttctgcgcttattgatgtgcatagctagaatacatttgggttaattcatcaattgttcatacaggacatgtacaaaaatccgcgcgcttccaaagatgtccaacaatatgtaaataaatgtaggggaaatcattgttaagatattttacaattgtataaagaacgctaatttgaggaatacgctccactgtgggaattgcacttttttttgtt

SEQ ID NO: 4865 - DNA, 388 bp, Oryza sativa
  unsure (1)..(388): unsure at all n locations
agctttctactcattgatcgtctntactatgttatcatgattatcccttctgaataggcgtggactttaaagcagtagtgacaatgacttgttcagtatgtcttatgtaaaatcacatttaatttaatcaagaactgatttgatcttttagccccaactttactgtataagttgttgggaacttgggatgcctttctggtttctacctttntaggcgttctagtttccacccaaacgaagctgtttgctctcgtacggctgtgtaatttatctctacgtgctaaattgattaccttgcattggaggaacaatattgacgcttaacatgtgttacagcggacttgttcaactggtaatatgagacatacattttttgatacctgtgatg

SEQ ID NO: 4866 - DNA, 436 bp, Oryza sativa
tcactttggacagccctattgctccaccgccacctaaatctccactgatgtcattggttgcccttgccgccgcctccggctcctctcccatcgatcgaagtggggcggagtggtaggcaaggaggatgccgcccctactccccactctcctttcctgcggcctcttttcctgtcacaccccaatctggcaccgccgtacaacggcacctgacaggagcgtgtcgtatgaaaacggcatgaactgcgtcctacgaaaccgcgatctcagtaccagtcccaggacatagcgctggtacccacggtgacaaacatgaatcattgcaaatccttataattaatagaggacttatttaccttaacttaggttgcagctcagacagcccgagaatgcaactggcgacacggacgaggcaaacaccaacaacagcagcagcag

SEQ ID NO: 4867 - DNA, 368 bp, Oryza sativa
  unsure (1)..(368): unsure at all n locations
agctntaaacgggatcaacatgctcaaagggttgtttgggatctgtgtgacttgccttgctggccttggaactcttcaaattcttctcctgcgaaaacggactctccggaaacgtcggaatctaaacaaaaaggagcaaaatcaccaaacagcacataaacaagcatgaacagtacatgtggatatttttaacatgtagatctcaantttagaaaaatgtagtgacttgaaccaactaaatccgagctaagatgaattagttatgaatttttaaagattaaatcggattaaaacacttatatnggatttaatcgaattatgacgcaataatgaattatctttgaaaggaanaaggaattattgcgtca

SEQ ID NO: 4868 - DNA, 423 bp, Oryza sativa
  unsure (1)..(423): unsure at all n locations
gaccttgaaactcagctgctgactgaaaactggggaagaggaatttttttctgatatctaaaaagcatgctgacagcaatcggtgggtgactgtgagaatgcncttcccactggttccatccgaattcccctcatatattcagatgtctaccacagctggttagcccgccagaagccccaggtaatttacttgatgaagctcgagaggaggcatctggtactgaccatgaacaaatgaaggaagcttctgcagaagagcaggaagatttctacattgatgacagggttgatgcattgatggatggatctatcatggtggatggtcaggagcttgagattcttggaggtaaaaatgctcccttgtcgtttgaacctgagattcaaaatgtttttnttttccgttctcttttgggccaatgggct

SEQ ID NO: 4869 - DNA, 296 bp, Oryza sativa
agcttatacagctcggctgcgaggctctgctttttatttttatatccattctagcctaacaaagacaatgtctgacataaatactgcagtagtcgctcttattactcaagagccacagtcactaccccgtccacttgactctgttgattagtcttattaattcgtggaactgacgattcgtcgagtacacccatcttatgatgccttctcggagtggggaacctgcgcgatatgatgatttcacactcctctaaacaagtagattgtgtttacatactatcttttggtcacccaga

SEQ ID NO: 4870 - DNA, 410 bp, Oryza sativa
  unsure (1)..(410): unsure at all n locations
ngatacatttttcaggttcgctggcatggagcagttttgttattccaatctggtagcaaagcagagtggtaggtgtgaacagatcatatacttcatatcataggtgtttacagtggtttcttctaatcattcccatgcgatgcctgagagtagccaagtcggtgcatggttagatattaggaatgcgctttgctgggacaactagctgtatatgatcggacatgggctctgatgcttatattgatgtgtatatatgtgcttgagggaagaattcataacctgttgaacctagagactaacaactcctggtgattgattaattcactaaacgagagtcctttagatgttctcggaatgatagagcaattctttttatgtttacgcctattacctcatagtcataataccca

SEQ ID NO: 4871 - DNA, 283 bp, Oryza sativa
  unsure (1)..(283): unsure at all n locations
agcttagagcaggtntaataagaagactcaattgttatcttgaattacatccacgcgatctatagatcaggtcggatatagaatatgcaataaacgagctctattccacagatacatactccatacgtcctacaatataaatatttgtagtatagtatcaagtcagaggatgtgaactttgactattaatagcaaaaaaagatgctcaatcatgtagaagtgatactggtagatntatcattaaacaaactatcataatatggaactctctttttattaaaat

SEQ ID NO: 4872 - DNA, 409 bp, Oryza sativa
  unsure (1)..(409): unsure at all n locations
ntagctgatttccttgccgagtggaccgagtgccttgatttcatgccataggaaaagatggaatattggactatgcattctgatgggtcgaagaggcttacaggcactggaactggggttattttaatttccccgactggggaaagattgagctacgtattgtggatatatttttctgcgtaccataatgtggcggaatacgaggcgctactccatggattaaggattgccatctctctaggcattcgccgattaatcgtctgtggagactctcagttggttgttaatcaagtcatgaaagagtggtcctgtttagatgataatatgaccgcttatcgacaagaggtacgcaagttggaagataaattctatggacttgagctcacccatgttctncgacataacaatg

SEQ ID NO: 4873 - DNA, 249 bp, Oryza sativa
agcttaataaagactcacatggattatattgatttttatatgccccagaggggatagaggtgtgttgggcacctaccacagggagggtgggagggatgtgccccaagcaccgcccataggggatcgcaccccggcggccgatgtgccccgagccgatcacagcccacggttggggtgaaaacggtatggaaacttcccgatcgtaccgataccgtttccgcaaaactaatataataataataagtttac

SEQ ID NO: 4874 - DNA, 446 bp, Oryza sativa
  unsure (1)..(446): unsure at all n locations
tgatcatagctagaaagtgaatgtatgaaatgaagtacttctatattctgtctgcatgtactttgagaatcttgtcatcaataatcgctttacatgattcagttatacagtgatttgtatttcgtagcttagctctactgtggggttctaataaggtgacgattttattagaacagtgaggccgccgatgaacagtgagaacacattgagatcagggtctcgtcagcctgatcattccaataagatcacgattttaaccgttgcattttcaggattcacaccgcaattcagaaacagcatcaaggttttgtaggactctgatcaaatgctntctaattacagacttcttctccctataccacctaacaaacagtggctgatctgatctgacctgaaacacacagtggttcagtcagaataagatgaaatcagactctatcctgacg

SEQ ID NO: 4875 - DNA, 351 bp, Oryza sativa
  unsure (1)..(351): unsure at all n locations
agctngagatggctggctggctggatctggaactaattctggatggatgcacanaacgaacgacgaattatctcccctaccactactactgatgaactactgatgagcagcagcagacaagcgtctaanagggcggagtaatgtggcgatgtggattgatcttatccagtgtctgtcgacgtaacccaccctctctagatctttccgctcgacgccaagcccgtcgccgttactcgacagggaccaaggacgcaccgcacgctgcacctgcaccttcaccttcaccttcacctgcacgcatcaatgaagttccaaatcgatttccagttgctcctcaacatgcattgcatg

SEQ ID NO: 4876 - DNA, 434 bp, Oryza sativa
  unsure (1)..(434): unsure at all n locations
tctcgggttcttggtctctgcccgaggtattgaggccaaccccgagaagattcgagctatcgagcggatgcgcccccccagcaaacttagggatgtgcaatgcgtcgccggttgcatggccgccctaagtcgtttcatatcaaggctgggagagaaggcgctacccttgtttaagctcctcaagcgctcggngccgtttacttggacggaggaagctgagcatgcccttactcagttaaaggcatatctcagctctcccccggttctagtcgccccggagccaaatgagcccctgctactttacttagcggcgaccccccaagtagttagtgcagcgttggttgtggagcgcgatgaagacaatcctcatttcgcgcacccncgccctgtgctgactngtgcccggagcgagcagggaggagaagcccccgagt

SEQ ID NO: 4877 - DNA, 245 bp, Oryza sativa
cctgcatatgctcaccgggatgtcgtatacaagtcttatgtcaatgagatggactggttacagacctcacatgtaagtattctcaatatcaactctagctcgacattacttctataattgagagactaacctacgacatctcctcaacttttgtttattgagtgtggaccataccacacccatgaggcttcaagtctgaccctgaacctgctgtgcaattgagactccgactacttcatgtacca

SEQ ID NO: 4878 - DNA, 460 bp, Oryza sativa
  unsure (1)..(460): unsure at all n locations
tccganagacattttagccggagtaagtatgcagccttattcatatttggtctgcaagtatatccaccagtgctttgacttgattcatcggattgcaggtatttggtggtccatagtgagttcattcatgaatgcttcccaccccttaccttggactggagtatagcanactgaatggagttgcgctgagataatcgtcttcttcatccgttcatcgtctgctttatttttgtagattaggtcatggtctttagtaacttggttcctacttcctaccttgagtatcttttcgtatttatgctgtgttagggaaggttttgggacctgacgatgaatgtatgattggggtattgtcagtgtcatattatgcaccccttgtttctcagcgatcatggctgtaatactgaaacagaggtacagaagtacactgctctatcttgaagcaacacacttatgtact

SEQ ID NO: 4879 - DNA, 447 bp, Oryza sativa
  unsure (1)..(447): unsure at all n locations
ctgcagctttgagagacacctgacatccagcttttttttctaaccactggccaccctncaaatgcgnctcatacaccttgaacttgatttcataatcgtccacatttgctgaagtgcccaacatgggagaaatagtacacctgaacatcaacagagtgccactgcatgaaataacaaggtacttgcatgaaataacacggnactggtgtactatgtcatcgatgctatattgccattgaagatgcgacaatggaggctctgctgcggcgcccctaatcacaagctcagcacgagacaatgtgttgttatctctgatctcatggacaagaagatccccgttgctagtaagggcgtagagcttgccgcggtacaaggcgatgtcctcgtacattctcttgtgatcaccatcatcatcatcatatggaagaactgaccatgatgtgtcaa

SEQ ID NO: 4880 - DNA, 469 bp, Oryza sativa
  unsure (1)..(469): unsure at all n locations
acctatgaaactaagcttaacactttcttaggcaatgtaacgtgagtactctcaattattttgattccaactactctgttngatataataatacccatttcaagactatctaattctaaataaaaactacacctacaaactaaatgtcatgataatcctttcgcttggtctatcatatctgatataccatcatgattgtccagtacgtgaataatccctgggaatgtttgtcattttataggaatggagatgcacagactgttatcatcgttaaagatactgaaggatttgtttttggtggatacgcatcacatccttgggaaaggcacagtgatttttatggtgatatgaaaacattcctgttcaagttatatcctgaagcatccattttccgccctacaagagggaacagaaacctccaatgggtatgcctctgttcaattcaagtgctctcatatgtatctatgct

SEQ ID NO: 4881 - DNA, 323 bp, Oryza sativa
cctgcggctgcagcttggtagacagataccgatctgatttctcttttcatgttgacgctttctgaagacacagtgaaatcccggaactcccaggcttcacttatttactcgctttacagtggtatagaataagagtgggaaaagtaaacagcctgaattgtgcgggagatctgagtaccctagaaaacaatgatctgtttggtatagctgcgactgacagcgcaggcgaaccttgcggcggacggatatacagtggattactgacgatagctgacttgagattacactgcagcacagtttgattgcccactttctaaaagcaa

SEQ ID NO: 4882 - DNA, 414 bp, Oryza sativa
tcactagcaccttgacttgctaagaatacagaacagaggattgttttacatttctctgcgtctcttcactctgtggattctgagatagatcaacaggaacacgggcagatgaaagccgtaccctgtggagaggttataaagcatttctgactcgctaagagaacatgaacattaattggatgtttctggagactgaccccaaggaactgcctgaacagtaacactgatttgaattgagcaaatggaaggaagcatgtgagggacttacctattaaggctattcttcttacaagggtaacaagcaagcccaatatggcgaccagaaaatcaaagtcatgatctcgcaattgcttaatttgacctggtgtgccttgctgtttgagaagaaattactcatgacaaaattgacatctc

SEQ ID NO: 4883 - DNA, 457 bp, Oryza sativa
tacagttatggaaaccagcaattgcatagctgcgtggaaggcatacggaaaatgtttatatgaaccttgtgctgaacacgttcattttaggttcctattagcaatctacaagactttgaagctataatttgacaatgcaaccaaccaatgtacttctccatatgaaaaaactgtgcaaagctttcaccaacaactcagaagagcaaacatgttgcagcagccagcgcatagtaatatagcatacctctagctacctaatgtgaagtcacgctaaaagccaattatttgcagcgttcctgagcaagtaacataaatatgctgctcctgatcttaattctcccaaccaataattgcactatcagcttcttttagcattaaagaaaacacgtgaatgatcgctaacgtatgtagaagtacatagactagtgaccagaacagtaatatcgattatgtatgt

SEQ ID NO: 4884 - DNA, 319 bp, Oryza sativa
agcttaccggaacaagaagcggtgggctcaggaatctgctgctagaaccctggaacggccggcataaccggcgtggaagagctcgaggccgtcgtcgggtagaacgcatgtgccgacgccgacaatccaggcctcggggagcgcgcaggtgccaacgccgacgatcctgctgggtcgaacgaagtagtggaacttgcggaagagcccgaggacatcctcgcagaggtaagcagaggcgccattgccggcgagctccctggaacgcccgccgtcgtagccgccatggacgaactcgaggccatagacgggtcgaacgtcg

SEQ ID NO: 4885 - DNA, 467 bp, Oryza sativa
  unsure (1)..(467): unsure at all n locations
taatcttatagaccatattatgtttgtagctttataccattaatctacatcttggtgaatgtgttgatcttcaatctgttgctgcatcctgcaatggttatgttggagctgatttacaagctttatgtcgagaagctgcaagacgtgcttatggtagattatcaagctcatcagagagtgagaatgtgctaacgctaatcatggaggattgggagtctgctaaatctgtggccaaaaatagtgtgacaagaggggtaactaaagaaattccagctgtttcatgggatgatataggaggtttgaaagctgttaaggtaaaatatgcctcattntaggatttctttaatcaaacctcctttaatggttattggtgctatgcttcagaanaaacttcagcaagctgttgaatggcccatcaagcatgctgcttcatttgatagactnggaatatcacctatccgtggggg

SEQ ID NO: 4886 - DNA, 409 bp, Oryza sativa
  unsure (1)..(409): unsure at all n locations
agctnttacaatatgagacatgttgatgaatatattatacatgcacactcttatcactctgttatgtgcccttcaagttgtgcgggttccacccgatggtttcctctcttctaatgctttaatattaaaacctatctgtaccttcattaatacagtctgagcaatgcttcttgatcttccaaaaacaatgatgataggcacctttcttgtaccatttttttctttttgagattgttggttttcaatattactaataagatgataatatactcttcttcttttaaaaatatcttctctgaccgattctgaaagagtgttgactgctctgtgataatgtggtgttaaggtctctaagatacctacgataaaccacaactcgtgagttacaaggaacaatgcctaaagtcta

SEQ ID NO: 4887 - DNA, 395 bp, Oryza sativa
  unsure (1)..(395): unsure at all n locations
ntgctcccatgcatctgttnntttctggttaatgctttttttgttcttgncttcttggcatatcactgccaatttattacccggtgcagttgtaccaaatctctgaatttttctctgtgttttttgcaggattaagttggtcgattgcatcggcatgcgagcagcagcatgaggaggattctctgtgtttccaggctaacctgatcgatctcgccaacattcttctcctcgtcgtctacctcgcgacgctggtgatcgccggatgcgagaagcgattcttggttgcggcgaggtggggcggcctgcggctgctgccgccatggctgtgcctcgttgcttctccttgctgcgctgttcttggcgtcgcttgcgtgtgcttgggagcgctgaggtcg

SEQ ID NO: 4888 - DNA, 449 bp, Oryza sativa
  unsure (1)..(449): unsure at all n locations
agcttggctgagtcaacatggttagttgggcctgtctcagcactgacctccaatgcaatggtagttggactagtgttggcgctcaacactgccacatctctagtggaatccttgttctcggataaatccaccttggtgtcgcgaaatgcctccaaaatccgatcgatcctattgcacaggtcttgaatggccttgcctgcattctccaccaccttgtccatgctagcctcagcctccatggcctcggtgagtgaagccgacgttgttgtgactgctgatttggttgaggccgcagatgggctcatggtggccgggaacacgtgttccagagtagtangagtgctctgggtatcagactntgtggtggcacatactggtacttgcatcgaacactttgtgggcgcaatgtcggctctgtcttcgacaaggtcggcacatgttgcacatca

SEQ ID NO: 4889 - DNA, 393 bp, Oryza sativa
  unsure (1)..(393): unsure at all n locations
tcgtccgtgccgtcgaggatgcctgtggagtggtgttttttctgcanatcaagccaaggcttagctccagttatcttttattnttccgctgcatttatgtaaggctttgataatgtttgtaagacgtggatctgtatgtcaactttgtcgtttgtgtaccccggccggtcctggacggtgattttaatggacattctacttggaattctattcataaatttctgggcgtgacattcctcaaatagctttaattgctcattgtgaaaaagagaataaaaatataaaaaaattaataccgaatccttggaaacagtcttgacgttaaggacgtattcgatgtgagcaaaataatggatgcggaatccctggaaacagtcttgacgacagggacgt

SEQ ID NO: 4890 - DNA, 327 bp, Oryza sativa
  unsure (1)..(327): unsure at all n locations
agcttaatggcagcacgtgagatactattgtttttctttcaaacctaacacatcttaacaaatcccatttgaaggaaggcacataataacagcgtgtttggagggttttgatcaagtggccaatgcagaagtagttggcagatggtgcctactggctagaattcggcgatctaacctgaaaacgaactgaaatgcgcatgtgaacggagtagtttgagcgagtgtgattgttcttgcaacaaagaaagcanaggtaattaacgtcgatggaatttctcagattaaatggcgctttataatggagatgggtatggtaggcaatcaatt

SEQ ID NO: 4891 - DNA, 443 bp, Oryza sativa
tatattataaaagaatttatgccaacatggtatctttcctttacgtgtcttgcacgtgcacgattactagtatataatctaaccctaagtcaacaggtcaaactccaaatcctctacccatccagatctgcaccagccaccaaccaccacccgagtcagtccgccggctccgggagcccgggagccacgcgcgccgccgttcgccagtccaccgggagcccgggagccgcgcgcgccgccttttgccagccaccaccgacgccgttcaccagtctgccagccaccacgcgcgccgccactcactgccttctctcgccgggatactaaagctgtcatcgccggccgtcgccatggactgaagtcgccgtcgccggccgcctttcatcaatgcgccgccgggccggcgcggcgcctgcagccatcttcaccgggagccgctatct

SEQ ID NO: 4892 - DNA, 328 bp, Oryza sativa
  unsure (1)..(328): unsure at all n locations
agctttgcacacatgtgcaacatagtnanaattttttatttatctccangngcgacacttgttgtgttatggatataaagggtatattctaacacgctctgattatttaattttagcctaaatcagaatgtacatccaagttactgatgacacatatataaagcacctaaacctattttatacccacaacgtcagtaacgaacaatatacggagagaattgatgaactatattattctatcaaaaatgcaaccagctgttgcactatcttcataacaccgcacacactatgtggttccggaccaatgtaaactgtacgacacattatt

SEQ ID NO: 4893 - DNA, 360 bp, Oryza sativa
  unsure (1)..(360): unsure at all n locations
tgcacggaagtggngcaattagagacttcttatacccttttcatggacatggagntaattttgttggcatctgggttgggtgggatctccttcagcacgtttgctaaccactttacctactatggatttaattttgaagattggtttcatgcatgacagatattgattntgactgacttaagattccttcaggaaatggaggaacatctccacaaaaaagattgtaaaaataaacttactacccataaaatgcagtgtttacattccttgaggatgtaccgggaggtactgtattttcagtgtaaattnttggtacctcccttgtgttgaggtacttgaagggagcacaaatttaagttg

SEQ ID NO: 4894 - DNA, 309 bp, Oryza sativa
  unsure (1)..(309): unsure at all n locations
agctntgaattggtgatgaacttaacgtgcaatgaaataagtgatatgtcnaattttagctcaaattctatntaaattttattgttttctcatattttagaaaaaagctaaatgttttagctgtagctatagccggttatagctgctcttagctattggagagcacaaccgctaagagccttagccagagatttagaatattgctagcgactagtgcggtggcagggaggaaaaaggaaaactgattatggttttgtggactttgcacaaatctcanattaatcaatggtctgaaatatataagatact

SEQ ID NO: 4895 - DNA, 455 bp, Oryza sativa
  unsure (1)..(455): unsure at all n locations
tgcanatcttaccacgattccggtcttcactatcttgggctgctaacacagtctccgcacgggtttcatccatagcccacagcatctcaaccaaatgccttgtggtagcatcattctcaattccctcagtctcaaggtagctgccacggtcacttccctgtggttggcgaggatggtagcgatactcagtgtcggccaactgatcactgtagcgatcaaggagctctcctatggcgatccttgccacctcctgacatgtatggatgtagtttcttcctccggcttcgaacatcactgagggaatatcttcactattactgttcaaggtgactttgactcggcacttctcttcgtgacgatcatgaggaatttgggcatagaaaggggcagtcccaaatcctatggcanaggacatcgtacgcaacttctggacatatcctcaacaccaaacaagt

SEQ ID NO: 4896 - DNA, 442 bp, Oryza sativa
  unsure (1)..(442): unsure at all n locations
tataataattacagtatattattaattgcattttagagtattatatgtattaggacatgtataggattctggtgatttttttatgggttcgccattggtagagggacacgtttttgtcaataattacattactgatgtaacattatttaagaagatagaaatgatgaaacagtgactcatacatcaccttgtagcctactctatcctttattagaagttgcggacgagaaactgacaagcacattatcacatccgggaatcgagaagatgggcattntcatattttattttataacagagaagatgcatggacatgcatggcctttttctccttgcaccggatccgtggatgatgtttacatttacctgcagatcgaataagtttcgagaaaaaaaatacctgcagaacccaatcagttcttatctatcggaacggtatcgc

SEQ ID NO: 4897 - DNA, 371 bp, Oryza sativa
  unsure (1)..(371): unsure at all n locations
agctttntncagatatatggagtgtcacattattattctgtgcatgatttaatgcatgatgttgcacaagaagtctccattaacaaatgccttattattgatgggtcagatcttcgaacagntccgtcgtccatttgtcaccttagcatctggactgagccggtgtacaatgagcaaagcatataacggaatgataacttcgaagagaagttagatgcagtccacgataatgtcttgggaagcttggagtggttaattcttgcaggtgtatatgatgagaactactcttgctaagttgtgaagactcttgagcgagtacgttatgtccggatgctccagtaaacagcatgccattcattctgacatttact

SEQ ID NO: 4898 - DNA, 452 bp, Oryza sativa
  unsure (1)..(452): unsure at all n locations
ngnttatctcttcttcttctctcccatgttttcttccgttttgttngagtcaagattcgcggttgctattcagacgcgatttcagttttcaaatcacgaagcctcatgtttctgttgctttttggcctactggtttatcgattttgaagcagaaattaaccgtatccttgtactgccattgcctttcttcttctttttttttcttacccttttgctctgttcttgcagcaatgtcatctgataactttgcttattcctttcacagagaaaaaaattaacataacctttgtttttttaagaaataatctggtttctgctggttggcttctagctctgagatcccgtgtgctcgcaatcaagtagggtttttgactgtttctactggggtctacaattttcatggaaacaatctttcnatgagtttggtgcgacangtgacgtaggacgctgta

SEQ ID NO: 4899 - DNA, 401 bp, Oryza sativa
  unsure (1)..(401): unsure at all n locations
cttatgtgatgatgtagtcgtcaagaccaagcagaaggatgttctgtttgcggatttagaagaaaactttacaagcattcgtgctttcaagatgaaactaaacccggaaaagtgcatcttcggagtaccgtcagggaagttgctcggatttatggtatctcaaagaggcatacagcctaacccggagaaaatcaacgccatcctcagcatgaaaccgccaagctcccaaaaagacgtccaaaagcagactggttgcatggcggcgctcagccggttcgtctcacgactcggcgagcggnggatgcccttcttcaagttgctgaagaagactgacaatttccagtggggacccgaagcacagaaagcctttgaagacttcaagaaacttctcactactccac

SEQ ID NO: 4900 - DNA, 331 bp, Oryza sativa
  unsure (1)..(331): unsure at all n locations
gcttggcttcgtctgctgacatanaaacatccctttccatgtcttcggatacaacccanaaaggcttgcctgttcttagtgcataaacccttgtgatcatttcgcgaactttgtgtaactcttccacttctagtaaaaattctggtgttcttgcccgataataagcactagcaggttggtgaagcataatcctcgcgtgggggaatgctatacgcttggtgggttctcctccaagcagaatgaaggacgccatggacgcggctattccgaggcatattgtatatatatctggtgtcaccgtttgcatcgtatcaaaaatcgccattcctga

SEQ ID NO: 4901 - DNA, 450 bp, Oryza sativa
  unsure (1)..(450): unsure at all n locations
aacgggtggttctagcgagatttgtaatattatttcctttacgctntgccgagatgtaaggggccattttaggattccatttcttaataccatgaccaaaatgaactcccgcttctatcatctctttcaaattgatgttccaatatcttcttgtcattntttccacacttccttgtgaactattcttttttttcatcctacctttccattacgaaatttctttcttttcgaagattaacaaagagccgaaatagcttgaaataaataataattgttccgatggaaccttctacatggtataagcataaccttaatgaattaactaaacttctttttaaattaaaataaaaatagaaaatctaacctcttagcgttctaaggtcaaaaatctagtttaaagtaaaaaatctgctntatgtatccttaaatcatataaatggggtaaatggg

SEQ ID NO: 4902 - DNA, 344 bp, Oryza sativa
  unsure (1)..(344): unsure at all n locations
agctntgtcagatgatgaaggaatgcaattgccacataactcatattatgaggatgatatcaccctaaattttaagtctttcaatcctgaggacatcaacaacccaattntcaaggttggaattgtgttttcttcggtggaactacttangaaggcaataactgaatatagcttgaagaatagagttgacatcaagttgcctatgaatgacagagagagggtaaaggcacactgtgcagaatgttgtccatggaacttgtatgcatccatggatagcagagtgaaatccttcactgtgaagacctatgtgccacagcataagtgcaagaaggagtgggttctac

SEQ ID NO: 4903 - DNA, 420 bp, Oryza sativa
  unsure (1)..(420): unsure at all n locations
tctcgaggatgttattgacgaaggaattcatgatggatattattcttgtggatatgccaatgncaaatgtatcttcttctgtgccttgtatatatatatgctgcatgtctacacatttttattcatgctctgcagatataaaacttgtatgtttcaacaaaatctttgagactacctaaatgacaactatgaagggcatctgtaccgaacctcgcttggataagcgcccaggctcccattctacgccagttgtcaacttccactggtgtgtttctgacttgacaatgaattatattagattacaagtggaattatggacccactgtatctctcgactctcgtagaatggggactcaatttccatttcccaataaggaatcttaatcaagcttggttctatattcattataacaatagaac

SEQ ID NO: 4904 - DNA, 255 bp, Oryza sativa
  unsure (1)..(255): unsure at all n locations
agcttattacatggtgggcagttcacacataataagtcgctcttttggagcacagcgctctgagggagtgacaaaaaacacttatatggcctaaatatgaactacacatgaggcctgctcagntgctgactataaaactctgcaacctgcagacttcccgcataatcatatatacacttccctttcccggngcacgtagcaccgtacctataccacaataatggcggcgccacgaagctcgacttcatactacac

SEQ ID NO: 4905 - DNA, 377 bp, Oryza sativa
cggacctatgaaactcagcttcctaccattccgtcgatgcaagccatactcatcatcttactagtgttatagcttcatcgtttagccttcagcttatatttaaattcaaaacttaattttagagttggttttcggtttttttcattgtggtttctttttcagtattcgtttttaaatcactaataacactaataagccatttcgcttgtaataagtataagcgaaatggtgatgctgttaaaatggccaagaaacatcagcactatacagtagtatgtgggaaaatatcagcagcactggctgcagacactgagttgcatgtggcagaggcagatcagggaaaaaaaaattcagaaccatctggattcatttagtga

SEQ ID NO: 4906 - DNA, 384 bp, Oryza sativa
agcttcggatgtgcatcgactacaccgaccttatcaaggcatgtcctaaggatccttaccccctgcctcgcatagatcagatcgtcgactccactgcggggtgcgaccttttgtgttttctagatgcatactctggttaccatcagattcgcatggctagggaggatgaggaaaaaactgcgttcattacccccgtaggaacctattgttatacatcaatgcccttcgggttaaagaatgcaggtcctacttttcagcgtactactcgaatttctttgggtagtccaataggacgtaatgttgaggcgtatgtcgatgacttggttgtaaaaacgcgcaaccaagagaccttactttcagatctagcggaaacttttgagaatc

SEQ ID NO: 4907 - DNA, 449 bp, Oryza sativa
  unsure (1)..(449): unsure at all n locations
ngcaagattaaaatntaaacacatttgatgaatttgaacatattttacaaaatttcaaacttgttgcaaataacggaaataaaaaaaacttgtagcgaataatggtaataaaaaaaattcagagatggacattcagatatttactacaagaaaaattgttttttatatgtactatttgatttagggtctaaaanttgatttatttgcctgatattatgaaactattttctagttgcctgatattattttcctaaataaaattcagaggtggactttcaaatatttactacaagccaaaaaaatgtttttatatatctactatatgatttagagcctagagttaattttatttgcttgatagaggattgctatggttggaaaagtttaagaaaacgaaaaaagggcatgggcaatatatcattttataatctttggatggaaaatgtgat

SEQ ID NO: 4908 - DNA, 178 bp, Oryza sativa
atgaccggacgctccatacacagaatagcctgtgtgaaatagcattagaaagttctcgtggattgtgacaatgtgaaaatgatgcgtgacacagactcaattctctcgagtaacgcttacaccagactaacatgagtggaccacgtgtgccacatactaagatgtcctacatcctctg

SEQ ID NO: 4909 - DNA, 372 bp, Oryza sativa
tgaagtatgagctatactagggtctctggcgtatatattttatcactcagctatgatagctatgcacatgagaaaattgtcatacgcgaaactgagacataagagatgtgctatctaaaaatctctacaaatgataaaaagactgccaaagcacagagttttgttgcaacaattaatagaatcaaactattgctatgacccacaaatgctcgtcacatgggacgatgtataacttacatattaattatcaactgtatgcacaactgctcgtgctttctgccttgactgccatcagcggaaagataacaaatgacgctgatacatagaagtgcagctcaaatcggcatttatggatgacacatcacattatgt

SEQ ID NO: 4910 - DNA, 374 bp, Oryza sativa
  unsure (1)..(374): unsure at all n locations
ctagtatatctgtgggagattagtttcatatgtttgacatatnaatttttattcttggttgacagtttgttgttatattaagagattgccaattcttttgattagacagcactagaagggtttgaagcaacactgcggacatcacctaatgatcctactgctcttgaggtgagttattatttccaacgtacttctggntgtcttaatactggtttttccccaataaatttcttttctcaatctgcattntgttgacatatgatattataataatgctgtagtttacattatctggtgcatangctgatgttgaaatgagcttgaataatgtacaaattcataatgggtatattctatcatgatagggttttgtc

SEQ ID NO: 4911 - DNA, 440 bp, Oryza sativa
cagatggctcggctcaaccgagtgacaaaggtgctacatatggttctccagcaaatcaaggtgacaactctcaaagagtgcacagggttcaaggtgatggttctcagggagttcaaggtggaggtgttaatcaagacggcaatgcagcgcagttgcagttcaacaactttcaagatcaggttgactatgctgtacaccatgctttgatcaatcaatctggaatattaaccaatactttggcaaacatggtgaagtcaatggttgatggttcaatagccgagtatcaagctacaggaccagtttacctactaggaggagtattccctaattatcggccattaatcaccgataatcaacaagtcgtccagtcaatccctcttaatgcaccatcagctcagccgacggcaccggtatcggctcctgcacctgctccaccacct

SEQ ID NO: 4912 - DNA, 371 bp, Oryza sativa
  unsure (1)..(371): unsure at all n locations
agctntgatagtttccctcanattcaaatatttattttcatatatacaagttgctttggtgaaactaaccggcgggtgaaattcttgtcattcctaacccgcgccgagttagtccattcttgctccattgtgcagaatgaggaggcgattgtctcgtctgttcaaggggtccggctcttcatcaagtcatcatgacgagtctagtactcgttcatcagctgttgtctcgatggaagacgccaaagctccgcgacgactcctgaacggcaccgacatcgaccatgtcaatgatcgggagagacaagcctactacatgctgagcgactgggagtatgctcacacgcgagaatactctccagagctgctgaaaa

SEQ ID NO: 4913 - DNA, 471 bp, Oryza sativa
  unsure (1)..(471): unsure at all n locations
tctgcaacggaccttaaactagctagcatgcacagatgacaatgacccatttttgcaacgatttggaccacctcttttcctgttcctggcattattcatagctcgagcaattctgttagcaaccaaagccaaatcctcctcctcgatctgttcgagttgatcatcggatgtggcattaaaaacagcaagaaaagaaggcttagatgaagaagcatcaacatccaaagaagaagaagaagaaaccaaagcactcgacttagaatcaacttttcgagaaagaacattcatcttatgtgttttcaattttatataaagtgaatccaaagtcaaagtagtcatgttaacagactcctgaatagatgtaactttcatctcccanatagacatgtcaagaccattcaaaaagtgacgagaaatctcagatggtggatagttagtatcatangaagagtcacagatctaagatcactc

SEQ ID NO: 4914 - DNA, 410 bp, Oryza sativa
  unsure (1)..(410): unsure at all n locations
agctngtctagtatatctgtgggagaatagttttatatgnttgacatataannttttattcttgtttgacagcttggtggtatattaagagactgccaattcttttgattagacagcactagaaggttttgaagcaacactgcggacatcacctaatgatcctactgctcttgaggtgagttattatttccaacgtacttcttggtgtcttaatactggtttttccccaataaatttcttttctcaatctgcattntgttgacatatgatattataataatgctgtagtttacattatctggtgcatangctgatgttgaaatgagcttgtaataatggacaacattcataaatgggtatcattctatcatgattaggggcttttgttcgtgctacaagctagtctacat

SEQ ID NO: 4915 - DNA, 393 bp, Oryza sativa
ccttcagatggctcggctcaaccgagtgacggaggtgctacttatggttctctaaccaatcaatgtgacaactctcaaagagtgcacagggttcaaggcgatggttctcatggagtacaaggtggaggggttaatcaagacggcaatgcagcgcagttgcagatcaacaactttcaagatcaggttgactatgctgtacaccatgctttgatcaatcaatctggaatattaaccaatactttggcaaacatggtgaagtcaatggttgatggttcaatagccgagtatcaagctacaggaccagtttacctactatgaggagtattccctaattatcggccattaatcaccgataatcaacaagtcgtccagtcaatccctcttaatgcacca

SEQ ID NO: 4916 - DNA, 205 bp, Oryza sativa
cattgacaacagtagtgtcatgccatcgcgagtagcatggagaaatatttgccagtccatgatttttcaccgagatgataatggtttcttgccatgctaattaaattggtgttgaaataggttcagatctagaaatgagctctcgatgggtttatttttaaaaattaaatttagaaaggttttaaaacaatccagaatcgtgagt

SEQ ID NO: 4917 - DNA, 337 bp, Oryza sativa
  unsure (1)..(337): unsure at all n locations
ngagaccgggaacttgctgatccctgtgtgcatcctgtactgcacatccaggaggtgcttcgggtgtcccagcgaactcagcctctcaaacaggctccttccaaactcagcatcttcacaaacctgtgaagaaacaaacagacaattgttacatagcatagtaatagagattgtgaatgttctactaatagagatggtgagagcttaccctgcttttgacaagtgccggcagctgaaattcatagccgatgagaacggcgtgacgaacgccagggagctggagaggtatcagtgactcgcactccttcagctgtgctgcctcgtcgacgacaaggag

SEQ ID NO: 4918 - DNA, 449 bp, Oryza sativa
  unsure (1)..(449): unsure at all n locations
cccttctggacttgcactagagttaagtagatctcccaggcctcgtgtttttacatcaacatgagtagaattagaatagtctgttagttattcaattcttccagagatttcgggtatagctctagtagcacttctctcttttgtaagactttatccattaatgaagtattcttctctatatagttntgttcctttattttacttatataattattcgagtaccaactttagttcatacttggctcatactattatgtaactagcttactggagatatacaatggtattggtttgttattcatttatttgattgctctatgccatctgcagagatgtagagtagtatttagtaatgtcagcaatgtgcttagattattagatgtcactaaatggtactatatgcgatagatctgtagatntaatgtcagcaaggtgcttagattactgaa

SEQ ID NO: 4919 - DNA, 423 bp, Oryza sativa
  unsure (1)..(423): unsure at all n locations
agcttggctggtaattctgatatgactcattccgtttcttgaagatnataagcagatagattgtggaactacatacatgttaaggaaattagccactatactagcaatatataatagtgctgttttcagcaaaaagaaaatgccgtccacctttnttttgttttcactgcaacatgcggggttngtactagttcctatgttcttgtgcccaatcaaatgcaattagtgcgacaaaactactctataaattaacagacataaccaacataaacccaagaatttgaaggctgcgttaaagaaaagttcaatatacaggagtaacatttgcagtataaatataacaatgagggagtaaacgctactaaacgtacagctttttttgttgatcaattcggtattgtccatcatcctccacatgaatct

SEQ ID NO: 4920 - DNA, 432 bp, Oryza sativa
  unsure (1)..(432): unsure at all n locations
tgccaacagcaatcgggttcgctgtcttccttatgacaatatgaccaggcatcagctccgtcggttgaacttttntgttgtaagttgccgaagtgcttgtggtatactggcgcatgtgcttcgactcttaccccctccaagagttcgagcgacacctcgcgcccctcttcgcccccagagaacatcacccttggtgagttagcctctagctccgctggggtcattgcctcatcgccacaaagaagcataaacgggttaaacttggttggtcttgtgggggtcgtccgaagggcccagagaacagatagcacttcctctggccatttgcccttcgctgccccctcgagccttttctttagtgcttctaggatcttgccatttgtacgttcgaccgccccatttgactgcnggtgcacgactgacgcgaacctg

SEQ ID NO: 4921 - DNA, 126 bp, Oryza sativa
  unsure (1)..(126): unsure at all n locations
ttagagacacccgccgcatgcagctgtgctcttatacttngatgaggtttattttctatgaaaacatccctattgggtaattggatgctccgatgctcatcctgacctgcgatacacgcactaaca

SEQ ID NO: 4922 - DNA, 393 bp, Oryza sativa
  unsure (1)..(393): unsure at all n locations
ttaagtcacctgccgcatgcaagcttgtatnttctctcccagctatcatttgatgtcttaagtgcggtagagcttgtttctggttctttgttcatcttctatcctagatagatggaacatgctgttgttagtgccgcggaaggtgcgatccacactctcttgggaaagctcggcacaatcgtcctccaagaagcccagcttctgggaggtattcggggtgaactgcaacacttgaaggatgaactggagagcatgacagcctttcttcatgacctttctgggagagatgaatgcggcaagcaagttaagatttggaagaagcatgtgcgtgagattgcatatgatatcgaggattgtattgatgagttcaaacatcaacttggtgacagcagt

SEQ ID NO: 4923 - DNA, 409 bp, Oryza sativa
  unsure (1)..(409): unsure at all n locations
agactaaacagagaggcgacactgatatttactaagnatatctggggataatatgagccattaatatattgttattgcgcatgtataggagacatggaatattgcgtggagttgaccattatgttggcactttgttggcgtgtagcaaatgtcatgatgcaaaaattctatgggcgccataggttttcctgtggtggaacgagttgacgtgagttaaactctagattagtactgttgctcgtatatacggattcttttcataaatgaccgatgtacttttgaacaataagataaaacctttgtcaatctcgagttatacactatcggtgagatcgtaatgataatatatacacttactaatctaagatcatgtgctgctagtattataataaagggggtgcacatatta

SEQ ID NO: 4924 - DNA, 444 bp, Oryza sativa
  unsure (1)..(444): unsure at all n locations
agcttcataaatcgctacaacatttctatttacttattctaatggaagcttaagattgttgatcatgggaatcatttcatgcatggtactactatntttttcttttatttttttatgctgttctcttcttttttattttcaaattaaagcaagaaattaactaatatatcatttactacttttaaatatgtcaaagaacatgatatcaaagttttgtgtacctaacggtatcaaagtactgcctagtatcaaacacatgtatggaattggggtggtaaataaggtcctatctagaatgtatgaatttgtacgtgtagatttatggaaaagggagcatccatcacaatatctcattgctctgaatatggtctgacacagaatggaagactattatcacagactgaagttttttttttgggaaaagcgttgaattattgaatgtag

SEQ ID NO: 4925 - DNA, 277 bp, Oryza sativa
  unsure (1)..(277): unsure at all n locations
tgctcgcggctgctctgntcttctagtgggtgctcgcgttgtgtacatgtatctgatcatcactagattaaattaattaacggtgttcttgctgcctgcccttctcttaaactctccctgtgtcttctctaatggccatgtgtaatgatagatttattatgcagggattctattgataattatatatattgcaagtccatcagccagatctgcgcatttggagttgtgtatgcggctttattcttgcttgaattacgtaacgcacttacgctgatgg

SEQ ID NO: 4926 - DNA, 405 bp, Oryza sativa
agcttcatgcctactgtacaccataacctgtttttatctaagttttctactcagagttgtaccttatacgtgaaaatgaccaaatactgttcgctacttgtcatctttgatgaaaaagtactgtgccatatcttctgttgtttgttaacgcctcttttatatcggcaggttgctaccgatgttgacatagatgaagttgcacggaggacagaaggctatagtggtgacgaccttacaaatgtttgccgtgatgcttcaatgaatggcatgagacgaaagattgcaggcaagacccgcgatgagattaagaacatgtctaaagatgagatctcaatagacccagtggccatgtgtgactatgaggaagctctggccaacgtcataagagtgtatcacccgctgata

SEQ ID NO: 4927 - DNA, 435 bp, Oryza sativa
  unsure (1)..(435): unsure at all n locations
ngcttgagagaaatgagagagctattgcttgatgtgtgtgtgaagtgaagagagtgagctccttatatagaggtagttatgacagttgtggaaggggaattgtccaaagtgccctccaaccgtcattgggatgcaatcctggacgtccaggtcaaaacctggatccaacggcgccaggattggtccaagttcggccgaacctagggatggcccaatccagcccaatttcggctggtgtcctcctctattgctccactccatagacttgtgaattttggcacaattcattgtgtcagntctgagttcttggcccatctattcataagtctgggtctcgacatcgttcgattgatttatcatctaagttgatgtcgattcttctccactttattgtcattctctgcaaagggtagtaacctaatactgtagaaaata

SEQ ID NO: 4928 - DNA, 431 bp, Oryza sativa
  unsure (1)..(431): unsure at all n locations
ctttcgctcaaggtccttgataagaattgaacccctgatatctgaagtacgcttgaagggcatcgtgctgttgctgcatcatgttgttgaagttggcgaattgagcatcagcagtctgttgccattcttgcatttgagccatgtattctgtgaggtcgtactaaatctccctcgtctgcatgtcaagggtgttggtatttcttatgaccacagataaatccgcaagcgcacggaataccgctgtagcacttcaccttctggtgacccgtacaggatatcgaacttanggaacgtgtgtaatctacctaaggctaagactatncaaggacaacaactgatgataggtaggctagggtagacaggactntctatgctgtttaattatctacgctaagcaaatgtaatntcctatctgttgcttctggcaccga

SEQ ID NO: 4929 - DNA, 365 bp, Oryza sativa
cacctgcggcatgcaagcttctctttcaaagttcctcagtgtttatgttcacataaagaatcctcagagttctgtctgattactatcacttccttgtgtgagaaccataaccaccttgtgggccttacctctaacatgtttagaaggttggttttggatgcttttatttatcataaatattgccaatctcatatgtgtttgtggtactaatcttgcagcgacatgtctccatggtcgagcttgtgaccataaacaaagcactgccgggagataccctcgattatcttggtaagtgttctttataataaaagcaagaaccagttcttatgatattatacaccttccggtattcttggtcagaacta

SEQ ID NO: 4930 - DNA, 465 bp, Oryza sativa
  unsure (1)..(465): unsure at all n locations
ntgtatggcttgaaacaagcacctagagcatggtatgatatgcttaagaactntntgcttgcgaaaggttntacaatgggaaagattgataaaacgctttttgttcttaagcatggtgataatcaactgttcattcagatttatgtggatgatatcatctttggttgtttaactcacgctntggttgtagagtttgctgagactatgcgtatggaatttgagatgagcatgatgggtgagttatcgtactttttgggattgcaaattaagcaaacacctcaaggtacatttgtgcatcaaacgaagtacatgaaggatcttttgaggcggttcaagatggagaaatgcaagccaatttcaacaccaattggttctacaggtgttggatcctgatgaagagggtgaaactattgatcaacaggagtatagaagtatgattggatctttgttgatctaactgtttta

SEQ ID NO: 4931 - DNA, 323 bp, Oryza sativa
  unsure (1)..(323): unsure at all n locations
agcttngggctgggttaagactgtcaaaaactgctaggcgtangcactggcttgccttgccgcttcgtacgcttgctgctgctcttgcatctggcgaagcgtatcttgcaacttggccatgttctgacgcatagcgcccatgtcagcttcggcttgagcttcaaggctagcgttggcttgcgagttggtgagtgttgtcgaagttgtagcttgttgcgacgaggcggcagcttgagacgccctcggtatttgagacgaaaggattacgtccctgatctggagcgctttcgccgcggccgctgccttcgccgcctcctggtctg

SEQ ID NO: 4932 - DNA, 395 bp, Oryza sativa
  unsure (1)..(395): unsure at all n locations
tcacggtgcgaggggtgatctgaatctttcgttcaccatctatggaatgacacattgtgtcggggttggtcttcttgagactttcaagtgtcatgcaagccacggcgtctagcccgatttcccccaatttctcgtggtgtgtattggacagcacacgacaagcctccgacgctaacgtggcgctgcaacatgtcacgttgggcccctttgattcgggtggctgcanacaaaaatatagacctattgaaattaagcatgaataataaaaatccaaaaaagatggtgctagtatatcaatgccgacactagaaataaaaataaaaggatgtgaatttttattgatatgtcactgaaagacacgctatatatgcagngtatgaagtgttgaaaaaaag

SEQ ID NO: 4933 - DNA, 373 bp, Oryza sativa
  unsure (1)..(373): unsure at all n locations
agcttgcccgcatgtacaccgaacacacatttattttgtttagttntatgcgggcagagcggagactctcaaaagtttccgctagatctgagagtaacatttcctggttgcgcgtctttacaaccaagtcatcgacataagcctcaacattacgttctaattggttacccaaagaaattcgagttgtacgttgaaaagtaggacctgcattctttaacccgaagggcatcgtcgtataacaataggttcctatgggggtaatgaacgcaganttttcctcatcctccctagccatgcgaatctgatggtaaccagagtatgcatctagaaaacacaaaaggtcgcaccccgcagtggagtccacaatctgatc

SEQ ID NO: 4934 - DNA, 484 bp, Oryza sativa
tgccacgctgtgacctgaatgtgacacgctacttcgttttatgaattgattattttcctttttggcgctttcataccttgaaatcttgtggcgcgcacaagattacgtgtagtactaatggtttgttcaaagaaagtaaccgaccagtagtaccaaatatacaatcgtagggtgtgtttaatttcacgctaaaattgaaagattgactaaaattgaaagtttatagaacaaaggtagaaatttacgtgtgtagaaaagttttgatgtgaagaaaaagctcgaagtttaaagaaaaagttgggaactaaacataggcttactatttgacacattgaataaaattcagatccaaccgaattcattttgataaaacatattagcatgcaaatagaacatctaatggacacttacacatattgtaatcccacacatgatcagactacctatataataggtactactagttcttacatgcgccaccaca

SEQ ID NO: 4935 - DNA, 179 bp, Oryza sativa
agtcccactgctgcatgcaagctataatgacaggcgcgccctcctattatttttgaaaaccagaaggagattgtggcgcactacgttcttccatctaatgagatcattggatggcttactgcgcacgactaatcattttctatccccgacacacatggcgtgtcgtggtatttgctcat

SEQ ID NO: 4936 - DNA, 368 bp, Oryza sativa
  unsure (1)..(368): unsure at all n locations
ctataaaactaagcttggtgagctattctttcttggtgatctcttttatgtatctgtgttcacaaggtatcctagctgtttgtttttgagatattaaggatgaaaggaagagatgcatgtaccccctcattaatgatgaccgatgttatgggagatggagggtggttngggggtaaaatatggtgaaaattaaatgactggttgttgggtgggagaagtagtactctaaggaccccctaggtaatnctaatctaagacacttgacataggtttcataaactccggctcttctagaactagatctagacactactatcttaatacaaaccacaatattccatacttaaatttaatgctacttatatcac

SEQ ID NO: 4937 - DNA, 399 bp, Oryza sativa
  unsure (1)..(399): unsure at all n locations
tgaaactcagttaagagtgtgtgagggaggagaaccaatctttatcgccggtcatgtgccgcgaacaaccggaatacacgatccacacgttcttctttcttttcaccaatgcctacacacaatcagaagtcgaagccttagtaccggggttagacaataataaaaatttaggaatccagtactgagacacatgaccagaagatccaataggcatatatccacctgcaaaatcaattttagaactttcagaagaatttctccaggcccgtctgacctatgacattggccgtatgaccgcaatgaccaccatcttaccgtgttctctaggaaaccaaattttgcacttgatntgcaaagcatcacttcttcttttcctgtatgactaactgaacaaaccac

SEQ ID NO: 4938 - DNA, 423 bp, Oryza sativa
agcttaaatgagcctgttacacatcatcagtctttgttcatcaatatataagatatagttatgccatactagtattatatcgacattcatttgtaagttcaagaaaaaagtgggtaagaatgaaagatttatgtggagatattagcatatatgtccaatgtcatgcagtcatcgaacgtatatgcaaattacataaaaaccagtttgcaaaatgcactagtatttggtttatgtatgatattatatagttcggagggttgggtatatggtttaatagattagggtgccaaatggactttcaatcaaagtttcttttgggcggcgtgtatttagaactttctaaacttatgtaatatgtatctatacgttagtttctattgtatccaatcttgagtattagtttctttctatgttagaatatga

SEQ ID NO: 4939 - DNA, 362 bp, Oryza sativa
agctggacgaagatcccgatccatcggagaacgcacttcgctcatgtcgtatcacttcaaatacgaagtccgtgagtatgttgctggcgaagaatccatctcttgaacccatctctgcacaatcctgaagcaccaatatccctctacctggcgcgccactatcaacgtttgatgtcgcgaatccggtacttgcatattatggggatcgtcggtactaagatatatgcgagattgttatacaacagatggggacgaggactttatacagttcagagccaaaatcgcgggtataccatacacctgctggcaagccgtcgtggttttatcccatatcccccacacactattggggatcatctact

SEQ ID NO: 4940 - DNA, 457 bp, Oryza sativa
  unsure (1)..(457): unsure at all n locations
agcttaactatcttnttttctctctnttcttgtactgtgtgatatagcagcaatgcatatcattatcacctaagttagctagcatatcctgtggccttttcattccaaattaaaccaggcaactattttagccagctagcaagacatatttgtctggtcacttcaaatggcaccgtgtatacatacatacacgtagctgccctagctagcttcaccaagaaaacgataaaaatgtaatagaaatgcttaaggaattggaataagcaaaagttaaaatgaatatgggatggggaaaaagttagtacttgatcttctcgtcgtaacggctaacgagaagaanaatcttcttatgggaagtgttcccatccatcgagctcttatatggtcaattaacgagagtgatattgtttttctatatgtactaatgatttatttggtgtctacaaaaacattggtt

SEQ ID NO: 4941 - DNA, 395 bp, Oryza sativa
  unsure (1)..(395): unsure at all n locations
ntntcttgctgattggatctagaagtaccatgtgatagaatatgttttataactattggttcttcagtattgtttatatttgcgatctgcattccactcattntatgtttataggttgcattctgctgtatttattctttaagcggtttgcaccaatcaaaatgttaattcttacatgtaaggttgtgataagatacaagcttacgaatngcctgcgtatttccaattatgggtgctcatatttgtacccctttcattgtgtangagcacccagacattgttgtccatcttgttgatctcatcggcaccacctcaataatggatgtcagctgttggtaaatcccgtccattccctatttttgcatgttcatttcatatattgatgccatgatact

SEQ ID NO: 4942 - DNA, 362 bp, Oryza sativa
  unsure (1)..(362): unsure at all n locations
agcaagcacaaaaaatatgcagaaacattctcgtttatgtcaatagagatgacgagcaaaagaaaaatagcaaacaacctccatcaccggtggactccaccctatcctctgcggccagccacatggaacacgatgtgcaaatgtaggacttgtgcagcccatcaattgagatcaggtaacattggagattgcacattaattngatatgcaaaataattggggcttcttgcgtgaagttgaaggagagtatgcagatgcaaatcacagtatcatttccttacttgcttgttctattaatgtcgccaacgcgaagcagccgctggttgcttctattggcctacgagaacacctccttgctggtt

SEQ ID NO: 4943 - DNA, 474 bp, Oryza sativa
  unsure (1)..(474): unsure at all n locations
ttaattntgcatgtggagatatatattcgaatgtggcaacctctatggtctgagaatgcataatataagcagatcggcacaagtattaccttggtgatgataacctctgtttaactttccgaccatcagatcacaataaggcaatatgaggacaccacctaagatgtatcggacatcagaatgaatgttttttttttgttgagatgtaccccagcagtctaacccctgcaatagattgaaaaacatacagagtgagattgtttctttgcaagacacatntttaccatcatatatnttaattccatgatatagcataaggacagaaatgattaacagttgtctgtagctaaactctgaaatgtctttctttttgatccccagtgagcagaaaagagcaagcaagtgtacgtcctaaaaatacaagtacattttaatgataaaactggtcccaaaaacagggaataggaccaggat

SEQ ID NO: 4944 - DNA, 411 bp, Oryza sativa
agcttagctacaattcattgaagaaagtgccttacctcactaggtgaaagaacatcctgttccacagagcgtgtggaggttacaacaagattgtcttgccacatgcttgctcgactttggatcttaaattgccactcagatccaacaagaacaagatccagaataggatccaaaccaagatctggctcaaactttgctacattcaaatgatcatttttaagtcttacctgcataagaataaaaatataaaaccacagtaaccatgagaatgtatatttaatataaaatgacaaagaaggtatgccacaagggcttaagaattctcatgcttacctgagtagcaaccaaattgacctcaccattttcaaaagttaagacacccttatgtcttatgtacttctgatgaaccat

SEQ ID NO: 4945 - DNA, 495 bp, Oryza sativa
  unsure (1)..(495): unsure at all n locations
tctctggcccttcacaattcatatttatagtgaagcgaagtcgagagtatgcttttggtgtctgggctgcagtttcttttaatgctcttctattaagtacatggcaaaccatctcagaaatgagtgtactaaaattcatacaaccactactcccatgctgacccgcatgctgcgagaggcttatattgcaagccgccaaataacaagatagagcttcttcctgaaaaaatggagcttcttcctcaaaaagaaaactacatgtaaatgtaatatttatacgccattgcacacaaactgaccctttccatttgtgatttaaggcccgcaaggctcggttgcagatttgatttgagtagtgtaccgtgacttggaagccgggatgaacaaaagcacgataggaagggcanaagcatctatcaccctgtctacgcagggtgtcacagatgtcttccacagattatgcctaagcgacaacagttcagcatattatacact

SEQ ID NO: 4946 - DNA, 305 bp, Oryza sativa
  unsure (1)..(305): unsure at all n locations
acctgcatgcatgcaagcttanacaagtggtgatatgggaggtatatgtattgttaataaataattggtcacaagtgtgacatggttagctctaaatgtgaaagcgtagatccctacatagaaagtttggtatgacaaagatgcaccaactaaacaaattactgtggtgtttaaatattccaggggtggtaagatttatcgtgtcacatcgaatattatatacggtgtctcatggggtgttcgggcactaataaaaaaactaattacagaatatgttattgaaccgcgagacgaatttattaagc

SEQ ID NO: 4947 - DNA, 458 bp, Oryza sativa
  unsure (1)..(458): unsure at all n locations
agcttatttatatgtagaaatatccttaattattattatatttcatcaatatctcagtatatttcttaacttggtaccccatctgaatatatctgcgtccaccactcaacaggtgaagagagactctgctgcacctgttttttgattgtcgtcatttgtttgtgctggagaacactaatcctgggtttcatcaaatggtggtacttgctaggattntattatggagaaagggtttcatggaaattttctttatagtggctggcacattnggaaacaaataaatgcaccaatctttcagaagaaaatgccaagtgttagtgcttggtttcattcttttaaatttgatatattctcctgcgtacttgtagagagaaggatccatcggttgaacatcaacggcagtataagggttccaagtttctctattacaaaataataataataataataatacatat

SEQ ID NO: 4948 - DNA, 385 bp, Oryza sativa
  unsure (1)..(385): unsure at all n locations
gttcttcattttcacgagcgatttgtaaattaagttaatggaacaaaatatttcaccttgtgcccacattctataaatttgagtacctgaattcacctccaccaaatggaatgccacatctcttaaaggacaaagatattgtcttgtcatattgctgcgcaatctctacctgcacaacgggntgtgcaatggaactaggcttatgattagagcattgcagaattattccattagtgctgagattgtcagtggtgcacatgctgggaagagggtcttcataccaccgattgcatttgcacccctcggaggatcttcaattgcctattaagttcaagcggaagccagttcccattcgtcttagctttgcatgactatcaacaaagct

SEQ ID NO: 4949 - DNA, 436 bp, Oryza sativa
  unsure (1)..(436): unsure at all n locations
agcttgtaaaagaagaggtcacctctatcttttatgtatatccaacattatttttcaaccgtgattcaactatctgatacttccatgattactatatgtctatccaaaagtaggttttaagacataaaaaaatgtgttgtgttaacatgcatgattcttctgatagatatttccgtcagcttctcgtcctcttcctcgtccacacaggagcattgtcattgtatcgatgtgttggttcatactgccaaacaataacggntggtccaattgctgccacaatgtcacttctagtcatccttctgtttggcggttcctcattcctcggcgtagacacccncatgcttaaacaaactacatatagaagagttatattcttataggaaagatatcgtacatcactattataaatatcatctacacttctacagcatctatg

SEQ ID NO: 4950 - DNA, 448 bp, Oryza sativa
  unsure (1)..(448): unsure at all n locations
actaagcttctccacccttctctggagcctttccgttgtcgcttgtcattatgactgtagacattcaatcctcactttgcaatagaaacctctaagggatataaaaatcattatactgtcaagcctgagtaacgccttcagggagttgcttcatagaataagcgatcctaggctgtcataaaaatggaggaatgaagttcttgtcacaagatgtaacactataagtgttcaagaatgcatacagggcattgactacactcataaggacattaatttactcatttaaaaggaatggggagtagaactcatgtcactttggctttcttaacaagatggattttacaatcttctattannaagaangagccgatgtgatagtgtatctacaccagtacaccatcccttcactgtacatcttttgtcaaaactaaaattgcatattcacaca

SEQ ID NO: 4951 - DNA, 418 bp, Oryza sativa
  unsure (1)..(418): unsure at all n locations
gcatgcaagcccagtggccttcgctgttttcgtgttttatttatgtgccaagtacatcgaccttcactatttgctcttgtcaccgccggtggagcaccaagcccgttagcctccgccgcctncgccctcttgtcttctcatcggaatagaaggaagagaggagagagaatcccttctctgtgcataggagcctactgatgacgtctcctgaggaacctcagcagtgggggcaaagactcctctagactggccaagcggcggtagcacacacgcacccatccgtgcctctcttgtggatatgtgtgtgtgagagagagagagaggcgaatatataacgatcggtgatttgtattacatggtgcctgtacctctatacgcgtggaatggatctcgggcacacttgtgctcatagatacca

SEQ ID NO: 4952 - DNA, 289 bp, Oryza sativa
tatatattgagtcttcttggatctgattgaaaaattcttgtgttttaatttcctactggtattaattcatactgcgacaggtaccactaccacagtggcattttcaccagttgtgcgtccttcatactctgttacactcctagatgatactaatgattgtttgttgtttcattgtgattttagattctgactgagctatgtctgatcatgatgttttccttgtggggcgtgatatggattccacaatgttggtttctttttcccctctctctcccttctttttattctt

SEQ ID NO: 4953 - DNA, 351 bp, Oryza sativa
agcttgtgagttagtggggtaagagctttcagttataatgtaataatgaaactcagttaagagttgttgagggaggagaaccaatttttatcgccggtcatgtgccgcgaacaaccggaatccacgatccacacgttctccttcctttccaccaaggcctacacacaatcagaagtcgaagcctcagtaccggggttagacaataataaaaaattatgaatccagtactgagacacatgaccagaagatccaataggcatatatccacgtgcaaaatcaattttagaattttcagaaaaattcctccgaggccggtctgaccgaggtacagtggccggtctgaccgccact

SEQ ID NO: 4954 - DNA, 430 bp, Oryza sativa
  unsure (1)..(430): unsure at all n locations
agcttgctaaataagggcctctaaacaactcttcttttcttaaacaaaatgcacgggaacttacgttcactaactggatactaaaacggacaaaggaagtggagatcaggcgatgtagactctaaatgacagcttctcgcacggtttgcaaggccgaaacaacatgagntttactattatcgtcatcattagaagtatgttcctttacctgtcgctgctagttgttttctattttaatgtaatctactgtatagcttatcgctcacatgtttagtacgtaatgctatgaaatgctggacagattgttgatattctcaagatggactcggaatcactatcaacaaaatactgctctggacccaacactgcagctgatgctggtctaaaaccagatgtgtatgaacttattcatanggtattgttgcatata

SEQ ID NO: 4955 - DNA, 453 bp, Oryza sativa
  unsure (1)..(453): unsure at all n locations
agcttagctaggtgtaagtataattaagctaatgtatctaactttaggtagttcgnttgtcactaaaaaaatactatcagcttccgttaattaaggagctaaaagcatgaacacatgtcagtcactggcagttcagcagatgcatgcgttctgcaactcaattagtgggcctctaatctacgctttttacgcctaaacaccagattaattaatctaattaaactatgagctttgctagctaagtcgaaaaagatggtggaatatgcccatgcgagaagagcccaataatacagacaggcgcatgcacaaagcangtggacttggataatgaataataacgtattgggtaagcttaattagcttaatcactttggttatatgggttcttaaatagggattagtgttgataattaagagcctttggacacacatgtagtgagcatgtggtactat

SEQ ID NO: 4956 - DNA, 424 bp, Oryza sativa
tcgagcagcaacagttgaacggaggattgtgcaggggttggtgcgtcatctggtgtgtcggctactcagctgcgcagggcagcatgactgattatcagcgctaattatcggtggctgttgcggcctggagttcaggcgaccaaaatgggtcgcctggctcaggctaaccgcaagtcagaaggaatcatgctaggcaaggggtagttgatctcaggatagcaaccaaacaaggttcaagctagcctcaggcttgtcttcactagggcaaggtcttctcagggcatcaaccaaatagcccctttatccacaagtggttgtagggcctgcttctgcaacatgcaaacgaacagcagaatgctgatgtaggtacaatgaatgtcagaaatcgcgttcggaaagcatgactgaccaacttcaagtcctc

SEQ ID NO: 4957 - DNA, 422 bp, Oryza sativa
agcttatagtaggcttatagcctctaaacctacattattatatataataatatctaaaattaccactgtaaaatatatgaaacattgttggagtatgttggtgagggttgagaaagcaagaggcgaattatgcaccttgagaaaaattcagaattccctgtcggtgacttaatacccacatgaattcgatataattcctgtcagtggtgcagacgtcctcgacaggaaaatcactggccatctgatgatctggttttttcgagtagtcattggacaataacgaggccatatatattgtgcttcttcttatttttagggagggcatattgtgctgtctattatctttttaagaagaatatcttcgtacagattcaaaaggtaagaacctattaattacactcaggttcaatgaatcttcctta

SEQ ID NO: 4958 - DNA, 424 bp, Oryza sativa
  unsure (1)..(424): unsure at all n locations
agctttcccactcctcttctttgaagaacaggtgtgcccgaacagcactggtaagtgaaaaaatgttgacaaaaggatgttatctaaaggtcatcctgtcatgcatgtgtcacataacagcaagaagacctttaagaaagttacagctcagtcaaatacacaaagggcaagggtaatggagagaattgaactctcagctcaaagagcaacggatatcaatccgtctgtcataccatttgacaacacccccttatgctggcaggaaggacaaaagcgggttgccaaatcgccaaaataggctgactatgacattacccaatatccttcctcccagatggttgtagaacacactagttaagaagaacaaaactaccttcctgtaaaatgaaagaagattacctganatcataatctggatacatgt

SEQ ID NO: 4959 - DNA, 401 bp, Oryza sativa
  unsure (1)..(401): unsure at all n locations
taatgacggattaattaggcttaataaattcatctcacgggttactgatggattccgtaattnttttgttattagactatgtttaatactttaaatgtgtattcgtatatccgattttcgatgtgacacggtaacaanatttacccttggatctaaacacagctataaagcaccggacgaactggattattttccctgtcaatctgatcgacacacacctctcataacgtaacattattcacagagaactgaaaacacaggcaagtttgaagaagcaacatggtaccaactctcacatcacaaccacaaaccatgccaccaccatggttgcctccaaatacagctcaatgaaagcatcaacatgcatgctctctctctctctctctctgngtatgatgaga

SEQ ID NO: 4960 - DNA, 420 bp, Oryza sativa
  unsure (1)..(420): unsure at all n locations
agggagtatatatgcattccttctgcaaatatgccctttccattctgtgatatgtataaagccgaattgctcgaacttctcatttgttgatacctgccgtaatgctgaatcgatcaaccttctgatcagtagtttcatgtcacctgtccatatcagcgactaagaggcaacaggagaaggcaaagaggagaacagcaagagtatactgagaaggtggagagaacaatactcagaacaaccttatggagcagagtctcgctgacaaagataattttgcgtcgcccgcggacctagaggtatgtccgcgtcttcatttgcttctngaaattctggtccgtttcatcgagagaatgcctgccattcgccatttgttcgttcattgaaggtagtgctccagaatggagatctacttacagactc

SEQ ID NO: 4961 - DNA, 317 bp, Oryza sativa
  unsure (1)..(317): unsure at all n locations
agcttcttcttgaacacccacttgcactctactatgtttctcccatacggtcgctctgtcacctcccaagtcccgttagcgataatggaatccatttcactacggacagccttcttccagtagtctgcatcacgagatgcatatgcttctgaaattgactgatgagtgtcatccacgaggtacacattgaagtcatcaccaaaagacttagcccgcctttgctcttactccttcgaggagcttcactgaccttcctcncagagacaagtcatgtgtatgtcaattttgtcctggggtgtgattgaactcggaaatat

SEQ ID NO: 4962 - DNA, 327 bp, Oryza sativa
  unsure (1)..(327): unsure at all n locations
tagagaagaaaaatatctacaataatattaccgtgtgtgacatagcttaagaaccaaacatttatgaagttgtatatttctagctcccacacattatggatctgaatatatgattctgtccataacaattagatggattatttaacgtacagaatttaaatttagtgtggatctgggatctcgagtagccaaatggatctaagggtgatngccttgacaatctgagctgccatgcctaatgttgacgtatggcttaccaattaacattaaacagattngttccttgtaaatgctacactatcagactaaacgctaagcaatggatac

SEQ ID NO: 4963 - DNA, 53 bp, Oryza sativa
cccccccaaggcgggttgtgaactgcaacgccaaaaaccacgggcgacccccg

SEQ ID NO: 4964 - DNA, 283 bp, Oryza sativa
tagcttgaaacaaatgccatgagctctcttttctactccacaagttctggcatgccaacaagattaatcttcttcaagtgttaaaaactactttgggtaacaccaccaaaatcaggttcaaacttacgtatgccagctatattgatcaaagtaagttcctccagatgcattagttgcccgaaaggtgggaaagttccgcaagataagccttctagatggagagatttcaagctcttgacacaaacatcaccacacaacctatgtggtccagtggaaccaccat

SEQ ID NO: 4965 - DNA, 396 bp, Oryza sativa
agcttaactttgcttgttaaacaccaccaatcggtggcaagagcatcaacagtcaccactgcatgcagtgtgaatgttcacagtgcctccatgaactgctagctgctactcttaatcgatcggtgtctgatcaaatcaaataaaatgcacggcgtgaatgattataaacctgcaaaatcggcgcaaattgctaatcatgttgtactgtaatataattagctgacctcagatcactcccaactagtagcctttatcgatctatataaaccacatgcatatgcctgatttttcttcactcatcgacacacacagctctagcctcttgccacatagtccaaagagcaatagagttttctaggattgattcagcaatggcagctgtagcacgagcactac

SEQ ID NO: 4966 - DNA, 449 bp, Oryza sativa
  unsure (1)..(449): unsure at all n locations
ntactatacaagaaagaaccttaagttaaatgataaagtaatcttctagtaccttctcgaagatggggaaactactccaagctaagtatcccaatattcagaaagaatatgaatcgaaacgcttcagccctttcaaattgaaggcaaaaaaggctacatttgactgctaatataaagaggacaaaatatttttatgatttagaaatctagtagaagtacttatgatctcatttgtcttgggttttgctcaagttaaatgtaaatgcttttgtaactctcttgttaattagtggttacatacatgcttgcatcaattaagggcatctaactttaccaaggaaggccaaacttgatcgatcaagtatcaaacccaattctctctctagctagatgccattatcagacaccggcagagaaattgatgaagaggaaacaagcagatacagagc

SEQ ID NO: 4967 - DNA, 421 bp, Oryza sativa
agcttctgcaatttactgctacatgataatacgttcattgccttataatttgaacatgattgttatacatttgttgttaatattatttttagggaacacaaaacctttgaccatgcatgcagattgaatgcttagtagaatcaattctgtttttcaaatcaaaaggaacaacaaaatgcttgacaaatgcatgccttacaaaaggggaagattggaataattgtgaactcacagtggtatgttcccttctccccatccaaaaccaacaaggatgcagcaagacgtgttctagatttcgtgcttggatggtaaattctttgtcacacataaattcttcattatgagactgagaattctaactatgaaatcctttctaggcttatggatcctctcattagaggggactaccctctaaacatga

SEQ ID NO: 4968 - DNA, 470 bp, Oryza sativa
  unsure (1)..(470): unsure at all n locations
agcttangaatcggctttaacagtttagaagtggtatagcacagcacgtcatgaatcgaataagagaaagcatgtcatgcggatagcacaatataggactagatgaattatatggacctaggagccaaataggtggcttacaggtttcgatttggagacggcgctgctcccgccttagggacattaaccgattcagctcatgtagtcccctggcgcgatgatatctcggatctagtcgagaaatcggaggcatcgggtcgggggcacctcagacttgccttctctcccgcttcctctactgatctaatgtctttctcctctcgattctctgattatttgaacccaatgctgcgctcgcttacaatttctttctgaatcaaacgagacgcgaggggaggaaatcgagtcggcgccgtcgggccgggcgacctaccaagcctactcatactagtatactactacactggatg

SEQ ID NO: 4969 - DNA, 454 bp, Oryza sativa
  unsure (1)..(454): unsure at all n locations
agcttacctattcattgaatatagagggtaaatttatagctaacgaanaaatatttacagcatcacggttggggtctacggtaacatctctgctaggcgtttggctcccgccatagcccaagattttgcctcttccttaatcttcgagattagggccaccatggttagttccttgtttcggaaaattcgatggtttcgctcctttcaaatttcccaagagattataaggattaggaatcgagtcccatgcttgggtgcaccttgacgtgttgcaagcgattcccaccagtagtgtaccgtggttgattgcgcccagattatcggcttgatgggttcacaggcaacccaggtagcaattgcatcctagatttccttgaatatattgcgataatntggatgcactaagcttattataaatatcgcttattattggcaaaactctacagcgttacca

SEQ ID NO: 4970 - DNA, 268 bp, Oryza sativa
gacaacgatataatggtacaacgagggaaaatagataattagtggccaataaagaaaagagaagggcattactttgagatctggatttgttcgaacacatacatataactgtcatattcaactaattttttgatttacgcatatgcaagctgttatatgattatagggggtcgtctccaaatatacttcggtaatgcaccatattatgagtgacgatactctaaaagcatattacaacagaagataggttcatttattagacaaaaaa

SEQ ID NO: 4971 - DNA, 430 bp, Oryza sativa
agcttcttccataagaacgctgaaatgcatactgcgatggacaagattcgtcttaccttctcggtcctgcagcttcaaagaatgacaaccaatcaacgcacataggagtaggtcaagaaatatgagacgcacttgtgccaactcacgtggaagaaaataacaatgcaccgaccaagcagacaatacacgatcaaacttcccatgggcagccaaaaaagaaaatcagtgacttggaggagaagaacacacaggcatattctttcttaacaagcttccttttgttttattgtactccattaaaggcccaaaattaaaccagcacatcaaacatgtatgtgaaataagcaaatgcatgagttattatgaccaataatctacttctctacacaaaagcttaagaaacagtataagccatactcctcaagattgc

SEQ ID NO: 4972 - DNA, 399 bp, Oryza sativa
  unsure (1)..(399): unsure at all n locations
tcgaatctgtcgatcttggtcatccatttgtttcatcgacaagggtttctggcaacagcgggaggtgtttgaagtgggcattggcgaaggaaggaaggaatgaaggaagaggggaatgggctttaccggcttcggcgaaggagcgtangagttctgagatggcggtgcacttgcgctcgaactcgtcgacgcggcgcttgatggcgtcaggggtgtagcgctcgtccttctcgtcactgtcggagtcggtgggctcccagaaggaatcgtccggcgcggcctcctccttggccctgcggcgctcgagcttctcgatgagcggcttgacgcccaggtaggcctcatcctcaccctcatcctcatcctcctcctggcgggcccgctagcgctctctctgga

SEQ ID NO: 4973 - DNA, 381 bp, Oryza sativa
agcttaagaatttggataagctgcagtagctaaaagcttttcatacacaaccgaaataacatatgtctcatccatgtcattttcgagcatttgtgcaagcaagaaaaggtttactaacatgtttctcatcctcgaaaatttgataagagaagaagcgacagtggtaaatttcgtgatggtatgagtacattgatcagggtaaaaaaacctaatggttagaatttcacacatgcaggacgaatccagaacgaaaattaccgaggtcttttacctgtcataacatgtatattattagttaatttttaactaataatatagttaatatagactaaaccatctaaatattaaaattctacccggggtcattacccgcgtagtata

SEQ ID NO: 4974 - DNA, 430 bp, Oryza sativa
  unsure (1)..(430): unsure at all n locations
ttctagaacaagtattgacaccatctataagctctctttcttctgatggtgaattaacagtcggatgcagcaatgctgattgaggagaagatattgccacccgaggctaaaactagtgagatatcttgtgctaaaacttgtgatattgtcaaatgaagactctgggtgtcggcatttaacttcactgcaatggtcggatggcatctctcgtctgcactccgttgtatgaagaaggaacacagagagaggcatgggaactgaaaaccccttcattatttgagcactcggtcttctgataatttttactgagtcttgtgagtactctcagtctctcacactaggagtgaatctctctctctctctctctctacctatngnggattggcattgcatctaaaattctggactatctacctatcatttttataca

SEQ ID NO: 4975 - DNA, 430 bp, Oryza sativa
gcactcaattaaattctgggtccattatatctctgaatggaaattgggataaggaactcatatctctttctggtcagatgtttggactgggtcctgtcctttgaaaacaaatctgttaccaacaagagattctggtgcctgatgctctggcctcttggcctgaggggatatctttcagaaggtctattggcccggtggaggtggagtgggaaaaccttgggcaacgaatggctgaaatctcttactgatgaggaagacatgatgctttggccttttgagaagaacaaatgcttttctacaaagtcttgctacaaaatgctaaactttcatggtgtgaaagatatgagaggactatatatctggcaagaccaatgccccaaacgtaaagcactctgttggcttgcttgaaagatagatcaatccactctat

SEQ ID NO: 4976 - DNA, 318 bp, Oryza sativa
  unsure (1)..(318): unsure at all n locations
agcttggccgataccttgtgtcaggcttaatttgtcatgttagcttagattaaattagctgttggtgtgttgttgtagatgtggttatcgctcagtttttcctgattaacggcgcactataaagtttggtccttaaaatgggacaccttcttaatataaaactttagcaatgacttgatcgttcgagaaaaaaaaattaaatgcagaanataaattggtaaggcgtaccctgttcgtttcttacgtaaggagaggattaaattttgaataccgtgacatgcttttcaaactgctaaacggtacgtttcgtgtgaaaac

SEQ ID NO: 4977 - DNA, 374 bp, Oryza sativa
aaaattttcggaaagtccgagaaaatttcagaaaattttgaccgattccgagatccgactgaaactgcccttattattttcgagtccattttcgagaaaatatttcccaaatgtttcccgttctgaaaaattcttttcacccctagatctgagagctccttgtttttctttaaggcattcatcctctaaagaccagcataatggtgctgaaattgaacacaactttgttaaagtcagctgctcacaaagatatcaataggcttggccttcactgataataacaagggtgctcaatggcgaaaaacttattcatccttgggtggaaatcttagacggcagtctatgatccatacagcatgttccaacaataacag

SEQ ID NO: 4978 - DNA, 434 bp, Oryza sativa
  unsure (1)..(434): unsure at all n locations
agctnggcctgatgggatcatggtaagtatcaatctatatcacttttgaaggataaaaaactcagggcaaggattgaacaaagcaacagcctacaagtgccatgtatcaataacttaattntaatatgaaagacttgcctaaacaatcgaccttgaaagtggaatattatacgtgacccaattaaagccaaccccgataaaatacaccaagacgatacttacaatcattccagcgtgcgcacacatgtagaagtcattgttccttggatgacagactgcgttgtccacaacagtacctaaaagttacatcattcaaatcattagatattagattaaggatgtacaattgcaagttntgacacaacatatcgaacaatgggattaccaggaggaacgttattntgagatccaggcacaaaaaaattggtatgatg

SEQ ID NO: 4979 - DNA, 429 bp, Oryza sativa
  unsure (1)..(429): unsure at all n locations
tcatacatagacttgtctgcagagtatgccatgtttaatttaaactgaaattaccttaaagagcatgcacgccatggactaaaaagtcatgagatccaaaccgagtattaaggattttaattntgtgcaacatgaattatccttcctaattcaggaacgtgatttaatttgaagggtccaaaatgccgtctcttggtaagaggctagatattaacagggccttctgcttctttatcgacgtaaatgtaatccttcaataagcaacattcccagtgaacagaanaactaaggtagaatgtgcaaactatttatgctcattgtcatatctaagttttcatggaaaagaaaccaaacagaanataagcatgtcctcgttattntcatttgcatttacaggcggnagaggtcattattatttacatgcagtag

SEQ ID NO: 4980 - DNA, 382 bp, Oryza sativa
  unsure (1)..(382): unsure at all n locations
agctngcattaaagatatcacttgccaccctccttagcagagccgttcccattcatagcttttcttgtgcgtcctccgatctctgcaaaatagatcaagattcgatccataaacaaacagaatgaattagttccaccgggtcattcaatttttcctttttaaagcatgcagcattcctggctttccaaataacccaaagaacagcagcaatcccaactaccactacctttttatcttctttattaaatcacaaagccaacctcctaaaagatgcttgatatctcttgccagagtcaggttaaaaacactgccaatcacattcaaaagaaagcgagacacaggacaagtaagaaacaagtttccacattttcctgtccagagc

SEQ ID NO: 4981 - DNA, 405 bp, Oryza sativa
  unsure (1)..(405): unsure at all n locations
tgatctgtaactacgattgactctgtttcacttccagtaattctctaaagttgagatctatttaatggcactaataattaagctaaataagatctttcttttgggtcttgtgtaaggtttcgaatggttgcgtataattgcggttaccggattttcgtcgatcgcgggttttctcaaagaattgtgaagctccgtgaagaccttgagcaaggcaagtcacttttgaccatcttgcacctataatttaaatctaagtatttcttttccacaaataatgcatggataggattaacacaagtaaattggccgcggcttgcgagatagcctaccggccccaatcctaatagctgcaattaccctcctttaaatatngaacacttanacctcctttgcaactgttgtact

SEQ ID NO: 4982 - DNA, 426 bp, Oryza sativa
  unsure (1)..(426): unsure at all n locations
tctgagtcccctgcggcatgcaagctngctcgatgttgacggcctcagatctgttctgatgccgacggcggcgaggatataggctcggggtcttcaaccggccattcaccgagcgatgaccgacggtgagatatggagggcagcccgcggccggccacgaccctgctgtcggcagcgcgagattggtgagatgggggagggcgagtatgcgctgggagcgttggaagctcgaagtgagacggngggagcgagggtgcggcgctgggaccgtaggctaggatccagatcgataatgggatggngatataggcgttctatgcatatatacctgatgtctagttgggctgggcctacaaatatttatgttgggctggtctttgacctcagctcgtttagctcgtgagctgctcgcgagccagctcgagc

SEQ ID NO: 4983 - DNA, 424 bp, Oryza sativa
  unsure (1)..(424): unsure at all n locations
actaagcttctttatgatcgattcttatcaatatgatgaattttcaactgacgacttgataactctcatcggctgattctagaactttgaagccgatactgattttcagcgccgatgatgactttagggcttaccaaatttcactgttaacacatgtcccccagttttggagtatgagaactcatgcnttcacaattattgtcttgataactccaagaccgatcttcctttgcttcttgtaattagctntcatgagctgatgctgtttgcattaaatgagctagacagtcaaactcgtggcanaagaatctctctctgataggngatgacnactcttggaatgcaagatctgcgagctgctcatcgcttaaactcaaactataacatcggccgcggacattacgaaatctcttaatatattcta

SEQ ID NO: 4984 - DNA, 426 bp, Oryza sativa
  unsure (1)..(426): unsure at all n locations
agcaggatatgcagccgggatcttctgtactggtgcctcttcgtctcacgccggtaggactggtcctactagccagttctacgacgacgacttgcacagtgcacaccaccacgacgtactatgctcctctcagcttggaggagctccagaggcgcacactcaggagcagccagaggtcacacctgtacaggcaggacgggttggccgtgccgtacccccggaccgactcacgtactcccaggggcacattatggcgcatggtatgagggacaggggtaagaggcctcgtcagtagtgttctacctcttcagtccttatgtgaccgtttcttttggcttacaaacttgtaaagcagtactacttttgctattactactgcagtactactggtgtttggtctcgctacatagntcttttcattcatat

SEQ ID NO: 4985 - DNA, 349 bp, Oryza sativa
tcaattcctcactcccaagagacagaatggccttaccagccatactggactcctgacaaccaggatcatcatggatagtagcaacaaggctggtgaatagtgaagatcaataccaaaagaaaactaaccacattctctttcaccttgtgtgggctctgtcttcttgaatatacaacattgctttcttgaagaatgtatgtactacggctgggagaagaaatagattaaagagatctgtatagatctgcctccatgaaaaaagggagatcaaattaactgtgcaaggacactccaagatagaagagacaaagtcgttgaaagaaaagaaaagagaggacaaaaaaagttt

SEQ ID NO: 4986 - DNA, 423 bp, Oryza sativa
  unsure (1)..(423): unsure at all n locations
agcttccttgggaaccaaagcgcctatctttctttganatttgaagagtatgaactcttctcgactctttacgtgttggttttacacctttcagaggggggcggattctgataacctaaggggacatccatccacagccatctgcgtccaagcccatcaagattcgttcccctttctaagccagtctttctagaaatccagcggtcaacttaccaaaattatatgactactaggagcaaatctgaaactaaaaaaatgtacacctacgtaaaggatttgtatgtggtgtctcccaggtttatgacatcatctggcatgcctactggacacgctacctttaaatgacattcgatgaacactatcccagtttatataacactcgtattgtcaccaccagcatgtttgttacaatattaatctaaa

SEQ ID NO: 4987 - DNA, 103 bp, Oryza sativa
taaacgggtgaataacccgatactcgcggatcactacctgttgcgtggtatatattgccatgagaaaccgggcgaaacattgtcatttggcacgttcaataaa

SEQ ID NO: 4988 - DNA, 379 bp, Oryza sativa
  unsure (1)..(379): unsure at all n locations
agctntgacagtgagcacaaattgattacagatgtgtttatatcaagatcaggcagtagtatttcgttgaattatcagtaaagtttcacgcctgcttagattatagttaaaataaatattattaaattttattaatgctaaaattctagcaatttaacaatattgtttaattgtgacaggatttcttatgtatttatcagagcttaataatgaactaaatggatgcatatatttaacaactttacctaaatttggtaagagttattttagctacaatctaaacagtccctcggacatcaaacatggctttatttattgccttattattcacatatttgatactaactacagtactactatagtactatatatatatatg

SEQ ID NO: 4989 - DNA, 296 bp, Oryza sativa
  unsure (1)..(296): unsure at all n locations
tcttacatgttataagagaaaagatcttttctttttttcaatgcttgcactcgtggctggagcacatgtctttggctcaccatgtgatggntgagccatttcattacccatctcattcagtagctaaagntttgatgatgttcaattaatctgtaatttcttaatctatccatctaggcatttgagaactaataacaacagatatagcagaaatagagaatgaacaaaacttaatcagttgatgagacttgagagatttgagatttctcaccggtggaggtaagagacgccggctt

SEQ ID NO: 4990 - DNA, 433 bp, Oryza sativa
  unsure (1)..(433): unsure at all n locations
agctntccccagcccctnttcatcaatggactcctgtcgtctacgaaggagtgtggttcgttcgacaaattcctacctctatatctatctctgaggtgtttgggttttgcaaaactccatagatatgcagaagagaaatgctatccccactccgaccaagacagaacttttaccaaaagtttattgtgatctttttgttcaaataacaattaaggtgaagcagggtcaggaacaacgaatctctttatgataaacagatccattttgcaagctcgttattacgggtagttcctacaaagaatcggactaatgacgtatacaatgcttgaattatcgacgtagatgctacatagtgggttctcatccttcagagactacgagtgtaataggagcatccgttgcataaggatcaccctaagatgatcatctcatg

SEQ ID NO: 4991 - DNA, 473 bp, Oryza sativa
gcatgcaagcttcataagaaacacatcgacattctcacaatgcatcgaactacagaggagacctttctaagactgacagaaaacaccagtatgaaaccaccccttctattcataagataaagggattttttttcctttggtccttgaactggattttttttcctttggtccttgaactacaaaatactactatgaaaatatctcgtacagtcataagattaaggggaattgatttctttggcccctgaactttggaagtacattatgttcttttaactctccaaaaccaccattaaaaccataaagtggataaaacgatggttagaatttaactggtttggggcttggatgtctcattctgaggtgaaaagttgacttctaaaatatccgagggaggtgtaattgatgacattgcatctcaatcaacaacaacaaatctgaatatttcaatctgtacaactgaaatcacttat

SEQ ID NO: 4992 - DNA, 413 bp, Oryza sativa
  unsure (1)..(413): unsure at all n locations
tgccgccggcgggctcctcagcgccgctccncgtcgtcatctcactggcgccgcaacaggatggcgcagcatgtatgcggtggggttcggaggcggagggaaatntgtattgccatcgtcctccttggctcgttgtccccggtccactgcgccccgatcggagctcaccaccagccatcgtcgccgcagcggcactccactcgttctcccactgccgcgagcctncgncgccgntcccctcgttctcccacccgcgagcctctgtggccgagccgctgtcatcctagccaccgaccgcttgccccggttccgcagcgccccgttgccgccagtcgcccgcgcttgcaacgaagagaatataagaggggagtcacagacaggtgggccccacattatttttttaattatttgat

SEQ ID NO: 4993 - DNA, 438 bp, Oryza sativa
  unsure (1)..(438): unsure at all n locations
agctnggaagagaggcaagggtgttttgcatattctttgttttggaaaccattttgaaatctctaggtgatttatttatttttaagtttgggccgaaaagagacttgagtctcgattcgacttaagagatgcttttcaacaactcaaatggtaatgtaccgacctcccgggtcagatcattacttctcggctcccggagctatttcacttgattaggcggctcccagagccttttcattttctcggactccccgagtccaactgtccagcaccacaacaatccgctttcactcgggaagcctagtctgtgatgcccgtagacatcccgaatcacacagattcgtttcttgaccactcangtcatccatctgccacataggctgattctggtaacgattcccaaaccacaacaacttttacaaagcacacgcaaacaaa

SEQ ID NO: 4994 - DNA, 412 bp, Oryza sativa
  unsure (1)..(412): unsure at all n locations
acgaattagcacttatttctagctntattntcctctataaataactttgtacatcctcaaaaacaattgggttttgtttagttgaattttgccaagtgccattcaccttgtctctagtccttgctcgattagncggcgactatagattcagagcccccaatagttagtgtgttgatttgccgggtcgattagatctaccacttcaatcgcaactattcctttgtgcttaattccctattcgcaatatttagattgcatcttatcttgttcttgcagggttctctcgtttgcattgtagggatcatcaaccgcgcgtcacggatggtacgacatcgtttgtggtgtagcgattgcacggcgtcctggatttgttctggttggtagccacatcgcanacgtcgcactcgatcaa

SEQ ID NO: 4995 - DNA, 96 bp, Oryza sativa
ccccccaacagacacaatgcaagtcaaacaacacacacaagagaatgaactgaacctgaaaccccactaaaaacgcggaacaacagaggagaggag

SEQ ID NO: 4996 - DNA, 342 bp, Oryza sativa
gaatcagtcacggctggatgttgctcaaaaattggcctaccaaattgcaatatcaaaaaatacttattcatgagcgatatctgcaatgcgcagcatcatgagctgtggtttctgagcagatgcatattatttgctccaggataattaatatacatttgtaaatgagtatctattcgcaacaagcagtgcaaatttaaatgattctgctattacttgtgtgaagattatacagtaagctcgacactgaacgttctgtgatgttggtgtgggtgcctaacccgacgaggcgcaaatggcttctctatgcaaccattagtaattctgagcgatatgagtcttttt

SEQ ID NO: 4997 - DNA, 387 bp, Oryza sativa
  unsure (1)..(387): unsure at all n locations
agcttcgatgctcgaatactcgagntaaaattgttgtgcattganaatttagcttgtatgcttggacaacatttgtatatactacgaaaagaaacgtcccacaagcagttgttagttcgcaatcgcctgcatttttatgagtcttggaaccggcgttctgaattatacaaattaagacgcacattttggtcctgttctttcattctttggctccaagctatcctccaacaaacctatggaatccaaatgaaccacagtctatccaaagaaccttctagctagattgacccaaaaaattgtcatgtgcgaaatgtgattgcaaaatagcatatgggagcaccaacttcccaatactccatacaccatgaacgccttggagaattgtga

SEQ ID NO: 4998 - DNA, 297 bp, Oryza sativa
  unsure (1)..(297): unsure at all n locations
gctatactcagaaagaaggcgaagatttctntgacacttactcacctgttgctagattgaccacaattcgtgtgctactttccctagcagcctcacatggtcttctcgttcatcaaatggacgttaagacagcttttcttaatggagagctggatgaggagatctatatggatcaacctgatgggtttgtagttgaaggtcaagaaggcaaagtgtgcaaattggtgaagtctttgtatggtctgaaacaagctcctaagcaatggcatgagagatttgacaaaacattgacatctg

SEQ ID NO: 4999 - DNA, 342 bp, Oryza sativa
agcttcacagttaaaaccttacttcaacctctttacgacaacacaattaaacttcgaattgtgcaccatgcttccttcagcccagattccaaggtacgaattatcaatcaagaaattatcaaaccatccaaatgaggaacatagataatattccagtcggacgctaactgatagggataaaacaactatcagcaatgacagattgttctatatatcctttatttgggaggtcccgtctacgtgatatcagcatctatggactgcttggatcgacaacaatatgtaccgatgctgtaaatgttcattcagtccagaatgagaactcgaatggtaatggtgata

SEQ ID NO: 5000 - DNA, 454 bp, Oryza sativa
  unsure (1)..(454): unsure at all n locations
cgcgtatattctagctttgaactgtggcagagagggaatctgtttctcatatattntttctcatcatctcatgtatcatataaagttctgaaatactcatcgaagtagtcagacaggttgccctttattctttgggccactggaagtgctgaagatatatttgctggtctttgctcttgtcataaaccctgaagcctagatatccagtgtgcataagattggagttatttgtgattatcttcataagctagtcgccccaagattccttgtggatattcttgcctgacatctttatagttgcatcaaggttataagtgaagtgagcatgctaatcctggtagaacggaacttgctgcctgcttaccgacttgcaacagaacactgacaaccccagtcctatactacttattattatctaactcagaaaaatgccctcctgctggagtacaatcta

SEQ ID NO: 5001 - DNA, 357 bp, Oryza sativa
agcttaagttaatgctagccattcgatattatgtttctgatgtcaatgctattgtgatcaatagtggaccaatgattgagaaaaggttgatttctttcgtatcaaacttgatgcaaccacaactacatgatcagagagctgacataattcagatgtgtgattcttgtgtaactgaaatgtaaggggccaaaaggtgtgtagcataaaattttgcaggcagagttcttttatgttgacatgttatcatcaatattgatcaggtataataacatgcatgaacattttcttataacagtggcaggagctgtgccaattattaagcatataagagagaaattagcatataagtagggcata

SEQ ID NO: 5002 - DNA, 255 bp, Oryza sativa
  unsure (1)..(255): unsure at all n locations
agctntgactgtgctgttccatggaaaaatattatttttacacgtgttttctagtacagtgacgtgagagcgacaaatactaaatactagttttcactatcttcggaagcctccatatctcctttagggtctaggtcctatgtcatactccctccgtgtcaaaatatttgacaccgtaaactttttagcacatgtttgacccattcgcttattcatgaaaaaattatgatatatgtaacactatatgtcgtcatg

SEQ ID NO: 5003 - DNA, 377 bp, Oryza sativa
agcttataccacttctcgtgttggcagaatatgttagtatcatatggattcaaagataaaacggctcataaagagtggtaaggttgcccaagtttaacgaacaggaagctgtaactgtgttccgagtcgaaaaggcatatgggccgacatgccgactggccctctgtcactagtgcacggagtgcacgatgcagcatttaattgttacaagagttgctctgtctactgcacgaaactgcatgcgcaagcctaattgccaaattggcaccaatatggtggctgcccaacaccaatcattctcgtgtacccatcgtacgtaccgggtttattattgttaaagacacatatcgttcttctagagaatatggacacatatt

SEQ ID NO: 5004 - DNA, 362 bp, Oryza sativa
  unsure (1)..(362): unsure at all n locations
agcttaactntnnttttgtcaaaaataacaaatgttgatatttctgaatacacgtgtgccctatatttccaacagcgggagtaatatcaaaaatcataaagttattgggttttataaagtatcataatgtaaaattactggtgaaagtttttaaagtttaaccgaatcttgttctgaacgccaaatatttatgaccggagcgagtactatgtagacaattttcccatatgccataattcttgtaaattatggctgcaaaaggctcaaggtttttgctttttattgtactaaaactatcagggtaaagcgctntatgcgttcaatttattttaatattatgatacttgattattgtagctgtg

SEQ ID NO: 5005 - DNA, 303 bp, Oryza sativa
  unsure (1)..(303): unsure at all n locations
tgcgagagctcanattatcactctcttagtcccctacctggcgcgccacataactgagcgtggggctcctcaccgggagaccgcgcaggcccccctatgtcgggtctgtccgggaccctgggtgagactttaagctcccaatctgtggaagggtcgcgagacaagaagcacacaagacgccggcgatgtatacagggttcggccgctgagaagcgtataccctacttctgggtttgggagaactgtgtatgaaggagctacaaagtatgagccagcctctccctcgttctaagttcccaatct

SEQ ID NO: 5006 - DNA, 458 bp, Oryza sativa
  unsure (1)..(458): unsure at all n locations
ctttaactgcatcanaccaatggcattcgatttactcaccgtgttctgattaccacccgattcgatagcgataatcgccgtgatcaattgtggatcgacgccccaggctgcaccggctttctggcttattggcatccactgcatcgcacgttgcaccggaactttcgcgttccacggcgggttcgtatagtcatgctttgatgaacaacccgctaataacacaatcaaaaaggcaaaccatctcaatttcacttcttctatccttatagcctggaatcgccgttgaggtgacaacggcacacctaagcggcatgatatacatttcgtttctgttgtcagcaaggaattgccatgtctctgtttcacttaattggccccatcggttactgcattaaacagcacgccgcgctgcgtggtatccagcgccttaccgacgcggngcatcaagtcaataacgt

SEQ ID NO: 5007 - DNA, 397 bp, Oryza sativa
gactgccgcatgcaagcttaacatcttgagtgactcatattgcgacttgttgtactgacgcacacgagcttcaaacccgacacgggtcgcgtatgagtagtagaatgtcttggcggcctcaagtgattcaaactccataccaattgtagggtcgaccaccgtatcaccctccatggcaatgtagtgcactctgctgggcataccaacctcatggttatgctccttgacaagcttggtgacaatccacttgctatcgcctctgcgtagcacctcgagcatggcattgcatcccttccggatggaagcaggccgctttctcgtcttctatcccgcgacgacatgcttctccttgctgaaccctaccttggagcagacaaacctcagcatgatgatggac

SEQ ID NO: 5008 - DNA, 359 bp, Oryza sativa
cagctgcagctcttttatgttggatccctttcatttattttttttaaaaccatggctaggagaaggttaggcaatataatcatatgtgtgtgtactaccattcttggctccttcaaaatcatctagggcaacatttgcggcaacttggaactcttggatcctattctctaccttgctagatacatcatcttcaattgtcttgccatctattgcctcactacaatggtctagaccgcacaccaaataagcaccctgtactgaaataggtgttctctccaatgaattctccatagaggcaccaccggtagctacactaataagttgtgcttctaaaggcaactccttcatagaggcaccac

SEQ ID NO: 5009 - DNA, 381 bp, Oryza sativa
  unsure (1)..(381): unsure at all n locations
tatacanactcaagctggggcttntngaatgcacaacgccaccttgctcatantctggtgtgtatttctgacatgaaactcaagntcggactaatgtataactatagagcattaaagactttattatggagcaagtatgagctcctatcaaaaatatgaatgttaccatttaataagtccccacatgcatgctatattgaccactaattctacagttccctgacagagactacaagaatggattagacttaaaaataccttcagaaaaaacaaaatacttgatgctagccgctcaaccagtactgagatctacctctatgttaacagagctgacagcatctaactaaaagaactgcatctcttattaactaaaaaaatact

SEQ ID NO: 5010 - DNA, 199 bp, Oryza sativa
  unsure (1)..(199): unsure at all n locations
actaagcttccctcggcacttcttggcccgaagtatgatatttttctttttntcgctgcgatccgttaaaatgaatcaattgctcgncgtgaggaacattaaaaagtagggaacggctctatcaaaacggaccgttgccacataagaataatggtggccagttccgcgtttcttctctatccagaatggcttatcggtt

SEQ ID NO: 5011 - DNA, 444 bp, Oryza sativa
  unsure (1)..(444): unsure at all n locations
tgctntctagattacaatccgcgttttcgagagattctggagaacaatcgaggcatacgcttgccgaccttntactggacatgacaacggccagaagaacacgacgtcccctcacgcgaggaaagcaatggtggagcggtggccggcggatgagggcgggacaaggcactgccggttcttgccgccgctggctgcggcgcatggcgcgaagaaggcgaccgcggagtctgtgcgctcgatgcggagctcggcgacgaggcgcatgtcacggccgtatccgcggtcggcgaggtgggtgagcactgcgtcngcggcggcgttatccgtggcataggataggatgagaactgtgagaggatggngaagactacaagaatgatgggacgattgaaagagtgaccgaagtggcattggttctatatatataattttcaagtgacatct

SEQ ID NO: 5012 - DNA, 427 bp, Oryza sativa
  unsure (1)..(427): unsure at all n locations
tagagaggtagatgatcagccacccggtagtcacgacgaagcatcgatgtcttgaatttatcggtacgagtcccactatcgaaaggatgagcccaatccattcacctgttgtggtaggctttctgatcagctcgctgtgaatgctttctcatgtatagagacatctcgactcatataccatgccctcaaccagaaaaaacttcgctctgagacacatcaaggtatatctgatgctgttgctaggggagacagtgatggaaaggatgttggcaccaagtaattttgccatcaagtttcataggaggaaggcgatacatggttcanaactaccatgattcaatggcaatctgccgttcttacggtcctcctcaaatattctcaactntcacctgcaattctaaatggccagagattattgaagctattc

SEQ ID NO: 5013 - DNA, 418 bp, Oryza sativa
  unsure (1)..(418): unsure at all n locations
agctttgataatatgctgttgtgttgatttatgatataggtgtgacgaacaagcacggagtgatcatgaatgccctgctggacatgtgattgtccaaacacaagaatggtggctggccggagccgccggaggggagcttcgcggtgtacgtctgctgcggcggcggcggctgaagggcggctagggagaggttcttggtgaggacggagtgcgtgaaccacccgctgttcaaggcgctgctggaggaggccgaggaggagtacaggtacgtggcggacggcccgctcgagctcccctgcgacgccggcgagttcgtcgccgtcctggcgaggatcgagcgtgagatggccgangagaggactgtcgggtgcgcccgcggcctggtgtcangctgcacccggcggcgcacatcatgctg

SEQ ID NO: 5014 - DNA, 397 bp, Oryza sativa
tatttagtcctcaagtttcagcgaatgctcacattggttcttcacgtttcattttgtccacataggtcctttaaatatatgttttggcttgaaatcatccttgggtctacttaatataccacatggctatttctagtcaatatttctattataaaatgtcatttttgcccttaatttgtatacatctatatactagaaaagagaaagccaacatgaataaacaacattacagatgtacttgccattatttcaacatgtgcacatgaaacttaagcagttgctattgtatgcacttgttagtacataatttgtcttcgtttacataatatattatgtattatctataaacactcaagcatgcacttttctcttatatatgtgaatgatggcgggtata

SEQ ID NO: 5015 - DNA, 456 bp, Oryza sativa
  unsure (1)..(456): unsure at all n locations
agcttgaccaagttttttaaaataaacgtattttattnttttataaacttaatctaacttaataaagtttaacttagaaaaaagtcaaaatgatataatatgtaatggaaggatcggagtagtagcaaagagtaattgtatgttaattacgtgggtaacgatggcgtatagcggcagcgtgctgtatctgcagagcacctggacgatgattctgcaaaagttcatgacagaaacatcacattactgttcagttcaattcaattcagtgcagaaatatgtactaaaatatttttttagagaaggtaatacagaaatatttgaattttctttaagattccaattaaagaaaagcaatcaatttctagcagaaatcagatgtaaagctcagactnttagtactgacccaatagcaagtctggggagggcataaatcttgttctccatgatgcatgaatc

SEQ ID NO: 5016 - DNA, 374 bp, Oryza sativa
  unsure (1)..(374): unsure at all n locations
ttagaaactcagctttgggcagacacagccgaagttctggacagccggtagttctataacaaacctctcataattcggttaggaagattttagattcattttttcttctgatggaagaaatntttagattctaaaagtagctggtggcaattcatcatattgtgagaatctaaacgaggaaaaacaagccttttacttttcggtgattttctagattttgtaacttctggttttcgaaatctgaacgagaaacccaattattcagatagagatgtttttgattccggatgaattttgctgcttcccaaaatagttcctcggtctctccttcatttcccgccgccgtaacggcctctcacgcgcctctcacgtga

SEQ ID NO: 5017 - DNA, 385 bp, Oryza sativa
agcttcaacaatcagagtgaagaataccttctttattctagagcttgactgctctgttctccagctcaatggcaagcttgcttcggccaacagatgacaaagaccgaagcactgcatgttagtgaaaggaaacagcgtattatatagaaattgtggctaattgtattgaactaagataaacataaacttactgcggatatattcttcctgtcctgattgctcgctatttctcaagaaagcctgcagcctaataaacctctctttccaatcttgattgcttgatctttgtggatcaaccggataacatgctggagcagcaccacgagatgctgtactagttgcccaaacactataagatgccaaataagctgctataaaattctga

SEQ ID NO: 5018 - DNA, 248 bp, Oryza sativa
agtggccggcacacggcatgaaccagccacgattgctgcagcactgcatttcttgtccgtaaggagcactgcgctgttgacactgacgacggggcgcgcgttgaagagccattggcgtaccatggcaccggcagtctttggcgagctcctgaccatgtctcatgaggagtttggctttgcaagccaagatgggaggaatcacgtgacatgcgacacatctgctatggaggaccgcatgtgcttactta

SEQ ID NO: 5019 - DNA, 339 bp, Oryza sativa
  unsure (1)..(339): unsure at all n locations
agcttggtgccaccactcaagctccttgtttattacgtttaaanaggagtttcagctcgtatgggctgtgtaaacacccgactgacgtatgggcccccggaaaaggacgagggcccctctgtcggtgttaggtatcttttcttcagtcgtttcagctattaattacttgcttagtgcatctctgacaagattgtctcgcacaggttaaagcaaaaaaggcccggaagttttcccttgataaaaaaaaacgagaaagtattcacaagggcgacgatatataacaacaaacagaaaggtatggttattcacgggacaatcttcatgcacaacacgagttct

SEQ ID NO: 5020 - DNA, 368 bp, Oryza sativa
  unsure (1)..(368): unsure at all n locations
gcagctgccaaggataacaatatcttctatgaggtattctgctgcactgactccttcagcctcagccgcaactgtctttgtatatcccagcgagccgaaattcaatttggaaaagggctattcgtcaactgatccgtgcgttagctagacttgtatatactcagatactctggcagctcttancatttgttccggagaagcgaggtatgctcctgaaaaaaacacgccagcnttatcttaattcttgaataggcctggagcagattctgttggtgaacagcggttggatcattgcataagttttggcattcttttcaggtgttgatttcgtatacctttttggatagaccacatttctgtagcctacg

SEQ ID NO: 5021 - DNA, 304 bp, Oryza sativa
agcttcgggaattgattggaatctttatttcttccatgaatggcgctagttttgcccatcgggaagaatttagacaagaatgctgtagagcatctgtcccaagtgatgatcgtagcacggttaacataaaaccactgctttgctttccccacgagggagaagggaaacaacctgattctaacggcatctgggatgacgccttctactgtgtatgtgctgcagatctctatgaactgttgcacgtgtgcatgggcatcttcataagagaactgcgtaagatcataaaagatatgttcaatagaac

SEQ ID NO: 5022 - DNA, 374 bp, Oryza sativa
tgggctatcccatactagcacatgtggtggcactgtatactaaatgaactgacattgagtgaagtccttaggtcggtttgggcacactctccccctatcggtacacaactaatcaccatatgtgcaccacttgaggcccacacctaaaatccatgtttttccaccattttatttatcaaaatcacaagtattaaagttctgtccagactaattaaaaatctattttcatgtttgtaatgagctcataatgacaaggaagacaattctaagcatggctaagccttatatagtaacctagtgtcaccaaaagtcatatataaagtggtatagtcatattgttcctaaggctacgagtgagggatatggatatatgt

SEQ ID NO: 5023 - DNA, 457 bp, Oryza sativa
  unsure (1)..(457): unsure at all n locations
agcttcattaataggccctccaccacatcagattccacganaaacaatcttatatgtgaacgcatcaggaggctcgccaacttctgtgatctccctaanaagactcacggcatctctgatattattccgtctgaagagagactggattgcagattgtaagcttttggagtaggcctcatcccttttatccgcatacctctgaataccttcaaagcaacctatgtcctaccagccttgcatagaccgttaatcagagtaccgtacttcaaatccatttgcagtcatagtttctaaaatatccgcaaccttttttatgtcaccttgcttgcagtaatgagttagaatagaatcgtaagtgatattggtaggttgcaacccttcacttatcattngaataataagctcaaaagcatcatcaatccttttggccctgcacaaccatcaatgggagtaatga

SEQ ID NO: 5024 - DNA, 439 bp, Oryza sativa
tcaatgaactaatgatgcccattgcacagtaattagtaattctatcagaaatggaacgacaccaacgccgctgttaattccgctcttttccctgtaagcactcatagcaattcaatctagctacaaaacctcacttgaaactctccaagagaccaaatcaagcagccaaattgtcaccagctaagaagtagtacaaggaacagaagagatcagaaaggggaaaagtgcaagaagaaacaagaaaccatcgcacctcgatcgatcgacaaattggaagccaacccgatcaaatcgcacccaggattgagtgagtgatatagggcaccgaactcaacaagccttacttgaatccgacgcataggaggagagagcaccggagtccgaaaatggatgtcgcggctgcgcctccgcgtctccgccaagggaaaggaacgggtcg

SEQ ID NO: 5025 - DNA, 415 bp, Oryza sativa
gtctctatcatgagttgctggattatgtaagtatatctttcagttagatttcttactatacgtcttctttaattaattaggtccttgtatataagtagactatagaaaataatatactcccttctatcgttgtagaatggagattcaaagggcccgacggcggagggttttcgatactggattcatcgaccctcggaaagtaaacgtcgcaatgctcgaccaatatccacaagaaacagaggacaatctcgttcatcttctgaaggcgcagcattacaagacgttcatactgttgctatacaacacagagttaggttaattttactgtctttctacataccaaatttcattcccgtacgaacttcctaagtgtttcatatgtaatgcatcccacgcacattgcagaatccactgg

SEQ ID NO: 5026 - DNA, 404 bp, Oryza sativa
  unsure (1)..(404): unsure at all n locations
ctcaagctctgcactcaccattcctgcagcaacntagctaagacacttatgcacctctgtcttagaaatnaaataagcaggaaactgaaaagtacagtagtgccaagctaagtgcagcgactagtaatgagacatcgtcggaggcgaccggccggaactgaagaataatgaaggcgaccgcggcgatggtggtgggcgtgctgctcgtcgcggcagcgtcgttgcatgcacgcgacggagacgcggcggcgccgcgccgcgtgctgggagctgacagcggcggcggagatcagtccgagagcatggtggaacataaaatcggctgcacgaacaacgataacacacccacttntggtgtctggccgccgaacgcgcccgggccgagataaattggtcagctacac

SEQ ID NO: 5027 - DNA, 301 bp, Oryza sativa
agcttagccaagatacaccatatagaagagagtgatatatagtgtgtgtgtgagaggaggtgagcttctctcacatgcacatggagggaggggagggcattgctgtagcatgtgcatgtggtggccatgaagccggcttctgtttgttcagagcggccgatgtgaccatgacataggcgcaagaagcagccaaggagtaccagtcttctacctcctcgccgtcgacgtcttctactccttccccgccgccggttgctgcctccggccatggaggggaggccgctgcaacgccgaccatgtg

SEQ ID NO: 5028 - DNA, 447 bp, Oryza sativa
  unsure (1)..(447): unsure at all n locations
ctagtagtagtagtactggggctctctcctttatcttatgcttacttacaacctaattattagatggctaanagctgagtatatgctaaaacgatttattaacaaataaaaaatattgtgttagtagaatttttatatgtgtgtgtttctagcggcttagatggtaatgctgaaaaagaaaccacgttaaatatactgcagaattataatttcaaaattaagatttaaaatttaagttttgaacagcgactgattctctatatatagagcaaatgatgaggttctgaagcattgacatgtattgtcattaggacaccagagcgcattattttggtattagctcagctgaacaagtttttgtgttttgacaattgcacttaggcttgtcagctaccatgcatgcatggtacacactacctgtcagatttgtgctcaaaacataaatat

SEQ ID NO: 5029 - DNA, 396 bp, Oryza sativa
  unsure (1)..(396): unsure at all n locations
agcttatntagaatcgtaatactaacatgtatattatctagctagatgaaaccccgcgcttcgctgcgggcacatatgaacatgtaaatatgtatattagtatgaacaattagattatattaattgaacctaaaaacaaaatatattccgagcaagttaagctacttctcgctatgtcaggacagctatatagcaattctctttatccttcccaactgctcaaataaattaaagtgataggacatataagtattggctgcaagtatgacgaatcttttcttaagaaactaatacagcagtaaatgcataggacagggattatttcttcaaagttagagagaccaatcgacaaaacttgcatagtgctcctgcttggttcaaataattatgtatact

SEQ ID NO: 5030 - DNA, 391 bp, Oryza sativa
  unsure (1)..(391): unsure at all n locations
agcttctntgcaaatgtatttatctagattcattaccgagctaagctactctttaatagatatactatcatatatgantaaaaatgacttctaatcataccacatttccagctgctgccaacacatatctatctagatatggatgtacagcaagaacagcgccattgaatgtatgttggactagtgatctcaaatggcctgccatgagttcaggttgaatttgattgcagcaaacttcatcaggactgctgcacatgctgttactagacagctcctctgctgcatattcaacaaattccgggaatggagaaccagcatgagatgaattcacattagaagctgcagtaaacgaaccgctctcacgaggactttcaatagtctccaagctaaa

SEQ ID NO: 5031 - DNA, 318 bp, Oryza sativa
ccccggtggaccacgagtggatgacgattgtttgaacccagttattggcgggtccatgttaatttgaaatagcttggatggattatttttaaattaaaatagaaatgttcatttttgggtaagctgggtagtataataaaaaatagtattatagggggtaatctctactgactactcgcttgatgaacaaactacattttgttgttggacaacagagtgagggagaacactgctgatgttatgttcttatgctctactatgtataaatggccatatttgtaactgtatatcctagcctgagattctcttggtgtcaaa

SEQ ID NO: 5032 - DNA, 377 bp, Oryza sativa
agcttgcgcacgttgtcggtgaaggcactgttttctcctgcgactatgacggtgtcaagctcatcatcagtgtcagccatgaagcgaacacaggaggtcgacgatgcgcgagcacatcaccggtggtgacggcaggagtgaagacgccttgaccgtgcgggccggtgtgatgaccgacggcagcgatgccatgatatctcccaacagaccaccgaacctcgttatcaccgatgattcgccacccttgcgtgtatgctagctgaaatggagaagacaagagacaaagaaacaaatagcattacacatggcaggtagcagcatcaccgccatgtgctgccgatcacgacgttccacctctttctctctgtatgtgtgtc

SEQ ID NO: 5033 - DNA, 85 bp, Oryza sativa
  unsure (1)..(85): unsure at all n locations
accctcacctttcccattctccnccccacccctaaggcgcgtgatctgctcctaccaacataaaaccaggctgaacttggatgaa

SEQ ID NO: 5034 - DNA, 382 bp, Oryza sativa
  unsure (1)..(382): unsure at all n locations
agcttaacccatcccaggtaggctatctctgatctaaacctaatccacccaaattgcaggtcggctattcaggaatccaaccgtaatctagccaattgagaattcgtgctgttcggctatccaaaatacaccacaacaccccgtacgtctagccatgagcccgtgacgaattttttagaaccaaaaaaaaaaaaacagaaacagagcaaaccatggccccatctagatcccaaaaaaaaagggacagagaaaggagaggcgaatgaacgctcattctataaagcgatacctanggttgaggtccgtggatggctcaacagcgtcggactcngaccggagcaagcgacaccccccgtgttgccctcgaaatccgcccctagta

SEQ ID NO: 5035 - DNA, 395 bp, Oryza sativa
  unsure (1)..(395): unsure at all n locations
tctcattttgctcttgcagagcactcaaagatatatagttatttcttaagcttcaatatcaatatctttgcatctcacacatggttcattgcttgggacaattttggaacaagatggctcgctagggagagagacactattctttaaggtttcgaacttctcttcaagagtgaggtatgctttgtccaagccatccactctctcttgaagttgagtgttcgccacctcaagattagcatgagactctctggtttgcttgtaaagccgtaccaatgcctcatttttttctctctctccttagcaagctcactcttgagttcatgggaccgctctttctcacgaatgagcaaagcctcttgcctctcaagagtngcactatggtcttcaattcttcc

SEQ ID NO: 5036 - DNA, 251 bp, Oryza sativa
cttaattgcagccgatcaacctgatgtgcattcggactcatatttgtttatttctatgaaaatctgaagaactaactcaactgcgacgttaatgctgtcagcatccctgtgtgatgaaagttgcaaaaagcaggtattaagaaacaattaggtactgtaaaagagaagaacataaatgtgaagttcatatactttcatgacaaaacacttttgcgctctgctgtgctaactcccagatataataaagtgaa

SEQ ID NO: 5037 - DNA, 474 bp, Oryza sativa
agcttacgtgctggctgcaagcgttcagaactacctgaagggtatccactccaatcaagtgagaagaaaggcaagttaacaatcgctttgtctacctagacactaatatactaacacgtcattttctctccacttactctatatatctactggctgtgtgatttatcgagtccttttggtcacatctaatacttgcttgatccacgtgggctctatattttcaacttttatcctctatttatacattggatttgtggagatggcaaccgattggttaattctttgcagaattaattagaatgaattaatactttgctaagtttatgcttaggttactcctgcgctgagctatgctcccataataccttgttgatcgtgctacatcttctgtaccctctgtctgttttgattaaaatgctatgggacaaacagcctttcattaagtttactatgctactattcaagtattcatat

SEQ ID NO: 5038 - DNA, 176 bp, Oryza sativa
gatcaatcaatttgtgtcaccctctatggcgaatggcgtgttccacgctgatggaaagataggagtgaaagctacagtgaccgattaacaaacagtatcagcttttattgagagtgggagccatggctaataatggtgatgtacatgtactggtcattaacattaatccaatttta

SEQ ID NO: 5039 - DNA, 466 bp, Oryza sativa
  unsure (1)..(466): unsure at all n locations
agctntccatgaagtacttgcacgcccaaatctgagttcgcatgaagtcgtggcggccgtcagaagttagcgctgccctgcagtccgaatccaccccgcgcgaatcctcttccctttggatcctctccatcgttcctgagtaaaacacgagtgcacgcgtctccgaggtataaagacgaggaatatgaactcaagaaagaactcacctgataatttagttgacgtgcacgagcgcgggtaataggaccatcatgctgtatatggggggacgtggatgtatcgatggtgttgatgtcctcatcaggacttttagaaagtaaaaaatgaacccgaacaataattgtgttcgatttttaaaatcccaataacaataaagagaacaaacagtggacggtccatagaggagtataatggcagcgttcgacgagacttctagaaattataaaaacgaaacccaacgagataa

SEQ ID NO: 5040 - DNA, 421 bp, Oryza sativa
  unsure (1)..(421): unsure at all n locations
atatattgaagatttttntactatttccattagctaagctgcaagacttattcgcacagaaatcacactacacagagtcatcaagctttctaaagggatattgaattgatacatagaaaatataatagttgcataaagtttgaatgggagtcgccaacctgataaatcatcacctatacggctccagataggatctcattcattgccgataagccacaacttgtggtactctgtaaaacacacagatcgagaaagaatccatgttaaatatcagaacctggtaagccaagtaaatcattagtaagaattaattgacgtgaagttgatatcactgtccattaagtattctctattgattagcaangtgttaatcttattaactattattttaatctaagccaatggaatttaatctttatga

SEQ ID NO: 5041 - DNA, 466 bp, Oryza sativa
  unsure (1)..(466): unsure at all n locations
agctngaatcaacaaccaagattcatgattttatacaatttataatgcaacatcttaacaagcacataggttgaagaataaacactaaatacatatacctattgcatttatcactctttctcaaataaactttagcacaaaataaccaagagaatttttgaaccttttcttttcttgagcgtttttgctcatatttttctcttttattccgggtacgtccctgtcgtcaagactgtttccagggattcagcacccattattttgctcacatcgaatacgtccttgtcgtcaagactctttccaaggattcggtattcattttttttcatattttgtactctctttttcacaataagcaattaaagctatttgaggaataacaattcaataaagcatatatatagagcctttataaatcaaaccatatgctagcatcaacattgcatatntgcttaattcaagtata

SEQ ID NO: 5042 - DNA, 395 bp, Oryza sativa
  unsure (1)..(395): unsure at all n locations
taagccgtcttctacttgtgactgagagagcaattcattcggtttgaaaatttaatgacaccaagtgtccgatatcataattatggagtaagatcggagtatcgcaatagcttttgtttttttataaaagactattgcaataattaaaaggagtaaattggacttcacctgaaatggacgacaaagtaagaacataatangaggatatggtatttagcagcccacttccgattggactgttctgtactctgtccacatggacagccgtgtttgtggtatgcatgtctaatggctaatgcccatggataacgggccataatttccgaacacaccacgggcaaataatttcaaccacatattcgacgttggcatgaagaacgtataaacgagataaa

SEQ ID NO: 5043 - DNA, 454 bp, Oryza sativa
  unsure (1)..(454): unsure at all n locations
agcttacgcataatcatttctctcgaacctctaacatggcatggttggttgtgtagaacatcagtatgttgcttgacacaggaaacaacatgaccaacgagatcactctctcagggaagctgttgcgatccctctttgacctccatcaatcaacagcaaggagaagggaaatactccaattccaacacaagatatcaagtatttgagatacaacttgagggagggatagaatcatagacacgggaatcaacaatctataatgggaagaagaagcaagagattggggaatcagagaattggagcttgaggtaggagagcatttgggaagaaaggagacaaggcatatgcttgttcattcatatgttcatccatgatccaaagaactgcagtgtggcttggtntatactccttgctgtttggttgggcctagagctggcccagcccatgtacatga

SEQ ID NO: 5044 - DNA, 486 bp, Oryza sativa
  unsure (1)..(486): unsure at all n locations
tgctgaaccctatggcgtctgcctatcaggctatcatccctangtggtagaacatgtagagaggctatgggccaagcaaggcagcacgatggtccaccataccatctgacagcccacaccctcccccgtagggatgatgaaagcatggcggccattcaagcgtcgtcccgtggcctcagttacacgtcgggtaaatatatgtcatattgcttttaatgtaaggtacactcaagataataaatagcgtttttagctgccactatagcggtagcggaccctaccactaccggtacgacgtatactagatatagcatcttggaacttagcacccactattttcacttatcggactgctacagcggctgcaattcgattttgtggactgctgtagtgttgagcctatttatatgaccactaacccataacaagtaacgagtgtataattggtttgtctcacaaacattgattcttggagtcgaacatcta

SEQ ID NO: 5045 - DNA, 451 bp, Oryza sativa
  unsure (1)..(451): unsure at all n locations
gcaagctnggatgactgtcagtatggacttcatttattgactgcctaagtcaggcaaatatgaggcaatcatggtagtcgtggacaaattttccaagtttgctaaatttatccctcttgcacacccttttactgcttatacagttgcttaggcatttatccagcaggtgtatgatgtctttgggatgcctcaggttatcatttctgtcagagacaggatttttactagtgctttctagcaggagctgttcaaactagcggatgtcaaacttaacatgagctcttcttaccatccacaaaccgatggacaaactgagcgcttaaccagtgtttggaaggtttcctcagatgcacagttcactttgctccatctaaatggtccagttggctgtcccaggctcaacactggtataacacctcctaccacaatgtgctgaataaatctccatatg

SEQ ID NO: 5046 - DNA, 418 bp, Oryza sativa
agcttagacaaattaaggtcttgtttagtttccaaacaaaaaattttcaccatgtcacatcgaatgtttggacacatgcaaggagtattatatatggaaaattaataatttcacggattgcgtgtaaattgcgagatgaatattttaagcataattgcgccatgatttgataatgtggtgctacagaaaacatttgctaatgacagattaattaggcttcataaatttgtctcgcagttttcaggcggaatatgtagtttgttttgttattagtctacatttaatactttaaatgtgtgtccgtatatccaatgtgacacgccaaaaaatttcgttcgcgaactaaacaggccctaaggtggtcagccaaatagccctgcaactttcacagccatcgcaaatgtaccccttgggtatg

SEQ ID NO: 5047 - DNA, 239 bp, Oryza sativa
cactaccggcacgtgagctgcacatgactgttatatttttgatgaaaataaatacattttcttaaaaatagatgctaagcaagagtagcatacgttatgattatgtctgaccgatctcctgtaatacaatgattacaaacaatggattacctaattgtatctttggctgtgactggtctattctgaacatgcgcaacaggatagggaaaaaaggggataagaataaaaattctgtcatg

SEQ ID NO: 5048 - DNA, 472 bp, Oryza sativa
  unsure (1)..(472): unsure at all n locations
agctnttaattngctcctgaatataaaatctttctgtcctaattaaggtcggcattaacaaacatatcttgttcattcagaaaaatgcagggcttctttagcaggtgacgacatttgcatctaatttttgcttgaaaaggacatcattaattaagttgcatctggaaatgttccctttggtttagctagcttggttccaaagaatagcatgattgggccggatcaggacgaggcttagttcagataatcaggataaatacggttaactacaatcgattacgacaaagtgaaatttaggttctggacagctgaaaaatatctagtagaagtacatcaggacagttccaaaagtgcagacatcacagcaaaaggagtcaaaacaaaagagagaaaaagtaatgcaattcataacaactaaagcctgtgttataacactgaattntgttctacttctatctagactctgacttgg

SEQ ID NO: 5049 - DNA, 447 bp, Oryza sativa
attctttatcaacatagtttatttttcaactttggcttttcaatcactaagaacatatatacaaaagttgtactcacatattattttttaatcgcaaataagcccgttatgacttataataagcgagactaaccgatgggggcctttggttatctgtccatctccatctataaatatgtagagtggatccattcgaaggttctcctgcacatgcgtttcatttcgactttgaagccgtcttccatccttccccttaatcatgggtttttctttgattttcctaaaagggatagattgattgatgacgtggcgacgatttggtccaggtagacgcccgccattcatgcagtcatgcagccacgtgattataatctggacacacgtatgtgatgcggtacgggtatacgctgaacgtgcgggccatacatatcaagatgggctggaagt

SEQ ID NO: 5050 - DNA, 465 bp, Oryza sativa
  unsure (1)..(465): unsure at all n locations
agcttacttgtcttatagattaggcgctntatctgtctttggttntatcgcttgttgctttgtctggttcaataatacagcttatccgagtgagttttatggacctactgggccagaagcttctcaagctcaagcatttacttttctagttagagatcagcgtcttggagctaatgtgggatctgcccaaggacccacaggtttaggtaaatatctaatgcgttccccaacgggagaggttatttttggaggggaaactatgcgtttttgggaccttcgtgctccatggttagaacctctaaggggccccaacggtttggacttgagtaggttgaaaaaagacatacaaccttggcaagaacgacgttcggcagaatatatgacccatgctcctttacgctctttaaattctgtgggtggcgtagctaccgagatcaatgcagttaattatgtttctcctagaag

SEQ ID NO: 5051 - DNA, 322 bp, Oryza sativa
  unsure (1)..(322): unsure at all n locations
atacacagatgaaacccaaccatacatgtcccncaattatatcttcttaatcatccacactaacaatccaaccctctcccccaaaaggggatcttagtaaataaccaaatataacaccggggctaagggtcaaattggtaattgttcttacatctcctcccacatgagcccatttatcatatataccgccaaaataaagagctgtgagtactaaaagaaaagcacctatacctaacataattatgtgaatacccaaaattgtagtcattgtatttctatctgtccacacataaccaaagaatggtaaaattcttcaagagtc

SEQ ID NO: 5052 - DNA, 470 bp, Oryza sativa
  unsure (1)..(470): unsure at all n locations
agctngcacgtcaacaaatcctcctaacagtatcttgcgctgaatagagttattgggctgatgaagagaagatcagaagatcagggagtgcaaattaagcattacaaaataaagtatattggcaaaacagtacatacatcctgatcagagggggaactctgtataagcaccatgcctccagctttaagaaccctgcttatttcagttatgaacagatcgcccaagttttccactttcttaatgacagcaagaacagaaccaactgatgcatcatcaaaaggtaacttcccacctgaaccatgccaacatggaatgttcaaaacgagcttatgacaaaccaaaatgtatactacaaggataaggtatactaaagcataacagaaatcgaaactgaacatatagcagagcanaacagtgtgtcggttgtagggtccacatattggaacatanctccaatttggagtagtagt

SEQ ID NO: 5053 - DNA, 63 bp, Oryza sativa
gtcatgataccatgtatacatatacctataaaaaattatcaccatttgaaatacgcggcctca

SEQ ID NO: 5054 - DNA, 478 bp, Oryza sativa
  unsure (1)..(478): unsure at all n locations
gtgcaagctttgccctcctttgataagaaaaggctgttctgatgcgagggaagcatgacaaaactgtgtcagtgtttcttctttgactgctcctatgtagtacagcggtagtagaatatccacggttttatgacataacaagtgatatgtgaacataataagtgatatttgggtaatttgtttctccatctttctttcattagtgcttgacgtagttntgaaatgctgatttttcttttccagatcactttctaccacctttatgttctatccatagaaatggtaaacggccagtttctttgtccagccaaaggacccaaggtccttccttcgatcaatgtcagaaattctttggttggaaatcctcccaccacaggataccacatcgaccaacatctagttccgctgacgcttcgggacaacctctacaatcttcagctgaagcacatgattcatcaagtatatggaagccaatatc

SEQ ID NO: 5055 - DNA, 316 bp, Oryza sativa
  unsure (1)..(316): unsure at all n locations
agcttntaccaagacaacaccgacgcaggtctatttagcgtggcagagctattatttgcccactccgatcgatatggttggtatgatagtacaaaactaaactatgacgccggctacggctggcgtgttgacgttattttgtcaagtctggtgggtttggtgtgccaaaaatgttcagattctggaaatagatctagaatggtttatttttgaaattaaaaattcaaatggttaaaaagtacaaaagaaaacccaagataacagagataactacaactcgatttggatttggatactgactgagcttgtcgccggg

SEQ ID NO: 5056 - DNA, 484 bp, Oryza sativa
  unsure (1)..(484): unsure at all n locations
atttccatgtcatcacaaacacgtttatcatatatatatatgataagcagcttacctggttgatactctctcgagatggcaaacaaaccaatacggctacccaaggaccccaaaattcgaaaattgaatatttgaggtgccattggtatccaagtcatgcttcaaaaccctttgaccatcttcacagaaaggaaataaattggaaccatttattatatatattgacagataatcaagtcttaacatcaataatagcttatagatcaacctgcatcacagaagataatgtacttctgaaatcttgcaacagacgagacaagttccttgaacgggatcttccncaacagatcagaatgctctntatcacttgacgaccaattcatgttcatatacttcaggagagcacatctttcatgtattatntgctgatatgactccatttcttcagctataccttcacaagactgtaactcttcaatgagct

SEQ ID NO: 5057 - DNA, 463 bp, Oryza sativa
agcttaattataataatccgcagatctccatattcagcactaaacttcggatgatcatatcttggtcatacgagctccgaatcgaccgttcaagtctcttaatgtttgatataacctaaagaaccctgtgctttctttttatgtattgttattgcttctttataggcttgtagctttgcttgtgtgcttcgcgtagcttctgtcgttccggaggttcccgaagcgtggttcgtggtcgtcgccgaaggttcggaagtccgttctctctgagcaaggcaagtcacatcatccttgagcatattgaatcccagtttataaaattattttgatttaaattaatgcattatcgctttatttaaattcccgcgttatcactgttttatttagccatgcctatttacctttgttatgaccttattattattgctattgttattattaccttgttcaccctagaataaac

SEQ ID NO: 5058 - DNA, 513 bp, Oryza sativa
  unsure (1)..(513): unsure at all n locations
agctttgttcctaccgtgacattctttcatggaagctgctctggtgttatttcactctgtatatgcactcaagcagagaccacgttacattttgcaggtcctggaaagtttgctcactgaatatgaaacttcttgttctggcccaagcaaatggagaatgcttgcagcctttttaagacagtggtttgttcctgcccctacctaattgttttaatgctngcacttacagatattttgtaattgcttttgtctggagatgaactggatgagaatctacaatacgccacctatcttttggtcaagtgagactatacaaaatatntattttctatatntagccaccttagtttctgctgacttgatcaagttgtttgtagaaatttgcctgctgtctcaactgtcccaacaactgataactntcatggtagttatgttatgttgttgaatttgaaatctcgaatggcaattgcatgttagatcatgtgttgagtggtgcaatatatatgctccata

SEQ ID NO: 5059 - DNA, 402 bp, Oryza sativa
  unsure (1)..(402): unsure at all n locations
caagcttccggcttatctcgctgtaatctttttctctgcatcttgaatcacttatattatcgtaagacgtgggtctgtatgtcaacaattgtcgtttgtgtaccctggctggtcctggacagggatttaatgcacattcagcttacaaattctggttcgagaatttctgggtgtgacactatcttcttcactaccatgcatgaaactatcataatttttaaaggtcattttttacatagatttggattgtaatttcacgttggatttggaatatgctagttgcattatattatataaaattttatattatcacgataataaaagatataattttctcacatgctattaatgtaatcacacatagatatatagatttctcgtgctaaanatatccaactgaag

SEQ ID NO: 5060 - DNA, 411 bp, Oryza sativa
ttccttcaagtcatctctcacgaagtctgattataacgaatgcactgctcgtagtatcttataagctggaaaaaaaacatgagagcattttggcgttagatgtttccctcatcatcaagtaataggagaagacaatgggatgtaccagcatgggatgtattgctttcaattctttgtcgtccaccatgactttctgcccatcagacctgtcgaaacacttggttagaaaaacagttcatacatatctaactaacaatatgaataactacataaaaatggtcataaaaaaatgcagaatatattatttgattagtgaagagaccagaggattctttttgcgacatctctaaatgagtgatacataaagcactcaatttgtagccaaataataattcattgctagatatagtc

SEQ ID NO: 5061 - DNA, 464 bp, Oryza sativa
taatctctgctgggcacttgttagagcgtcgatggtgacatatcacatatacaatgcatgatgctgccatgatagactacgctacgtagatccatgagatttctttaatggaccatgaattatctaatcacacgcatcagtacaatcacagtagggatttacctatatatcgtactgacagtgctagcagctaatactcgttcagatctgtgcagaaaataattactcaatcatatcgtctgtgtgatggtctcagatcggcttagctcagttcagtcagtgactgacagagccaagtatcgaagtggagtgtataagacagtagattaatagcgtattccgtacttcaagaatggcgcagaaagcacgaggaagtacagtatcccaattccggctagtaatatacggtattagataaatacgagacgaaagcataatatatactatgcgactacgagtatatt

SEQ ID NO: 5062 - DNA, 470 bp, Oryza sativa
agcttaaattctgttgacagagaacacgatgtttgtgagatctgcttaactccagtgcaggtccaaaactcgccttcggatgtgtgagcgtgccagttgatttgatcctgcaatcaacaagaaataaagacaaagaaaccacaattaatcctataaacgatagctgatcggctaggtgccgatgacatatcatttatctttgagccgatgtcatatatgtatcgatcggcaatcatgaataaataagaagaaactaaatctactcgatcggctgtagatattaacaatatatatattccctatatcgatatatacttaaatcaagtgattgagatagatcggacgccatgccgagacagtataaatcatttatatcgaaatatatactaataatgggactatatatatgtttatagcatagccgatcaaatagatctagcgtgtatcggctaatactccgataccactct

SEQ ID NO: 5063 - DNA, 448 bp, Oryza sativa
agcttctaaaagcacccatgccacttttttttggtgttcttcaatctcctttttgactaatttcaacaatgttttattactcgacttagcttatccattagcctgagcgtagtaaggagaagaactccacaacttaatatcataagattcggcaaaacttctcacttccttggacataaaagaagctcctttatccgtagtcaatgtttgaggaataccgaatctatgaacaatatgcttcaaaataaagtcaattacctccgtgtaagtaatattcttgaacgacacggtttcggcccacttaatgaagtaattcgatgcaactagcacaaaccgatgcccttttaatgatgaaggataaatttgaccaatgaaatccaaagcccaacctcggaacggccatgggttgatgataggattcaatacagcgttaggcaccaattgaaca

SEQ ID NO: 5064 - DNA, 289 bp, Oryza sativa
  unsure (1)..(289): unsure at all n locations
ttcttantgcatgtgatatctgctaaaggagtggctgtggaccccataacaatgaccgccgtcactgattggaagcaacccaagacagtcactcatattcacaactntttgggtttggccgggtactaccgaaaattcatcgagaatttctccaaaattgccagacccatgacgcagttgctgaagaatgaagaataatttgtgtggagcccgcaatgcgagaaagcgttccaaactctcaaagaaaagctggtttcctcgccagtgttaatcttaccggatactcgca

SEQ ID NO: 5065 - DNA, 464 bp, Oryza sativa
  unsure (1)..(464): unsure at all n locations
agctggggcagatccggatccgctaccgtgttctgtccgccggaaacacctccgtcggatccacccacgggagcactgatgccatctctgcagttgcgggaaaagcttggggacggaggaggagggggtagaggaccgtcggatccatctgtcggaagcgccaccgctagatccgcccgtgggagcaccgatgccatcatcgctaccgtgggaaaagattatgggtagagggggaaggggagagggtagaaagactatcgaaaacgccatcgccgctgcctctgctggatctgcccgcgagagaagcttanggatggagaggaagagggtaaaggaccgtcagatccggcccacgggagccgccaatgccatcgactctaccggatccgccgatggcgaaagaggcgagagaggagggggcatgactatagagggaactggtatagaggggaggagagctcgag

SEQ ID NO: 5066 - DNA, 496 bp, Oryza sativa
  unsure (1)..(496): unsure at all n locations
ctctagattgaagaatacgcattatggatgactgtgttcatattttatgccggtcatcaaactaattgagcataccataccggatgctgtatcttggtcaactccctctatttggaagcgtatgtttgtttatacatgcatccagttgactttcgaaacttcgaatatcaatacactatataatattattgtctcaagaactttcttgaatattataacttttacacggtctgatatacataatgcactaaaagttagtggtcaaactactgttctagatagtgtcccattgtccaaaattacatgtattttatgaattgagggaatcatcaccagacgcctaatcagtcatgtctttctacgattagaagttcatcgtgcaaatttggactcgtttgttttgcgaatcgcanatggtatgcacaattctgacttgttgtgaatcaacttgcagcttgcttttgaagaatatggtgacagtgatgatgatgatgat

SEQ ID NO: 5067 - DNA, 470 bp, Oryza sativa
  unsure (1)..(470): unsure at all n locations
agcttccttcagagcataccaacatgccaaactgttaacataaagtaattaagatccaaacaaacaaaaagaagctataatgaacatgcatgaaaattatatgcgtcagatcgatactacacctagcggattcaaatccccaaacaggagtagggtattacctcatcgagagggcctgaaactgtctaaatacttgtctctacatccatccacttttaggtctcgtgcgctaccccctttatattgctgaaatcttgtttcgacaattctaatcctatttgttataccagtgtttcggtggagactgttaagttgaagttctatctaggaaaagagttacaccagaccacaattgaacaatggactatgccttgaattgtcagtctgtgcgatcaggtttgggctgccatttggaacaatggactatgtcttgccaagatggaaggaaaangctgaattttttatttata

SEQ ID NO: 5068 - DNA, 436 bp, Oryza sativa
  unsure (1)..(436): unsure at all n locations
ctaagcttcctcgacgcttactctggctaccaccaaatcagcatggtgaaggatgacgaggagaaaacagcgttcatcactccgttcggagtattttgccacgtcaaaatgcccttctgattgataacagctggcaacactttccaacgcacggtccatggcgcacttagcaattagcttggcaacaatgtcgaggcctacgtcgacggcatcgttgtcaaaaccaagacaagcgactcattgattgatgacctncgggaaacgttcgacaacctccgacgatatcgtctcatgctcaatccagagaagtgtacgttcggagtaccgtcgggcaagctactcggattcctcgtttctggcagaggaatagaggcaaatcctgagaagatcaaagcaatcgagaacatgaagtcgcccacgagactcaatgaagtac

SEQ ID NO: 5069 - DNA, 462 bp, Oryza sativa
  unsure (1)..(462): unsure at all n locations
agctnttctaggcattaggcctcatttcgtcttgttccgctgcatcttcttcctcaagccccagccaaacaaaagcaagccgtgcgttgttgggggagctggcttccaactcagaggaaccttgagccaaaaatatttctccatgcccttcaaaacctcaaacaaaggctggcatgtgaactggttctatgttcagaatcctgagcccgcactccccgagtactgttgtcttcctccggtttaccaggacacatgggactcattgcctataggagatgaagctgctcaggcagtagaactgatggagaggatgataaagctaaaagaacagggtcttcaaggaaagcagatcacccggcactttatcaagtgtcggttagctccaatcaaagaaagatcccgcacagcttttgagttcgatggcaagcatgatccanatcgggaagatccagattctcttga

SEQ ID NO: 5070 - DNA, 402 bp, Oryza sativa
  unsure (1)..(402): unsure at all n locations
ttatgtatacatataacatacttatgtgaagntaaatatatatttttatagttaatatttctggagtgttactggcttccgatctgtaccgacatgtttccgtttgtattgttccttttccggttntccgatatttccgatatcgttttcgtttccgactttatcatttccgatatcgtttctaagaaaaaatatggttacggaaatggttgaggcttgtttccgatcgtttccgaccgttttcatccctacatttatatacaccagatagcaagcctgatttaaacaagttgcagagtcccaagaggcacaccgggttacgaagagcctcaataagtgagaaaatagatggacggcaaatcataaatgcaaacatattcagatctcgaggggtttaaagta

SEQ ID NO: 5071 - DNA, 441 bp, Oryza sativa
gtgcaagcttgttcttttcgtaacaatgcaactgtttataaatctctcctctcttgaaatgttcatcagttaaaaagacaagtaggattttcaagtcagcagagcaaggttgctgcaaatccaggtgatcaatgtcaaatactaccagacccaaattcagatcacacaaggcaagcagcagctaaacatcaacaattctagtctacagcacatttgctccaaacaaaccattgcagcttagttccatttcatatacagagctcccatggcattttgagtgacagcatgatgatcatgatcatgatccatcttgagaattctttctttcttttttgtttttcttcagatgttcagaggaacagccagctgcagcagcggcggaggcgcgacggcgcggcgccggtctcccggatgcggtgcacctggcgggccagccgcgcc

SEQ ID NO: 5072 - DNA, 381 bp, Oryza sativa
  unsure (1)..(381): unsure at all n locations
atgcaagagttagcttaacacatgctccaagacagaaataataaatgtgtaagtgagagatagagatagaagaagaaaattatagccaaccttatacctaatctattatatgtattggctctaagacgggctaataatagatagtgagttntactattatccttgcacttagagcaagtttaatagtatagccaactactagctacaattcatttataaccaacctaatagctcattcatacaatagttacatactacactattaatacctggtcccacttatcatacacacagtgtgtctttgagttcgtgctacagctgactataaatctgtagcccgctgttatccatctatttaaaaatatgttgtagctggctcat

SEQ ID NO: 5073 - DNA, 445 bp, Oryza sativa
agcttaacctgtgcatacaatattggtaggttttattgttctatgcctatgaaagtgcaaaaggccaataactgatggatgaaatttgtgaatcatgtgatgttattttgcgcaccaaattgcattgcatcgcattgccttttttccccatatctttagctcaagtagtgtgggccaggaggttgatttgaaaactcaatgcatcgaatcttgcttgtagctgcttatttcctattttggtggttgcctacttcccttcctagtaatccatcacaatattttggaactttaaagctgtgctcaaaattatttctgaatatgtatgtcattcaacatacactccttacactgtaatcatacagaaaccatgcacacattatctcatttagttactaccatttgcatgttcagttgtgtacaaatgtatttgtcttcatcggacaat

SEQ ID NO: 5074 - DNA, 479 bp, Oryza sativa
  unsure (1)..(479): unsure at all n locations
cttgctcctgccaatntcactcaagttctttcggtttctagcaaaaagactattgcacctttaccatcaactaaaaggcaggcacctgttatccctgaccaaaagaaatggtcagccagtccaaaggacatcaatccgtttagtgttctgtcacaatcaggtggtgctgttaagataactgggctgattctgatgtggagaatggcagtattagcagaagttcagatgagaaggaatctatggagctagtttctgattgggaggatntggatgacaatgttcttcacagccaacttggtctttgttcaaatccagatgagatcagtcaaaactcctcatacaacaatgttgctaagggagcgggagttgtggaatgcagtcatttggttgtcaatcctgtgaatggaggaatacnaaagtctgatggagacatgcttgtgatctcagatgatgtgcgatcacgtgctgtgggtgttgat

SEQ ID NO: 5075 - DNA, 459 bp, Oryza sativa
  unsure (1)..(459): unsure at all n locations
agctnttcttaatatgtttgaagggactctatactaaatgcctgatgaagagttcaaggtaagatgattgctgtcagtatttgttggcttctgttatagcttgctgtagctcttttgccgggtcggccgaaggttgctgtagctctattgtatggttgtatacttgacattatacagagtaaacagtcacttctgttacctgcagagcaacgtgaatgctctcattgacatgaagctggagaaatacaagaatataagagaggaatcagcgttcttctggaaagaaatttcggaaggaactctgaaatttgatagaaaagaggcggaggtatgctctatttctgtaattntgtccctatggtgtcattnttttttatacctggagttctcttgctgcaggttgctgcactgagggatctcaataaagaggagtngattgagttcttcaataatcatgtc

SEQ ID NO: 5076 - DNA, 471 bp, Oryza sativa
  unsure (1)..(471): unsure at all n locations
gctggttagttccaaatttttttaaaaaacatcacatcttattctttatcacatgcatgaagcattaaatatacgtaaaatctatttggagaggcgctctcgttttgccttaaccagcgacacctgaacgtgtggagaaatctactatagcgtactacatgcatgcantttttagaagtctactacatcacatgtatgttattttcctcttcaaacaaagttttctctcatattacttatccgacctacaatccgattacaccattgtgttcgttacaattaaatcttcacagtaagatcttacatgattatattacgatgaanaaatatttatatgtgtaaattacttttattatatatgtaagttactttctatcatatatataagttacttgtaaatttgactgaaatacttcttagatatataaaagtaaattcaatagagtctgaaagtaatgtacatatattata

SEQ ID NO: 5077 - DNA, 376 bp, Oryza sativa
agctctatcaaagctaagagaactctgactattatatagtcaaacgattctttaatcaaacggaaggaatataaagtaactattcttttaatgtatttcataatataaggcgtgcatgtatacatgtaattaactagcacattctattcacttaattattatttttaaatcctccattctcaagatttttaattttattagatgtatacattatatttattaggacgatataaatgagtaagtgataataattatttattgactaatgagttaataagtagttgtgccttttatatttttgagaggagtagtaagcttgttgcgtacatgcaagccgaatctgtcaatctggtgacggccacttatgcatgctctg

SEQ ID NO: 5078 - DNA, 429 bp, Oryza sativa
agcttaaagccatgaatcccttctatgcatatctggatctggatcctgcagaacaaacatataggatgagtagtatctgatataaatataatactcgagaaaaaatcaagtattttaaaatatttataaatatgtatttctcctcttgtcaattttgatttccccgagcagatgactctgtacgtttaaacactctgcccgactagtcataaccaccaagcatcgggagtcggcctaggcacttcccaaacatgcatatgagtgatatgagttcgtcattaatggaacaaagtttcacggattagaatttactactcaggtacttttgcaattattaagagcagaaaataaatttatctcatctctatgcttttgatttattccgaataatacttagcaccttgcgttactcggtccatccaacgagcc

SEQ ID NO: 5079 - DNA, 365 bp, Oryza sativa
  unsure (1)..(365): unsure at all n locations
agcttctttgtgtccgcccaggcctctgattttgggcctctagctntgtgactcggtcggcggtagtagtagtagcctttatgagttgctcgagtgctcgacctccgcgactacgtcgtgagcactagtttgcaacaccataatttagtctattaattttattcactcccctatggaaatcacttatcagccttagcagattatattttattaggccttgtttgtttcaacttaagattgtcgtaatccagattattaagccagattactataagctagattataataagctatgaatgtgctggttctcttgattattggagacatggattattgggtttgaaagggtaatggctataataccc

SEQ ID NO: 5080 - DNA, 341 bp, Oryza sativa
  unsure (1)..(341): unsure at all n locations
acacatttaccaacgacatgttggccacattaagcgccacttggttttattgcacaaaatctccgtgaaattgtgaatggttataatcacgggtaatgcaattagctgttttgaataacatcgtgtcaaagatgatgaaaacaagatgcgatttaacaggcgaggtttgtagatattatagcataaacgtggtgtaacgttcatatggaaagacatatttttctgtnataaactcatacataatactatttacagctcagtcataaatttctatcatcattcataatacctgtgagttgaattcgtgaatcaaaattaccaacttctgaaatagagattaa

SEQ ID NO: 5081 - DNA, 458 bp, Oryza sativa
agcttcaagacagattctatcttgacttcttcccagttacccatattactgcccttcgagtagaaattctcagtttcaagcagatcgaaaatgaatcaattggtgcagcttggtccagattcactaatttagtgcagtccggaccaaccctgtccttacccgagtatgtgcttctccaacatttccatacggatttgggtaaggaatctgcattctatctggacataaccgctggaggatcgttcatacacaaaacaccgtcaggaggaaaaacgatcttggattgcattctagaaaatacttccttcatgacgcagtccaatgaacctcggccggaggcatccgtgtccaagatagaggagcctctaacgatcgagccacttgctaaaccatctacttctgctagctcgattgatgagaaggttcctgagcaccgtctgtcgagaatgaagaaattc

SEQ ID NO: 5082 - DNA, 372 bp, Oryza sativa
  unsure (1)..(372): unsure at all n locations
tataaatggtggttcatattaacaggagcttataaccagatttctaacttatatgaacttatgtttacagattttccaaagttctggacagcaagcacagatgtttctaaattaatgacaaacgagttcttagttactattacatccatccaacaagttcttacataaatggagtacatggcagccatattacatatattacataccatgattttcttccaaaatgggccaccacatacctagactattccttaagcttgtccttaagtcatactaccgtggcagtagaggttagataggactattgattaatctctcatccttagctngaagactcgaccataccattgaacatactctggcggtccatac

SEQ ID NO: 5083 - DNA, 469 bp, Oryza sativa
  unsure (1)..(469): unsure at all n locations
agctntcacacactataaggtccacanaaagcttacataattgaaatgaacacaaactgagaagcaccaacacaagacaaaagatccacgattattaattgaatcatattagtgaacctccatccgaaattggcgaagatttgcatgaccgtcgactcaagtttacgacatacatcatttagtagtttgatgtcttcatcacacctttttagctgggcctaacattggagccaatatgctaccctgaaaattacctgcatataatattttgatggtgatttatcaagaactatatcattcctacaaagccatagagctcaacataatgcagatgcttctacaaggataagtttcttgttttttttttatcaaaacctacaatccaattcctaaagatataagatgtactgtgtggagggtataactcanaagtaatttgtaatgctctccaaagaaatatggaataatg

SEQ ID NO: 5084 - DNA, 473 bp, Oryza sativa
  unsure (1)..(473): unsure at all n locations
agctntagcattatcagaggtaatacggtgaggatcaccgaaacgatatataatattatgctccaagaaatttattacattggaactttttacttctcttagtggcacagcttccgcccaccttgagaaataatcagtcgccgctaaaataaacttatgccctcccgaagagggtggatcaaaagggccaacaacatccattccccatgcatcaaatggccgggtatagtggggtgtagagggacaggaggctgatgcttaagatcgccatgaatttgacaattatgacatgatcttgccactctaaggcagtcaatcatgatgccgggccaataatacccgccaattctaatgctatgatacattntgggtccaccttgatgccccccgcatacaccatgctgtacttctttcaaaatcttctcagcttcatccctcgagacacacctcaagagaatntcttgcccaaatga

SEQ ID NO: 5085 - DNA, 456 bp, Oryza sativa
  unsure (1)..(456): unsure at all n locations
agctggacttctcttcatgcacaagttgtcgattagcttggattttttttctctatatccttgngttctcgccgttcagccagtcttaacttggctttctccagtttgaattggtgttgctcaaggtaaacggttggagtaaggatatcggctaactcatctgggattaaagcttgaatctcgtgtagccgtaccctgattgatccacagtcaaccaccatgctgtctagcgatgatgcttctagccgatctaaaatgcttcctagagttttcttcacatcatcagataaaggagccaaggctntgcttgtggtatcttcttctccttcatcaaggtagtctctgatgtcaaaagagaaaagatcggttaatacctgcagcgacaatttataagcagattagaggttaaacaattatagccgatctgaatgcttgttatgataaaagaaacttact

SEQ ID NO: 5086 - DNA, 265 bp, Oryza sativa
aggacgaacggagcgcacaccgaaccacacgtgcgacaacccaacaacgagcttgtgccaacaatccacacagaatcacgaaaggaacctgcatacaactggagataacgcacagaggatcgcccaaacacaaaacaccgccgcgaggaaaaacaagccagactgtaggcgataaaaaactccgtgatgacacaaccaaaaaccacggcggaggatccgagtccacaagaagaacaaaacgatccacgcgttgcaaaccaccact

SEQ ID NO: 5087 - DNA, 428 bp, Oryza sativa
  unsure (1)..(428): unsure at all n locations
agctntccccattagttgagagataactatttttgtcacatagcctccatgtatcaatcctagaatttgtaaaaggaagggtgttttatttttttttgttgaaatttaaacattcccaaaacatgacttgtagctcctaagttacaaaattaccctgcagtagaatattacagcagggtgttcttctctagaatgtgagccattcaagaaaaggggaaagataacattcatctagaaaagttttatgctgattgtttgttgcattctgataacattcatctagaaaagttttatgctgattgtttgttgcattctttaatatgatatccaagtacaagctattttcaggcttccaactatttctagcagaaccaataaaatgccaacttgaaggagaaattgctatanaactattctgtataacttga

SEQ ID NO: 5088 - DNA, 449 bp, Oryza sativa
  unsure (1)..(449): unsure at all n locations
gcaatggcacaagaagatgctggatgaaacgagatattaaccatacatgtaggctgtagcatgcaaacatccggtgcatgatggtcgatgcatgaattggcacattcagtagtccgtactccctactttgtacgcacagcttcgattaaattttactttccttggatttaagctcttcaatatcccgtctagattcactaatgttcatataaatntacacatgtatttgaaacacatatattgatccatgtataaatntaacccacaacgtacgtcttatagtatgaaacataaatttattcaaaacctcaaacattgtatacacatacattgatccatatatgaatttatcaaaatccaaacattgtataatgtgaaatataaatgtatttaaaacccaaaacatcagagaaaataagcctgtattaactgaaagatatattatttgt

SEQ ID NO: 5089 - DNA, 467 bp, Oryza sativa
  unsure (1)..(467): unsure at all n locations
agctttcgagaataaatgagatttaggtttttaacattgacatggcactggaataggaagaaaatttcgaattggcaaatccagcatgatgcaaatttttcgcaaagtttttggggatgagtttttgagttctcggattttatttgcgaatttttcaggatgttacagttaggtactcctaccaatgttgaacgttttgctagcacagtactactagcagtactcaaatgatttggttgtcaatattctgcaaacacaacagatgaaactgtagagatagttgcaatcttcagatcatcctgcagcatgatatgatatacagtatatgacccacccaatttaaggcacatacattcagttctttntttccaatggatcacatctttgttgacgatcagttcacaaactagtcacaatcacatcgntattacttctgcttcttcaagcattcatgtaacatcaaaaca

SEQ ID NO: 5090 - DNA, 434 bp, Oryza sativa
  unsure (1)..(434): unsure at all n locations
tcttactgcagacaaagaatntaccatggttgtggcagggatcatgggctacatatacccaatcttctatatgactggtcatttaacacagaagagtgatgtatataagtttggagttgtgttgttggagctcattatcagaaagccaacaatatatgacaagaactatagccttgtcattgagttccaaaaggcgtatgatcgagaaaatagtgggagagcattgtttgataaggagattgcaattgaagaagatgtcttgatcttagaagaaattggtaggttggcaatggattgtttaaaagaaaagatngaggaacgacctgatatgaatgaggtagctgcacggcttatgatgctgcgaagatctataaacactggacaagataactacaatgtaagtnctcaacagtactttgaggagaatagtatcg

SEQ ID NO: 5091 - DNA, 472 bp, Oryza sativa
  unsure (1)..(472): unsure at all n locations
agcttctcgggttcttggtctctgcccgatgtatcgaggccaaccccgagaagatacgagctatagagcggatgcgcccccctagcaagcttagggatgtgcagtgcgtcaccggctgcatggccgccctaagtcggttcatatcgaggctgggagagaaggcactacccctatttaagctcctcaaacgctccgggccgtttacctggacggaggaggctgagcgggccttcactcagttgaaggcgtacctcagttctcccccagtcctggtcgccccagagccagatgagccgttgctactctacctggcggcaaccccgcaggtggtcagcgcggcgttggtcgtggagcgcgacgaggacaaccctcactccgcgcatccccatcctgtgtcgactcgacccgggagagagcanggaggagaggcccccgagccgaacggcggcccaagaccctcgacggccggagc

SEQ ID NO: 5092 - DNA, 320 bp, Oryza sativa
  unsure (1)..(320): unsure at all n locations
cacaaaatngtaaggactactcgaacctggattacaatttggcttagtataactaaaagaaaagtacgacgaacatactgactatttgttggggcttaaactttttcgtttagctcatgagccccaaaaaaggcccatctgcgattcacatatgaaaagctactcaaatatggctgttgattttaatagtgcaagagtggtttatagctttaaatataacgaaccaaaatgttgatacaacacgtgcaacattaccctttacttgcatatcaagtccaattcatgtttcatgccacgttcgccgtgccgattcccgacac

SEQ ID NO: 5093 - DNA, 389 bp, Oryza sativa
ctgcaattgtgttgacgctagcattatcattcaccacttggacaacatgttgttcccctatctcttctatgtacctgtccacaagtttaaagatatatttgccatctttcctgtcacctgagcattccactgaatctaagaagagtaccccatgagcactatgcacaacttaattcatcacttccctacccttcctatctgtccatgcatctgtcatgatagaacaacctgtgagctcccatgattccttgtgctccttgaatccatccatcaccttttccttacttttctgtaagaacgatccactcatctcatatggactatgccctttcagacttctaccaatattgccaatggcctctacatatgagcaagctaggaaggtactg

SEQ ID NO: 5094 - DNA, 209 bp, Oryza sativa
agcttcttcttgtttctttgtctcctcgtcgtcgtctgcgagatcacgatgatgatgctgctgctgcggccgtcggcggcggcggcggcggcgccgttcgcgtacgcgaaggtggacaaggtggacgccgaggaggcgcggcacctgcaggcgcagtacctgatccacaaggtgctggaggggtcgtcggcggcgagggggagggggat

SEQ ID NO: 5095 - DNA, 414 bp, Oryza sativa
gaacaactgccaaatctaaaagtggcaaatagttaaattccccacacactggcctgcatgtgacttgatcggaaccataaccaaggccacaaaaggtattgaataacatttgtttgaggaaaatctagagtactacgattagtatgtcaaactatcggtatacattgcattaaactacaacagtaattaataatctagtaatataaaacattagtatgtcaattgaattatgcgaagataattgcagttttgtaaaatataaactctctttcccttctctattatttttgtgagaacttcttgtcctttccaaattctaagatgtcaaaaacccaaaattgtgttgttaaatacaaacatgtacaaatatgtagtactacttttgcttatatatgtgacaagcacaaacatata

SEQ ID NO: 5096 - DNA, 448 bp, Oryza sativa
agcttactaaagacctaggagtatgacttatactctccacccgaggggtagtctacagacggtctagtaccagataagactttgagtgaaacttgcttgcacaagacttgcaattcaaggcgtagtccattgttcaagttgtgagtaagtgtagcttggagttctaggtggatgttcaaccttaattggtctccatcgaaccgctggtatataaacagtacattggaaaaggcaaatctcagtgggattttgagatttggtgggggattgttggaattaatgaatgggccttagcccactcgaaaattaattctttggaaaatcacaaaagcccacctcatgggatggcatgcatgtggaatttagtaccaccttgcttattctaagagaaggggacctccttaaaaaggaggatgccctcctagccacttgaagcatgtgtggtgga

SEQ ID NO: 5097 - DNA, 221 bp, Oryza sativa
ctctccatgcccacctaccacgacgactgccccgcacgcacaagcgattcttgagaccgcccaaaccgctcggtctcagcacaccgtcctgaaagcccatagacaacggcatagcatgaagcagagcatctgctgctaatccagcagagcatagaagccatgaattggagagaccatcgagtggactgcgagagaagatgatgaatgcgtggaatggtgcg

SEQ ID NO: 5098 - DNA, 446 bp, Oryza sativa
  unsure (1)..(446): unsure at all n locations
agcttctcgngttcttggtctctgcccgaggcatctaggccaaccccaagaagatacgagctatagagcggatgcgcccccccagcaagcttatggatgtgcaatgcgttaccggctgcatggccgccctaagtcgtttcatatcgaggctgggagagaaggcgctacccttatttaaactcctcanacgctccgggccgtttacttggacggaggaggctgaacgtgctctcactcagttgaaagtgtatctcagctctcccccagttctggtcgccccggagccaaacgagcccctgctgctctacttagcggcgaccccccaagtagttagtgcatcgttggttgtggagcgcgatgaggacaattctcattccgagcactctcaccctgtgctgactacgcccgggagtgagcanggaggagaggcccccgagccgaatagt

SEQ ID NO: 5099 - DNA, 483 bp, Oryza sativa
  unsure (1)..(483): unsure at all n locations
tctagtgagcccacacatgatcaaaatgattggtttctccaagagtctggataaacttggctttccccttatccgagagttggctactgatttgattctccagatgctccctcccagctttgagccgttcataatgaatttcaacatgaacaatctgaacaggaccttggcagaattgcatgggatgctaaagactgcggaggaaagcattaagaaaaattccaaccatgtgatggttatgcataatcgcaagcccaacaacaagaagagtggcaaaagagaaagctaaactctgatgagatcacgagtactagcaactctaagaccaatgttcataagacatggcccgctaaggatgcagagtgcttcttttgcatagagacaggtcattgganaaaaactgtaagaaatacctatagcagctcaagcagaagcagcaggatggaaagagtaaacctcacgattaatgtatagaattaatct

SEQ ID NO: 5100 - DNA, 462 bp, Oryza sativa
  unsure (1)..(462): unsure at all n locations
agcttcgttntaatagtaatgtacgtactcatatttttgtttcaaatcatacgtacgtacgtacttacctacgtagggaaacaacagtcatgtttgtatcatatatacagncggaggaagttattatttcttaataataaatttaatctaatggtgtaaaataacgggtccacaaattaagcgaaaatcaacggtacggttaggatgggtccaccaatttaagtgaaaatcaacggtaagattagatagtgccatgtgacggctcaagagcgtttataggagtgtcacatagcagcgttagagcgtttgtacgaagtttaatggacttttagtatataatagatagatagatttcttcatattgtactattatgtgaattcacgccgatatcaattaatctctactacttgaaaaaagcttagtggtggtcttgaatcctcaccctagcagatccacagagc

SEQ ID NO: 5101 - DNA, 465 bp, Oryza sativa
  unsure (1)..(465): unsure at all n locations
agcttaacaactcanagttaaaataatgatgtgtgtatgttcttatggttttaaattaccaaagctgttccagagaacaaatacacagtgcaaattcttcaggttttgatgcaacaatccccaattttggcagccaaagtctgacgttttgcttcaaatattgaaattcaaaattccgtgtgttcacgattttaaaattcttttcaacaaagaatacttctaaatgggaaattttattgttcgctctacagttgcacgcgcttcgacaaatatgccacgaagttgtctgtacagactgtacttcatgttttttgtcccaaatctgtttacagaagatcaagaaaaaatatctttggacaaaatgtagaagcacatgcaactatggagaaaatcatcaattttccatttaagatattaactgctacttctgagaagagcctacaggctagagcagctgctggatta

SEQ ID NO: 5102 - DNA, 403 bp, Oryza sativa
tcatgcttgaattgtacgtcgaaccattaggccgggttaaatttctaaagagagaaacttaattaatccattgctgctatccgggcaatcgaaactaattgttctataccaaaattttggtgagggcagaacattggtaagtcttggttactactaaattatgtagcattgaatttgaactattggagataaattatggtatcaaaccaaacatgcatgtgtcattattaaagttataaaaatgttgatagggtaaaaattagcatcaaaccaaacaagctcggcaagtcatttttatagctaggatgccatatattatatcatacatcgatcaataacaatgagaacaatgttatacatgttcaagttggctcataagataagctcacacagtgtgcattct

SEQ ID NO: 5103 - DNA, 489 bp, Oryza sativa
  unsure (1)..(489): unsure at all n locations
cgactgcagcatgcaagcttcgagacagtggtacttggaagttgatcgttcaataaataaattcgggttttaagagaatgtcgaggacaactgtatttattcaaagtttaagaatgagagattttttttcctaattctgtatgtggatgacattctactggccagtagtgatgtcagtctactgcaggaaacaaagaagttcttgtcctcaaactttgacatgaaagacctcggtgaagcttcatatgttttgggcatagagattcaccgagatagaataaagtatgcattgggactttctcaaaagacatatatagaaaatgtgttgaagaaattcaacatgtacagatgcagtgctacacctgctcctatagtgaaaggcgaanaatatggngcatcgcaatgtcccagaaatcagtatgagctcaattaaatgaaaacaaagccatatgcatcagctgtaggaagcctacagtacgcgcaagtgtg

SEQ ID NO: 5104 - DNA, 382 bp, Oryza sativa
gctcgcacccatcgcgcgtccgctcgctcgttttcttttttgtcgatccgtcgccgtcactaccgcgtcgactgcatttcatgttcaggatccttccccgcattaaccctctgccactccgtcgacttcgccggagacacagccggaatctgctggtctaccagccggcgtcacctcgctcgacggcatcctcaccacccgctccacgaaccgcacctaggcacgggcagtcacggtgctgcgtcccttcccgctctccgacgcccacctcgcttgcacagttctgagcttgtcagcgaccgttcccaagcttcgccgcaccatcgtcgctgttcccgacctcgtccggcgctgatgtgcggccatgctcgagcttgcatat

SEQ ID NO: 5105 - DNA, 470 bp, Oryza sativa
agcttcccaacaatatttttaatacaaagagcatttttcactggttctgacaaaattttattcactcaaaaaggatttaaaataaattagttatgaatttttgaagtttacactttttttagttgggagggcatattggtcatttaagaaaaaactaacatttgactaacagtcaacaaacataatagtggtgggagtggcataaaagggtggaaaaacttgaaccagtggcataaaaggaagaagccaattttaagtggtatataagggaactggccaatttcgagtggcatataagggattctctcttaatataatcatagatagatggcgaaaaaatatacaattttgcctcttgtccattcttttccaaacataacactcaaattacagagtttttattcgtatatttattcactccattatatcatactcattcatatgcagataccaatataaatcatcacctt

SEQ ID NO: 5106 - DNA, 392 bp, Oryza sativa
  unsure (1)..(392): unsure at all n locations
cattgccctttgcctacccttacatacagtgtcataattaattgggcattngtgatattcttgcaacctaatctataagctnttatggcccatacctggattattcttcataattntaactgcctttgaagctacccatttactaattgcagtagtggtcctcctcatgctactagatgtacaggtatgataatccctcaacaaagtcacctgcatcaattgaaagatagcaatacattataagtaatgcaagaagtttacatatcacagtgtgcaatcaaagtatttatatcaaccttaattatcttcatgtcagccttgctactttcaacaatatgccaaacacaacctttcactgtacatccacttatatacacttgttggtcagtctc

SEQ ID NO: 5107 - DNA, 331 bp, Oryza sativa
  unsure (1)..(331): unsure at all n locations
agctnggacttctcttcatgtacaagctgctctttggcttggattgtggcttcgatatccttaagctcccgacgttcggctagtcttagcttggccttctccagcttgaattgatgttgctcaagatagaccgctagagtaaggatgtcggctagctcatctgggattagaggcttggtctcatgttgtccagtttaccaccaagttgtccagtgatgacgcttccagccgatgagagatatcttcaagggttttcttcacattcttcggccaagggacccaaaaatttgctggtggtatcttcttctgtttttccatcaaaataatcttt

SEQ ID NO: 5108 - DNA, 439 bp, Oryza sativa
  unsure (1)..(439): unsure at all n locations
ctaagctgggatggacacatgttgaaagaattntntcagagtactactttcatggtcacttggcaaattagattggcctcctcgtgtctaaatcagcatatcacgaatagaaatatcacatgcaggcctattgtagagttgagaaaatgtagaaaataccatcatagaaattcgtgaattacaaaataccatcgtatgtgagcaggactagtggattccaagaatgacatgttaatgatacattgngtggtatttttttgttacatgacttacgaaagtactatgcaaaccggcctaataaccaataatattgttcaatcttggagttagaatggaagttcagaaaacaaagggtatagagtacaaagagattggttgcaaagatattnttggtgactgactaaggggagtgcctagacccacaaaaaaaatgaatttg

SEQ ID NO: 5109 - DNA, 462 bp, Oryza sativa
  unsure (1)..(462): unsure at all n locations
agcttctcaagctcaagcatttacttttctatttatagatcagcgtcttggagctaatgtgggatctgcccaacgacccacacgtttaggtaaatatctaatgcgttccccaacgggagaggttatttttggaggggaaactatgcgtttttgggaccttcgtgctccatggttagaacctctaaggggccccaacggtttggacttgagtaggttgaaaaaagacatacaaccttggcaagaacgacgttcggcagaatatatgacccatgctcctttaggctctttaaattctgtgggtggcgtagctaccgagatcaatgcagttaattatgtttctcctagaagttggttagcgacttcccattntgttctaggattcttcttttctgtgggccatctgtggcatgcaagaagagcccgggctgctgcancacgatttgaaaagggaatcgatcgtga

SEQ ID NO: 5110 - DNA, 413 bp, Oryza sativa
  unsure (1)..(413): unsure at all n locations
tcctaatgtgggagggtttggtcatgtggatgcataaatagtgcttcaggatccattacgcgttcaaggccttttgttcttcttcgcatccgttattttggcacaagtttttttggttctcaaaaagaaacagtttgaaaaggttcaattgtacgaaatgaatttctaggtcccgggatttcttaccatcaagttggtaaaaagccgcgatttattggcgattgctagaattctctatgatccattgtggaaatcttttttttgtttagactattntttgtttgcgagatgtcttgtctgcaattccttatttctatcatctcatgcaaaacgaggagaatgcaaggcatgggcgagaacaataaaaggaacaaatccttntatgagggattgctggtcttcttaatcctcta

SEQ ID NO: 5111 - DNA, 469 bp, Oryza sativa
  unsure (1)..(469): unsure at all n locations
agcttacctattggatgctgaagctatcactgtattacttaaggtggagcaactctgtttgcaagctctctgtatgaaggaatacctgngggcacccatcattgatgttcctgtcgacattaattttcccattaaagatctggaaattggtcgactgaacagaaagggacctagcacacctgtggcctccaaatcaatttcaggctctgacttgccagaatttgtaagttgatggtatgcaatgaaatgacaattttcttataaactcttatttcaagagttcctactaaatcatgctgttatgcaggtaaaaattatttcatcatgcccttatgggataggcaaattggtggagtcattgcgtgtgcaatttccttgtgtccctaagttgcaactgaagaacaaaatttgggagatagctgactntaccaataaccgttggcaggtctttaacattccgctcattatt

SEQ ID NO: 5112 - DNA, 420 bp, Oryza sativa
catataggaatgttctactaaactgaacctaatatatatgcatacaaccaaaaacaaatatttcagtgaatttaaaaacaaaaacagaatgaaatcttgatcaattaaatctaaaaactttgggctggcttgttaagatgaagacatgaagtttgctgaattctttgctcgtagttaattatctgattcttttcaaaagaaaattaattcttaaacattgaatgcttcttaaacttttccagcagagaggtgaaacaaattatcaacatctattaaaatgaatgcaaatttggcatcatcttcctcctgctgtgcctccccccaagtgaatcatgaataacgggatcttactgtgatggctgtataagttggcagaagcagtctaacctcgttagatgccgctgtacgtgttaatatatg

SEQ ID NO: 5113 - DNA, 476 bp, Oryza sativa
  unsure (1)..(476): unsure at all n locations
gcaagctngcggaggaagaagaagaagaaggcgtttcttttgtttataatnnttgggggaacaaaattgtggggtttaggcgttggtccacgtcgtcgccatgggagatggcggcgtggtggctgatgataaccacagtgcggaaacacgcggttttgggctgaatccggtgatcccaccggaaatgatgcccaaaactgcctcgtggtgcgtgccctcgcgcaagtttgggccgaatgggctctctgtttttttttaatataagttcaccgaagatacattcacttagcagcgagattttttaaggtctctcaaccacataaccaaaaatgttcacccctaaactcactcaaaccgttcatccgaggtccctcggcagtatttatgccctgtcttactgacatgacatcctagtcagcaaagaataaaaaaataaatatgtggggcccacatgtaagtgacacaataatgtggcg

SEQ ID NO: 5114 - DNA, 438 bp, Oryza sativa
agctcctccaccatatgtcatgcttgtcagcttggtcgtcacattcgtttaccctttactacattgttttctagggctaagggaaactttgagttaatccattgtgatctgtggacctctcctgttcccagtgtgtcgggttttaaatattacctagtcattcttgatgattgctctcactatgtttggacgtttcctctacgtttgaaatccgacacttttaccacactttctcatttttttgcctatgtcaggactcagttttccacaccgattcgcagcattcaatgtgacaatggccgtgagttcgacaactccgccgcccgtaccttcttcctcactaacggcgtcaccatgcgcatgtcctgcccccacacctctccccaaaatggtaaagccgagcgcactctccgttccctcaacaacattgtacgctcg

SEQ ID NO: 5115 - DNA, 483 bp, Oryza sativa
  unsure (1)..(483): unsure at all n locations
tacaagctttcattcttatccaacttacacactaccacatgcttctgaagcatacaacactattcaaccacacaatatccacagccagaaagcaggtaagagaatctgcctccttaaaccaatgcaacagcaggagataattctcttgcacatgatgatgctacctacatactattagcctagtgggctatggagaaagttcaaaagttgacagttttggcacattgctaattgttcatagacatcatgggtgaagaaaaaaacaagcatgaaaaatgtgtggcaattctccacctccttccattttcattgccaggtttcctcttctttttttttccgttgtgaaaagtcagtcaagattatgaaatgatatgatctgggatccaaattatggtcccagccaaagatctgaaagagatggatgaatcagaanagaaattgattgtgttcagaaaagatgccccatatctttgaaaagagtgg

SEQ ID NO: 5116 - DNA, 462 bp, Oryza sativa
  unsure (1)..(462): unsure at all n locations
agctntccattaaaggttaggttagtgctgacaaccctgtctggcttttctccttcctatcagcaggaacaaaatgtcattagcaaaagctcagactgcataagaaggtatgctcttctcctaccaacactaacaggcttacctttccccacaagcctgactccttgtcgtaccaatatcttccaggcttgagcttttgaggaggccgttggcaactaagcaagctggccatctcatctggattaagaggaaaaccatttatgatgagttgctcangccggagctggtttgcttggcattccttctcagctttcagtatttgccttacttccaacgggctgagcagacgtgatagtatcctcgaacccttcccgagcttcgaccgcttgctctcatcgattggctggccaatgcaagtgatgcacttgcgcncttctggcatcgagcccatggccctgagca

SEQ ID NO: 5117 - DNA, 462 bp, Oryza sativa
  unsure (1)..(462): unsure at all n locations
nnagcttgcacattttcttgtacgggtcactaaaaaaatgtgtgcaatgtttttggtatgatatccattgttatactttgataaaatcgaataactataaatttaaccgcatataaaattattttcaaatacaaatgtaatgttatcgtttgtttgatactactaattaagtatattattagttagtttttagccaaaattactattgttgacttcttctaaaacttgaggactagggcatctagtctagattaaccaacatgaccaagcagagaggatgttgattgacttcattgtataaaggtgatcaattgtaataagatcgctgggagtgcgaggatagccaggcgtaaacaactctagcgtatttcttggtttccaagacactttgagagcagaataaaataggtatgcgtactgtgcgagaacggcaaatacacagtagcaaacttgtacgatgga

SEQ ID NO: 5118 - DNA, 406 bp, Oryza sativa
  unsure (1)..(406): unsure at all n locations
acatagtgtgcatacttggaaaacctgtcaacaaccaccagaatgcaattataacctgctgacttatgtagtccttcaatgaagtccaatgagactgcttgccaagaaccctcgggtacaggtagaggttgcaaaagaccagggtactttattctgtcatgtttggcctgcatacaaacctgacatctttactgattccttaatcattttcttcatgttaggccaagcaaagagctgtttaatcttcctgtatgtgacaggaaaaccagaatgtcctccaactggactggcatgtaattctcgaataagttntaactgtagctcaggattgttgcccacccagattctgttcttgtaccgaatgattccattgtcaagaaaataatgaatgtgtttctcacgatga

SEQ ID NO: 5119 - DNA, 464 bp, Oryza sativa
  unsure (1)..(464): unsure at all n locations
agctccgcgcgtcctcattagagcgctttttaatcgcatttgcacatgagaaagcaggacacagagagagaagggggagaagctgacccaaaaaagtaaatttttgtggtggggcccacatgagaaacagtttggtggggtccacctaaagacacgcgcccacgccgcattgtggagagaggagcttcacgctgtttcttcgtacgtggctgtttaggctcctcagaaaaacacaacgcagtgctaatgccctgatggtccgtgtgactcgctcgtgtcgtgtcgggctgctctgctgctgcagcaaaacgatcaggagcatccaatgttaatcgtacggcggcgatgtggtacaagttgcaaggattagcacactgttgttgctgatatcatnttgctactgngagtatttctgtatttttgtctatttacaaggttgtccaagcgtgttgtttgtgatgact

SEQ ID NO: 5120 - DNA, 440 bp, Oryza sativa
  unsure (1)..(440): unsure at all n locations
tatgcatgagtttattggatgcctctcatatggcataaacatcattaaacaatccttatgcgtcagaagcagggaagctgtactttgagattaaaatgcataatcatcgcctgtgcatcttctttattccatctagcaaagaacccaactcatccttgctaatagttatagatctatgggatattgtagataatgaaaaaaaattacattttcgacttctgttataaaacacacacagacttaaatttattaacagatctaagatatatgggtgtgactattattactcggcttctcccttcccaactccacaaagaanataaaagtgatgaaagaatataccctgccaccgcccttgcacttcccaccttctgctccaataacataatgatatatggattttagatattaaggggctggttagcacagctctagctata

SEQ ID NO: 5121 - DNA, 422 bp, Oryza sativa
  unsure (1)..(422): unsure at all n locations
agctngcgtgttctatccaatctttcttctttctatggtgcttgtagagcgatagttgcttgtaaactgccatccgattcgtcatcctggctgttgacctgtgttattccagtgatctatgaaacgatcgatctcgtaaaacttaagtttctttctttctttctctgtttgcttagttctgaaattacttgctcctgcatgctccatttcttagaggagtgcaattgcagcactactatgcaaaaagcttgtgccctcttttggagctgttctcaacaattggtcccatcatccttgtcatactgatccttaggagctcatatccaagttgtccacttgtggttntggatgatctcatcagaatcggctactaattagtactccaggcttgacttggtctggcctatgtatatctcttgtac

SEQ ID NO: 5122 - DNA, 467 bp, Oryza sativa
agctgtctctcgagagcgaaagcaacgcctctttcatcctgaagttgaagctaaatgatagtattgttgtcgatcgcctttctgagatggttgtagatgtcgaggacaacacattcaggacaagtgcggcagatatcttgaaacatctttgtatcaaccacactacggacgatgaacattgggacaaactgaagaactccatgaccattgcaataccaaaggtaatgatcgatacctgtcaaattaacacgtacaaaacgaaaaagttttatgctgaaataccttggggttaatgtttcaggtcctcagagaattacttggctgtgactggagacgaccagagagacaaacagtagctacacaggcgaacaattctgggaatttctcgccaccagatgcagacatagaagccctaccagacggtgatccttcacgagttagcaatggaggcaacaacgcctcatctt

SEQ ID NO: 5123 - DNA, 359 bp, Oryza sativa
tagagcatttctcctggttatcagttgttcagtgctccatgcatagtctgctagaacattcatcactacatttgcttgctcactagttgctttgaaaaagagaagggtatcatcagtgaagagcaggttggatataccatgatcccgacgactgatgtgaaccggggacaatgctccttgggctaccctctcctcaagcaacagcgaatgtccgtctaccacaaataggaagaggaagggagataaggggtcaccttggcgcataccccttgaaggagcaaatgtgctaagcatggtcccattaaatttaaccgaatatctcaccgatgttatacacgacattatccaattaacccaac

SEQ ID NO: 5124 - DNA, 467 bp, Oryza sativa
agcttctagacacatgcatgccaaaacatggctccgtttggagaaggcttagcaattagcatgtttgaggatgtgcaagaggaggtttatccaggacaatctataaaggtaagagtgtttgaattctgtttgctatctatgatgtcgcgggacagtttgcagtaaattattcttgtagatccttttctcttgaagttcccacatattaacattagagaagattacacctcctggtttggttctccttttcagacttgctcatctagtttggttaaataatccttagatctatccttatgttggctaaagattatgatttcaacttttttttttgttccaagatttcaactccatttaggaatgatctgtcacacacaaatgtttactgtaaatacttgtgatgagtcgcatttggagtcatttaggaattgatctctctcgcatacaaatatattcctaaaaccaga

SEQ ID NO: 5125 - DNA, 486 bp, Oryza sativa
tctaatgtatgacagcaatgaaacaattcaagagactgattgcttttgtctaaggtgagggagagctaggtcagacagggagttaccgtgttcagagttcatgtcatgtacaaagtaaccccacaggtcttgaaacaaattaagattcataaagctgacccacagtgaatgtgttaagttcatgttcctcttgggaaagcatataggcatttctcaacttctaaaacaaattcagtaaatgagcatgcactatgtgcaaatcatttttcgtgtacagggctgcaggatgaatcatgtttttccctggtggctgcagcagcaaagtttaatttatgactgaatgcagtacactaaatatatggaacttcctatagtttcattctaccttctaaattgacaaatctatcaatttgttcattatctatacactctggtttcactttcacatgtatgcagaagtcacatcacttcatcagaaagcattct

SEQ ID NO: 5126 - DNA, 467 bp, Oryza sativa
  unsure (1)..(467): unsure at all n locations
agctctagggaaatattgagactctgatagtctatgttttttttttntgaaaccaatagtcatggttttcttatgaaaataagaaatttattttcctacggctgggctgtttcgctgaacattcttgttgattccctaggtcacagcccctaaggcctaaacagcatggaaagcagctgggcaaatcaaggtcaggccctctcatggccaagtttcgaggcacaatttggtatgctaatttgcatgttcattcagaaaagcaaattcgaatgaagttgacaattgacaaagatcttatggaagagcatgatacaatcatataataggcatccagggcccagctattttgtgaagagaaatagaagcatctggagatggtaacatggttacccacttgcaagagtcatatatatcaggtatttgcgtagtgtcaaaacgtctgcatcataatgagagtttagcaatgg

SEQ ID NO: 5127 - DNA, 322 bp, Oryza sativa
  unsure (1)..(322): unsure at all n locations
actcagcttctcctgccctatatgaatcaaggaggatgcgccgatgcgactcggatggtgggtttatccncccgacccatctacagcctatcccatctactcaccgcgatagggttgacgtcgtcctcgtcgaatgggttccggtcgtacctccccgccatatctcccctccaccccaactcctcctactcctccggaagctgccgcgttcgtggtttctctctccggcgagggaatgggaacgcgcgtgactgtgggaccaactgctacggccatcgggcttccgcttttacgtaacctattgggtttgtaattcgcgatt

SEQ ID NO: 5128 - DNA, 468 bp, Oryza sativa
agcttcagtggaatcagctggtgcaaaagcttctgcatgcagaactctttctgttcttgcttcattgtctaataaaggtatcaagttttcatttaaatttttttttgtctaagttcttttgcaaatggaactttacaaggtttgcaagatatcgagggactttaagtttaaacaagtatttaaataagctccaattattatcaatggggaagtcgaaagttttgaacagaaaatactaggatatattacactgcacgattttgtatgtaatcaaagtataaggtaaacaattctgtgcataatttggtggatcatccaagtgcacgtatcattgtattttctttattaaaaaaaacagtttgccaagacagttaaaatgtagtgctatccatggtaagttggtaactgatggaaagtgtacatatggttcacaggacaacaattgtagtgactctagtacagggttga

SEQ ID NO: 5129 - DNA, 350 bp, Oryza sativa
gtactcatgagcctcgaaattccttatagatcagtggctatgtcacgttgaagttgatgctgtcaggatgcccgaatccgaatccaaaacgtgtagaactttatctcttttcttctatggaccaaaaatgacgtgatgagatggaagtggacttggagaaggtcttgatatgtgccccaatcaacttctttgatcatccatgaattctttacattcggtctcttttccttttgccaagcaagtacctcttgagacaataacacaggaaactcattgtgtagcaatggttggtcaaatatataacatgtgaatctaatgtagaacatatgcaccctctggtgattaataca

SEQ ID NO: 5130 - DNA, 467 bp, Oryza sativa
  unsure (1)..(467): unsure at all n locations
agcttcggatgtgcatcgactacaccgaccttatcaaggcatgtcctaaggatccttaccccttgcctcgcatagatcagattgtcgactccacagcggggtgcgaccttttgtgttttctagatgcatattctggttaccatcagattcgcatggctagggaagatgaggaaaaaactgcgttcattactcccataggaacttattgttatacgacaatgccctttgggttaaagaatgcaggtcctacttttcaacgtactactcgaatttctttgggtagccaaatagggcgtaatgttgaggcttatgtcgatgacttggttgtaaagacgcgcaaccaagagactntactcttagatctagcggaaacttttggaaatctccgctccgcccgcataaaactgaaccccgataagtgccgtgttggtgacctgcggcaagcttctcggttcttggctctgccg

SEQ ID NO: 5131 - DNA, 347 bp, Oryza sativa
catcgaaacagatcaggcattggcggcttctgccacggcggcggcggcgtcctggttccgggctggaatcttggcgatctcttcccatcctcttctacctccagcttctctctctcctttccagaaacttctagacacttgtatcaactagctagtttgcttctctcttttcccacataatacttgtgagagttgtattcaagcttgttgttactaattgggagaagagggttcctaacaatctggtatcagagctcaccaatccccaccaagctcaccatgcatgctgccatggaatgtgaggacaagtttgacatgcttttgatgatgctcgaggagttcgagcg

SEQ ID NO: 5132 - DNA, 432 bp, Oryza sativa
  unsure (1)..(432): unsure at all n locations
agcttagactttagttcctcttgcttggtgttcgtctttaaaaactctatatgctttacccatgtaacgggatagtcttatgtactcgtgtttgtgacttttaggctgtgtacatcctcacaaggtgtagaggccgggtttaatataatccattatctaaaaaaattatgtattgttcatcaatatacctcattttgaaaaatatatggcgccattgactttttttaaaacatttgaccattcgccatatcaaatatttaatatgaaaaaaatataaaagtcacaacaaaataaatgatatttatatataatatttttaataagaagaatgatcaaacattatgcgaaaagtcaatggcatcatacattntgaaatggaaagagtacctccaagccttagcatatntagaggatcgatccgcataacgcatg

SEQ ID NO: 5133 - DNA, 446 bp, Oryza sativa
  unsure (1)..(446): unsure at all n locations
ttcgtctcgcagtttcctggcggaatctgtattttgttntgttattacactacggtgaatattgcaaatgtgtgtctgtatatccgatgtgacaaccaaactcatataatttccccaactaaacaaggcctaaagcttgttatttgcgtgcatcgtacaatggcaagaaattgtacttttattgtataaaaataactaataaaagtgtaggttgtaccttccatcacatatatgcatatgtgggtttatttgtagcatggctaataatggagaatggcatggagagatatatggcagtagttggaaaggatgacgagaattgcgtgtgaccctcttcacttggccctgttgccacaattgccttcgacccttctcttctcttaacatcaatcacacggagaaagatantgtcataccccatcacatacataaaaagtgtttttatt

SEQ ID NO: 5134 - DNA, 468 bp, Oryza sativa
  unsure (1)..(468): unsure at all n locations
agcttagaatggttntacttatcacttgtgcttatattaacatgaaaaatgattctattaagattctggacagagatgaataaatcaagtatttgacaaataaaatgatggaaaacatggattttaggtttgggcctcaagtggtgcacatgtggtgattagttatgtaccgatagagggagagtgcgtccaaaccgacctaaggacttcactcaatgtcagttcatttcgtatacaatacaaccacatgtgctagtatgggatagcccaagcttagtaaattatttatggtttagacttacattctggtaggccggtgtctatgagttcgaataatttagaggagcttcctatttaccccgatgtggtagttntggtgactaagcatgtccaatacaatggtattgtgccacgtggtgggttcccattgtgtctgccaccacgacgttaagtttaaggcgtggcccc

SEQ ID NO: 5135 - DNA, 358 bp, Oryza sativa
  unsure (1)..(358): unsure at all n locations
tggagtgcaacattgtgctactcgtatacactgagtcgatacttctgcaaagccgtcacaacacattcctgaacccgtctggtgttgagtttcgccaggagtgtgctgagttgcatcttgtccggacatgtaaaccattatgccttttaaattatatattgctagggtttgttcggttctactattctagtgatctctttgcatctgcgtttntagttaataccactgaatatggtttgcataaccgaaccactcttactgcatgggtacagtgaatggaaaaccatggtaatctccttacatccaaataaattctataaataatttgatactttgatatatttcacgggtaccttct

SEQ ID NO: 5136 - DNA, 459 bp, Oryza sativa
  unsure (1)..(459): unsure at all n locations
agctngtcattaatacatccatgcccgatttatcactaatgtatctaaattggagggaactaatcacataacaaattaaagatttacggactatttaaacggccgcacaacaattctaagcattaataaaatattatccatttctaaaaaaaatgaaaaaaatcgtactttcatctgaatgaaaataaatttaatagagacaaacccaacttttcaatttaggtactaaatacttttataaacatgtaatggaatcattatgtatttgctaaaaaaataagaaaaaaacaaaaaagtgcctacactattccatttataaatgtgcaagtttcttcgtattgtactgacaaaaataagaaaactgacaaaaatggaagcaaatgaaggaggagagcaagctctacaccttttatatggaacccaatcaaaaaattgaggtcgaaaaccttcccccctaat

SEQ ID NO: 5137 - DNA, 234 bp, Oryza sativa
  unsure (1)..(234): unsure at all n locations
ctgtctanagatgatgcttctagctgatgatatccgatggagtttggtcacttgatgatagctgtacatggggagaaggaggangaggctgataagagacaacttgttagacaatgatcggcgatgatcaactagtgaaagatttatgaacatcttactggtggagccagtttgagagttgttgcttcccgcattcttctcattatagtttccttttctgcaatttaaaatcta

SEQ ID NO: 5138 - DNA, 389 bp, Oryza sativa
agcttgtctcgtctggaggaggaagattatttatatataggggtcggactttagcgcggggtggtgttaggaaccggggcgtaagatcgccgtgatctgataccaaccgcgactaaagttacgatctttagtcccggttggtgatttaaccgggactaaagatcccagggggggcctgacaggtcctgacagcatatgaacagggagctgagatcattattagtccggggcaagatgcccattaccctatttaaccgggactaaaaactatctttagtcccggtgattgtagtgaccgatactattgtgtgattatcccaaccgacgaaagatggttatctcaccacagaatcgactcgtgcgtagatcatatattgcatgacacattg

SEQ ID NO: 5139 - DNA, 360 bp, Oryza sativa
  unsure (1)..(360): unsure at all n locations
caattcanggatggccaacataatggtaagaatatttttccaccttcgtttattttctccactttgaataacacttccgataatatctgttcttttgtaggacaatgagtgaaacataatgtctgtgaattatcgtgagtcatacaataaatgcaaagtatgaaacttagacgatcaggctattgcaagaataattcggtgcaagagggctggggtcctaaaatgttctcatgtgtccttctgtgcactctattacttctatctgatgtgtggtgaaataacatctcatcngcatgatgtagatcgatggatgtaccacggatgattactctttctaaaacgtatagaatggttgacaca

SEQ ID NO: 5140 - DNA, 388 bp, Oryza sativa
cgagaggaggttttatattgggctcgtaacaggcctctcctaactcgtcaggacaccaaatggggctcgagcctgaccacgcactggcgattcacattacggcccgctcaataagaccgtacctggcccattaaaggcccacgacagacctgtcttcctatctgaaaagaacactgcttgtccctagaaccgaaaagaatattgccactgagcccatgagttattgcttatcacccaacgttctaatacttaaataaaaaaatatatacaagatatccagtgcaatacatgaaatatccatgtgaatattaacatggcatcccctcgggctcttcacctaccctctagagaaagcgtaaaccccgacaatcgctccaacagaaacgat

SEQ ID NO: 5141 - DNA, 422 bp, Oryza sativa
  unsure (1)..(422): unsure at all n locations
ctatagagttattgatctttgtgacaatgaaacaaaattcatcatcatttgcaagcctcgcgtgcaagcatgcctttgtacggttggtgacgtcagcgtatacctctttattcgtgcaatgtgattaattactggtaacgaacaacggtgatgtgtactggaataatcctatgttattggtccctngcacatagaaatgctaacgcgtcagaaagttcagttaactagttaattcgagtaatgtgtacaccctgctcatatcatggttctcgatatatttgtgttaaccaagagaataacagtacacaacccatttataataaacgagtgtgatgcaactataatatcttggagtcatctctatgttccatcttttttggaaacaaaagctaagtgaaaatggtggtggtagttcttgcgaa

SEQ ID NO: 5142 - DNA, 393 bp, Oryza sativa
agcttgttcagtgcagaatagcctgtaagaataataagctggtcaagacgctgtatgcaccggatgccaagtcgagcaagataagctcctattccaacagttcttccagtcacaaatgtaagtgtaaatgtctccttatatgccctagaataagcactggcaatagcagcacttccatgtatattctccacaccaagtccatcttccttgcccacaacagaatcaataacccacctaatttcaccactgtctagctgcatcttatgtgctatgacagaagtgccaatacgagcatagtcttcttcgcttagataaatgtactgaaacccacgttcagggctgccatcatcagaccacccaacacggaagcaagatttcacttcatctgctatg

SEQ ID NO: 5143 - DNA, 385 bp, Oryza sativa
  unsure (1)..(385): unsure at all n locations
tgtcttatgtggagtcctggcttatacccctgttgatctcttgtgaagatggagccggangcccgctagtccgctgctgtttatttttgattgccatgcctgaaacgcctttgtaataatgtaaatattatcgatataataaagatgtgtcttttatatcatgtttgtatggtgtaccccggcttttcctgtgacggtgagtaatacactatcgttcgggaataggcaattttcccggtcgcgacaagctggtatcagagccatctcgactgtatgataagccaagtggataaaacctatgggcatattttataaataanaattatttgcgaaagttcctttntctccttcccctaatgctatttgcaaaagggttactcccttc

SEQ ID NO: 5144 - DNA, 452 bp, Oryza sativa
  unsure (1)..(452): unsure at all n locations
agcttatgttgatgatgtagtcgtcaagatcttgcataaggatgacctgatcacggacttagaagaagctnttgcaagcattcgtgctttcaggatgaaactaaaccctgaaaagtgcatcttcggagtaccgtcagggaagttgctcggatttatggtatctcaaagaggcatacaggccaacccggagaaaatcaacgccatcctcaacatgaaaccgccaagctcccaaaaagacgtccagaagctgactggttgcatggcggcgctcagccggttcgtctcacgactcggcgagcgggggatgccctttttcaagctgctgaagaagactgacaatttccagtggggactcgaagcacaaaaagcctttgaagacttcaagaaacttctcactactccaccagttttggcctcgccacatccacaagagccgctactggtatatgtgt

SEQ ID NO: 5145 - DNA, 481 bp, Oryza sativa
  unsure (1)..(481): unsure at all n locations
agctgcattcatacttccatctgtttctttcttataatcctangggtttgcacagaataacagctttgtgagttaattctgcatgcacgatcaatatcataacatgcacgatcaatatcacagcatgcatatatatgctgccagaagttttattgacttgcacaatttcattcaacagaaagctaagagaaagaaaaaatgataatcacacagtgtacatttttcttttgactgtaatactttgatcttaactgcagggaactgtcattcagcgaattgattggtgatattgatgcttcctttggtcagcttttgttgctccgacacttgtacgtaatgcatactactatatatcatttcatgcatacattntccaacacttttagtgtgatcattagtagaaagtgcagacatgtatgtcaacttgtaacgttgagttgagtcatcatgccaccgagactagtcattttgatatattatg

SEQ ID NO: 5146 - DNA, 468 bp, Oryza sativa
agcttcatccaatacccttactaatcgaagtctaccaaggtgaaattctacagtcagctaataagtttaggattaagattaagtcaattaagtaattcagcaatcctggagagtagagagaacaaatataaagaacatttgcaaggatttatgactaaacaaaaggattcaggtaattgttggacagactattgcgatatgatccacgctatctttaggcaccactctttttcccctattacaaaatgagcaaatccatgtgtggtgggaatgacaaaagcgatcacacaccatagtgagatcctcaaaatcccaccaaaaactactgaactggcagacaggggcggatccaacttgtgacatgggggaacaaacaaactgtttcttgtattaaggttaaggctctgaaatcaatagaagaagcttcttccagatctagaagagaaactagggttaacgcaagcaaat

SEQ ID NO: 5147 - DNA, 326 bp, Oryza sativa
  unsure (1)..(326): unsure at all n locations
gccaaaaaaatagccgaagacagtctaaactcattctgtcacttctctctcaataaaaaaaggaataagaaacagtatatagtgtgcaagcaaacgggccggtgacggatgctgcggttgggcctgcctgggagcccgaagtttcttcttcaacgacaccagacgccggtggtaccgctcacactgtcgcttggctcgccagatcttcttcactcctcgcattcacaagccgaacgtgcgggcggcgcggcggataaaataagccgctggcgctgcagctactcacgcgcagncaacaactccaccttgccgtgcattgtactcgt

SEQ ID NO: 5148 - DNA, 468 bp, Oryza sativa
  unsure (1)..(468): unsure at all n locations
agctntgcagcaaaaatgcgttacttacgtttctgcanattntcgtatgaacttgttttgccaacttcatattagaaagagagatccattcctttttttaaggaagaacaaaaggctgtttttttccttcgctatattactaccttttgtgatcaaaattatttatggcacgtacatttgcttcgcctcattagcatatgcaacaatccacatatacaagctttttaaacaggcatacaaagtcgtgcaaagcgcgactatttggctagtatacagttggaagtaaaagagaaaaaaaagggcatcgcttatgtgctgcggggaaaaaaatgaatattgtcctggtagagactaacttattggatcctttctgcagccaatacaccatttctgctgaacccgacataaacacgatggacgtgagaaatcaccgtctctgtcttctgtcggaccctgcccacaagctct

SEQ ID NO: 5149 - DNA, 453 bp, Oryza sativa
agcttattgtgtttgtagttcatgtgtttgtggatgtacaaccaactagatggttgggacctctctgcttcatctcaagtctgttctgaacatgggtttagtatgctatctaattgttcctaataaacaaagctcgcatctaagccaataatttatgttgtattcaggaaaaaagatatgtttgcgttatctttgacgactttgcgaggaaaaaacatggtgttaagtgtagaatggataacactgtcgtaggtgactgtgaggtgaatggataactaatcaatgattgagttagatgaataacgctgtgttcgttctgctgagttgggaactcattccctccgtacggaaaacggagcaacatattttcttatgtttaattaagtatctactcttcttgaagatggattaatatgatcttttgaagcaactttcatatagacactttttgca

SEQ ID NO: 5150 - DNA, 437 bp, Oryza sativa
  unsure (1)..(437): unsure at all n locations
gaactcacaaatggtgggtctcatgactccccgctatagacgatcttacctcgacaccggtgttcccagatgttgctctactacgtatccggacaggggggacttaagtgctcttgatgctgtcaccacctctacacctacctcatacgtactgtgggatacgctgcatttactgtataacaattacctaaacactacgtctaagcaattaatatctactttagtgtttataactcaccaaagcaatcactatatttcagttgattatagtgaacaataatcccgtatgctatctatgaactaagagataattctcacaagataaatctaaattactcaggatgataactctattgatatcagagtattatacagaataaaacatatangagaggattactgacagctccggattctttcgactcttctactctctc

SEQ ID NO: 5151 - DNA, 450 bp, Oryza sativa
agtgggcccaccttggatgtagttcccggtgtttgtggttatctccaccaccctaccatggctggtcagtgtcggcctcatcagtgaccacccgatgttaatggcgaagttgatgatgtagtcgtacttctcaccggaggccgagctcatcaggatggcgtcctcgggggtgttgtagttgaggacgtcatcggcgtcgagatagcatacaagctccatgctgcgggcgccgtatgtggcggtgacacggttgttgccgagcttggtgatctagatggcttatgtgccgatgccgtcggaaaccagatggagaagaaacatcataggaaattcaaacacgatgaccctatcgaggcacgatatttggtaccggagttcagctgtggcctacatctccagggcattgattacgagtgctcctttccgatccaagatattacaacgtatcag

SEQ ID NO: 5152 - DNA, 408 bp, Oryza sativa
agcttgctgtcatttaaatgtatgtgctattaccatatttgatttttctatcggtacacaacaatcaatccgtacccctcatctgcgctggttaaaaaaatactatatatgattactattatattaataaaatcttttgcaaaaagacggttggaaaagcatgcgtacggaatacgatggagaggggttagaaactcatgattccaaacacagctttagtatccggcctatctccttccaattcatcctcctctcttctctctgtcaggctagcagcctatcacactgacccctcatgccaaaccctctgtaattcatttggcatgccacctctgatgtcttcccttctaccactccctatgtcttctgccttgcttgcttaaggttcatccagataccaagaaccac

SEQ ID NO: 5153 - DNA, 464 bp, Oryza sativa
  unsure (1)..(464): unsure at all n locations
agctntgagatagtggtacttgaagtttgatggatcaataaagaaatctgggttttaagagaatattgaggacaactgtatttattcaaagtttaagaatgggagatttattttcctaattttgtatgtggatgacattctactggctagtattaatgtcagtctactgcaggaaacaaagaaattcttgtcctcaaactttgacatgaaagacctcggtgaggcttcatatgttttgggcatagagattcaccaagatagaacaaagtatgcattgggactttctcaaaaggcatatatagaaaatgtgttgaagaaattcaacatgtacagatgcagtgcttcacctgctcgtatagttaaaggggaaaggtatggngcatggcaaagtcccacaaatcagtatgagctcaacgaaatgaanaanaaagccgcatgcgtcagctgtgggaagcctacagtac

SEQ ID NO: 5154 - DNA, 453 bp, Oryza sativa
  unsure (1)..(453): unsure at all n locations
gggcgcatccgctctatagctcgtatcttctcgtgtgtggcctcgatgcctcgggcatagaccaagaacccgggaagcttgcccgcatgcacgccgaacacgcacttatcggngttcagctgtatgcaggcggagcggatactttcgaatgtttccgctagatccgagagtaaggtctcttggttgcgcgtcttcacaaccaattcattaacatatgcctcaacattgcgtcctatctggctacccaaagaaattcgagtagtacgttgaaaagtatgacctgcattctttaacccgaaaggcattgtcgtataacaataaattcctatgggggtaatgaatgcagttntttcctcatccttcctagccatgcgaatctgatgataaccagagtatgcatctagataacacaataggtcgcaccccgcggtggagtcgacaatctgatctata

SEQ ID NO: 5155 - DNA, 458 bp, Oryza sativa
  unsure (1)..(458): unsure at all n locations
agcttacagagcttggaaagactgcatactaaacaccacacctctctacccgtgcactggcaaagcacacgatcagaagaagatggagacctccttggctccagcacgtgctcagcagggaaaatttgccaatcacacacttgcgccactgtcgttgatagcggcaacaatcagcagaatattgacgatgggagcgccatcgtccctgccggcggaggacacgacctcgacgacgaccaaaacaaattaaaccctaaccctccctgtaacctattacatggacatatatgtgtgtgtgcacgcaagcaccaggaaaggacatgggctcaaaggcccaaaacctaattaaacatgggagtacctatacatttttcgaaagagttttatgattatatcacacagaattttaatctttggattaaaatccgatagatataatanaaagcacaaagcaatta

SEQ ID NO: 5156 - DNA, 300 bp, Oryza sativa
ctgctaatgacggctggggcagttggaaatgtcctaactaccctgcaactgtcattggggatgaatcctggacgtccacgcaaaaccccatgatggacggcgctgatgactgttcggtcgaaccccgaaccatgggctgggccaaaccagtccatcctcggctggcgggctcctccactgcttctctctgtagacttgtgaattatggcccaattcatcgggtcaattctgagttcttgggccattcatacataaatctgattcccaacattgtccgattgatgtatcgtctaagttgat

SEQ ID NO: 5157 - DNA, 464 bp, Oryza sativa
  unsure (1)..(464): unsure at all n locations
agcnttgcctcgtatattaatagagatggagttaaagtatacgcagaanatatgtataggtctgtcaaaagagctaaaaatggccctgcggaaggaaaatctttatgtgatgtctcccaaaattccgaactcttggagtctaagagctcttaccttcacccatacactagcttcctctgtgatcttggctaatattgtgcttggtattgatgctttctagcgaaaaattctagcatttcgctcgcaccaaatttcctaagaacctaggattacggcggagggtgtttgggattccaacactagattccaccaatgctctattgagtgacagtcgtctcacttatccatttatagatctgtgttgatccacctttgaatttcttccatattctcttggtgaccctacactctgctatcaagtggatttcagccttgtcatctgcaggtctgtagtctgaagactc

SEQ ID NO: 5158 - DNA, 446 bp, Oryza sativa
  unsure (1)..(446): unsure at all n locations
agcttggaggtcttccgacgtggctgattcttttttctatgtgacccgggntagtaatgtcgtgtgggtaaagagtaccccctctgcagaggttaacaaactgttcgaacagccgtgttcaccgtcatgggcggatgtgaggtgattcctagcgtagtttggtttgactactgcttgtgaaattgctgtgtgaaaaggggttcggcgttcgaaaaatctgcagctgatgggatcagctgggcccgggtggccgtttgataagttgttggcccgggtggccgttgaaaaagctgttggccgggtgccaaccttgtttaaattctaaagactgatacattgcacatactccgaccggacgagatgcactgttttatccgtgtcgttgagaagactcacttattcgttcataaatagttatataaactaattgcaaagcatcattcttt

SEQ ID NO: 5159 - DNA, 379 bp, Oryza sativa
  unsure (1)..(379): unsure at all n locations
tattttagtgatttggatttatcacacaacaatctatcgggaagaattaccatcggatcacagctngacaccctctattntgaacatcctgatatgtataacagtaacgatggtcttttcggaattcctcttcaaagaaattactcggaaggaattgcaccaaagcagggctatcacgatcatagtaaaacccgacaagtagctgagccaatgttcttttaccttgggcttgtgtcaagatttgttgntggcctatgggtggtgttttgcaccatactctttaagaagacatggaggattgcctatttctctctttttgacaaggcgtgtgacaaaatatacgtgtttactgttgttcttgggcaagagtatttcatat

SEQ ID NO: 5160 - DNA, 370 bp, Oryza sativa
  unsure (1)..(370): unsure at all n locations
catgcaagcttggactgganaataggacacgaacatttcttacactactactccagcaccatcaggggatggagaagactactccttgcaagcacttcaagggctcgacactcttcacaatattaactccaggagtttttgctgattcaacaaaacaaccagcactcgagccgacaaacagaagaccgatcatacgtactcaccacgaaccaaatattcatcacaccacaccaaacacacctcatcactacgcgcggaagcaaatacaatctttacaaccacaaagctgttgtgcatactcacaagatcatctatctttaccttcctttcttaattcccaatcctgagctcaatcggccaaagaatacaa

SEQ ID NO: 5161 - DNA, 343 bp, Oryza sativa
atactatgatattatccgctcgaaagtatggtcttgtttcccccacgctatggccatacacgacaatggcgtgagaaagatataatgatagaatttgtaaagccacttaagctattgggattcttaaactgcaatgtgttcatctcagaactcgctgcattttgtggtcatgcacgtcaacctctgtatatgtttcagtcacaagtcacaaatctttgctgaaaaatatatctgtggagctagagatcttatgattctagttaagaaaataatgcaaattatactcctactgaattgacatcaagtacaattatttggcgaacattgactgaattactgcatc

SEQ ID NO: 5162 - DNA, 462 bp, Oryza sativa
agcttaagagttggaaatgaccaacatcgtctgtttgataagatgagataattctgaaattaaacttcaaatgcagttgatagtgagtgatactgtcatggctattatgtgtgtatgtgcataaaccaatatcaatggccattatgtgtgtatgtgcataccccaatatcaatggctaatatgtgtgtacgtcaatatatacttgtttaattttattccctcccaccgaagaatacatcagtcagaaaactaaatgaattccctagttaatgtttctcttattcaagactcgatctatatgtttctccaactctttttttttttggacaacctgcaaggtgcacaaattattatgcggatgtgtggagaaaaagttgttatctgcatatgttccagtaatttagatagcagatctagtcttttgtcaagctagatagcatataataggaaagtacatgtact

SEQ ID NO: 5163 - DNA, 463 bp, Oryza sativa
tcgtacgtacgtacgtacacggtgtatttttgttgtgttcttatattccggcccacaatatacacgagggaattattaactttctaaataatacatctaatctagtgatctaaaataacggatctatcaatgtatatgataatcgaccgtgagattaaacaatatcatgtgacggcgttcgagtatttatatgaacaccacgtgatttaagaatatttataggaagtgtaatggatttttactatataataatagattgatattttaatataaaaaactctgcttcctataaatggaagaaaggagagaggagtacctacgtatgtacatgacggaggggatatggatggcgtttttgaatatatctttaatatataagatagatctaatggtgtaaaacgatgggtccaccatgtgaagtgaaatcaatgatcggacgtttgttgtttcttggaattctata

SEQ ID NO: 5164 - DNA, 386 bp, Oryza sativa
agcttcagcttcatacaactgcaggtgcattctccatccgccttcaagacacattcctgcacggcttgcttgcgatagataccacgcctgctcctatcaacacacattatttcataccgatgcacttgtgtgccttgagcaacaactcgatgtctccgtgcctttttgattttatgatccatgtacttatgcactacgttgccaaacactatgatgatatcggccatggacggaccaattttcttgtatcgatccctaaagtacgcttgcgtgccgtgaaggatgaattcaacaatagcaaccaatggaagtacccgaactcctcgcattacccagttgtacacctctgccaaattgggtgtcattatgccataccgagatccatc

SEQ ID NO: 5165 - DNA, 397 bp, Oryza sativa
  unsure (1)..(397): unsure at all n locations
gaagaangacagctgaagatgaggatagatcatgatggacgcttcttattcggtcagcaaaagctgtaatgagaagtcttcatgacgtgcgtatttagcatagaaaacgagagtgtaatatggtagctcatgaactggctcaacttgctaaacagacagcacattgtgcggtttggcgtgaccatgtcccgtcttgtgtgatgcacgttctgaatcaagattgtaatgttattacataatcaataaagctcttgttttcctcaaaaataaatgcctttatatctatgtcataatgaagtgtcacaagcacatatatgaacgtcctttactggggagaaccattttggcggtggcaatatcaaatatcccgtcatatgtaaactctttttattttctc

SEQ ID NO: 5166 - DNA, 424 bp, Oryza sativa
  unsure (1)..(424): unsure at all n locations
agcttgctgggggggcgcatccgctctatatctcgtatcttcttggggttggcctcgatgcctctggcagagaccaagaacccgagaagcttgcccgcaggtacaccaaacacgcacttatcggggttcaattttatgcgggcggagcggaggctctcaaaagtttccgctaaatctgaaagtaacgtttcctggttgcgcgtctttacaaccaagtcatcgacataagcctcaacattacgtcctaattggctacccaaagaaattcgagtagtacgttgaaaagtaggacctgcattctttaacccgaaaggcattgtcgtataacaataagttcctacgggggtaatgaacgcagttttttcctcatcctncctagccatgcgaatctgatggtaaccagagtatgcatctagaaaacaca

SEQ ID NO: 5167 - DNA, 214 bp, Oryza sativa
atactaataatttatttagcacataattttccatacacaaattttacccccactaaagattaatgagtagttacatatccaaacccaatctgcacaacttatagtaatacctactgaactataatatccaatcaaaacaatgccacgtgttgtcctgtaacgaataactcatctggattcacatactcacactcatacatattattgctccaat

SEQ ID NO: 5168 - DNA, 465 bp, Oryza sativa
aggtttgaggggcgtatatgtgcgacatggactctattccatcgctccatgcatgccaacgtgttgggcagctcgatctaacaaagtgtcaaactcagctggacacacaagaaaagattgaggtcgaggacttttttctcagcgaactatttaacttgatcaggagcccacgaaatagagtagcacaggttaatatgttatgatcgggtaggaagtggaaggtgccgatcgagtacacgtaatatatgggggtggtatatatatggtgtatgacatggatcaagctgtggtacatatttcaataaatgtatggatcaagctgcatctaggttttcggtacacctaggtttgtggtacatagaagagtcattatcgccgcggtgagagacaaagtaacaatagaggcccttaatatataaacatctaaataatatgatctaatgtgttctttctctctctattatg

SEQ ID NO: 5169 - DNA, 408 bp, Oryza sativa
  unsure (1)..(408): unsure at all n locations
ccgcacgaatgtttcttggcgatccgctcttgtatctttatgtcaagaaggcgcgcgcggtgctcgatcgatgccggatgatgagatgcgcgacgcgccatatttatggcggcggtggtgggatcagccatggattcggatttccgagtcggatccaaacttcgaattccgagtcggaagacgcgcgcgcgcgcgctccattccgatggagcgtactgtacgttgacattntgaaagcccacggataatgctacatgagactgctacaggtcggacattcaatgtggtgtaaatcgtcggatagtgttgcaccgtgttatcgagaaatatttacatgtttcacctctcggtaaaaaatgtttcaatgaatattgtccagatggttcactatgagatgaaaaatattca

SEQ ID NO: 5170 - DNA, 456 bp, Oryza sativa
agcttcagctaaattataagaggctctattctactttactgtatactagaattagggagagagtagagtagaagaaatcggaggaattttggagttgttggtaatcctctcttatttcttatactttgttaattactctactttaatagtaattaagatatgctcggtgagaattaattcttggttagttcctaaattagcgtgcgggatcattgatcactatagtccaataaaatatagtggttgctttagtgtttagctagctctaaaatagttattaattgcgtagacatggagtcttggtaattaatttccggtggttgcttcgtatcccatagtaaatttgaggtgggtgtagaggtggtgatagccctcaattacactaaagtcctccttgcccgagtatgcagcagagcgacatctgggagcagcgagctggccagtgcctgaagtatc

SEQ ID NO: 5171 - DNA, 408 bp, Oryza sativa
  unsure (1)..(408): unsure at all n locations
cacttttgatactataccagactccagcagcgggccactccactccacaggctaaccttgttctgttctacgaaaccaacctttctgagacggctccaactgagaagaacttcaactctggtgtggnggaaaagagagcaagactgagtactacccactgtactcagcatgtcataccggaagaggaggtatgatgcatgatataaccaaatgaagcttggggttcttctgcataaagtatgcatttcaaagcaatagttgaaagcatgaaaacagctgtagtaattaatcaatattaaccaatcactgtccaacgctacaccacgttgcaacatgcccaaccatccacctgaactacagcaagttcattaagctaaactatgggtgagactaatcacggtgaatctg

SEQ ID NO: 5172 - DNA, 452 bp, Oryza sativa
  unsure (1)..(452): unsure at all n locations
tgcttcatctactccctgctgtatggcacgttctccgcgcgacagggagagggcgaggatggacaccttgatcgcgtcggagctccagcagatcgagctggagcggtgccatcgggcaggaataggaagtaggagaagcaaggatggcaccgtgatcgatgtcgagtatggtgaggaagagtctggtgatgttgttgatgatgatgatgatgagaaagcgttgatgcgttaccatgttgaacagtgtggcagtgttggcaggtgaccaaaggagtgatcaggtcagaaaagctcctgaacttcatgatacaatctgccaaaaattttccacggtttttgtacaggaaacagattacacgggttcagtaattccaggtcctagtttgcaccattgtagccagctnttcagtgaactatgaaggtagcccacgcgatgcgtgggtatgtattat

SEQ ID NO: 5173 - DNA, 286 bp, Oryza sativa
aacatatcgatcgatggatcgaatgtgttattataccactatctataaccattataatcttacttgataagagaaactaatagataaagtgtcattacatcaaagagacatcatcatcaatggtgatctacaaccattataattctaccttgaaagagaaatcatcatcaattgtgtaaatggtgtagtatatgcacatgcctcttcacacagatcctgtataaaccgtcactgtgctgcgtgatctcggcgacgatggcttcgtggaactcgcatcatcaattgt

SEQ ID NO: 5174 - DNA, 459 bp, Oryza sativa
  unsure (1)..(459): unsure at all n locations
agctnggattcagatcagaaaaacactgtgttttgtaatgtttgaaaaaataacagcacatgttaatccatgatgtagtatgttccattgtcacaataaatttatagttttgtgaactcaactgtttgtgatgttcagtagcagatcatatttgaattacaaaattttacaatgtattataacccttgtttattggggtctgatgctgtttcatttcatacctatggagttcaggaaatgtgttagcaaaaacatcagctactcatcacaaaataaatacaacaattttcttaaaagcaatgaaaactcccaaaggatttaggagtggtcattaaaataatctgtgataacccatttgtagcagacaatatcataataaagttatatgactgatcccaaggaattgcctgtaccatcttggaacgatgaggatagcacanaaacgagggcatggtatca

SEQ ID NO: 5175 - DNA, 413 bp, Oryza sativa
  unsure (1)..(413): unsure at all n locations
ttcttaaatccaacaatatcaaacattcaaatgcaacaaggtgtgtattatatatttcagcataacaaaggcacataaaattataactgatacaaggaggtctcattatcatatctgccattagctcaatgagtgttaccttcttccatgttcacctactcagagtcattgctattgtctggcgaggcaattgtangaatctcatcactagtgttcacccctttgatacaagatatagctgtcttgatatctgatgcattcagcttcaaccaaataatctgtcgacgtttgggagggagttcattcaacaaatgctccttcaagcgcctaatctacagcacagaagttaacatcatctgttatatccgacatagaatggtcgatgaacaatcaattaccagaacaaaacatca

SEQ ID NO: 5176 - DNA, 381 bp, Oryza sativa
agcttaatgtggccacattcatagatattgttaatgacacgacaaattgattgcaaatcaggaaattaagataaatttcaaaacaaatatgatcaaattgtctcatacaacataccgaagttcctcccatactggcagggacaatagatgacgctggacatagtcttgaacattgtttgggtccttcttatacatttcagcagaaacttcaagagcatctctgatggttagcatgtcattgcgggagttggcacgagttatagccgtcttgagctgtatgcagagagaattatgagattgttcaaaaacaaccaatatgacacaccgagaaaaataagcacattgaattattgataggtctgcatgtatccaaaacttact

SEQ ID NO: 5177 - DNA, 163 bp, Oryza sativa
acgccttagtcccggttggtgacatgacctgacagcattctaaccgggactaaagatgatcttaccgggactatagatcaaatatgcccgttacccttttgaaccgggactaaaatcatctgtagcccccggttttattgcatccaggactattgttgaaatc

SEQ ID NO: 5178 - DNA, 463 bp, Oryza sativa
  unsure (1)..(463): unsure at all n locations
agctnggatgtttcttccctgatgaatgccgtctggaaggatgcatgggctgattgcagctgagaaaatttccctggacgattggtatctttcatgattgatgtcttcgaatctaaagtctgatgggagctcaaggcttgccgaatcttcataaggaaactagactcgagcatctttctgaaagccctcataggagctgcagaaccaatccttgagtagctcagccgatagttttgctccagcatcggctgatgcggatgcatattctccatatgacatacatctatgatgagtgcgctcttcttcatcatcttctacaatcggctctagtcttgggaattcggcttctaacacagatggccgattgacaactttcatgactatcaggtttagccaagtctgcagcaaccaccatggtccgcctgctccaaccattgagccgacagctatcttggccgatgca

SEQ ID NO: 5179 - DNA, 344 bp, Oryza sativa
  unsure (1)..(344): unsure at all n locations
atctagctagttgtctcattcagaacacttttcgttatctgggcagaccatatatacaatatccacaatttgtttgctgggtaactccactgcactaacaaaagaattctatcatgtaagtggtttatgccaattaacatatggatcacattcatggctggtggcactctaggctggatagcatgtaaaatcttgaaaccaccacaacatttcagaggaatgatcattgncttctgctcaactggtaactctcctaagtggatngcatgtntttaccctcatattttngctgaataatcctaatgttatgagtgtcatcaactgacaaaaaaatgcangaaatc

SEQ ID NO: 5180 - DNA, 455 bp, Oryza sativa
  unsure (1)..(455): unsure at all n locations
agcttgtggttgtagacttggcgggatctgagcgaatagacaagtcaggtgagtgcattctcgtcgataaatgccatgtcttgctgcacttctatacctttgacaggataataaggctaacatacgcattgggcattaatctctcaggaagtgagggtcatacattagaagaggcaaagtctatcaacttgtccctaagtgcacttggaaaatgcatcaacgcgctagctgaaaacagcccacatgtaccagttcgtgattcaaagcttacaagattgcttaaagattcatttggaggtaaatacatgctaacctgtcatttggtctatgtaaaaatgaaattgtgccatagcttaagaggcacgctcatctttatctaaaagctaataaggagccaagagcatatccctgtacaactcattgcttgtaacacttaatgattnttggtctaattg

SEQ ID NO: 5181 - DNA, 288 bp, Oryza sativa
  unsure (1)..(288): unsure at all n locations
atctgttatgcatcaaattaaataaatatttcctaacgaacagttaggcaagtgaaggtaaagaaacatgcattaatgaatatatgccacaaggaatccaccagtttcaaaataacaaatgttaaacgtgaggtaacatataaatccagttagcgcgaacctgaatctgcaatgtacatacttttgaagtaatcagtggccgtataatntacacatacataaacgtggtggcctaatccaaatgatgcaaacgacatagaatgcaatatataatattgtagacataca

SEQ ID NO: 5182 - DNA, 282 bp, Oryza sativa
tctatcactacaatcaactacatttggcgcatcgccaccctttttacttctacttttggttttacgttccggcggaacctggcacccgacgcggggctgcatcgccttcgatctacggcgaaaggataagtccaatgttccgcaggtctaggcaattcttctctgagaggtcaccaagcaactcctccacaagccatcaaggaggccggcacctccaagagtaacaagcaatgacccagcgtggagatgatcaatcaagtgccacactagctctacaatgga

SEQ ID NO: 5183 - DNA, 439 bp, Oryza sativa
  unsure (1)..(439): unsure at all n locations
gctaatcatgtagaaatcaaagctaataaagcctatctgccatgaaagatgcaacttcatggttcacttttactatttttgtgggagaaaccacatagttctcgaggatccttcagttttgcacttcatagacatgttttgttcgaattatcaacatttacatcacacgacattaatcaccttcactctcgtcaacaatgaatnttacattntttactgccccgttccacctatattttagtgggttggcaggcaccagtgtctaaacaaggtcaagtggaatgaagattcttcagacatcccctagacatgtttttgcatagaacaaaagatttctgagtaacagtaaatttattgcatacatnctcgtgtgacaaacctttttttctgctatttaatatttagtcgtactaaaaaagatgtttttcatggcaccaca

SEQ ID NO: 5184 - DNA, 331 bp, Oryza sativa
  unsure (1)..(331): unsure at all n locations
caagatgaaagcagagttcgatggtactgaagagaatgattcttcactgaaacttacacccggggataaagtatgtgaagcgatagagaaaataaaatgtgtgtttggaaaagggactaagaaaaaattaaggggacaaagcgtaagaaaacatcaaaggggacaaagcggaagaaaccaaatggcaaccttcctcccctattcaagaagcattccatattccttaagtacctgtcgtactggaaagatctcaatgagcaagtgcatggtgtttagtatgaaaagaaatggatattggtgctctactggntcacatttcagatgatgtcta

SEQ ID NO: 5185 - DNA, 397 bp, Oryza sativa
tcgatagcgataatcgccgtgatcaattgtggatcgacgccccatgctgcaccggctttctggcttattggcatccactgcatcgcacgttgcaccggaactttcgcgttccacggcgggttcgtatagtcatgctttgatgaacaacccgctaataacacaatcaaaaaggcaaaccatctcaatttcacttcttctatccttatagcctggaatcgccgttgaggtgacaacggcacacctaagcggcatgatatacatttcgtttctgttggcagcaaggaattgccatgtctctggttcacttaattgccccatcgggttactgcattaaacagcacgccgcgctgcgtggtatccagcgccttaccgacgcggggcatcaagtcaataacgt

SEQ ID NO: 5186 - DNA, 165 bp, Oryza sativa
ttattcaagacctcaatcatcacatcccctctctccacttcacacctcggaacgcactgctcttatatagagaaaggagctctcccatcttcttaaccccaaatgaaatggctgaagagagggacgtttcttttgtggggtacccccgggaagagatccactgga

SEQ ID NO: 5187 - DNA, 321 bp, Oryza sativa
ggatcaatcttctattgtttactagaaaagggggctttctacatatggaactgtctaaacacacgatatttgcccttatcatactcgatgaaagaaaggacacttctcgagaatcaacattggaagatagaaaggatggcctatactactctatggatagagctcctcaattgatcgagatagcacccgataaatcaattagtgaccgactgggtcgatacaactaaaaaaaacctccttacttatcccatgatatggggcaaaatttacgaatccgcttatgtaattgagccgatccactaacggattatccagcggtgt

SEQ ID NO: 5188 - DNA, 258 bp, Oryza sativa
  unsure (1)..(258): unsure at all n locations
aacgtcagagatgaagatgcagaagcgcaaatgacaagccatgatcgcactccgtgatataatgtttgacagcgctcgtttttcactctgtaccggacatgctagtgaagaggaacctttccctgaattaccagctacattgtacaaattagtagattctgcagctatatgagctaaccctaaccattcttctttacctaattntgcatgttntgaacactatgtgaatgcaattgcaatgcaacatcgctcgtcatg

SEQ ID NO: 5189 - DNA, 370 bp, Oryza sativa
gaagctgcgaatgactgccaaccttatatttttgcttatacttatatttatcaggtaaaatatgaacttttaactttaaaatcggagttaattttagagtttcttaattaaagtgtaattttcagcctttgcttttagattgctaagaacacgtgtattaaaattgtactcataaattatttttcggctgcaaacatgccgttcgcttgttcctccgataagccacaaccatgggggtctagcgtgtcggatatttggaggtgcacttcattaatcgaataagaagagagaatggttcagttaactctttgggttgtttggtcattgcataccaaacattcgagtgccaaactcgacatgttttgtgttt

SEQ ID NO: 5190 - DNA, 383 bp, Oryza sativa
  unsure (1)..(383): unsure at all n locations
tcagaaatgtttaaggattggtagtggccacatttctcgaaatttatttcaacccttaaattcggttttatgcaatttaatggaaatacttcataatgatcaatcattcaggttaagatcgatctaaaccaatccattntttctatatacatacgacatgccaacggttaaacaacttattagaaacgcaagacagccaatacgaaatgctagataatccggcgcgcttaaaggatgtcctcagcgtctaggaacatgtgctatggtgtatgtgcgactcgttcggatcatgggttcaaacaaataagacaatttttgagtatccatgatcggtccaatgaataggatagagctccttatcctagattctaccgatatggaat

SEQ ID NO: 5191 - DNA, 294 bp, Oryza sativa
  unsure (1)..(294): unsure at all n locations
atctctagtgaccgagttaaagaggatgccgcatggcacgttatctattaattangaatagttnggtaggttccttttatctttaggaaagtgtgtttagtgtccgataaggactctatattttccttttatctttaggctaaggtctttcttgtctgacaaggacttgtatcaacccatgggtataaatatgtatacccggngtctatgtaatctatcgctacgaacaatatatttcggcgcatcgccacccttttaccttttctacttttgtttttacgttccggcggaact

SEQ ID NO: 5192 - DNA, 527 bp, Oryza sativa
acaacttgacaactctcattggctaatcttaagactttgaagtcgatgctgactctaagccgatgactactccggacttaccaaatttcactgttaacaaatggaaagctgtttgaactcggaataggcatgtaatcttccactatgtgtagaaaacatcatttatttatcctattatacgaatgacgtaaatacatatagaccaccataaccagtattttggttttataaggtcatgttcgcacggcctcatatctcatattctcattttatttgaagcttataaattaacttactatgggttaaaagttcatattttctctaaaataacaataagatgatttacctaaatattatcaataatgaagatccagatccataatttctagagctagtatatccatccaacaattaaagatacgagttggccaacaagactatagtcactaacttatagagcatgtgcgcgtacaaaagtcccatatacgataggttatggaattacttgactagcggttgcttaatgt

SEQ ID NO: 5193 - DNA, 345 bp, Oryza sativa
  unsure (1)..(345): unsure at all n locations
tatatgtatgctggtccagntaaatatgaattacagatgctcttaaggaaatatattatactaaacacaatntaataacttacagtatttcttcacatgtctcaagaaattntctttatgatgatcgtcccaccttattgcacagagccacagtataccaaagagttcaagttagtaggggaagtatgtactgcagttgatcatctggttcaagggtgcaagcaccgcangattgggatgagaaaatatgatttgaggtcagatctcatctttatgttgggcangaattanggatagcacggatgggtatgggaattgggatataanggtagatctcatctacta

SEQ ID NO: 5194 - DNA, 482 bp, Oryza sativa
ggatcctgttgaagaaaaatctgcgtccgatcaatggtaccaagcctgcgttgatgcgaaccatatcgacgaacacacaaagttctaggagatctgcttaatttcagtgcaagtcctaaacttgataagatgcgagcgtgccaatcgatttgatcctactactgacaaagatatgtaaacaaccgatcggctgacaagccgatagagagacaacaaccaatgccgatggggttttgagcaaatgattgtatgtccaatgtagagtctgaaacatgaatgataatgtaaaataacaataatataatttagtagaaaccaattggccaataatgatatgatagaataagcgccgatccgcggttaaagtatacatcggctgaaggccgatgtcgtaaatccaacgatagataacagtaaatctttgtgcgatcggcttcatatatccttatagtcgatgcacatcagataactatactgaactt

SEQ ID NO: 5195 - DNA, 499 bp, Oryza sativa
  unsure (1)..(499): unsure at all n locations
gtgctttaaaattcagatgacagtgctgtttggttttccttggaaagtggatgctgccaagttctttgcagcccaagaattaatggttattcattcactttcgattntgtgctcatggtttcacagaattgaactactggctataggttctgcatgctgtgcccacagccacatatcacttgctcttctaggttctctagctgttttaggggtaacaaaaatacacacacttgtttatactctaatgaacagtcacatgtgcttagcttgataacattcatctgtttgggccatggacattagtttcttaatctcattaattagctatctatatntgtatgaacagtaaccactactgagacattggattcgaatgcaaataaaacttgaattgcgagctgtccaaaccagacctaataattaactgcacccnnctgtatcttgtttcagaaatcctcttgtangacacactatatgtgatcagatgatgtgaatggac

SEQ ID NO: 5196 - DNA, 297 bp, Oryza sativa
  unsure (1)..(297): unsure at all n locations
tcatctcgagtaattcttcttctcttgccttcgaattgttcctatcattaatgccgacaatgagtagattatgacagcacggtccgattcttataacatccgtagctgccaaaaacttttttaactagaacccgctatgtgtcattatattgtttttntatgtctcttccttaaactgaagagataaatccctagagtcacgaaatttcttaaagaaacatccttgtaaatgcatacagttccaaaatttcatgccatgggtcatcacaaccgcanacatctcttctattatggatt

SEQ ID NO: 5197 - DNA, 382 bp, Oryza sativa
tatctttcactttgatttaagaaagttttttcttgttcgacaaggacttgtatcaacccaagggtataatatgtacccccagggcctatgtaatctatcgctatgcacaatacagatctgggcatcgcctccctatttacttcaacttttgttttacgctccggctggaactggcacctagaccggtgctgcatacgcttcgatcttcagcgaggggataagtcctatgtccccttctgtccatgcaaatgtaccatctacgctcgagttgtcatggctgtatagtgcattcgatctcttgattactatgcgttgatgagatatctgcttgctatatatatatgtctatgtaatctagcctagcatctacattatctctatc

SEQ ID NO: 5198 - DNA, 282 bp, Oryza sativa
  unsure (1)..(282): unsure at all n locations
acacaaagcanatggctgcatgtgtggcatataatatatcacacagatgatatgcacggctgctngtgtggtactactgattaaattaacagagcctggactgaaaataacacgagaccaacttgccataatttggaaattaagagggaagaaaataacatgagccgactcgcgtgcccatacaaacattccgactacatattgagtatgtccgaaaaggagacaatatttcagagagaagcagctgacctaaattggaccaatatatactagtactacaac

SEQ ID NO: 5199 - DNA, 295 bp, Oryza sativa
  unsure (1)..(295): unsure at all n locations
aattaagaaaaaactagtgagaaagaaattgagtcaacaatccaactcatattgggcacccaatggattgtcttccagcatctgaaccttcccaagccattcctctcactggctcaacataattgaaatatcatgcaattttaatttgcattgacaaaaatcgcaaattcccagttactgaaccctacaacataaangattaaatgcaaaaagcagattggagatgcttgcttttgcctgtgacgaaaccttgcctctgaactgtagaagacatttggggaacactgccatgaca

SEQ ID NO: 5200 - DNA, 277 bp, Oryza sativa
aactgcatgccatcaagcagatcatagccataggcaagtgattatcctgcatgtcaagttggcaactagatagtagtagttggtaaaaagaaatgttttgggtacaattcgggaggtcagagttagtgatcatctgcttggaatgtcaagattagacagcaaatatggaccagtagtcaaaacaaagttgattgatcagttgacaccaggtcactagttaccagtagctagttagaatctaccttggagaattcatatccctctgcagaaattctgg

SEQ ID NO: 5201 - DNA, 467 bp, Oryza sativa
  unsure (1)..(467): unsure at all n locations
acgcttatttccttaagagacgccaagctcaagagaggcgcatagatctgttctttcctcgggccaagaactgcgaggaacagatccaaatgcgccctaaacaaatggctgcctccaagacgaccaacccatgaaacatcatactggaactcatggaaaccaaaaaattaagagaagagattctgagcatggcattgcagctgaaacaatgctgaggagactgacctgagctgctgagctgagcanggaagtgaaggcagtgaaggaatggaggagagtangaggggagttaaggatgagagtggctatataaaatgtggggaaagtaaaaagataatgaaatcatgggtggcagctgttgatgaggattgagtataggacagagagggctcactactggtttcacgctttcatctggagaaaataaaaagatagtaaattcaaaagaagaacagctaaataaaagc

SEQ ID NO: 5202 - DNA, 119 bp, Oryza sativa
tttttttttcgggaagatcgacatcccctcaccactaagtactgggcatgatacatcattggtcctctgcgttcatcgaacgctgcctatagatgcacaacctggcgcgcgcacattat

SEQ ID NO: 5203 - DNA, 453 bp, Oryza sativa
  unsure (1)..(453): unsure at all n locations
ctgcagctatcgntgggttgtctgaaaaatggagccttanagattgtaaaatttatatgctgaaacatctatactgctgaggtggaaacatagtttgatgcatatgaatngaaccgtttggtacatgtttttcaaattgcattatgacatatcangaagcacagnttagctaatattaattgctatcatgagtgattcattgaaaagtgccattaattgggtgggttctgatgataaaacaagtgttattagaactatgggacagtagcaagtatttttgatatggnggtatgtatgatggcttgagaaatagtgtcgtgcaagaaatgtagtagtatccatctttcatggaataggtatataacacactttatggngttctgttggatcaatctatangtcctatngaaaggccnnctgtctatgagtctatgaaagttctctcattgtctg

SEQ ID NO: 5204 - DNA, 449 bp, Oryza sativa
  unsure (1)..(449): unsure at all n locations
ctctgatactcttgtatatgctggatccgggaggagcgcccgtaatcagtgcctcggagatgtaagcctcggctgaactcctttaccaaatatcatgcctcggtgtcatcatcgtgtttggatctcctatggcgtttctttcacgtttagctaccgatgttgattttgggactggttttataacattaatgttcttaggaaacaccatcatgttgtaaaacatgtttttggaattagttaagcttttgtagaccatttgagatataatttgtttgtgatatctttttttcttcaacctcttataacgatttgtgtagcataaaaaaacaagagtaaccatgagggctttcctcgtcaccgacggagtcacgggatccgttngtcacgtcctgctgcctcgtgtagaatttttacattntgatcatttntaaaaatttattttacaaata

SEQ ID NO: 5205 - DNA, 285 bp, Oryza sativa
  unsure (1)..(285): unsure at all n locations
gctcgtggccacccgatccagcgctcatcggtgtgtgttgaggcgaacgccgtgggagagagagggacgagcgggcgagcaacgccgtcgttccgagcggcgacggtgacgaggtgctttntttttttttctttttttcggaggttactgggattaagctggatgggcggatagttaaatagagaacagcgatgtgtgtttatatcgctatcgcttaaaattgtgtggctgcatgtgaaaattgtgcaaattgctcctattnnttttttggaaatatggaactga

SEQ ID NO: 5206 - DNA, 494 bp, Oryza sativa
gcctcttgggcaacccccactccattaaccggccagcacactgcggccatttgtgacacgttgcccaccaacctctgcatcttcttcggtgccaatgctctagtcagtccatcctcaatgtgtgctagccttcatctcggcaacccccacatacctagctaactgaagactctcgccgccttcccttaccactgcaaccctcccatcgactggtaacaggaagcactattgactatgcctatcgtgcccacacactggccagatctagtgttcaccaccaagggaggcaacctgtgggttccaagggcaccccatgcgactagagggaaggcacctgcgctgcccaccgtggcgctggctatgagaagctatgtttgggagggtcaggaacggcaatgctgtcgcataggagtcgacactacagaactatttatctgtgacaatttgacaacatttgtatgttccagaatcggcccgattgcactatggaacca

SEQ ID NO: 5207 - DNA, 382 bp, Oryza sativa
  unsure (1)..(382): unsure at all n locations
gatgaattaacacgtctctagttagctctggtctctctcatggcgcgctatcatagatctatagcgccctcaatatgaccctacttgagctagctctgttctactatgagacgtagccatctgacctacctctgacagatgtgtatgcgcatggtggatctacaaatcatcgcaccagcataagaccatgggaaagggatgaatgcgtgccatgcctgtgaaatntaggttaacatacatcatatactgaatagcacaaatgtcaaaatacaacttgctgcgccacctanatagagtttacgattaatgtcatatgaattgagaattatattagcccaacaatatgtatgacaaactcatgaaccttcaattatgtataaca

SEQ ID NO: 5208 - DNA, 317 bp, Oryza sativa
gcccatagaataataatagtggtggttgctcaaacgcataggagtatctaccccacaacaactcatggactattgttctatgctatcggagcctaataacattctcataaaagatgaatgatgtgctcatcgtggagattatggccatgcaagtataagaccaactcagcaatgccatctatatgagatctaaatgaactttataatctcaaatagggaccattgatatatcgctccaagcactggtaactgatactggatgcattgacgtgctcaaatgattacatttatgacatgctcatgtgagtgaactttaa

SEQ ID NO: 5209 - DNA, 242 bp, Oryza sativa
  unsure (1)..(242): unsure at all n locations
gcaagcttatccgcttcctttcgccggtagtgtgaatcttctctaaagcgcacagcatattccagtcagtgtagccagggcatcatgaacggattcctcaagaggaaggagggccatatctatccaagaagaaagaccaggttaacaattatgctacttgaccaatggataaagtatagatctcatggctggctactattcaaccctggcattggggatcaagaacggngtcaagtacggac

SEQ ID NO: 5210 - DNA, 390 bp, Oryza sativa
  unsure (1)..(390): unsure at all n locations
aaactcatgctccatttgtgatcatgtagaaaaangaattaggagaaagtacactataccatgtaaatgcaaagtttgacaagaaagaagaaacaactttaacttaagcaaatcattactaccaaccttaccacattgatcaatatattggccgatatgctccatttntgttctagcatcctcagctgtgaatttcgtgaagttgggcacctcaaatccttgcgggtatgggaccgaatctacatgttcaggatacggccctttgatatgtatgcataactattctagattctatctcactactatcccgcaagacattatcattatctnttctaacattccacatgaccgatttgtgattcggtctaagtgataatgctattcactttc

SEQ ID NO: 5211 - DNA, 103 bp, Oryza sativa
tttgctctacttccactccatctcatattcattatcgatctgccttcatcatatgctactcaggtgattgtaagatcccatctcctatattcgattcatcaca

SEQ ID NO: 5212 - DNA, 377 bp, Oryza sativa
cacaagctgatcgaagagaccgatatcaacgacgaatcactaatatagtgtatgtgtaatatttgtgacatcaaaatttaaacattagtggatgcatccacgagaccgtaccacgattcatcacttcatttgtacacttcctagaaagagcatctccgataacatcctttccaaatctcactttccaaatgttcatttgaccgatttgccaaaaaataaaaagatagtcaaatttacctttcatttcaatagcctctctattacaattctctaatctgatagtgggtctcacatgtcagcctccctacttctttccccttcttctttctctccttcaccctctcctctatctcttctcttcctctctcttcttcttt

SEQ ID NO: 5213 - DNA, 451 bp, Oryza sativa
  unsure (1)..(451): unsure at all n locations
taacttccccgtatcttagcggaggaatgttgtactatcaattattttacaaccattctctatctcgctggagtttttaaggtcccagttagttaaaaactataataaaatcaaactattattattttgagtaaggtgtttgtctagactttctcatcacagtattttcttattttcttgtaatccatttaagtttttactcctccttactgaaatataattggcagctcttctacggattagtttttcttttaaaataaagtgttagcatatgttcccttaaaaaagaaagaaaaagaagagcanacttgtgatcatcaagctgcccatgagaagaggcttgaatgcatttcagcccatgagaatcttttcggcccatccaactgctgggcccgcagattcctcttcctctcngtattcanaggacatgtgtactttacagtcaacaaca

SEQ ID NO: 5214 - DNA, 486 bp, Oryza sativa
  unsure (1)..(486): unsure at all n locations
actcttgtatatcaatgatcgcaatgccatgcagagttgcaggcaagttttatattactctagtcctggaccaagaaacattgccagtccggtaccaattntcggacaattcagcatggaatgaggggggaagacaggtggcttgctcattgggattcactaacgatatgtaaaaagcattaacttatagtcaccttaccactggtggggattctctaacaatatgtagaaagcattaacttatatgtatatgttctttgaacattaacttatatgtacatgttatttgagtntcataatgtgtatttgatattccaaaagcanagtcaaaattgaagggtccaggctggctactcttagaaatagagataacccatttgtgtgttattatggcattgttttgcaccattctgcatgtaacttgcatatattgtaaatcactggcatangtgcaaaacctattgttgctactacactcacagtgat

SEQ ID NO: 5215 - DNA, 66 bp, Oryza sativa
  unsure (1)..(66): unsure at all n locations
cccccccgcatgtattttttttcgnagcanaaagtactgttgtcctatctccatcctcgcccctct

SEQ ID NO: 5216 - DNA, 492 bp, Oryza sativa
  unsure (1)..(492): unsure at all n locations
agatgattaaaagaggcacctatcccagataaaggagatggagatttgatatcagntcacatttcttctagcaccgaantttcggaatatctagaaagggaacctctttttcagaagacagcatcacaataaaaaaatggcaggtcaatggttgcaagcaaggaaagatacaatatctagtttgcaactagtccactgttctctcggatgcccttttacagttttacttccatactttccttattgcatgannaagtacagttgcataagaagaaataatttaacaatatcagctgagcatctggtgaaaatgcataccttgtatatcangtttgagaccatgctgctgtaataccatgaacantatgcattnttatctctctctcangaattatgagtgtctggatagtgctattctttccttccataagatcccgaacagcanactcaatgattctttcatagcggcgtgagaagcctgtagtttcaata

SEQ ID NO: 5217 - DNA, 400 bp, Oryza sativa
  unsure (1)..(400): unsure at all n locations
aacaacgacatgatgccgagaaaagacgacgccgacgatgcagcgcggcagggtcgacgcaacagagcactgcattatcgcgaagaaatgttctattgggaccgggccaaatggtagtattccatttctaattgatgacctttngttagttttagcgtaagtctttatgctttccgatgctgagaaaactggcttttgtacgtgaaagcgcgggtatttcctcgaagntgttcgtatgcttttccagcacagtatatatacgcttgcctgttgcctccctcgtgtttttcattggaagcaaagcccaaattaatacgtttaatacgtctgatggaaccttttagaaatcattgtatagtggttagtccaaccaagatcatatcctncactagcacatatg

SEQ ID NO: 5218 - DNA, 294 bp, Oryza sativa
  unsure (1)..(294): unsure at all n locations
cacctaagntcccgggacttgctgagtacgaaagttctcacccttgctctatataaanatatatatagntcctccgccctgaagagaagataaagngaagngaagattatggtttcgtcctggttcccagccgtcgcctgtggtgttgggtgttagacccgtggttccgctgctgctgctgctgttggtgtttcctcgtccgcgtcgctcggtgtattctcgggctgtctgagctgcaacctaagttaaggtaaataagtcctctatcttatttaaggattgctatgattcata

SEQ ID NO: 5219 - DNA, 390 bp, Oryza sativa
  unsure (1)..(390): unsure at all n locations
taccaccgaatccatcttctgtttcgccgccgncggatccgctcgtggaaaccgctatcgacggtagatcctccaccgcggaagcttgggagcgaanggagagggggaggtgaccgccaaatccacccatcatcattgtggtggactggtgggtatgtcgtccaccaaggaagcaagaggggaaaggcgtggnggagagtgagagtgatacagacggtanggagagcgacagcgacagagacgcgtgggtagagataatatgataatgatgccagtggatatatgtgcatgtcngttgatcggcttgactcggctttttggtgtcngtttcaaattctggacatatatctatatgtgttctttctattaaccgatacctacaatatatta

SEQ ID NO: 5220 - DNA, 533 bp, Oryza sativa
  unsure (1)..(533): unsure at all n locations
ttactctattatcttggcttgngtaatagaagcaaaaagcacatttaatgttataatctccttttcctctaatccaatcatgttcacaatntaactgatccatcaattctatttttaaaccggctagttcgtcaattaaatctaactcttcatcggttgattcatactcttcattggtgtattcaatttcatctgtttctatgatagaatatattgattcgtcatcttttatttcatcatcacatactaatatatnttcatttacgctatctataattaaaactctctcttgttcttcatatttactagaatatcttttttgatcctttattgggcaagttctacttaaatgatctggtgaattacatatgaaacatctgcatgtcctatcataaggtttctttgcggaatatcttcttacaatgtcgttattgtagaaaggtgctctattatctgatcttctaagaaaaacctcttcttggcttaaatattgctattcacttggaatctatgctctttattctagcccatct

SEQ ID NO: 5221 - DNA, 435 bp, Oryza sativa
  unsure (1)..(435): unsure at all n locations
gctttcaggagatttacggctaaaggctcgtcgtcgacgtcgtcgagcatgatggatcttgcaccaaggaatgctctaaattgatactgagaaggtagaggctcatcaacggaatgggaatttgaagaggagaaaagctcacgacccatgctaatggcagtgtgttctatttataagcccatgaacaagaagaccaagcaataatccaggctaattatagagccataagagccggagacctaacaagaactagatgcgaagtaaccgtagcacttaattaggacaaaggacaaatatatttacatgtcacatggtgaaaatgtaagtacatatgcccaaagctaaagaagaanacaaaaggggaaaacacctatttctgtgcatgttctatgccgtaattcggctcctaacagaacaataaacccgcctttgtct

SEQ ID NO: 5222 - DNA, 421 bp, Oryza sativa
  unsure (1)..(421): unsure at all n locations
ggtgtgcttaattgtggcgatccatgacattatgctgataagtgtccaaagcctcgatgtgtgaagaatgctccggtccagaacaactccaatgctccagcaccgaaggctcgtgttaatcatgttgcagttgcagaaagcccagaatgcacctgatgtggttttgggtacgtttcctgttaactctatacccgcatttgtgctttttgattccggtgctacacattcctttntgtctaaaagttttgcaagcaatcatgggatggaagttattagtcttgggagacctttactagttaataccccaggcaatcaagtatcttcaacgcagtactggcctttcgttactatagaaatagaagaaatctcttcccatctccttatcttgtagaatccaagactggatgtatcttaggatgga

SEQ ID NO: 5223 - DNA, 370 bp, Oryza sativa
  unsure (1)..(370): unsure at all n locations
ccttggagnggagataatatttatcgcaagcctgacgccctcttgactgataatacctggtaatgtatggctgctttgatgaactaagtcttgatatttattgccagctttgatttagttgccctattataaaggactggatcaaaagttctctttacttttgcattgttgactgttgagaatgccatgttgttattggccaatatgatattgccgaatatgcttttaaaataaataataagcagcgctggcactactgantattctattcgtttatgcttaaattgttcacttgtagccatgcctcaattcctctttggcgcttttcttcttttgacatgcggtgcctatataattatacaaatattga

SEQ ID NO: 5224 - DNA, 79 bp, Oryza sativa
aaagctggcgaacaggtttttcttttttgtgtgaattggatccgctgcaattcccacccattcaaccgaacataaaggg

SEQ ID NO: 5225 - DNA, 460 bp, Oryza sativa
ctacaatcttaggagaggactgaactctgtttgatattggccatatgttgtcataccctttatagataccctcttactaaagtttgtaaagggatactcatttcatttaaatacatgattgtgggacgataacatgtgatattgccattgctgcctttttttttaaatcttgtagctactctctttttttaattcttggagatactttgttactcttcctaataaacatgtcactttcagcatactagaatttaatactaccattagaagctaatttggttcctcctttttgaccaaaactgcggtcataatatacgaagatactgacaccccataaaattagagaaaatgctggaaaacctatggaccactgacctctctcctagacatacagatcatatccgaaaaaagcaagcacttatgattacagatttaccagtaagatgcttcccatcctgac

SEQ ID NO: 5226 - DNA, 372 bp, Oryza sativa
  unsure (1)..(372): unsure at all n locations
tacgtcgaaactcatttgccattggtagagaaagaccagttccacatcaggaacaacagaaactagcgcanacatgtaatagcgtattcggaattgtaaccaagccccccccatgggttctatacccgattcataactagaaagcttctctggtccttcacgaaccggagctaanagtgctgaaatccaaaatgctaaaataggaataaggcttgctattattagaaatgcccaanaaatatcatattcgtgaagcagaaacataaatgtactcncattaatgtggaatangcgggaactgaatagtccattcaagtcagcattggtcaattatacagaatttctctcttttcctcggtgaaacaaggatcg

SEQ ID NO: 5227 - DNA, 427 bp, Oryza sativa
  unsure (1)..(427): unsure at all n locations
aattaaacaaatacaggttaaactaagtatattaggcataacaagcgtttcgttcttgtagagtagataattggattttgattgagttatttttctaagggaaaaaggaaaaggaggattcaaaatcctcttttcttcggactttcccaaacacaaaatacctccttgtattcgcactctcaaatgagagtggaagaaattcgactttcatataatatcttaatagaattccatgtaatgatcaatgcattttttggattctatattattcgcatgtctagaatcctaccaagagaataccccccatttttatgtaattgaagtaggattgacgaataagaaataaacataatactggttattagtgtcgcataaaacccgaaatggngcgtggccagtggaaggcagcgggttttgtcccgtactc

SEQ ID NO: 5228 - DNA, 286 bp, Oryza sativa
  unsure (1)..(286): unsure at all n locations
tgggagtacacataccttaaacttcttcttttattatcctacagtatanaacactgcacanagccgaacagagtgctagcttttgcatattgcaggtagtacgaaccaatggttgtcagatgaaaacaaccactcaatatacatctctacagtggtttgcagcgtttgccacatctcaatcgctttgattgggacaccactccaactggcctgtaggcatagtagcatacacctgaaagtttacattgtaaccctctttataaacataattnntgtataaacctca

SEQ ID NO: 5229 - DNA, 366 bp, Oryza sativa
  unsure (1)..(366): unsure at all n locations
taacgaaaccatccctgtgatgactccctccgttaaggcatttgatttcgtcctagataaattagacttcttaaaatttaaccattntttttaaaaaggggatattgacaattatgataccaaataaatacactgcaaactcataattcacagtggatttncaataaatataattgttgctttaaatgttggcgcactattatataaatttgatgaaaattcaaaaattttgatttagaacanaactgattgtcttatattacaatactatatggaaccgagtaacactagtctacaactcccttcactattaaatacttacgattcgttttaatatatgacgtcattgactttttacataatatt

SEQ ID NO: 5230 - DNA, 435 bp, Oryza sativa
gtttcaacactcttaacatatagttgtatcggagtattagccgatacatgctagatctatccgatcggctatgctataaacatatatagctctgttattaatatatatttcaatctaagtgatttatactgtcttggcatggcgaccgatctatcccaatcactcgatttatgtatatatcgatataaaattatattatttgtgatatctacagtcgatcgagtaggtttaagtctttattatctatttataaccgccgatagatttacatatgacatcggctcaaagataaatgatatgtcatcggcacttagccgatcgtctatcatttataggattaaccgcgggttctttgcctctatttcctggtgattgaggatcaaatcaacctgcacgctaacatacccgaaggcgagctttggacctgcactggag

SEQ ID NO: 5231 - DNA, 350 bp, Oryza sativa
atgacgagccgcactgcccgcgcatggcctcatacggtcgtcaccatatcgccgacgggcgctcggcactaaccttgctctcgcggagatacagtgcgcgcctcggacgcgcgaccaacagcgccggggggctcaccgcccttttcggcctgactgcggctccgcgtcactcttccggccactatgtcgtgcctcgcgtgcacctgtgtgtccgcgctgcatgcggcccggaacctctagcacgtctccctgttcgtgtggtggcaggggaggcgctcagatgcgacccgcaagctctaaccgtctcgccgcgctcgcgctattaataaggaagagaaacaagaggagag

SEQ ID NO: 5232 - DNA, 261 bp, Oryza sativa
attattctttgtctctgattgatatcaaaatttctaaaaaaaaaatatggcgtttcctctaagagttatcttgctatataagtttgatttttatcatcgttggattcaactcgagaatcatgctctagcggcttagcataatgaagacatgtcttacgtgtagcagtcgggtatgatggcaaccgtgatactatactaattaataaactcccccatctcattttaaatacaattatatgttctttttccaacgtttgacta

SEQ ID NO: 5233 - DNA, 463 bp, Oryza sativa
  unsure (1)..(463): unsure at all n locations
agccctttgaaaataaagaagttgagaatgcaaatgaattccaaaaatattacaaatgatggaataacatgtattgttcttttcttttgctcgagggatgactagcttgttcagtctatgggcggatccatggcccgacgatccaggtagttgttggatagtctcacattggttgtggaaaggtaatggacctaatatataagtgagggagtctcttacctcattagctagcttttggggtgagaaaggctatttacgatattaaatttggtatcagagcctgactaggtcaacatttctgactcgagagacaaagtgtgtgaagctctaatggaccgtacgtgcctgagggacctganggaccgtatggcgtgaatggttaagagacactaatgtgtgaatggggtgattgttgaatagtctcacttattggtgtggaggacacatatgacttatatataag

SEQ ID NO: 5234 - DNA, 231 bp, Oryza sativa
aagatgtacacacggatgatcaagtgctgtggacaggtaactcttgtctgtggtctggctaaggcaatgtgttgtctctcccagcatgctggctgatcctgactctcccattctgacactacaccctacacgcaactgtgctctcctccagtgccatgctgatgaccccccatcctccctggccatgccatcactgacactcaatccaggtcggatggtttctatttcctc

SEQ ID NO: 5235 - DNA, 516 bp, Oryza sativa
  unsure (1)..(516): unsure at all n locations
cttataccccattttgtcgtctgtgaagatggagccgtaggcccgctagtccgctgctggttaattttgattgtcaggccttaagtgcctttgtaataatgtaaatattatcgatataataaagatgtgtcttttatatcatgtttgtgtggtgtaccccggctnttccttggacggggaataatacactaacgttcgggaaaatgtatttttctcggtcgcgacatgggcccccgtcacactgcgccatataaaagaggggtggaggccggcacggcacaagggacgagatttaccgccggcgtcaacttcaccctacaaacccttatccgatcgagaggggccgtagccagtgactggatatgccaccgccgcgccacgaacttcgcgggatcgtccatactaccgttgttgtaccgtatcgccgtcacttaccgtgccgatctatgaaaccgatgccactacatacatgtcgccttttattctcacactaacggctgctattatacttccgta

SEQ ID NO: 5236 - DNA, 392 bp, Oryza sativa
tggacattgataagtagccgataatgaaaatgggttgcatcaaatatgccgattcataaagtggtcaggaattaaagtacatgtgtttataattaagtaacaactgaaaaactagcaaaacattttcttatagcactagtatttgcatctgaaatagtactagtttactagcatgtgcgctctcagttaaagcaatagctgcatattatgatagacctcacctacggtacaagcaccaaatataagcatatgccggttatacatcaaccataatatccaaaaggaacactacatacttcaggcttatcgagaagaatttaaccatgcatacacacagcacaatagcacaagggtaatggctaatcagagaaatacaagaacaatcatatgcg

SEQ ID NO: 5237 - DNA, 429 bp, Oryza sativa
  unsure (1)..(429): unsure at all n locations
ggtttggtgaccatcaactaatggtgtcatccatttgcctcatcacaattagacctatttctttgcacatctcaaagcagaacattagtcccaataaatcagttgtcatcctccacttgatgaccaaccggttgcatatgaaagatatggatatgtatgttgagtattcattaacaccacaagcgtcatatactcatatgcaagcttaagtgtaaagatccaatataaataataggtgaacaacatgaatctagaacatgcacaataaatgtataggattggctccccctaaatatatgcatacaaagaaatatacaagagaggcaagtgtatgcataaataaagaaaaaccaatggggtttatcctatatacatggagaaggcatgtagcaatgataaagatnnaacaaaacacataccttcatgatc

SEQ ID NO: 5238 - DNA, 533 bp, Oryza sativa
  unsure (1)..(533): unsure at all n locations
cgccgntgctgcccacgccgccgacatcattccaggtggccgcggcggaaggcggaagcaaaggggcctgtggccgactgcaatttcatgaacactggggaagggttctggggatggctaacaccctaggcccgactccggtcaagggtacgtatgagtttccttccacatccctgaaaaattttgatcaatctgaattgggaggtggggaaagtgatggggatcaattcgggcgacaatataatcatagggttccgaaacttgattttccaaagtttgatggcacagatcctgaggattggaggatgagatgtgagcattattttgatgtgaataatactttntctgcatttgtggttagaatagcaaccatttatttttcgggaagagcagcttcgttggtaagatcaactaaggctcatgttagaattcctatatgagagaatttttgtgtagctatgtcgaacaacgttgatagggatcaacatgatgttcttgatacgcaaatggatagtatcaaccaataaggtctg

SEQ ID NO: 5239 - DNA, 432 bp, Oryza sativa
  unsure (1)..(432): unsure at all n locations
gctgagaatgcaagcgacaggaaaaaacttgatgatcagaagccaaaggtaatctaatgaactatctaggtgaaatactaagctacgatcatatgcacctctggtgaagtatcatgcctaggctatactgttaatttacatgatttgcaatacacttattttgaggtattgaatgtttctgttatgataacccaagtgtgtactgcaaatactgtatgtaatatatatgcttacttcctgaaatgtaatgtataggcaaaggatgataatagtgaacttgagctagcaagcatagaacagcagagggctgatgaagatgtaatgaagctagttgaggatcagaaggtttgaaacttntttttttacttctggtatntnttcctggttagcgggactgtattctcttatgatgagaatngactcactgataca

SEQ ID NO: 5240 - DNA, 404 bp, Oryza sativa
  unsure (1)..(404): unsure at all n locations
ttcgataacatggacacaactatacaactcaattatacaactcaatcataagttcaaaattaacttctgagcaaaataaatcggtcaggtgtaaatgcaaaagaatattttgtttttataaacgagaaaataaagttcaaacaaacttaaaggagatgaaccatgacaacccannaaaaattgaaactcgaaaaaggatatttgaagaattgatgcaagacgaacgttttaaaatcaaagaatccaactaaaagtacaaaatataaactcttggatgaaaaaatgaagcctcaacggagaaaccaagatattggttggtacaaccaaacttcgatttccataaaatcaataagatgtgaccaaatgtagacgtctaggccacaactaagtttttttttcgataa

SEQ ID NO: 5241 - DNA, 415 bp, Oryza sativa
tcttagtgaggctcttatttacacatgtactggctagaacatatcttaattaatcttaactctatgagcctttagagtatgcatccataagcaaaagcttagattaataataattcgatcctaggacatatgtttcacaactatatcaatgtattagcagaaaacacacaacatgttgctactaaaatagaaaactgtgttcaattagtgcacaacatataacacagtataattgagtggttacaccttttgagtggttatgagcgctattaccactcttagtctgggaatatcttattatatgataatcataacatgcttaaatctaactgctcatcactatgagaagagatattttggactttactggcattgtcctatggggcatagtatctgatatttataaatccacatt

SEQ ID NO: 5242 - DNA, 391 bp, Oryza sativa
  unsure (1)..(391): unsure at all n locations
ttctagagattgattatgaagattaagagtatcgctttgcataatcatctgaattttgataaaaatcaaacaactattccggaactatatacaattaaaagtaatttattttaacttttgttataaaccgaaccttccatgttcaatttttccgctatggaaatttttattcaatttggaacatgatttttgtatttttatagtattaaaaacctgaatgtcaaattatttaaggaaaatttggactacaataattgcctttggtagaatttaaatagtaaaaaaatatatgatattttaccatccatgatgtanatgcaacattaatccctttggtcaatgggtgatggatgatgcacagtcaattaatgcgccatataaaaatctaatc

SEQ ID NO: 5243 - DNA, 343 bp, Oryza sativa
aatcaaggcaatacgaggcacgggatgacggatatggttggccttaccacagcgtcaataccattacgggatattgtgcgggatttgtgaaaatatctttcagggttaatgcaaaataagatcatactcataaattattgtacccgtccatcgcgcaagctcaatctcgtcgtcacacgggcgtgctcctgtgcggcgctgcgatccaccacagcccctgtgcgacgcgcgtgatcaggcactacgtcgatcagcgtgctccccatatttgtggcgtgttcactgtctatagcgacgcacttttgcacgagcgaggcgctcgcaatgagttgattcagtgtac

SEQ ID NO: 5244 - DNA, 226 bp, Oryza sativa
  unsure (1)..(226): unsure at all n locations
gtccggctcaggcctctaaacatttgtgctttgtggaatgttgcgcatacacactatnccaacggatcatagaacacaagaagttcgtgattgcgtattgtcatctgaatgtaccatctcgtcctcctcaccgtctcctggtatattttagcgcacaggatttatagtcccgccaaaatatacatgtgagaaagagacctttatatatctcaaccatgatacctat

SEQ ID NO: 5245 - DNA, 480 bp, Oryza sativa
  unsure (1)..(480): unsure at all n locations
tgatatgaccatgcaaggattcgnggccagcatccaaatggtgtgtttgctatcaagattagcaattacttaattagggttcgagtaatcaacaagttggaggtttcgactgacaggcatctcgccttaatttacttgcttgagcattatccgatacaagctaaaacgagagagcactgttgtacccagtgtggcagagcttccattggatgggttcctctcagaaatggggcttgtaaacacacatgcaatatagttacatcatgaaaaatatatacaaggactnttacggtgaacaaaatatggtaccagcgaatatcttactattactccagtatttcagaatcggatattgaatatacttcatatgatacctgagccagngggattntggttntgaatcacttgggcgttcccaggattactgtgagtcttttgtctcatagagaagcattttagagaaatcttccgcaagtaatc

SEQ ID NO: 5246 - DNA, 337 bp, Oryza sativa
ttgggcacacttttatgcccacactggtttaacagatgtgcttaaagttcctaaaagacacatggcttcaccacacctggaaatatatggcatatgtggtatgaaatcccagtaaataaactcataaaggatttaccaaccgcctggaaattgacctagatatataattagcctaagccataatattggtcaataaaaatgcacacttacatggtcaaaagcaatgatatttgatccaatcaattgctttaaaacccaaacagcatcttgacttatataaaaatagtcagcggggcaactatataaagcttaattgtttacaccctttaagatgcat

SEQ ID NO: 5247 - DNA, 394 bp, Oryza sativa
  unsure (1)..(394): unsure at all n locations
caccttccaagtcccgttagcgataatggaatccatttcactatggacagccttcttccagtaatctgcatcaggagatgcatatgcttctgaaattgacttaagagtgtcatccacgaggtacacagtaaaatcatcacccaaagactttaccgtcctttgtctcttactccttcgaggagcttcactgacatcctcctcagagacaagttcatgtgtatgttcacgttgttctggtggtgtgattgaactgggaattatttcagagggttggttcgaaccactatgtgtatccttcatttngaaaaagctctcanagaaggtagcatcacgagactccataattgtaccaacatgcatgtccagtacctcggatttaactattaaaaatcta

SEQ ID NO: 5248 - DNA, 140 bp, Oryza sativa
catttatgtttcacaatctaagtctgaaagctaagggaaatggcgacattagaacctacacaactaacggccaggtaatacaatcgcgatataactaatctagtgagatatatacaccttctaagaaaaatttatatagt

SEQ ID NO: 5249 - DNA, 115 bp, Oryza sativa
atctctatccacgagcctcatggtgggtcccttccgcattacttctcacgttttcattcttgggcaagaactgggttggatccttgttccctctctttttaattccggtactggc

SEQ ID NO: 5250 - DNA, 299 bp, Oryza sativa
ttatcatgcaaatttatcgtactatctatacaatattgtcatatcagtaattcgctatgtttacctaaaacatgttttttatacaatatctattgtgcgagtgtttctgaagttagcccaactacagtttaatactgggggctcgctttatattcttttgtataaatcatgcttgctttatggttacgtaatgcctgatattaaatatgctcgttatatcctaataatgctagaagattcatgcagtactctgagtacatactcgatattctctgctatatatctggccttctagacaa

SEQ ID NO: 5251 - DNA, 223 bp, Oryza sativa
tacgacaatccagtgcacatacaacctgaccttttaggcgtcaccacaaaaagcactgatcacgcatccactcaacaacagaagggatctgaatgatagaactccctcaggcgtagacacaacagaaatgaactttcagatactcactactcaagaggagaggtacctgcgatgtagactacgcattcgatgactagattaatgctacggcggacatgcctca

SEQ ID NO: 5252 - DNA, 453 bp, Oryza sativa
  unsure (1)..(453): unsure at all n locations
tctggttgaaatgtgtggctttatatgttggtgcaacttgttcaactagcaagttggtactatctaccatatattcatgctgtcatcatgcatataaagcacatactccaatgaaccacaactgtgctcaatccataataggttgggtctaacgccatgccataacatatatcatgataattgaaaaaaggttttgaagaattgtacctcccgtcgaattaacaagttaagagaatggcagtaagatttccgtaaaggcatcaaacagctcttgtccaggttctagaaaaaaattataatataaagcatgagaatatggtgcaaaatttcacatattgtagccataacagtactgtttgtaaaatagtatcgtttntcacaacaggacaacttgcatgtaaccttgatgaactgtagaagtcgggcatatgtcctgcatangtacctaatatc

SEQ ID NO: 5253 - DNA, 174 bp, Oryza sativa
  unsure (1)..(174): unsure at all n locations
atctcatactcatgccatgttatattctttntgcaataactgtcagtacatgcttatgaatgctcatgcttatgcgtccatactttgtatcaatcatgctntacaagctttatctctgtttntgtccgggctactgagtgcgtttacgcatgagtagtgccgaagatagcactg

SEQ ID NO: 5254 - DNA, 284 bp, Oryza sativa
  unsure (1)..(284): unsure at all n locations
gtagcagagcacacaagaacagagcagtatatagatactagagaatagactgtagcacagcaaaggccaaagagcatggcttacttgctcaattcctcagtgttggccataattgtgcactgtgctggtgtgctggtgcatatgtccaagcggctggtggcgtggagatggtagatggtggtgagtgcctggcggngagaacagagggacgatggagcagtagaagtcgcagcggagcagtaggagtcgcatcagagcaggcgagctgncagtggatctaacta

SEQ ID NO: 5255 - DNA, 330 bp, Oryza sativa
  unsure (1)..(330): unsure at all n locations
acactcatcatattttacaaaacagtcggtatatcactcggatcatgttattcacggattcacaccgcatatgctacatattaatatcaagtcgcttggttgactataattatcgaagccactcggttggttggattatttattacttgactatatgcttggtttgttcaattaaccacatagtcgagggctacacctattaggtgcatctagtcgatgcacctgactnntattttcagcccttaacagtcttcagagttggtaaaagtactcgggagaccatggcaaagatgattgaagcactcngctttggagtaatctagttcgaga

SEQ ID NO: 5256 - DNA, 365 bp, Oryza sativa
  unsure (1)..(365): unsure at all n locations
acatctttggatcatgcgttgataggttgctccggcgctctttaacccaaagggcatggtgatgtagctataatccccaaaaggtgtgataaatgaggtcttcaagcagtcagattcctttaagctaatctgatgataacctgagtagcaatccaaaaaactgagtaactcacagctggccgttgagtcaactacctggtcaatgcgaggtaacccaaagggatctttaggacaacatttgttgaggtcggtgtaatcaacacacatacgccattgtcctatcttcttncgaactataaccgggtttgccagctagtcaggatgtaaaacttccttgatgaagcctgctgctaacagcttgggta

SEQ ID NO: 5257 - DNA, 363 bp, Oryza sativa
  unsure (1)..(363): unsure at all n locations
cccgagggtgaggaggccacagtttctaccgatggaactggtggctcgatgtgaatctttgttgaaatcacagtaatatacgatttggtgatttatggcgaattattttgttgtgaggtgatgcatagttgtggataaattggtggcttgttatgaagatttggtgatcatagtagtggaggattatttgagttgatgtatatatagttgtaggttgcgttggacgatgatgttgcttatctgttgaattgagcttaaatttaatgattctagtttggtgtgtaataactgttgcaagagacatttggtgaggcttgagcncatggctggacttcagttagaatgcattttctcaggcagggt

SEQ ID NO: 5258 - DNA, 110 bp, Oryza sativa
atctctttttggaagcagactctgactgtaagcattctgtgagaggttgcctaataaacaagaggctctctggtaaagttgcgacccaataaaccttttggagataaaag

SEQ ID NO: 5259 - DNA, 202 bp, Oryza sativa
ccactaagtgatgtacatggtgaaagtatagattatgattagggaaagaacatctctgatgtttgcttcatggcgtgtggtgaatctgacacagagtttgaacataatgaggctctggcggcaatgaacgagaacgtgtggatcgtggattccggttgttcgcggcacatgaccgtggattaaaattggttctcctccctca

SEQ ID NO: 5260 - DNA, 336 bp, Oryza sativa
actgctaacaataatcgatcgagttaatgatgcgctgaaacaccacgataataaatattgtataatggtacagaaaggggatctctcaatgcattcatgtgtagcctgctatgccaatagttgctaaggttccttcggtaactaacatatcttgaaatgggaacagtgaatagggagttagtctaccacaaatgggaaatgaccaaatgaacacagatgtcaatgggggaatcatcatccaaatgtgggtatgagatagtcttggctgatgtgcagaagtgctcacctctaccaagacaaagtgaattaatgtagtgtatcaaggggagtagtttc

SEQ ID NO: 5261 - DNA, 308 bp, Oryza sativa
  unsure (1)..(308): unsure at all n locations
ttggatgcagagttatactagtccaaagaacagagagtagtggcatatctaatggattgacacagagggccttcttgaattgaaactanggacaaagtggctcccaagtcccaacccttttaacctggctttcaagatcaggggaatctctgtcctttttatttttcctcccccctcatctttctctctantttgntttcagaatatttagtatagtagtatagtattagtgcaggggaaatacagtgtggtatctatgaatatttaggattcaatgtcttatatagcatatagttaatcagcatggt

SEQ ID NO: 5262 - DNA, 89 bp, Oryza sativa
tttaaatcttccgttcattttagccccctgcagatatcccgtctcttttttttaaacggctcgaaccttcttaacaccctttcccctgg

SEQ ID NO: 5263 - DNA, 390 bp, Oryza sativa
  unsure (1)..(390): unsure at all n locations
aataactcttcttgcacatttgctccagaatatccaccactatcactacgcattctggcattgcttccatttgtgcctccatccttccttgtctttggaactgatcgatgcaattgtcttgaaattgatctactactactactcaaggaacctgcactagatgtgtttgatgatgatgggctactccctccactcaatgagcgcttcctcgacgaatttactctttctttcaaatggtccagaagatcctgtccagcagtttctcttctaggtctgttgccggtttcgctacaagtgccggctgcattcctcctgctgccataagccattcttccttgaggtaacangcctgttgatccactgacaagtagtgatctctgaggaatcact

SEQ ID NO: 5264 - DNA, 188 bp, Oryza sativa
  unsure (1)..(188): unsure at all n locations
gcagacaatcatgggaacagctaaacaacacgtacaacagcttagctatgaacacaccatgtggnggaaaatacatatttactggccctttcaatacaaaacatcataggcgcagccgagttaatttgactacactggaaccacccatctacccgacgacgaccattacccaagaactagagatcaaa

SEQ ID NO: 5265 - DNA, 284 bp, Oryza sativa
aggcactacttcatacacaaaagctgcatattacagcaaacgggagacaggatagtatacaacaacccggcaaaaaatagtgctatagttggtacttaggtgcctaagtcttgcatttacaacagagaacatattatggttatgtctaatatatcttttcggtctgtactatgatgcacattaagcctaatttgttaataataccatcatctagctgccttcaacacttcttgataaaccatattcctagtgtattaactacaacctcatcctccatctctata

SEQ ID NO: 5266 - DNA, 203 bp, Oryza sativa
ctattttaattacaaaaggcacatgatcagaaatagctctatgcaaagtaagaaccactgtattgggatattttatagtccagtcattagaggtgaaaacccaatccagctgctcaagaagggggttattttgcatgttgctccaagtaaatgatctttctttataagggatttcaactaaacccaaagaactgataatggta

SEQ ID NO: 5267 - DNA, 349 bp, Oryza sativa
caactcctctttgtggatgatcaatgatcaatatgtaaataatggttgactaagatgtcaggtgttcattgaatcctcttggatcttatcctaaggactcgtttaaggactcggtagttcgcttatatttttatttctagttcgattttggcgcgcatcttctcttctcccgcatgtcgcatgcgcaaccagggtttaccttaccgccctggtaaccacgcggttaccgcggtaccaagcttaccgcgatgtacggtattataaatacacgggaacctccttatattcaaataattaaaatataattcgaattttaattaatttgcacagttttcacggtaccacgtta

SEQ ID NO: 5268 - DNA, 330 bp, Oryza sativa
ctatagcctctactattacactgattatgtcctctcgctcatatttaatggaccagagatttcatgtccctattggaccacacccatctgagaccatttttgattttggacgagctaactacgacagctccaggataggagtacctgacaatactggtcacttcacgtcaagtgatggcctatacctcattgcttctgactcacgtcttggaataacagaacgctcacaattgatctagatgcaatctcaattggacatctagaaaaagtgcgaaaagctggatagtacatgggaagcattgcccatcactgtacatcatgactatgtgg

SEQ ID NO: 5269 - DNA, 173 bp, Oryza sativa
ataaatgaaatttattcaattaccggattacacacgtaacaagaagtaataatacgactctgatatttttatttcaaaactgataaatgatctttataagcaggtgcaaggccattcgccctacaaaagacatcaaataacgacaacctttgaataatctgtggtccaaacaa

SEQ ID NO: 5270 - DNA, 360 bp, Oryza sativa
  unsure (1)..(360): unsure at all n locations
tttattctttttttanatnatcaaccccacttttccactagctacttactgattacaactcctttcagtttggatgtactttctctttatattcacaaacttccaataatttgctaacacttgtattcatcttttacaacggtatttcaattgcttgattaatatacaatctcaaacctatatacgtaaatatatcatatattagagctctaatttgtcatattattaatgaaccttgatagaggaaatgaccgtggaagtgtataaatctatcgatatcttacatttgtgaaataatttaaaattataatattgttagatatgactaataaaagttttatattcattaaaatttattaa

SEQ ID NO: 5271 - DNA, 247 bp, Oryza sativa
atgtttgttttaaatctgtttgcaccataatgctagaaaaaaagagcttatcaaaagtagatccgtcatgactatattttaactatattttaacgctgttactacacgtaagacacagtgttactgcacagaggtcgtcattgttacttgaccgtcctgagacgagagcttagaagaggtgggtggtgtggggagttagtatgcgggtttgaccggtgggagggaccttaaccgatgtgggaagtga

SEQ ID NO: 5272 - DNA, 446 bp, Oryza sativa
tatttataaataacataattacgtgagcattaccttcacaaatttgttaatagcagtatacacataatctttaacatatgtagctatcttagccctcacctctgcgacaggcatcctagccctattttacaatgctgcattatactaaaatgtatcagattcatatatagctatcttggtcgcgctcacaatataacgctaacagcttacgtgactgtcaaaatggtttctcttatatgaacattacctgctccaaattcaaaggtcaatgcatgaaaaaacgaagctacaaggtaatagataaacacgtgcattgcaatgaaggaaggctgacatacgcacaggactatgtatctcccttcttttttggaattatcatcaaaactgttatacgacatagctgaatgtttgccatccctctttctgtctgtcaataaatgccacag

SEQ ID NO: 5273 - DNA, 462 bp, Oryza sativa
atcctctgagtttgattcatgcatgcaaccttagcattaagagcactacgttctgtttcatgcttggcatcagctaccttcttttcagcatcaagaacagaaatattcactctagcctgtgacaatgcatcttgtagtgagttaatcgctacattggcatcttcgaatttgctggcataaatagccagctcctcattttgtttctccaactcctcttctacagcagcagtatgcaatcgcatatgccgcttttcttcagaaatagaagagatatactcctttgaattactcaattcatcttccaatacctttaagctggaaagggcatcatccagctggctagcttgtgaggtaacttgttcatttactttgtgtagctcattctccacagagctcttagtaacttgtgaattcttgatatattgggcaatctgacctattttgtcgataggatcctcacat

SEQ ID NO: 5274 - DNA, 430 bp, Oryza sativa
  unsure (1)..(430): unsure at all n locations
gccatcccttgngatatgacgcgggctcaaagtctggtggtgggagcaacatttcagcagaactgcgcttgccgttgattggttccaaaggctcaaacagcgccttcctcttctcagataagttagcttttggatctggatgaacatcgtcgtcagtacttactgcatttgcatcatctattttcatggcctcttcatgagcctgattgttcagttgttcatcagcagcctctttgttaagttcttgttgcaagctccggccattggctggaacatacatattgttagtcagattcaagagtcagtgcacttctctagctaaaatctaatgcatacaggtgaacactataactacatgattatatggaagttctttaatttcagagtgtgttctgctatcatgacagcctgataacttgttagcatacat

SEQ ID NO: 5275 - DNA, 372 bp, Oryza sativa
cagaaacaatccagcagctctaggaacttagggcgcacctgcttccaaatcgattcatactatgagctgaagccatacatcgagccaactcatcaatgatgcaaataagtgccaccttagctgaccaagaaaccagaaaggagacttgggacaagggttgcaacatcacttgtgcagacccaaatgcaacagaagcggattcatgaagaaaccgaagatactgccaccatacattctgggaatgcgccatttaaaggtatgaccggcacactccacaaagtcacaagctgccgttgctgctcaagaactaccgagtgccacaagcacaatgccgtcgcctcaattcaacttccctgcaggtataacatatga

SEQ ID NO: 5276 - DNA, 252 bp, Oryza sativa
tccaactatgaaccttactcatagatgtagatagtcaataatatatatcacggttctctccttattttttcccacctgggttttccgaggaagcttatgtgatgtgattaacataactatttctaagattatctttacagatatctacaacactaataatcaatgatcaaagctggattccaacaaaggggagtgctatgaaatatttgcgtgatctcatctatctatatggatagagcaaccaataaatct

SEQ ID NO: 5277 - DNA, 385 bp, Oryza sativa
agcttcgcagaaccctcattgatggcggcagtgcactcaatatcctcttcgccaagactttggatgatatgcagatccctcgctccgagttaaaaccaagcaatgcgccttttcatggagtaattccaggattatccgcaactccactcggccagatcactctcccggtcacttttggtactcgggaaaacttccgcacagagaatatcagctttgaagttgccgatttcgagacagcataccatgccatactcggacgcccggcgttagccaagttcatggccgtcccgcactacacatacatgatgatgaagatgcctggtccccgaggagtcctaaccctacggagcgacatcaagcaagctgtcacatgcgacaaggagag

SEQ ID NO: 5278 - DNA, 131 bp, Oryza sativa
ccacgtgaaatcagataactatacactaactatcaggaggaaacgcaccgcaacaaaacctaatgaaattataagaaatcttctacaaccacaaaacatagaggtaactcactatatataaataagcaaaa

SEQ ID NO: 5279 - DNA, 303 bp, Oryza sativa
  unsure (1)..(303): unsure at all n locations
cactccggccggcgagcgcaatcttggtcacaatcctcttgctatgctttgatgttactctaccatggcaaccgcaggccgatgaggcgagggcagcaagagcatcactggaagcagaatcctggagtatctggcgaggaggcgtgtatataccctagcgcggtgttctcggcgaccgaaagcggaagctgcgcccgcggctgggcattaagatcgagggcgaccatctgaacgtcattagaaccccattccccgcgaccganggaacacgccgcggcagggacaaagtccaccgcggccgtg

SEQ ID NO: 5280 - DNA, 218 bp, Oryza sativa
accagaaaaactcttggctggtggtttgtgatctaaaagcctcagaactttttattgccactcccatacagacaacaagattgccattcgtagctgttttcccaatgtgttctttgtaagaacaggctctgagtaacaaataaacggaattatttaaatgaagacagcccttcaagtgcacacacaagttgagatgtgacatgatagataagtgactt

SEQ ID NO: 5281 - DNA, 419 bp, Oryza sativa
  unsure (1)..(419): unsure at all n locations
cgactacccaatccttaagcacactgactaggggtgttctttntattaagntctaatcctataagaagcagtcgaggaccgcatcagtcacattaaactaagtctaatcctgcataacataaaacaacacatggcgagactcagtacattaatcaaattaatgtactggcaagagcaccatcgaacctacatacgtgaaagctttaagtgaatggaaggctatttgtggtctcaattttcagcatanagcatattttagttcacaaactatttgcaacgcaatttaagcaaatgatttaggcaatatataaagcatattaatcatggcatgatatcaacataaatagatagacatcattcccttacaacataaggggaagtaaggcaattatcacatataccaatctcatcatcatttc

SEQ ID NO: 5282 - DNA, 411 bp, Oryza sativa
  unsure (1)..(411): unsure at all n locations
agcttatcataaagggcttcgacaaggggttttattcgttctttgagcaaaaagataaagatcggatagattcgaaccgcaattgcaaaggtaatcactactatgccagcccaaatcatgatcttcaccaacttggatgtggttctctcgcgaaaatcgcgagttgcagagatgagaaccatgataagcaagatcccgaataagaaaacagaaaccgaggaaaccacaagagtgaagactagtagagtctcgtcttttgtcattctttgctcctttttcactcaatgattcattcgaatttcccgaccaaaaattctatatgtctattcatagggcctcgctgctaagtgctacaagatctagtgcactggaactcgtggttatggacnccaatcctctatatggaacatt

SEQ ID NO: 5283 - DNA, 304 bp, Oryza sativa
  unsure (1)..(304): unsure at all n locations
attgggatctcttgatcgaattccctgaacgctacttatgggcgtgcgctcacaggataccaacacggatttgctaacaaaaaggggaaatcgtagacactttttcctgtcgcgtaaaaaaaaagcgttacgccagaacaatagaagttgggatacatttatttcttgtgagcaacctcttttggattcttaagaacaccccttgccataagatacaccctgccttggggtctttattatattatttccttcgagggattnttaagatcgttcacgctatatttaagctaatttggctcttact

SEQ ID NO: 5284 - DNA, 413 bp, Oryza sativa
  unsure (1)..(413): unsure at all n locations
agctttagacaatttaaaaacatgggtgggaaaatcacgattttcaaaacctggtgggtgtttgacataaacttcctcctatataaaaccatttagaaaagcacttttcacatccatttgatacaatattaaacctttttgagcagcanaagccaacaaaagtctaattgcctcaattctagcaacaggagcacaagtttcatcacaatccaaaccctcaacttgagtaaaaccttgagcaacaagtctagctttatttctcacaatcaaaccatccgcattttgtttattnttgaaaacccacttggttccaataatattatgtccagaaaggtggtcaactaaagtccaaactttgtttctctcacaattntcaagttcttcatacatggcgttaatccacgattcatcag

SEQ ID NO: 5285 - DNA, 433 bp, Oryza sativa
  unsure (1)..(433): unsure at all n locations
catattttcactcagacaaatttctaccaggagtattactaaagcaagaactacagaaaaatagtttatgtcaacaaacaagaatgtactgcatcaacacaagatgaaagatacagtgaaaataccacaaaaaaagagagggagagggagaaaacatgtactatgtccatgtatctgtgatggaataccacagacgcaaaactcacatacaaatggttcaacatggactnttgtttaaaagcttcctgattcatgagatattatgaaatcctaacaagaaggattaaaatatgggttttattgtggtttgtaactgcttttggaaaagatcaactctttctggcataataacatcatttgccgcatatattgcctgcttagtagctaatcagacnatatttacagcctgggcaggcttcactatagctaatat

SEQ ID NO: 5286 - DNA, 366 bp, Oryza sativa
  unsure (1)..(366): unsure at all n locations
agctttctagttatgaatcgggtatagaacccatggggggggcttggttacaattccgaatacgctattacatgtttgcgctagtttttgttggttttgatgtggaaacggtctttctctacccttgggcaatgagtttcgacgtattgggtatatccgtttttatcgaagctttcattttcgtgcttatcctagntgttggtttagtttatgcatggcgaaaaggagccttggaatggtcttaactgaatattctgacaaaaaaaaaaaagaaggaaaagattccattaagacagttatgagtttgattgagtttcccctactggaccaaacaagttccaattccgttatttcaactacactaaa

SEQ ID NO: 5287 - DNA, 423 bp, Oryza sativa
  unsure (1)..(423): unsure at all n locations
ctggatcttggaagtttctctttcacggcattgggatcgttttatcgatttccttgatcgctacttatgggcgtgcgctcaaaggatacaaacagggattcgcaaacaaaaaggggaattcctagtcactttatcctgtcgcgtaaaataaaggctttacgccagaacaatagaggttgggatacatctatctcttctgagcaacctcttttggattcttaagaccacccttgcagtaggataccgtctgctttgggttctttattatattatctccttcgagggaattttaggatcgttcaggctatatttagtctattttggctttacttgctccttttctcagggaagtggttaacgacctcanaagatagaggagagcgccaggcgcagaatttccgaatacttctaccgggaatgctc

SEQ ID NO: 5288 - DNA, 317 bp, Oryza sativa
acaaatgttgtacatttgaataactggtttcaaaagaaattaaaagaaattattaaatccacatgctatatttattttattgcagacagattaaataaaacagtattgtaaaactcttgctggtcaatgagccattattacagcaatagtatgtcagtactaataacactggaataaatcttgaatgagaaccattaaaagagattatgaaatgcatgtgccattagcttggttaattaaacagaaagggaggagaacagttctacttttccatatttttagagggctttatgggaaccattggcatacctaggtca

SEQ ID NO: 5289 - DNA, 399 bp, Oryza sativa
actgatgctcctgcagaacaacctgaaggtcccgccgtggcggaccatataacggttaaaacaacttaataacgcacatattgtttgagcaccacaatacattgcaatatattctaaggacactaatgaaactatcccacgaacccacatcgtgtaccactaacaatatggtgacaccaggaattgcaatacctgctccaaaggtgtaagtgttatagcctaccttggagacccgatagcattgggcgcaactgcttacacgtaatgccaaaattcatgtggacctaatgaattccgattgggatggtacactatcccgcactctctaatgacgatatctgaccactgggctgccgtgggaccttattaatggccaagacactatggatcaaatactcc

SEQ ID NO: 5290 - DNA, 423 bp, Oryza sativa
gaaagtgtaagtggcatataccttggtatcttagttgattctctgctcaacatggttttgggaaacataagttcaatgctagaaatttttgagaagcagaaatttgattcatgatgaaaagctccaatgcttcagcttttgtagcaagtgattgtggctagagaatgctcgtgagtactagatggttggtgaagcaacatgtttgagaaacacaaacaatcctactttagaagacacaagtagaactttgtattgattgactgcttgatcatcgtggatgcagtagagaatgcttgtgagtactatgcagttggtgaatcaaaatatgctaaaaaactcaagtaaaacagatggcacagatcacaatcaaagtccaccgaagagaactcgtgtaagtgtattgattgactacatgatcatcat

SEQ ID NO: 5291 - DNA, 375 bp, Oryza sativa
agcttgacaacacgcttggattccaagatgtgattgactaagggagcagagatctgttatgtgtttgaaggtggattcctattcttaagtcgaatgctagtacgctaccacgaaatttccaatacaattaaccactcccgatggagcatattataattctctatggtggaatttggggttgttgataggtgatacagaagagtagggttcacaggagaagactatacacactaaattggtttacaagaaatatacaaactctactgttgcgagatataagtgaatctagatatttctttaacttccatctagtgaaaccaaacaggagagaaatttgtttgtaagagatttgtgcgacaattttacacatataac

SEQ ID NO: 5292 - DNA, 360 bp, Oryza sativa
  unsure (1)..(360): unsure at all n locations
aataataatacttgctatgacctacatacatttacatcgggtgatgatccaacaaagagtgtgctgcaaagagcatttttctcattgggtgcttgtatcaatgctnttgtgcattgtcgacctgttctatgcatagatggaacttttatgactggctaataccgaggtcagatattgacagccattgggtgtgatgggaacaaccaggttctacctatggcttttgcatttgtagagagtgagaacactgaaagctggtactggttcctatagagagtgcacattgcattggtgcgaatgaggcgcacacgttgccttatacatgatcgccatgcgggtatgttgccggctattgactac

SEQ ID NO: 5293 - DNA, 430 bp, Oryza sativa
  unsure (1)..(430): unsure at all n locations
agcttgtcattntggagtaccttttgtcacatcaatcacctccaattcaaaattttctccatcatacccccaactacctaccatacattacttaatagagggcacctatatntaattttcctaaaccataatctttgccaaataacctagaacgacaactatattgggacggaggtagtatttgttacatgacatggtatgattgaagctgttattctttcagcattgtttttctaagtagctgattaaattacctttttacactgtgcagactggagcttgtgattgcgtttctgtatatggttntagttntggggctggtgaaaggatcttgttttctcctgaaccttcattnttttctatacctctggtggaggtaaacaaagtcattaccgcacngcattatgaatccttatatntatatatatat

SEQ ID NO: 5294 - DNA, 339 bp, Oryza sativa
ttaatggcttttcgctcccatcgaacggctatccgctgcttaactttcttcaacttgaattgatgttgctcaaagtacgcacctggagagatggcgttcgctagatcatctgggattaaagcttggatatttgtcaatcgtgcctggattgaaccacaatcggccaccagactggtcagtgatgaccctagccgatgacatatgtcttcaaggaattttttgacatcttcatctagaggggctagaggtttgcttgatgttcttcttttgcttctcataaagtaatcttgtgtccaagaaataatcggtagatctgccgagaaattgaacagtgatatc

SEQ ID NO: 5295 - DNA, 344 bp, Oryza sativa
ctcactctgtccattatatatgaattcttggatgatgtacgtatatcatatgctttgcgggatattaactcgtctattccaatgactagttcatgctagctctgtccatggagagcaggaaacatctatctcgtacccgagagcgtgagcaatcacacgttgtgcgccccgtgtcgtcactcgtcacgtcgagaagctacctggcgctcgcaatggccaccaacaccggcttaacaatccaaggagtgcacgcgcgccgctacatactccgggtcggcaataggggtgcatggcggcgtcgacgtgcctataatgatgcccacttcaacatgcacgaccggggg

SEQ ID NO: 5296 - DNA, 325 bp, Oryza sativa
actcggcgtacaattgatgttcccgcgactttcccaacacccgactgttatggtgctgatggtcctcctctgattgtgagtatatcagaatgtgaccgatgaaaaccacaacgaacttatccaagtattccatgaacactttgttcatcaagttcatgaagaatgcacgagcattggtcaagccgaacgacatcaccctgaattcatacagcccatatcgcgtattgaatgcgcgcttctgaatatcctcttcacgaatacgtagttggggatatccggaacggagatcaatcttggagaaacacgggcacccttgagttgatcc

SEQ ID NO: 5297 - DNA, 430 bp, Oryza sativa
  unsure (1)..(430): unsure at all n locations
atggtctgcctgcatgcaagctttcagcctcttttggcttaaacccaaactatttcctcattacgtcagcaatcacattggttcacagtacgtgctgatctaccccttgtgactattgctgcatgggctcgaactgaccgtattgaggcgcaaactgagggtgagccaatcccnctggctgatattgggcttgcggggaaggaggctgatattgataattcaagttacccccttggtaattatgaaggttcggctggatattacgtaccaaatgctcatgaacaacttgatgtattactgtgccatctgactgtacatggtgaaccaagtgttctgggacaacttgatttacaaattgttgtacaggctgaccaccaggcgttgcaaacacggccgatgcgcctaatgaaccttggtgctggatcggctg

SEQ ID NO: 5298 - DNA, 411 bp, Oryza sativa
  unsure (1)..(411): unsure at all n locations
gaacnaagccaaaaggaaaccaacggcaggttatggcacaaacagaatatttggatntggacaaatccataccaaacgtaattcattacaattataaagcatatccagggctatacaactccgatcacccaaacttaagactagtctctgactatgaccatagactttttgatgcagccacgtacctaggcgtccactaggcatatatcgcaagaagatagctttgtatgctaaacctttcggatccaaggtggaacataaggtgatgactctaataagatcgcgatgacggatgaatttcaaggctccacactctgcaataaagcttgatggacctccgagctatggagattgaaaccttaaaactactacatcacctaaactccaggtgccttgcaacatctcaaggac

SEQ ID NO: 5299 - DNA, 461 bp, Oryza sativa
  unsure (1)..(461): unsure at all n locations
acgcttgcaaaggataatatgtggtgctctgcccctccaacaacggccctagttagctaggatcatttccttgctatactatctgtctatctatttcactatttgatgcatggctagccagttgccaatgcatctctttntgcagctagtagtaatagtggcaatggtgtcggcatgcaaacatgtacctgcagcctgcaggttgaaaagtttccacgcactgcatggccttcgatgcatttcctaccttttctggtccccatatggagcgccattgttgatgctgtgacctcacttgagctggtcagattgtctctagctagtgaacaggttagggctccactagcctttaatttgtgtcatgagtcatgaggcagaggaaatgggagctgatgaggaataacgtgtatggtcttcatgcaacggataaggccatntatactgcactgatttatcattca

SEQ ID NO: 5300 - DNA, 305 bp, Oryza sativa
ccgatatctatgtcacacttcaaatactccaccccactattctctgtagatatcccactattcactatattggtgggaggttgaaggggatgaatttttgtgtctattttccacgaaaaacagaaaattcataaaaggaagtgaaaaatactaatcgcttattattaaattagtaatacttattgtacaagatttttctctaatatctcgttcatttttgcagcgatggatcaaagttggatgtatgggaaaactgttaaacattataccacggagtattcaaatggtgcattaatcttataaat

SEQ ID NO: 5301 - DNA, 324 bp, Oryza sativa
  unsure (1)..(324): unsure at all n locations
gatgcccaacttatgtgactaataacanacattcaactggaaaaagttagacattgtatgctatgcccaaatatattgtatagctcctaccattaaaacgtaaaacttactctctgattggcgtccaatgattctttctgagctaactcattaagcttctgaagatgccgtagtttaaccctcagcctctcaatctcaagctttagatactcctgcttaacagaagctacatataatggtatgagaaacatgaaatttcagccatgtgcatattactttgaaaaagaatatgtacatcatgttgtcttgaatggagtaatacct

SEQ ID NO: 5302 - DNA, 118 bp, Oryza sativa
aatcttccttctctgcagctactgacaatagtaggaccagatgcaggacattgtattggcaaactggcgttgagctcgactataaacctcactgaactcaactagacatgaacaactt

SEQ ID NO: 5303 - DNA, 349 bp, Oryza sativa
  unsure (1)..(349): unsure at all n locations
agagactttttattttatgcaaatagctaagaaaaattttctatctattttagaactttgataatggcctcatgtatggctggacaacatttaagcaacaaagaaaagaaaaataattaaccagtaaagtgaaaaaaattaatagtttagaaataaaatgaaccaaaaatagtttacggttaagtgatccaatgaaatagttcagngtaaattagatttttttctataattaacatggtattatcttcataagaattctacaacaatagaaagtcaaatcgacatctcgntattccaaccgttgaagctacggttacatgagcacagaaaaaattagaaaacaacctat

SEQ ID NO: 5304 - DNA, 413 bp, Oryza sativa
  unsure (1)..(413): unsure at all n locations
tatgcttctaagtctgcatgtgatttgcacgaatcagatataccaatgttaataactcttagtgtatccgcggcggatgaatcttatgaaatacgccttgttcgaacaaaagcgggaggtagataggtggtagttataacgagttcttctgcgagctgcttcttcctttggatttcttcatcggcatctggtcgccgctgtctagtcctgctttgatccgctacttgcgccgtccattttttaatatagagagagagagaccacggggatgacaaacataggaacagaaatgagaggagatcaacagcctatggctggtcaaaccgatatagttcgactcccagnttgatgttgtggctctcacggattcatcgttgtgttcaagggttattatgtcctattggatctcttaa

SEQ ID NO: 5305 - DNA, 244 bp, Oryza sativa
taataggttcataagcacacgccaatggaaaaacatgagaccattattgatgtgcgcctgcctttcttccagtgatcgatggatcaactggaaaggagaaagcccgctttgaccctaaccatatgagatccatggctctgcaactctgcacgaaattgttctccttgtgcctacacatatgcatcgacactaactggctacaaggtttctgatccatagcctcttcttttcagactagcctatt

SEQ ID NO: 5306 - DNA, 328 bp, Oryza sativa
  unsure (1)..(328): unsure at all n locations
acagtgacttttgaacatgaccaacacctagaacaagatgctccccattgttctcttttgaacatacagaatttgtggccttttcttcatcagaatttgcgttagtgttatcaagtgtttgggcattatagtggtgaaaagatgcccgcgataaaatacgtggcaccaagtcctctggaatacagtaggatgtgaaataatcttgccatcctcttcgatgaacggagctagtataaggaaaaatggaaaagataaagaagtgtttccaattntatcaactctctaacacatatctgaagacatataccattatattaatttaattaaa

SEQ ID NO: 5307 - DNA, 486 bp, Oryza sativa
  unsure (1)..(486): unsure at all n locations
taccatgtactantcctgtctcaaatattacaagtttttattggatggaatatattttagtacaacaatttaaacaaacttatccaacattgttatatgtatctaatccgaacgaagggagtagcttgagctatgctggagtaaaatcccaacacgaaactcacttctttacatttagggtgtgtccatttggattggtttggaaatctctccccttcacacgtaaaacaaaacgacaaaataatacataattaattaagtattaacacaatagtttaaaaattaaattgatatgattatttacagcatctttttctaaagaactttcttaaataaacattatgtttagtagttcaggattcgtgcgtgtgggtaatgagagacatgatgttgggaaccttgagttaagaacacattctaggacaaataanagagtgatactattctaaactctcaggtgacatccactcattgttgaagtcactc

SEQ ID NO: 5308 - DNA, 419 bp, Oryza sativa
agcttcatacatctctcaagtttaaaggttagtatagtttctagagtatagtggaatagaaatagaatagaatctttagtcctcggattcttcagaagaatccgagtatggctctagtagctcttccttcttttgtaagacttgcacttttattagaatattttctttatactactttggtattggattactttccgagtatatgaataccaactttattatatgtccgagctatatttattataatgctagcttatctgggacatgcaatattgtgggtataatgattgtatttacgatgactctatgtcatgacaatgatattagagtagtatttggtaatttaagcgtggtggttagattactggatatcattattcggtgttatatgctgcacaagcgaggtgggccgctgatgg

SEQ ID NO: 5309 - DNA, 381 bp, Oryza sativa
tggagcctcaccaatgaaaaaaacatgagagatatgcttatagtaattcggtcatttgcagctctagaatatattcccttggtgggaagccttcaatttttgaaaagcactaagtagtatctcgaaaggtatacctatccattagtaacattcaaaaatttgcttgtacgctgtgatcgattcaaacataattgctcctctatagcatctgttgcaacatgctgagcttgatgtcaaaaaggaggctgcttgggcaatatctaatgccacatctggtgggacattaatcagatagagtatgaacagctcgatgacaaatatttatatgtgcgtttgctcatttctgtgcactaaattagcaacttcttaccacaccatcat

SEQ ID NO: 5310 - DNA, 338 bp, Oryza sativa
atgcaagcttccctggatctgggaagagtctctttctctgtattgggatcgattgatcgattttcttgatcgctacttatgggcgcgcgctcaaaggatacaaacaaggattcgcaaacaaaaaggggaattccgagtcactttttcctgtcgcgtaaaaaaaaagctttacgcgagagcaatataagttgggatacatctatctcttctgagcaacctctcttggattcttaagaccacccttgcagtacgataccgtctgctttgggttctttattatattatctccttccagggagttttaagatcgttcacgctatatttagtctattttggct

SEQ ID NO: 5311 - DNA, 448 bp, Oryza sativa
  unsure (1)..(448): unsure at all n locations
tttctttctgacaaanattcaaaagaattatgcattttactttgaatttataaacataagcgccaacacatggataagaatttgcttgagtaggcgaaaatgtgggagcaccttatggtaccttataggtacaatttttgcctacttaatggcatttatttgaagcttattatcattttcccactaaattagttatgctgaatcaccatcggtgtactgacatgtggtgttntataaaatattatacggtaaaatgttacaacttgtatgcatagttntctatagcatgaaggtggatatgatatcaaaaagctaatggtacttcaaacagtaaccattagccataaataatattacttgacaatgnaaatctgatgcattgaaatattttgtaagtganaaaaaaagtaagttatgaggtaatggacgtagttaacttagtgtcagc

SEQ ID NO: 5312 - DNA, 128 bp, Oryza sativa
gccgacatgatgcagatataaacccatatttgctcttatgccaataccgataactataaaaaacatatcgactattctcttgcgtggaagcttaatatgggattaattgcatttgggcgcttcccaca

SEQ ID NO: 5313 - DNA, 313 bp, Oryza sativa
catgcaggcatggatgaagatggcaatatgaactatttattggtgtccaatgatgccagctgattccatataacttccaaactctcctcaagaatatccaagctggaagagaaaaaccaccctataagaaatgggagaatacaacgacctcgtgcgtgtccggggtcgggaatgcctcgccatacactggacgccagccgatgatctcctttgtcagaagaacaccgagcgccaccatctctttcaagtttcctccgcttcatccgagggagcccattgactctctaagcattctcttctctctgccatggat

SEQ ID NO: 5314 - DNA, 334 bp, Oryza sativa
cttacaatatgagacatattgatgacaataagatatattcacactcttatcactctcttatgtgcccttcaagatttgcggattccacccgatggattcctctcttctaatgctttaatattaaaacctatctgtaccttcattaatacagtctgaacaatgcttcttgatcttccaaaaacaatgatgataggcacctttcttgtaccaattttttctttttgagattgttggttttcaatattactaataagatgataatatacttttcttcgtttaaaaatatcttctcttaccgattctgaaagagtgttgactgctctgtgattatgtg

SEQ ID NO: 5315 - DNA, 469 bp, Oryza sativa
  unsure (1)..(469): unsure at all n locations
atcctctgagttgtctgcatcatgcaagcttgctcacttaccgatcaaggtggttggagtttgatntgtgcacgcctaanaaggcctatgtttatgagaggatttgatccttctatgtggcatgaggtaaccctgggtcggctggggaaaggctttgtcgcgaacctctgacaccggccagtgtctagagtaagttcgtgtcttgtgggtaaagtgtacccctctgcagaggttaactaactgttcgaacagccgtgcccacggtcatgggcggatgtgaggtggttcccgctgcgtagatttgtttgcctgtgctttgtgaaaagttgttgtggtgtgggaatcgtaaccagaatcagcctatgtggcagatggacgacctgagtggtcacaaacgaatctgtgtgattcgggatgtctgcgggcatcatagactatgctttccgagtggaagcggattgttgtgctg

SEQ ID NO: 5316 - DNA, 412 bp, Oryza sativa
tggaattgcgactaaattggagagatgctacaagttcaaagttttctataataagaagcagtatgaggcgagagaaaaccgatccaatgatgaaaaggggatctagccgatggtaacttacctcagcgtattctgctgatgatgccgcagatgggctggcggaggttgacatcgtcgcaggcggagatctggtcggagatgaagtcacctggggatcgcctagcgcgtcggaggaatcgctggagagagagagggtaaagtttcactgaaccggggaaaacggaagtcacggtgtgagatttctcggggataacggatagtatttgaagcgctagagtaacaatcgagaaaacggcagagtgcgagacttgcttcgagtcgataaacggcaaatcctgaacattaccaaata

SEQ ID NO: 5317 - DNA, 422 bp, Oryza sativa
  unsure (1)..(422): unsure at all n locations
agcttangaaacatgccatggataatcttcatctgctcataaacattcgaacagggattaatattatttattaatcacgaagtactacttgacattgacgataaccctactacatactccctccgtcccaaaaaaaaaggcaaacccgcggtttgcgtgccaacgtttgactgtccgtcttatatgaaatttttttataattagtattttcattgttgttagatgataaaacatgatgaatactttatgcgtgacttatctttttaatttttttcataatttttttaaataagacggacggtcaaacattggacatggaaaccagggtttgtcttttttttttgggacagagggagtagtacaatattatacttatcgatcttgaactagtgaatgtgtacaaagaaagtggcacccaccct

SEQ ID NO: 5318 - DNA, 491 bp, Oryza sativa
  unsure (1)..(491): unsure at all n locations
ctagcttacatggtgtggcaagaaagctgggttgtaagccatggaatctattttcagcttccaagccacgtgtattgaacacgttaattgactgcaaaaccacgcagatttgtacaatataacaaatcacatgtactaccaaatcatgatttgatgactaaaaatcattttgcggtgaataatatgtagacacagacacattaactcaagttgaatgataccatggaattaacaagaacaaattatagtcaagcatatctagttattagaaaaggctagaaaatcatgtacaacaattcagcatcaacccaagtgggctccataacatcagatcacattgaataaaacatatttgtggtagcaaatgttcgtattcaacaacagcaattggtagtagcaaggtggaagagaacaacacttaccttnnttgtaatgggatnnttttggccaatggacacatctatgtagcttcatatctgcacatagcaata

SEQ ID NO: 5319 - DNA, 434 bp, Oryza sativa
  unsure (1)..(434): unsure at all n locations
gcttgacgcctttggatactccggntcnggccgctatggagcgtaacaccctactcctgtgtttgggattatggatgagttttacaaaggtttcttcactctagaaagcgcgctcacttactctcttctggagttcaggttttctgggcgctatccccctgtctcagtgggcagggtcctccttttatagctcaaggggataccacaagcgcagcctctacctaccctctatcggagggggatcccgctctactttttctgggctttaaaccgtgccttctcccggaagctaagcaacaaccggttctcgagtggaactcggcgccgctccccgcctgacacggnggacagccctgtcattccctcataaatgaacgatgacttgcgacagaccttcctcaagtgacgctcggacgtgacgggtcatacccacc

SEQ ID NO: 5320 - DNA, 419 bp, Oryza sativa
  unsure (1)..(419): unsure at all n locations
tttcctgtacctaacattattcaagctcgagaacaattgcgtgtaaccaaaaccagatcctcctccccgaacagttcgagttgctcatcggagatggcattaactaatacaagaatagaagactccgatgaatgagcaccaacatccaaaaaagtcgaggaagaaaccaaagcactagacttagaatcaacgttacgagaagagaatattcatctcatgtgttctgagttctggtgaaagcgaatccaaagcaaagtagacatgcaacggactcctgatagctggactctcatctcccaaatggcatgcaaaaaccttccataagtaacgagatactccagattgtgttaattaacatcataagacgacacacagatccaaggcactcaaaanttgtaaacctaaaagacggcaccaag

SEQ ID NO: 5321 - DNA, 444 bp, Oryza sativa
  unsure (1)..(444): unsure at all n locations
agcttaagttntaatacctaataggcattatccttctcaaacgtgacctatataataattgtctcaatattttaagtgtaaattgaagtacattgattaacacatattctaccagtttatattgagtattatagtgaactcggtaccaaacaaataattttattttttaatataatatactgatgtacaccctccatcccaaaataagtgcagttttgtattattcacgttcaacgtttgaccactcgtcttatttaaaatttttttatgattagtatttttattgctattagatgataaaacatgaatagtattttatgtgtgactaaatattttcaattntttcacaaatttttcaaataagacggacggtcaaacgttggacacagatatctacggctgctatttatttgggacggaggtagtattatctagatatcgagt

SEQ ID NO: 5322 - DNA, 236 bp, Oryza sativa
tcactgacagcgagacggctgttcccggatcagccgtaccagccgcgcatgaaagccggcatgcacgcaagagtggctggtgagagctcgctcgctgcgacctaacgctgaagccaagcgcgagctcaaataggcgggagaatcaaatcctcgccgacacggtggtggcagcgaccgcggccggaaatattcgcagtatatttcttgacactcccaggacccaactgcgcggacta

SEQ ID NO: 5323 - DNA, 404 bp, Oryza sativa
agtaattaatgtataattaattaaatataaattattcttaatttgttaataaattgatataattttctaaatcaacttttctacagttttttaaaataaatgtatcacttagcagttcgaaaaacatgcgcgtgaaaaataagtggtttatcttgtaaatcatcttgtactgaacacacagattctgagaaacaacaaataaggagttagactatgagaatctgaaaaggctgagaaatctagcttctagctcttagctaactttttaaattatattattacagttcttataatataaaaaaaatctaaactatttaatcatttggatatttttaaagaagctctctaaacagcaactggcaccatcgtttggttatttggggaatagtcaaataacatattta

SEQ ID NO: 5324 - DNA, 424 bp, Oryza sativa
  unsure (1)..(424): unsure at all n locations
gccttgacatcaggggagtattcaagcatactctttctatattcacagaaaangggtctctgactagagcatccaccacttcgtgctttgaagaaacctgcggttaaagctcagaaaacagaaagcatatggcgaaacatatagcatccacttctgcagactcaattatgcagtcatataggtgtacatataacgctaaaaggccaacctgcataagcattcttctgagggactcaataagctcagcagggtgatctttgccatctccctcagcacgaacacttgccggagtagcattaagaacccatacctctaggggacacaatatacacaataaacttagacgacagagtagaaatatcacccataattgtcacactaataccactcagaagagtactcatgaataccctgacacgacgtg

SEQ ID NO: 5325 - DNA, 424 bp, Oryza sativa
  unsure (1)..(424): unsure at all n locations
ttcttacctatctggaactcgaatcttgtccataagaaagcacaagaaagtattgtcttgtgggtagacatggaattctttattctgtggaagtcaagtggaacctggcccacccattaaattgatcattccaactatgagagatgatgtgatattggacaaaggtatcttcattggggaacactcgtttcattttctttgagaaaagcatttgatcctgaattcctcctagcctacatttgcaaagtgtagcagagatgctgccatccacaataaatatagtggtgggagtgtattgtagcatctttgtttgcatgctctgcgtatctggttattggtttccgccgtgtttagttccacagattttcttcaaactttaactttttctcaccatanaatttttctcacacacaactttaacttt

SEQ ID NO: 5326 - DNA, 413 bp, Oryza sativa
  unsure (1)..(413): unsure at all n locations
tttcttcattntgaaagagatatcatgattgttttatagagagacagagattccttgtgtccaattcttctcatttaagtatgatagcgtcttggtactttctttactcactgaagtcttgtcttcacaggccggaagtctgaaagggaagttcattgatgcaacgccttttgcaagctcagttaaagagagatcaaattccattgtggatgaactgggacccatgcttgcttcttatggatttaattaccatggaacagaaattctatatagtggagtttctggcactgagatgaaatgtgagattttccttggacctgtatactatcaacgccttcgtcatatggtctcagacacatttcaggtggcaatcattatttgtgaccatctattatgtatagtaaagtcgtatc

SEQ ID NO: 5327 - DNA, 291 bp, Oryza sativa
actgagtatattacgccttacccgcgttccgatcttgtagagtagataattggattttgagcgagctatttttctaatggacaaaggacatggaggattcctaatcctttcttcttccggattttccaaacacaaaacagctcctttgattcgcactctccaatgagagtggaagaaattcgacttttatattatatcttaatacaattccatgttatgatcaaagcatcttttgtagtctatattattcgcatgcctagaatcctaccacgagaatatcccccattttta

SEQ ID NO: 5328 - DNA, 320 bp, Oryza sativa
  unsure (1)..(320): unsure at all n locations
caatcacttggcgtccgtacgatgcatcgactatggatacttcatatgccccgctttctttacgcagaatctttcttactacacactggtgacctttgcattatagaccgtattgtgtctcttgctaccatcaggatagatctgtgcccttcctcgggtatctcccacatatatgggatatttaaagacatgaacgtctttcttcatatcanggtcggtggaaagaatggtagagacgattttactatatctcttaccgggaacagggcctattacaagaatattttattattgggacgatacctctgaaagagagattc

SEQ ID NO: 5329 - DNA, 397 bp, Oryza sativa
  unsure (1)..(397): unsure at all n locations
atctttatcgtttgtcaccttttataatgcacaccaactccgaaaaagttgagtaagagcggtataaaaggattntaaggtattgggcacttgatcacgcacactntggcctaagcaaaaaaaatgcacaagtccctaaaagaacgtgactagccacacatgaaaatatgggctacagggtgaaaacgttcatggaaattcccgatcgaccgagcgtcatttccgtataaagggtaccgtttctgaccgtaccgctttttggctattattaaattntgttttttctaatttctttctgcatcatattaatgttgacactgagtagcttaaatgataaatatggtcaattattggccattcgagcatcatttccgaagagatgctatcgattccaatc

SEQ ID NO: 5330 - DNA, 267 bp, Oryza sativa
gctatctttgagaacccctccataaaccttctgtaggatcccgccaagcctagaaaactccgaatttcgggcaccgacttgggtgccttccatcccggaacgggctctactttaacagggtccactgctactccaccggctaagaatacgacctatagaagcgacatccttcaacaagaatatacacttgctggaatttgcgtataacctgtgctttcgaagagtctggagtaccaaacgtaagtgctccacatggtcctcctcatc

SEQ ID NO: 5331 - DNA, 365 bp, Oryza sativa
  unsure (1)..(365): unsure at all n locations
gatctctactgcgatcgagcctgttctcacccggttgagctagcttgcccccacaagatacaattactttacggnttcaaacggtgggcctcgccaagccaggcctcaagctcaacctgggcgttcggtttaaaccgacaattcggttcggtttattcggttgctataaaattcggtttacaggcttcaccacccgatcggttctccaaaaaactgaaaaccgcaaaattcggtttcggttttttaattttggttttcggttttagccgaattaaccaaaagttactaccaccagccacaacaatacagaattacataataatgaacacaagcaacagcatatatgatattatagatatatcaaa

SEQ ID NO: 5332 - DNA, 439 bp, Oryza sativa
gctgatgggcttcaccacaaagggctacttgagaggtctagtgatactattgagttcatagacccaatgttctccggaatttttccactcaagcgattccatgataaatttaaattagacaatctatcgagagatgttatttcctctggaattccaccggctatgcgatcgagcgataagtcgattccaaccatatcaacgacctcatgtgatccatacttgagtatttgatgctccatttctagggaaaatgtttcaaatgactcatcaaatgccacggtcgagattgaatcacccacagcttttagagtcatttcattaatatgtgacaaagatagaggaattaaaccttatatattattgtctgctaaaatcacgcttatgaagttgtgtaagaagtgtgatgttgactggaatatcttcattgaacatgttatga

SEQ ID NO: 5333 - DNA, 234 bp, Oryza sativa
gcatgggtacttggtccgagacacccactgaggctgcctctcttaacccgcgcgccccaatatcctcagattttgaagctactacgcatgggtaccttccacctgtgggactgttctccagagacactccatggatgccctcagttagtgaagactctctaagagaggctcacattgtagatgccctaagagagtatctccacataaagctacctaacaacgtgataaagcaca

SEQ ID NO: 5334 - DNA, 346 bp, Oryza sativa
  unsure (1)..(346): unsure at all n locations
tcatacgaactctgaatcgaccggggcaagtctntaatggtgggataacctaaagaaacctgtgctttctttttatgtattggtattggttttttataggcttgaagctttgcttgtgtgcttcgcgtagctttcgtctgtccggaggtttccgaagcgcggttcgtggtcgtcgacgaaagtttgaaggccgttctctctgagtaaggtaagtcacgttatccttgaacatatagaatcccagtttataaaagtatggtgctctaaaatattggattatcgctgtatctaaattcccgggttatcacctgtttatctagccatgcctatttacctttgttatgac

SEQ ID NO: 5335 - DNA, 269 bp, Oryza sativa
tttaatttcgttccttttttctgaatatgatgtcaaattttattgttaacaagtggtaattagcttttgggcggaaaacattgttggaggagatgatcagcttatacgaggacggtgcacaagttaacacattttgtttagataatggaataaatattagtacatgttaataatgacacgattgacttggtggagattaatgggttgagttgatgcgtgaacgatcgtgcatttctaacgcgtgaggtgtgattgcatagctacacata

SEQ ID NO: 5336 - DNA, 427 bp, Oryza sativa
ctcagctggaaagcctgaatgagtattaacccccccccccccttatatctatagagtaatcaccccaaccagattgtgtggctgccactctatcaggtttggagttaattaaggccctgatttagttttagaaaagaagcatgctacatgatgatagctcatttggacaggatgatacttctgagacgtcgatcgatactcataccgtcctttactattcccccttagaaaatcatgaagcgaggcttccactccgtcagtttttttggagttaatagggccttaatttagtcttaggaaatcatcatcatgatacaagttttagttaatttcggccctaatgtttaattaactcataagctcgtttgctcttgggctcttatcgttttcctgcttcagaaaacaccgcccccagcgtgatcgccgg

SEQ ID NO: 5337 - DNA, 447 bp, Oryza sativa
  unsure (1)..(447): unsure at all n locations
agcttgatnataagagccttgatcaagtacatacttttgaatgttaactacataagaaaattgatcattatgttgcaatgtagttacatagactggccaagttttgttcttcattaatcatccttgattgtgttcttgcagggcccacaataattttggactgaaatactttggcgctctgaaatttaaaatcctgctcttgatagcttcatgttggacaactagccaacttggaagtgttacaacaaaaggagcagataaaccagcaacagataccaccagttctcccttgaatttcgtgtttttgacgttgtgatctctatctgtttaaattactttcttattaagatcacatatatgatggttttggcaccttctaaatctcagaattagctgggaaggtgtcaaacagcccaccttccatggaagaaaatgcaatctggttga

SEQ ID NO: 5338 - DNA, 225 bp, Oryza sativa
aaagcaagaccgctttacccctaacactcctaccgcacaggcggctatattaacctggaacaagacacctccttggagtcggcgcccatagtctgcgaatatcccgacgcattttcagaagaattaacgagcatgccaccaaaccgggagattgagttcgccatagaactggcaccaggcaccggaccaaatgcaaaaagaccccaccgaatggcagctaatgag

SEQ ID NO: 5339 - DNA, 454 bp, Oryza sativa
  unsure (1)..(454): unsure at all n locations
cgcttgtatagttatctctaaccagctggctaattacaaaagtagtgcatttaagacactccagttcagctgttgttgttgtcacttttttttcttaaggagagtgtataagaataatattacggtgcgtgcgtagtgttgtatgttgagtgtatccctattattcttaagaaatcctttcttgtgaagctaaaaatatcatcatgcaaatttctattcattatcttaaaaaagctacaagtcattattgcttaagtttgttttcagctcttgattcccctacttgtgtccaaggtgctntatcttattcatagtataaactgtctatctcaatcttcatttaaactngaattatttntattacgaatatgtcgtaattaatccagatgtatagttgcaatacttaaactgatggatctggatttaattagcaccaacccattgactgaactga

SEQ ID NO: 5340 - DNA, 450 bp, Oryza sativa
  unsure (1)..(450): unsure at all n locations
tatatgcacatgtccgcagcgatgacatctagctaaggtcaagattaagaatctccatctttgcagacggaacttgtttcaatatctcatccctcacgcgtgcaccggcagataaattcctaacccccataacaacatacacaccccgcatcaccaggactcggcatgtttcagccccaatcccactggaggcacctgcaagaaacatatccatcagcaatgatgccaacagtaattcatgtctgcaatacaatttgattaggattttctttatggcgcattaaattactgtgcatcatccatcacccattgaccaaagggattaatgttgcatctacatcatggatgggaaaatatcatatattttnttactatttaaattctaccaaaggcaattattgtagtccaaatcttccttaactaatttgacattcaggtttctaatactat

SEQ ID NO: 5341 - DNA, 438 bp, Oryza sativa
  unsure (1)..(438): unsure at all n locations
atctatctcttttactcgtctttttctacatattatacaatattgaaaatgtgaacattacaaatctactactgttatttttgctttattataatatcataatgggaggagtaaatttttggaacaatacttagtgttattaagttcattataccttcttgtcattacatatctaattgaattattgtgaacttatatacaatgataaaatatatatcattactattcacaattttataattgtttgaatggcacataaaagtcagataatataaccncaaatatgggtctttaaatgttaaataatcaaaatacataagcaaaaatattactcgtatgatataggggatctcatgattgagatgttatagctgcttatttatctcgtataactctcgctctctaacttatatattatgcgaacattactcatagcta

SEQ ID NO: 5342 - DNA, 472 bp, Oryza sativa
  unsure (1)..(472): unsure at all n locations
actcagctgctattctttttcaaaatcaacatctcgtcgggtttttttttctgaaatgattccaacggagacactgtatagggcattaaagcgaatgggatttaattgagagcactacatccaactctatgtcattatagttattaatggcatatatgctaaggatgatgtctttttttggcatatcaattaagcggatggattttgcttctgtttatttctgcatatgtctgaaaccaatttggcggcatggtgcataatttngcatgctctaatagactaatacaaccccttggtttcctcactcagtcgttccctttctctcacccattcaacgtgcgcgcgcacacacaaacatgagtatccggctgaaaataattctcctcaaatgattaacttgcaatttccctctctttcatgcaattcatgttacttcatatgctctcatctataatattatggcctcaggcat

SEQ ID NO: 5343 - DNA, 382 bp, Oryza sativa
  unsure (1)..(382): unsure at all n locations
tgcaagcttgacctattccatgcatttcaagctgatcttccatcgatccctttctaaggttggttaacagccgccctctggcccaagctaaaagtgtactaattaagtgtgtggtgagtagtgtaggaggctatagttngcgttgttaatttgggtccagtgagcaatgttggaatggggtctatatatacatatacttgtagctataggaacagcctggatttggactgttaccttgacttctgagagagacacatgagcacagtacaggctaatgagtgagatagtagaggaggaagctggctaaggtcttgtttaaatcttaaattttttttcccaaaaacgtcacatcaaatctttagacacatgcntagagcaaata

SEQ ID NO: 5344 - DNA, 387 bp, Oryza sativa
atcttggatcgcaccggggatgcacgtcttctctgcggaagacgccgccgccggagaggagccccgagggtggagaggagagcatcgacgcccccggcaatgccaagcccagcatccaagtccggttccccttctttctgctccaagatttcacctctcgtagaggtgacttctctcatgtggttgtctcatgtgattccatgggtgggcttcctgccctggtctaactgatgaatataaatgcaaatgaaaatcgcacacagctgattatttattttttttgaacgaatcgacgaggctgccaatttcattgaatagaagagacgaacactgtacaaaaaggataaggtacacggaaaaaaaaacagggccgcggccctaactata

SEQ ID NO: 5345 - DNA, 409 bp, Oryza sativa
attcgacaataaaccaaatgtgaacactttttttaaactttactaaaactcggtaaagatgaaaaagggaataaagagaacaagttctgagattttatcaaggtcttgctactaatttatcttctaaaaatatctgaactggtctagagaacttctgaatacatcactatggaagatgttacagccaccgaaacatcctcaaacagggcctacatgatgcccgaacaagacgaacattaatttacatatacaagtggagttacctataacgcaaggtttatattgatccacgagaccatgattcaactttaccagtttgaaaaaaaaatattataatccgcgatcacagttgatgtgctgaaactttacaaataaaccggccatgagagaaatagaaacgagaaaataa

SEQ ID NO: 5346 - DNA, 419 bp, Oryza sativa
tgcaagcttgtatgtattcttttaagaaaatatttaaatatttttaatatcatctgtctgtcgcgattgaattttaaaataataaccgtatgcatcatttctcatgaaatcgcatatatatttaatttgtggggtcttgtcgtcacacaaataataattatggctttccggtgaacataaagatagtaaatatgctatcttgctttcaagtatttgtttttaggggtaattggtccatgccattacaaatatgccaaactagaaaaatattattactattcgtgatatcagctaagtgccactgaagatttataaaattaaaatcatatcatcgccgctaaatttactgcaactccatccatttaatctcggtctcctccctctctcttcttactgccggtctctctttccactctctg

SEQ ID NO: 5347 - DNA, 324 bp, Oryza sativa
agtcacctgcggcatgcaagcttcttgaagaaaaactaccttctaacagttggattgaaatatcctactccatccgcttcatattgtaagactttctagtattgcccatattcatatagatgttaataaatctagacacatatgtatgcctagattcgctaacatctatatgaatgtgggcaatgctagaaagttttgcattgtgaaacggatgaagtacttatgtgttactgcttagaaccctttaatatgcatatacattatttgtatttcattttgaaggaaatattgttttataatatttgtggtagagctactgattct

SEQ ID NO: 5348 - DNA, 337 bp, Oryza sativa
atgtgcaacttctgactgcatatatagttcaatagatacattgtgacttgttaaaattattctggcttctatggtaagcttcctacacttctggccatactgaacaaatggtttgtggtgttactttcagcactaaacaacttttgtattctttgatttaacgagctggctttttgaataactgattatctgccgattttaaaaaggagcttatgaccctgaacagagagcttcagcttcatattttggagctagcagatattttagtggaaagaccatcacagtatgctcgtacggtagaagatattccactcattttcaagaacttgcaccacct

SEQ ID NO: 5349 - DNA, 320 bp, Oryza sativa
gctttacctcaacacattatgtccgagctgtcgcggaatgctgatcaagcacttagtgtgcgaccatgctgacattgatccagtctacttccagcatcaagacgtaacatgaagcattgcaatctactgtagcatgaagccaccctttcttcaccatctatacaacatagacctcgtgccacatcaaaaaattacattgtgcaccagtttgcaaaacacaacaacaacacacatttaatcaaattgaaattcctaaagctgaaatgtagtgaaagccctataaacttgggggaaattgcttacatattgtccgatcccac

SEQ ID NO: 5350 - DNA, 292 bp, Oryza sativa
tatgtacgactggcggcatgtgatccacataccccttcgtgtatgtcgaggaggatgtggttgccgtcgtccgacgagacgcatttgagaagtaccccgtttggcgcctttttgtatagatcgctgccgatcatacagcagatttttgcttgacgggttattttctcggcttctgcgtcgtcctcgggccactcgtcggtgcttatgaatttaatgagtgggggccaccagacgttcgtggtctcgatgtctgcaacggcgtgctctggctctgaagcccctgagctgatgt

SEQ ID NO: 5351 - DNA, 365 bp, Oryza sativa
  unsure (1)..(365): unsure at all n locations
ctcaccctagtcttcggccttggtgcactatcggtattcatgttatcaccaaccttcctatttcaaatgacaaagggaatgatgactattaattagaggggcattgtgtttttcttgtgcttatgccaactaacttttatagattctttttctgtctctaccactgccatgaagatatggcaatattgtctcaacagatcaaaactcctcttaatgtattctnttatgaagggcaacacaacaatattgtaatggacaacatatcgacccaccacaccttttctataccaccataatacttgggcctttcattaacaaaaatactcccttcattccaacaatttgcgtattcataattaatttta

SEQ ID NO: 5352 - DNA, 383 bp, Oryza sativa
  unsure (1)..(383): unsure at all n locations
acattcgatacactagcattacttttgtatatgaagaatgccggcaccgcgntataattctattcccatatgctcttcatgctgcccatccagagatggttatactatgcactgtccagaattctaaacgacccctatctaatgtcatctattcgggatgatgtccgtggagcctttagagcacaagagcgttcaggacaatccaagctaacccaccgtgcatttactctctggcaaggaaatataggttttccaaggctgcaaaagacaaccacaaaacgctcagatattgtgaataatctcatcatgggagggcaggaggccatgagactcagcacaatcatgatgttgtgaatgaaaacatctatacttcacaacacata

SEQ ID NO: 5353 - DNA, 400 bp, Oryza sativa
  unsure (1)..(400): unsure at all n locations
ggagcatatataagaaagatntgcctctgtatattgccctgtggtatcagaaatggttagaccaagaacagagcatgttctatacataacgggtatagctagcaacttacttgaagatcccttcataattcttggtccgtctttctttgttattagaaaaaggcatgagaggtcgttttctgtagcttcttccaatgcttacagacccctctgtacaatggttttgtatactttgactgtgagtaggtctagatctaattcatgggaataaattgattttttctaccacgagtaattctggctagcatctcaatgatgtcatgtggtgtgaagagtatcatgcagctgcaaacattttcttcggacagcattgagtcttctcaattttgggtgtggatgt

SEQ ID NO: 5354 - DNA, 408 bp, Oryza sativa
tctcaatcagccaggaattttgggcaacaaacgacggcacacgtaggtgtcgtgccgggcaaccacccctaaacaaggaagtggctccaccactgatgctaagtacaactgtacaaggaaccaggttccaaaaatcacaattatctccctttcagaacaaaagaattacacctctatggagaaatatgtttatatacaatagtagcaatggtagtacacccgagcaaagaattgtaaactcaacacaagcaaccaaaatcgataccaggatgatgaccaacaaaagctcaccgctggccattttcttcaaccagaaccaccgcacaagccatcccaacataagatcactataactcataaggcagaaatatatcgcataatcacgacgcaaacaactctgctggcaca

SEQ ID NO: 5355 - DNA, 415 bp, Oryza sativa
accttgagacgcctacaaataccatattaaaaaataagttatcaactttacgtctataaaatgtgaattcaaattcaaatttgaattcaaatttgaattcatattcaaattaaagttgaatcggcgatgtaaactcttgacttataaactctggatctataaaccttaagcgtataaactttagatgtatagaaatactatatataggaaatatttgaacaacaactccaatttgaatctgatataattccaaatccacatcccacaccgggtatatgaaacttttgacttaaaactctacgtctatatacgttacgtgtattaaactctacatggatacacatcctctgtgtataaaaaaaaattcgaatttaacttcaactgtggatcggatatataaacctttgacttataa

SEQ ID NO: 5356 - DNA, 428 bp, Oryza sativa
  unsure (1)..(428): unsure at all n locations
agcttcttcgtattcctggaatacaaaaacatagataagataatgacaaggaaatgatgtatcacaaaatgaaaaacttggaaaattntatttttcttttctgaccttgagtgccatgtgggcacatcctttgcgatagtaacctttagtccactcaggcttgagttttatgcaatcattagcatccagcaaagcctcttgcgctgcaccacttctcagatggcaaaggctcctgtttgaatacagtgtggcatctgcaggatcaagtttcattgcctgcatcataccaaactgtgataagaccaatctgtgattccagaattaacctagacaaaataacagttccctattaatcgcaatttgatctacagacactgacgtgaagagggaatttgcctcccaagttccaactcttctagttcaccaac

SEQ ID NO: 5357 - DNA, 420 bp, Oryza sativa
  unsure (1)..(420): unsure at all n locations
tcgatgggtctagctcactacaaggttatttattttcgataaacatggacacaactatacaactcaattatacaactcaatcataagttcaaaattaacttctgagcaaaataaatcggtcaggtgtaaatgcaaaagaatattttgtttttataaacgagaaaataaagttcaaacaaacttaaaggagatgaaccatgacaacccaaanaaatttgaaactcgaaaaaggatatttgaagaattgatgcaagacgcaacgtttaaaatcaaagaatccaactaaaagtacaaaatataaactcttggatgagaaaatgaagcctcaacggagaaaccaagatatttgttggtacaaccaaacttcgatttccataatatcaataagatgtgaccaaatgtagacgtctagctcacaac

SEQ ID NO: 5358 - DNA, 348 bp, Oryza sativa
tggacctgtctggtggcgtacatgctctacccgctattgctcgttgtcgactacatactcgacttcgtctttggctggtcataagcaaatgcttctgaacttctgcttcataagctaatgcatctgaactcctgcttttgacggatactttttcttcggcttgatcttggaaaattatctccctgtaatttatcagtctgcacttcacgctgtgcattgtaactcgtgcctatcctaacggtcccatattgtctagtttatcctgatcgtgaacagagatgagcgtaatatataaattgagagttcgctcgaagaaccaaccagcttatttctggattggcgccttga

SEQ ID NO: 5359 - DNA, 283 bp, Oryza sativa
tttctttcaattacgtatccgatctatagttatcttattatataattgtgttcgctataagtaaatctttataacaaatccttaatattctgatgaacagaacataatgttgtaaataatctttgtcggagacatggaaccgcgggtatcttgactagaggtatggggcagacgcggtcacccacgtggtctgaccacctctggggggtcgggacctatggaattgtggacgccccttcctttgaatacgtgaaggggcgtcgtacttatacctttaatccta

SEQ ID NO: 5360 - DNA, 224 bp, Oryza sativa
tgacaataatccgacgaatgaggcaatctactgatattgtcttggatatcacataactgccatttataggaaatgcttattatacgtatcgtcttttgagatagagggtaagcactatgatactaatataaccgatgtatttggttatgattaaaatttaatttcatacttttggcccaactacgagatgtgactcgtatcaaatttattttccccaaaagaaa

SEQ ID NO: 5361 - DNA, 299 bp, Oryza sativa
ggaagacgcgatgtgtgatgtgtggcaacaatggcattattttatttttttttaagaacaaaagggtgaaagctttgcctcatatatattctgatagagcaaaaagagaaaaaattattaatttttatttacagggcatcaaccgaggctcaagtaagctctatttttgttttgctttttaacttcccaaagcgcgaagctcatggcatgagtctagtggagtcgctgggtgttggtgtgggccgaactgctgatcttggtccatacgctttaatgtttatataacagcgtcttgtaag

SEQ ID NO: 5362 - DNA, 418 bp, Oryza sativa
  unsure (1)..(418): unsure at all n locations
atcttattgatgaaaacacacagataccaacatgaaaataagattcatttgtttcaaaaacaaagagtaaattgcatgagctatcctttaacttgtagggatgtgtcatctagatctcgccggagggggccaacaacaccctattcgaccccctccctgctgtactaactagcgcattagcatgttagttagtacattatcaattaacctgatatagaaaattaatctactataaagagatggagagacaacgcacatcaactcctcgtcttcattgcttcggcttcacacgtctctccgttcctccattgtgtctcactatgtcttaagtctcaaactgtcaaacatcccatgatacaacttatgaactacattcangctttttttatggcagaacacatgatatgttattttatca

SEQ ID NO: 5363 - DNA, 322 bp, Oryza sativa
tagtttgttagtgtctactggaatatattgctttattatattatcatcagccgattgccttcatatcattatatacattggacatatagccgatagctcataaccctatccgtttagctggcaatggctatttgctggcatcggctatctgctggaactactacattggcttgtcagccgatcatctatttgatctactgtttacatatcttgtcagttgcaggatcaaactgactggcacgcccgcatatcatcaacctttggacctgcacaagagctaagcaaatctcccatgccagtgagtgttttcgcatcaacacat

SEQ ID NO: 5364 - DNA, 430 bp, Oryza sativa
cagcttggtagtgtgaggatctgatgcaatagtggaaacaactactacacctgtaattggagatccttgtaaataataaagatagtggattctatggccttctaacacaacaaggttgccttttaaaatcttaagaacactgttgccaccaacatatttatatccccaggattcaagagtgcctaaaaaaataatatttcttttcattctaagaacatggtgaacatttgtaagggtcctgacaatgccatcatttgttttaatttgaacataaccaactctacaaatttcaattggagacctatcaccaatcacggggaagtattccgtgccataccactatccagtgggagaatacaatatgcgttgtaaaccatcggatataaattgtacagcatagattgaggtggactcaacctatagtcactta

SEQ ID NO: 5365 - DNA, 278 bp, Oryza sativa
agcttcaaaatttcttcataaaagaggggaggtcatgccacaatttatagtgaatttattgtggcgattatatacaaatcggaggtgcctaaaagggtagcaacttcatcctccaatgttttttttgtcatattacatttggagctatgttttgcacacttttttttgtctccaaaattttgttgtaaagtgatgagagaaaaatttgtgtggagaagaaagaatatatagaaatttagttatttgctaaagagggtttataaatagttgagaaagaa

SEQ ID NO: 5366 - DNA, 163 bp, Oryza sativa
ttctggaggatgaacatatgtacggtgaatgactctatccggaagaagaagaatgggttcccgagcttatcgacatctcgctaggaaggaggaacatgggggtatgaggagtggcggggctcactatctgttggcgttgaagctactaagagggatgcggaat

SEQ ID NO: 5367 - DNA, 258 bp, Oryza sativa
catgacatcttcttcatccactttagagaaaacattatgctccatgaatgagactaggacagcacaccaaaagtcgtctcccaatttatgtcgtaacttatgcttgatgaaaatcatagcggaaaatgatctttctacacttgctgtcgcaaccagctgaatcaatgttcactcaaaaaaggggtaggatcaatacccgtttaggaagcttgtagaacaaatcataaacgatatgccttctgtttgacaaagcttgac

SEQ ID NO: 5368 - DNA, 182 bp, Oryza sativa
aactgaaggttatcaacctctgaagatgaggtgcccaattgttctctatgcactcattgcgagaacgctgccctctagcttgaacaccaccagacagatagctgtggctctttcggaatgttggtgaacctttaatattaatatagttacttgccctgctattaccattattagaagcagta

SEQ ID NO: 5369 - DNA, 370 bp, Oryza sativa
atctgaacaccacatgtgtccttggctctcttctgttttatcaggtatttctgtcaccccttcgcgacatgaaactgatccccaattcaggttcagagaggcctggtccggcgccccgaggcccgaccgcagaggagcgcgttctttgggatcgggttctcgtcccgccatgagttctccggagagtagaacccgaggtagaattgttggccgaggtactgtctagcccacctctctgacctgatgttccacatccccacattatccaaaggcatgtaaattgcagtccatgattgaggatacacctgacaaaagtagatcatgtgcacgcaggcatatgaattgcgcatcatggagcattccatatatg

SEQ ID NO: 5370 - DNA, 318 bp, Oryza sativa
aaagctggctggttcgcttcgcctcttatgctacaagagatttgctctcggtgtatgccgatgacgcggtgctgttcttcaagcctacaaccactgaagccaacactatcaagagatcgctgacttcttttggagaggcgacgggactcaaaaccaacttctgcaagagcgctattacaccgattcagtgcagcaatgaacaacgagttctggttgaaaccatactctcttgccgagatgaagagcaccccaacgtctacctatgcctctcgctgggaacaaggaaaacaacgaaagcagagctccaaccgatctatc

SEQ ID NO: 5371 - DNA, 436 bp, Oryza sativa
actgacaaattaaagatcttaatcacatcaccggtgggtagatgtgataaaagaaatatttatgcactaatggcttgaactaaaaaactaagtcatttgaccattaggcccagaaatgacaaaggaattaataatatatattaaaatttcctcaattatatgaccggtgggcagaaaataatcatagaaatattaatcttaatggaatttgacatataataacaatggttaaaataattttatgcctaattattttctagataaatatcccattgggtccattcaactagaaataatttaaatgactgaggaaataataatcatcatgatgaaatcatagtctaatataatataatatcattaattgttttctagttaaacttcacggtggtcccatttaactcgaaataattctctaagtgataaaataagtgat

SEQ ID NO: 5372 - DNA, 321 bp, Oryza sativa
aacctaaagaagagctaaacgtacacattccctgtggaaacacgagcgcttgcggaaattatctggggacgtaagatataccaacaataatccgaaagagacaaggcatacccaacggacaatctaacgctctgatactaattgagttggaactagggcccaaacctccgataagtactgacaactcacgatctaggttctgagcaatatgaaccgaacccagaaatcatagcaccacggctactcttgatatcaaccatatggggcctggatgacctcaccgcgaaggctaattcctgcatgccaatcgaacaacacaag

SEQ ID NO: 5373 - DNA, 298 bp, Oryza sativa
  unsure (1)..(298): unsure at all n locations
gcttaaaattctaacagganaagggtgataacagtggtgcatacatcattcngataccatttggaccaaaagacaaatacctagctaaagaacatctatggcctttcattcaagaatttggtgatggtgcacttggccatatcgtgcggatgtcaaaaaccattggtgaagaaattggctgtgggcatacaatatggcctgctgtgattcatggacactatgccagtgcaagaatagctgctgctctgttgtctggggtctcttaatattcctatggcatttacaggccattttcttg

SEQ ID NO: 5374 - DNA, 425 bp, Oryza sativa
tttctggcctactgcagtgtccgacgtctacttatttgtgcgcacatgtgaaggttgccaatttttcgccagacaaattcatctaccagctcaagagttgcaaactatcccgctgtcttggccgtttgcggtttgggggctcgacatggttggcccgtttaaaaaggcagttggcggttacacgcatctctttgtggccattgacaaattctccaagtggattgaggccaaaccggttgtcacaatcacagcagataatgctcaagacttcttcatcaacattgtgcatagatttggagtgcccaatcggataatcactgataatggcacacaattcactggcggagttttaaagactttgtgaggactcggaataagattgctacccttagggcacacccatacaatggcaggggagcagctat

SEQ ID NO: 5375 - DNA, 159 bp, Oryza sativa
gcgtgggatatctctatgccgacatccggtataacacaggtgccgacgcccacgatgaaagactcgaggagcgcgcaggtggcaacaccgacaatgctgatgggtcgaactaagtgatggagcttgcggaatatcccgacgacatgctctccgaggtga

SEQ ID NO: 5376 - DNA, 323 bp, Oryza sativa
tgcagctcaaccccttgagtgtagataatatttatcgcaagcctgaggccctcttgactgataatacctggtaatgtatggttgctttgatgaactaagtcttgatatttattgccagttttgatttagttgccctattataagggactggttcaaaagttctctttacttttgcattgttgactgttgagatgccatgttgttatggtccaaaatgatatgccgaaatatgtttttaaaataaataataaacagcgctggtactactgattattctattcgtttatgcttaaattgttcacttgtagccatgcctcaattcc

SEQ ID NO: 5377 - DNA, 494 bp, Oryza sativa
  unsure (1)..(494): unsure at all n locations
ctcaagcttgaactggccagcatcagggcatatggtggtgacgcattgtttcatatatattggcactgtgaaatgcagtcactgttctccgagaagcacttgagggtgctttctgcatgtgctcgctcagcggagtctctagaattgtaaagcttttcacataacagctctaactgtgctatgctctccattgatgacatgaataaggagctccaattttccagtagaccaagtatccaatgttaatatccacgaatttgcatgaatgtttgtcacaagcttagagttaatgcactaggtattcggttcaacaggaaacttgaaaagtaccacaagagctttgaagctgaaatatatgattctagcacaggagaaggatagtcacaaactcaatacattcatattacaagagaaatgtttcaacaaaagaagtttctcatgtacagttctttcaatgacgcgtatcnaagatgaagaccaagacacacgagaaa

SEQ ID NO: 5378 - DNA, 280 bp, Oryza sativa
cagcttgcctacgatggaatcatggaatataatataagaggatggatgggattaagccatacagtgcacaggacagaatatctttgctctaccaaatttcggtgcattgatagcaagagagaataaaaaatgttcttttacctgagtcagaaatggttgaactttgaagatctgatgttcttgtgatgaactgtatcacttcttaatctacttaatctacttctgtgcaagcgtattttgtgggaatagggacttatatagagtttgggacagaaaatat

SEQ ID NO: 5379 - DNA, 446 bp, Oryza sativa
cgcttcaccacaacatctagcccagtgaccgcaccatagtccagtaccaaatacactgtggccaccgaaatcgtactcagcccagtctttccacccagctgccaaacaacttcaccatgcactggtggcatgcccatttccgcaaatcgcaatgtagcgttcaagaaggaagggtctagcatatgcgctaccactcgcgccgcagagcgcaagaagagaatagtcttgcaacgaacttttgtgttacctaatcaagccactacaccaaaccctgctaccatgcctgccgctgtcaaccgggctgatgtaataagtctcccaaacacaccaagccccgatgtcatgcccacaatagctgccacgggctagccaaatactgctaattggcccactactcagagcaacgaggagtcgaggaacttatgggaatttgctctggaattaac

SEQ ID NO: 5380 - DNA, 346 bp, Oryza sativa
ttatctggctaacaaaaaattatgaatgctgattgcaaagattacattctttctcatttgtacaactgcttcaatgctgaagtaaaaaaggaggacatgaaaaccacatctatgttttgcttctatactaaccatttgcggaagtgcatatcatgaaaagagggagagacatgaagaccaccgtcccattgacacctcaagcgagcacctcattattgaaaggcatcaagtaactaatgtgctgaataagaaggtgatgtgtgtaataattgattgccactttatgcttacgacaaccttgtggacaactgtgagatcttgcaaaatgattgttgctgcctttata

SEQ ID NO: 5381 - DNA, 368 bp, Oryza sativa
ggggttggaacgtctactgggccttctctgttatggatcacacgtgagggggtcctctgtctatcttgaacaagagaaatagaacaggaagaaatctgagaatcatgcagtccacactgcacaaactttaatttggtgtcttctttattttttctaattgattagaaaaatggcaaagcattggagggacccaatgatgttgatgattgttgtttaactgacatccacttctagcgttgttcatggtctagtggtaaccttgtaatttttcctgctatattaatagaaacctttttgtcttgtgtaggtcgtcttgaaaaaataagcctagtggtattaattagcagtataaaatggttgcccgtttt

SEQ ID NO: 5382 - DNA, 360 bp, Oryza sativa
  unsure (1)..(360): unsure at all n locations
tttatctcatcttgacagagggagaaacgattcttgattagcttagccaanccgccgcacgttttttacagaccaagaagctatgttccacaatacatacaattatatctcagcatccgcgaatacatggcccaatcctctccttaataagccttgtgtggctatataaacccttattttgtccaaagccatgctgcgattaacttatcactcatcaccactgcactaaaagcagttgtaaagctatctacccctagctggttgaagactaatcagcttattatcaggtactactagctagttaattaattagcttcattagttagccttagctagccattgacgactacttctttctcc

SEQ ID NO: 5383 - DNA, 398 bp, Oryza sativa
  unsure (1)..(398): unsure at all n locations
tatgaaatatttatccaaggaactgattattatatactcgaataaatatttatcttctggtggagttattagtttttgcatcgccacattttagattctacgtgctctctattaagcgaattacgtaataaatgattgtgaaattaaaggccatacttcattccgttatcgatgagaagccaccgaaggcggtttatttagtacctttactttggtaagcatgagaggtgtgccatcttttgtcgaaagtgaagaactcgagcgctcgcgagctnttattttagacatttctaataaataattctattaatagatatcccaagaacttatttctaaaatgaaccattttgccacgccactggaactggcgtgggcaaactactatgccactctaagac

SEQ ID NO: 5384 - DNA, 169 bp, Oryza sativa
  unsure (1)..(169): unsure at all n locations
ttggacattggatgggatgccgtantatgcagagttccaaagaatattacctgattccaggggtttgccgatttttgtcattaccactcgaaaacctgtgaattttgaacaaaatttaccgaacgtcttgagttaagttttgatttttttataaaaaatgattaattta

SEQ ID NO: 5385 - DNA, 325 bp, Oryza sativa
actcggaaaggaatataacatgcaccaaacagcatgcatcacagtagcaagttttgtagtacgttcggaagattgaatctctttcagttctacactgctgtggagagttgcccatgtggatagtgctgcgcatttagcttctgttgatgtcataacaagccaataattaatgctacatcataaggccatgaccagatgtacaagttatcacgttacacgtggatcattacgagtaggtcatatcaagcacttgcaacgaatgacgcacgacaataaaaacagcaatataaagcttcatattcgctatcactagatgccatatgct

SEQ ID NO: 5386 - DNA, 188 bp, Oryza sativa
  unsure (1)..(188): unsure at all n locations
agcttagagcacatcggttctatccgataatanaatcgccggcttcattcctaacttatgaaatctaacaagtttagtgtcattggttctctccagcaaccaaatcacaggttccattccttgaaccttacggaaattgaccaatatatagcaatactgggatttgagctagtccaatgagtcaagtg

SEQ ID NO: 5387 - DNA, 388 bp, Oryza sativa
ttgactgcggcgcgattgtgtttgtatttctttaacctgacataccaaaacttctcaatagaatattattggaagttatggggcagtgctctgtgcacaacaccaatttggatgggattctcaatgatatcataaataagctgcgggataaaaacgaatgattctcatgtatcatactatgtgtgcaggcataagctttttgtttttgtcaacaatgagactacctatgcagatttaaattggtattatctaaaaaaaccatcttaattctatgcgaagccctataaaaatattacgcctacaaagctataacttgaaagggtaaatgcatgagaatactgattcctacctttacgttcgctcccattcttgtagattgtgctcataa

SEQ ID NO: 5388 - DNA, 260 bp, Oryza sativa
agcttatgtggatgatgtagttgtcaaaaccatgtcttttgatgatttgattacggatctagaagaaacctttgcaagcatccgcgttttcaggatgaaattaaaccctgaaaagtgcatcttcggagtactgtaagggaagctgcttggatttatggtgtttcatagaggcatacaagccaacctggagaaaatcaatgccatcctcaacatgaaaccgccaagttctcagaaagatgttcaaaagctgactggttgca

SEQ ID NO: 5389 - DNA, 215 bp, Oryza sativa
tacgacgaaacgccgaagcggacggcggcgactctcagccccgacgagggacggccggagttgcgacagcagcggcacaagaagagaacggagccgaggccgcggacaaaggaggaaagggcggccgcgtgtggggagagaggagggaccccgggcccctctaaaaccacggagggaggacaaacacacccgcgaaggacaccgaccccggccag

SEQ ID NO: 5390 - DNA, 394 bp, Oryza sativa
  unsure (1)..(394): unsure at all n locations
ctgtatgcaagcttagttgatggtaactgtgggaagatatgcactgctattgtggggggatatggngtaactttgttttattgaaaaataacttcctacatataattgaacaacatttacaagactgagttccattatatatatatatatatatatatattttttntttcatcatactgcctaatataatgctgtgtgatgtaatggaacatgaaattccattgaattggcataagcttacatgttaaggtatgagtgaacaaactaataatgtactagtagctattctggttattcaacactatgtaatgctatctgcatgcaatcttgttagcctttatgtgaacacacataattaaacttgaatttgtccaatgagaattcccgtcaatcc

SEQ ID NO: 5391 - DNA, 323 bp, Oryza sativa
tcaatggctattacatcgtttgtaaaggcgttacgtgcttatggcattatcaatgcgtccttaatctgttatacctgagctgccaaataaactaggaacttcaaaagctacaagggtcacaatgcaatgtgactttaatctggacacataaaatccggagacaatcatggaggctactcaaccgacagtgagcgtgacccaccccacctcgtagtcttgtagcctcaaactcatcgcatctatccctttgactcgtcgtctccagagccacgactcctcacattgcatcgcattcccctcccgtgacgcatcgaccttctcgc

SEQ ID NO: 5392 - DNA, 427 bp, Oryza sativa
  unsure (1)..(427): unsure at all n locations
ttcaccgcgtcactactcaggagctgacacctaagggctctcagagtcatcaaggggtacctacctagcgacgcgttggaccaagcacgcgtcaaccttgcaagccatgggtgagaaaccatctaggagtcttcagcagggttaagatgggtctcgccagntggcttattagttacgcaccaatcaaaggttgcactaaggtataggcagacatagatagtatcctctactttttctcatgagccaggtaggctttcacttgtatataacgagcaggggttttccgaaggcgggtggaaaaaaatgtgggctcccagtacaccaaagttgtatatggtggggtagactagtgtattatccttgaaacctgacctaataaccttagatccatcacaaacacaggtgcatatttgacgattggcaccgc

SEQ ID NO: 5393 - DNA, 344 bp, Oryza sativa
  unsure (1)..(344): unsure at all n locations
cttatttatttggatacaaaccggcatggcaaccgcttgatcttgcaggtgccagacctacatatatttgtagcaatcaatttcatatctcaccaggctgatgggtatggctacccactggtctgagcatgcatccatggagctgtcagcaatcatgcacgtgattntcttttatttntataggcagagaagcgatacttctttttttagaaacagagagcattattaacagagaaactgatctccaagttccattttctccaatatttcgtattataaatattaaaaattaaatcatataagaatttgctgaaatgcatatgtaaactttgcttaaagttcta

SEQ ID NO: 5394 - DNA, 382 bp, Oryza sativa
  unsure (1)..(382): unsure at all n locations
ataaccaacagtatacagatgcatgatcggaatttgcatgcagattcagatatttacattcctaataaatttacactccatatatataacacttggcataattttttttcatgaaacatacctcaatcatagctattggttacgattctatagccctttntgtttggacctcctatgagtgctttataagtctaaaagccaaagtctaaacaaactagcaatattttcaattggcgttttaaaggcatatataatccataaaccattctcgcacaattgaaccaaacaactatatttgagaaactatattgacctatatatgtggagtagagtataactctacatttgaaatataaactaaatatccacccgcttatataac

SEQ ID NO: 5395 - DNA, 384 bp, Oryza sativa
  unsure (1)..(384): unsure at all n locations
cagatagagaccacaacatttagctggcatgttatatattatgtaaactatgttagttccaacaatgtggactatattgtcatattatgggggaggagctagcatagtaacttattgagcagaaagcacatgggtcgatggtctctttgctttcaatgcgtacaattatttatgattattcacctctctttgagagcttaccctcgttctcattctaggtttacttaacttacaggggaagtgttctttctttcattatctgatgtancatatgtgtggacgcgtgggagcggtgaaactagtgttctaccaactctcaagaagttaggatataatatacgaaatgtacaattctgtatttctattgcatgtgtggacacttat

SEQ ID NO: 5396 - DNA, 99 bp, Oryza sativa
tcaccccccgcggtccggtgatttttttgacgagaccctcattgcatccagagtgcagaccgctgtaaaaaaacgtatcgctgcgtgtgcgccctaacc

SEQ ID NO: 5397 - DNA, 392 bp, Oryza sativa
tgttgagtgatgaccacgatatcttatcttacaccggtgggaatattcagcgcggaatgctcactttatcactagttcgcgttcatccacaatggtatactgctgccctggacctttgggtaacgctaggtttgtgcttgcacctactacctttatggactgctgtgctttgcttgggatgggtttcttcggaaacgcaaagtttggaaaattttacaggaattggcatgattttcttaaattttctctaagattactccattctgagaccagctttctgataggaggctatccatgcatttgtcgacaaattctctcaacatttgtcaaatgtgaatatgggacaatcggaatgtaattacactacaacttacatataactcacatataac

SEQ ID NO: 5398 - DNA, 143 bp, Oryza sativa
  unsure (1)..(143): unsure at all n locations
gatgttcgctccctgaaaatctgagtgacgaaatcttaatatacattgccgttgccttcgattctgatgtcattatacccatatgggaccattatgcaagaggattntgaactaaatcaacagaattttcacttcttggctat

SEQ ID NO: 5399 - DNA, 345 bp, Oryza sativa
tcatcatctgatttgtcgatgggtcataattagttggagatgaaataatgcatgaactgatcgattgtgccaattgaaactgcagagtactctgcgttgctgtcgcggtcaacacgcttgaagatcgccatttgagccggcacaggtttggccttcctccatgaagctgccaagcccgtcatttatcgcgactcaagaccttcaacatctactcaactcggtatacatatctatctatatgagcttatatataccattggttttatccaacatccttttaatatttcaaataggactatatatattggcttatctatcttatccattcataaaacaagtttatat

SEQ ID NO: 5400 - DNA, 407 bp, Oryza sativa
  unsure (1)..(407): unsure at all n locations
agcttcatttctatccatcatttgctattgcagtgtctcaacattgactatatatataggctctctggacgatagtacacagtagctntagctgtaagtaaatgaaaatttggttaacggcaaacctttcttcagaattcattgttgcatttgtaccgagatattcgagcgcagagcgacttatagaatctttacttgtttagcactactactctgaagtcttgaacacatgttactgtgatccttgtaggctggtgagaaagcagtgggatgccgcgtgatccgtgtttcggaaattgaagagtgganattgatcaaagatctacacattaagtgagtctactttttcaaacagttactggtcaaactggtntctaatttcactttgatggttctttgctatcaat

SEQ ID NO: 5401 - DNA, 394 bp, Oryza sativa
  unsure (1)..(394): unsure at all n locations
agtaaaccgtcggtacgtttattttgttatagattagcttatagacccccctatatagcaaggctaatattgaaatcaacaggctcaatctttgccatgtcataatctagccaacatagtactagcagatccagatccaaggattgagcgcctgattatttttgctgtgtttgttntagataaaaaaaaaagggtccatcacacagagaagtaacattacatttgacccgaacttatcaatatcttttgaaaaaaacaaaaactgaacgcgcgcgtgtgtattgggtttgtgtgtcggtaacattttcttcataaaaatagtacttacacaacaaggctaaccagattcccaagttttatattctaattaagtactttatagcatcttcaatag

SEQ ID NO: 5402 - DNA, 488 bp, Oryza sativa
  unsure (1)..(488): unsure at all n locations
catgcaagcttctaatagctgcagcttctctcaaancaatttttttcttatattgttaanantncctccagatctaagattctgcacgtgtataactcacaacatgaactaggagaaagaacctggagaacccacattttctagatcctcagaagctggttaccaatcaactacttctcataattttaagctcctccgaacagaccctagattatcatcctaatcttgagaatatgtaattataagatccagaaaatgaagaaaccaaaagctgaaaagccaacttctctaaattcttagaagctgacaaccaacaaattttcggaattttaagctcctccaaacataatcacatattagatggagtctttgtttttgagaaacacagtacanacgcagacgctcataacacacgtacacgctacccctatgagcatctctgaaagattgggccgacatatcgctagagtctattggagagggatttc

SEQ ID NO: 5403 - DNA, 301 bp, Oryza sativa
  unsure (1)..(301): unsure at all n locations
cganngggaacgaaggggagagatggagaatgctgaaacaagaaatatacttcgcatgtggagcccactcgccacgtcggctaagaacagactctatactggttaggatctcgagtataccactcttgtaagttgagaaactcattatatcttgtattgcagtttcgaggacgaaattcgaactcagcaacgaagaagggatccaaaatgaagggctagtttggtttgtgaccaatgttggccttaccataatttggcatggcaagttttggtatcgtcaattttggtaacgccaacatgt

SEQ ID NO: 5404 - DNA, 366 bp, Oryza sativa
  unsure (1)..(366): unsure at all n locations
ggtgaagtaagaaggctgactcaaacagttggacaaacccggggagaaaagaaagaaaaagaagacccaattactcgttgtgaagcttacatagatggaatggagtcaaaactacaagtttgccaggtctttcaccttgctaactttttacgttgccaaaataactagtagtcctaatattaattatagaattgattttcaataccaaagacaccctntatctttctagtagaaaactccttatggcgcagagttgtttccacttattaaaattagtcattaaaataaagtaatttggagaacagcaactaagtaataaccttaatgtctaattatagtttatcttagttntaaccatggatcaaa

SEQ ID NO: 5405 - DNA, 358 bp, Oryza sativa
aaactcagcctataggaaagcactgagcatgatggggataaaacctttgtttctctttaccggtccactcgggaaatgttacgtggcttgctggcacacaatactacccatctatcttccaaatgccgagtgacaaaatgcggaagggacgtctccggaaaagggagcattaccaacgttacacaccgaaaccgtttgtcaactttacccccaaatatggatttgcgcagacaatctccttggttggagcatggactcttggacgacggaccggtcatatcgtttttgcacaaggttgattgaagactttgaccgccactagggataaatttcaatgataagctttgtgcttaccgag

SEQ ID NO: 5406 - DNA, 298 bp, Oryza sativa
tggaactacaacaaccattgcacttagcatatttgcagccttcatctccttaccctcagaagcatctgaattcaaattgacatgatttttcacagatgcaatgtgcttatcaaacatgccaattgcagcattactaaactttcttcccacaaccacattgtttcaagtgcgcaaataacttctccacactctcctgtgcacacctttcaacctaccaagcaaagagtgacaaccacatgaacatggtgctcaatatgtgtggaaaaactctatcagcctcaccctggcccgctggtcg

SEQ ID NO: 5407 - DNA, 354 bp, Oryza sativa
accatgcatgggattgagtttcatcgagaaccgagctagctcgagcttgacacaatgacatacctgctcatgacaactgaactgaattgtctgaactcatcggcatgtggcaagtttccctgtggaccaagccttccatgacacatgcatgtacaaagtcaggacaaccgacgccacttccgccgtgaacaagtttgcatttgtagcaggtactcggtacacagctaacgccatatacttatgggacagaacatgatcatcttaattagctcttgggagtgatccttgaacaaactttatgagcagtacattggattgttctctgatataagcctcctactcctagacctatag

SEQ ID NO: 5408 - DNA, 113 bp, Oryza sativa
ttagcgagacctgcaatatcagatgggggtaaaaaaaataaagactaaaacctctaaacatttataagacatgctacccgcgcacaatgtacaagattgcccttactcagtat

SEQ ID NO: 5409 - DNA, 384 bp, Oryza sativa
tcaaggaaagaccaaacattaacgcgaatggctacagaaagctttttacttaaagagattattgatgacgccgctgatagacctgaagaggtttgccaattatttcatttgatgcactagcaatttgattagatgtatagatatatgattagcgttctatgtccacctgaataatcatctgtattattttgcagttaaaggaaacagccggtgatgaaagcacggaatttacaacgtatatgccgcagagagagttgcaagagaaacaagaagaggagctgttcactcgagctccgctgacaaaacgtgataagcagacagagaagtggatgagaaaagagcttcacgggtatgcggagctgatcttctgctactatccaatat

SEQ ID NO: 5410 - DNA, 412 bp, Oryza sativa
agccacattcattctgggctttagggttgttttattagtatatctgaataagtccttcacgaacgagatcgacttccgtgccatcaataaacggcatcgctcgcagcgggacaaacagcttcgcgccgtcgtgttcaaacagcagatcgtctttgtccggctcgctaacactgtcgagcacatagccaaagcccgcgcagcccgtttgcttcacgcctaagcgcacgccgaccatacccggctgctttgccaccagctcacggatgtgtatcgccgctgcgggtgtcagcgttaagccttgccaggcgaaatcttgtgggttaaaggttcctgaatgcatgtccatcgatttacctcacttcatcgctttcagcgtataacagcatgttagggataatgattatcagttcaa

SEQ ID NO: 5411 - DNA, 436 bp, Oryza sativa
  unsure (1)..(436): unsure at all n locations
ctcaagaacaagggtgtcaaataaagtcctttgatggtcgtgttggngacgaggtacttctgatttagtttactattntgtgttgcaacattggaagaattggcccattatgtaagccttggagtgatcttttgtgtttgtttatgcagatcaacattgataagctcgagaagtgcattacagaactggtgaagcatgttttcaataatgacacagaggcattgaatgccacaattcttgtatgcatattttggggcttgctaagagtacagtcatcctatatcaagcagagttctatggtaatgcaactgctaaccaagaaaatcttcatcttttttctaatgaattctgattaattttgaacaccgnctcaatctatatttttatgccagataatgatggtggaaatacattgcttgatgaattggttctcttc

SEQ ID NO: 5412 - DNA, 407 bp, Oryza sativa
  unsure (1)..(407): unsure at all n locations
cctccagatttgttatgctggaatttntttacgtgtcattgctggatgcaagtggatgatgtgggattttctaactacttgacgattggaataagctgatcttccactcttggaatctagaaataagggtacaggctcgtatttgttctttggtaatctttatgagttctctgttcaggaacatcagcaagttaagcgatgaatggtttgcggatgaagaaaaagttcgtgatattggtggattactcttaaatggaatcgatcttcctaactctagaaagggttgtattatttattcaaatgccagtatattgttatcacttgtgtgttgtgctggccacatgtcatatctgatcaaacctttggctgtggctacatatacactgtttcttacatctgacagctgt

SEQ ID NO: 5413 - DNA, 419 bp, Oryza sativa
tagcccatctaattggagcccttctatgcctaggcccatctgttttgagtgatgggggcatctcctgaaaactcgcgcgcatttaactaagggttaccagctcaatataaagtgtgtcttccctccccgccgccgccggcttgtcgtcgccgctgccgccgccgccgcggccgcgcgagaagaacatccgttggctctagggactcgcgtggaagatggtaactattccttctgatccttccccttctccctagcgtagccggtttctaccgccaaagtgcgggtaggtgttactcatgccagatcggtctcaagatccgggatggtgtgaaggagagctgcgtttgatcttgctttgtgcggcatgtagcttggatattacgctgctgaggagatgccgctttgtctgtggcactctg

SEQ ID NO: 5414 - DNA, 262 bp, Oryza sativa
tccctgcctctaaagaaacgcagccgggcagaactcctgaatggcttttcttgtataactcatattcatgcataacataaagtttgctccgccttgaaatccgctcggcttcatttttatcttgagggagctcttgagaagtaaaaatcgtatgaagggctctcgccagtcggcttcaaccatagctacgtcatgagtgtccgcatcttgagtagtatctctatgaagtacggtcggggtataaaggtgttcgacgaaaaca

SEQ ID NO: 5415 - DNA, 346 bp, Oryza sativa
aactcagctgcttcacaagctttgtaccgccaggggacctcttttttttttggggaagaaggtccgataaggattgtggagaaatcctctctgcccgaaaactcaggttatttctctaccaaaaaggaaaccattctttccaagggagttgtcagggaccctttcacatcctttctaccactcagacgttaccaaagatccacggctcacacagctcttattacccctaatattgagtgataccacacacatacccacatcctgatttataaaggatcggcaacacacctcaaaaattgattcttgagcttttagctagacactccataacctttgtcatacccga

SEQ ID NO: 5416 - DNA, 385 bp, Oryza sativa
  unsure (1)..(385): unsure at all n locations
agcttctcgggttcttggtctctgcccgattanctagngtttaccccgagaagatacgagctatagagcggatgcgccccccagcaagcttaaggatgtgcagtgcgtcaccggcttcatggccgccctaagtcggttcatatcgaggctgggagagaaggcactacccctatttaagctcctcaaacgctccgggccgtttacctggacggaagaggctgagcgcgccctcactcagttgaaggcgtacctcagttctcncncagtccttggcgcccccgagccagatgagccgttgctactctacctagcggaaccccgcaggtggtcagcgcggcgttgtcgtggagcgcgactaggacaaccctcactccgncgcatccca

SEQ ID NO: 5417 - DNA, 428 bp, Oryza sativa
  unsure (1)..(428): unsure at all n locations
tggccatggcccagaacacaaggagactgcgaaaatgttttgtattgcactatgaaatacagaagtgatatgtctattatgacccggcaaagcagcaggatttattcatcatattacaccttccagcaagaccagtaacatgttctagtagcagataattggatcactggatggctctgctttaagccgatgattcaacagccggacgatgatctatgtacctgaaattatcagcacctaaattatcagcctcctgccaatgatgacgaaccatttgcaattcgcaaagcacaaagcgcggcgattcattcaagaaacgatcaacgaaagagaggttngaatttgatgttntacgtttaggcgggggcgtcgtcgaggggcttgaaattctggagctggttggagttctcccacgccctcttccacac

SEQ ID NO: 5418 - DNA, 265 bp, Oryza sativa
  unsure (1)..(265): unsure at all n locations
cagagatggagctgccatgcgttcggtcagcataatcggatataattcccagaagaaataattcagcacgttgaagaatgaattattctcgatcataacacgtgaattatgcagcccttcgcatcagtggcttcggtccattatcacctaggacctaccattttcaggaggaattttcaggcttggggatatagntacagctgatcatgaaattttgctcctctctagatatcattgaaatcattgactccagcataaaataaac

SEQ ID NO: 5419 - DNA, 446 bp, Oryza sativa
  unsure (1)..(446): unsure at all n locations
cttcggcctctggacgcgcgtggtagcagcggatatgttatctttctttgtcgggcgccgggcaggacgcggagctccggcgacttagagtggagcaccgcgccgtctggtcagcggcgcagcggtcaggcgatccactcctgaccaaactccagcccaattcaggaacaaactccagcgggcccatatggcatttggggctaagactactntgcctcactcaactcatgcccgtgaatgaatcacatcccttagaccgcaaaatcgggtataacgtgtccccctactcccaaaaccgttgcaaattgactctctagggggtttcgtaggaggttttattctacgtggcatctttgaccacgttgattagcttagtcagctcgtggctgacggtgggccctacccttttatttatttttatctttatcattgacatgtgggcccca

SEQ ID NO: 5420 - DNA, 316 bp, Oryza sativa
attacttgtacaccactcctttctattttcagtctcataatatatattatcaatatcctaaaaattcaacaaataggtactcagtgaatagttagaaaatgtcatgtgcatttcgtacgggcagctcggtttggcagaactgatacatgacaaacagaagctgacattccttatcagacgcaacacatttccaaactgacatttgttaaagctttgaaacaaatgaattgatagcgtctggcattacccaacacgaggttcaacattcaccttgggtgttgcttgtacttaaatattttaataatgacagaatttc

SEQ ID NO: 5421 - DNA, 179 bp, Oryza sativa
gcccgcgcgttagcaccagcacactccggaggtcccggccgcacggccgccaaccgggaagagcaccccacccgccaaccaaacccaccgcgctccgcggcaaccgcgcattcgcaggcacagagacgcaacccaacggcaagagagaaggaggcgccccctgcacacccggaggcacg

SEQ ID NO: 5422 - DNA, 319 bp, Oryza sativa
ccttgacgtggaggagaaaaggaggggagtcccgtgtctttgcaagttttgtgcatcctattaaaggcccggttttctcacacccgaataaagaaccacgcttgctactgctcaccaatcctccccatttcgaagatactctgcattggatggcctgtactcttatgtgtgtcttcatcacctctttcttatgtggaagctggaactatgggctatgggcacggagcattactcttgccatgaagctcttctccttatggaatatagtcctatgtcctaacgacaaccttgtgttttcgtcaaccctggtcttcatttt

SEQ ID NO: 5423 - DNA, 417 bp, Oryza sativa
acatcctaatgaagtatcgacaacaattcattcttctttatttatatcgaatctcctttctagtcattcactttcaatgtacacgatgaaaacccatacagtggaggtttttttggtcacatgaatttttaagcctatcattgtatccaaaactgaataattactcctaaatgaagaaagatcgatgtcaccactgttctgatttataatgcaaatataggcaactgcaccagatgatagttagagaaatttaactgtactcctttgtgcccgggaggaacgttataatttggataagatgacgacagcttaagactggacagtttgcactatatactttcctactctatctagttataaaattggaaatataacagcaataagtcacagtgataatgactagtgtagttaattttt

SEQ ID NO: 5424 - DNA, 450 bp, Oryza sativa
  unsure (1)..(450): unsure at all n locations
catgcaagctnggaaccatggtactggctggctntagnatgtagtattacttntttctganactaatgtacctcgatcacacgatgagcccattcagaattgccacttttgaaccattaccattttttgaagaaaaaaattgacaaacacgtgaatgcatttagttggttaccaaacattggtaatacctaaaacattntggcaacagcacacttaatctattctaacaaagttttggtattgccaaattttgaaaaggatcattgtggcagcaatagccacgcttacgattgttttcattattcacccatgctttccatgctatatatgtgcactaagtagattaagatttgatggcaacaccatgtatgatgttttattaattgatccacagagcacggtaaaagcaaagtcgtggatgcttggcctataaatatctagtcatcgaca

SEQ ID NO: 5425 - DNA, 454 bp, Oryza sativa
  unsure (1)..(454): unsure at all n locations
tgaatcaacaatcaaaattcatgatttcatacgatttataatgcttcttcttaacaagcacataggttgaagaataaacactaaacacatatatctattgcatttatcactctttctcaaataacctttagcacaaaataaccaagagaattctttttgaaccttttcttttcttgagcctttttgctcatatttttctcttttattcccggtacgtccctgtcgtcaagactgtttcaaggatttggcacccattattttgctcacatcgaatacgtccttgtcatcaagactanttccaaggattcggtattcatttttttcatattttttattctctttttcacaatgagcaattaaagctatttgaggaataacaattcaataaagcatatatatagagcatttataaatcaaaccatatgatagcatcaacattgcatatttacttaat

SEQ ID NO: 5426 - DNA, 444 bp, Oryza sativa
  unsure (1)..(444): unsure at all n locations
ttaagtgactgcagctgcagcttaaagaatatctcttaagacaatccttactcgtttctctaaganaaanaagagaatgggctccaatgctccctcctcgataccacatgatatagcagccctccctcctcgctatctaggatagggagcaagaacacttcctcagaagtggagaacaaagaaagttcagcattggggatttcagttttgggtatgcaactgttagatccattntttttttacgaaatccaaagatataggattgcgatctgcttcgggcttctgttagccatactctcatcaatacatagaaacttgaattgttaaaaaanaaaagccacctttgatctcttagtgatggggttacgtgctaggacgctcaaactgttccaatataagattccttttgcaatcgccaaaatatacaaaatcctacgatattag

SEQ ID NO: 5427 - DNA, 255 bp, Oryza sativa
cctttttttacctccgcaggagacaaggacttaggttactattttcacactttacaattggaagcccatcctggtcttaacctaacacacttttggattgtacgacatcaaaaatattcacaggaccaactgggaatatggtcaattatcgatcacgatccattattattaccgaagatcaggatgtctatattatctctcgtctagtaatttactgccctctaaagtagaaaaccgttgcggtaaaaaaaatat

SEQ ID NO: 5428 - DNA, 477 bp, Oryza sativa
  unsure (1)..(477): unsure at all n locations
gcttctatttaccatcgtcgccgggacttctctatttctttctttcgactcaaccnncgtctgctnctctagagagatgctttntattcttcgatgacaaagggggagaagaaccttgcctcatattatctcttttgtgttggatgggactagtagtagtaaggttagtcctcatattattaggctaaggtggttgggctatatttgtatggngaatgggctatattatgtatcgngtgtgccttgcctactttatgtgaactcttatgtctttaggactcttcgtggtcaaggtgcttgtaataagttagaatgaactctcttgtgagatttatggatgtttatggattttatgtcttacttgtgaactctgtggcaatggtgtggcttacatattatattcgngatcatcttatgcttatgatataaatnctgtgagttcacaatgtattttgcatatgtgttgtgcctatgtca

SEQ ID NO: 5429 - DNA, 375 bp, Oryza sativa
taaacactactttcaagcccacaaagtcactgtgccattatagtattctttgggcgaagtgctccggggcaaggaaattactggccggctcagcaagtgggcggcggagttatctcccttcgacctgcattttgtcgcccgtactgccatcaagtcccaaatcctaaccgactttgtggccgaatggacgccagcattcgcccctaaacccgagcctgccaaacaaccttgggtgatgtactcggacggctcgtggtcgcacaaaggggcgagcgccgtagcagttgtcgctccgccagggggcgtgccgattcggtacgctgcaaggctgcagttcgacacgaccaacaacacggcagaatacgaagctgtact

SEQ ID NO: 5430 - DNA, 418 bp, Oryza sativa
  unsure (1)..(418): unsure at all n locations
atggngacanacaccgactcaatcaagcatcccaatggaggttggatgtatcgatgccttggcaaacacctgttgtacggctgcaatcaaatctgtggagctctgggtaggcttaaatatgtagcaaaggaatagcaaatgctcaaatcagagaatgcaaagttgaataattgttcaaagtcaagcaccgtgctggtcctatgctagaacgtacttgagacgcgagcctagacacaaacggtaccacaaaatagcaccagaaacaactcaagcacactctgatgtatgaaagcaaactcanagatacaactaatttttccttttgcttctttctttccttttccttcttttctaatttcctttctttttcttttctctcttntntggggcggcttttcttctctttgagttttatgca

SEQ ID NO: 5431 - DNA, 458 bp, Oryza sativa
ataaatctcagcttccagccttcctatgcgcacttgatgagaatatttttttattcgaatgggtggattaattaacttcattgtcatgggctaaacaacagtattactattccttatcagttaccgcattttataatatgtgattttatcttacgactacaagaaaatgattataatattatatataagcagtaaaaatgggttccctttttgtgtttgctttaccaggaaaagattcgggttgccctctatgtgcagcaggctgcactcatttttagtgatggtatggaatagcttttctatgttactgttcttttttagtatggaataattctatgtaacttgatttactcccaatatttaacaaaaagtgccaaaaagaaagagtcaagctaacagaggatattattaaagctagaatttccatcaatccagatgaactagcattgatcacaagc

SEQ ID NO: 5432 - DNA, 420 bp, Oryza sativa
tccatctcccgctgaaaccagcacgtctgccccatctattatttctatattgctcaaagtaagacgctctacctcaacaccgatcaccttgggggcaacctctcgaggaagcgagaaaccgcccaaaaacaacggcgatgtgccaactaccatcaccttacaggcaagatggattccaagcaaggaaaccgcgctcgcacaacagggagtggtcaagaacagagttgcagagatagaggaggtaaaagcgggtgctcagtgcatgcagcccccagccctctacacttcagtttctaccccgatagaggaatgggcaattccagattcatcttcttctacatcccggaccattctctacaaggtcccacagggacaagagtgtgattctataatcgaaatgcctaagcctcattctgatac

SEQ ID NO: 5433 - DNA, 482 bp, Oryza sativa
  unsure (1)..(482): unsure at all n locations
agcttgnggcgtatagtactcccttctcgattcttttctgtctttntatcttaanaatttctctcacgaactctgtattttagattncgagccatcaaacgagtagggctccgtcctctctcattntctctccacataacgaagattatgaaagtcttttaatcgcttgcttaattagatgcctttgacactttatgagacaatagctntttaggaacggagggagtagggtgctatagaaaattgggtgctttagttttcacgtagtggccccttcacttttgaataatgacatgatacccatttcgtccttcctaaccttcgctaagatgttnggtctcaaaatcaataactcattgttccaatatggcataaacgaaggaaaacagatgagaatcactttatatatttagaatgataagaaaagtagtttgcatgttcagagtcatgacacaattaacataatacttgatgataacccc

SEQ ID NO: 5434 - DNA, 445 bp, Oryza sativa
tggcttcagtggaagaagaggactaaaatgagatagctttttcttatgttggtccaaaatgcaatctcctgtcactaggagcctctgtatttagatataaataaactagacacaaacaagtgaacaaccctgatgcttaatggggtaaatccaacagaatgaacccaaaagtctctgcaaataacaacagagcttgtcacatgcattacaggattgtctcacagttcaaatcttcagcaattccacacagaaacatcaaacatattctgaacattacattgcacgaacttcctccgagatgagcctcaagcagaaggcggccgcagatcgtaacattccttggccatgcgaatacattgcaaccaatgcatcacctccacattatggttcttctccagaacaacatctctaacagcaatctggatcgcaccacggtacaatacaa

SEQ ID NO: 5435 - DNA, 282 bp, Oryza sativa
  unsure (1)..(282): unsure at all n locations
tgctggcgctggcttgaatggactcggcgcctccacgtcagcagcgcgaggccaggtgcgtctcacgttcccgccgggaggtctcgtcgccacgcagtccgccgctcggcntcaggtcgtcgagctcacctcctctctcctcggagcacgctcatacctgcacgttgcacataaaagacatctgcacacaagtttcccggcacgacgacacaatacacaagggcgagcactcactgcgatatttcgctgagcagcgactctgtgcaagcgaccgcaagcatc

SEQ ID NO: 5436 - DNA, 443 bp, Oryza sativa
  unsure (1)..(443): unsure at all n locations
cttacatcacaaatgaacccatcatagatcaaacgatatgtctttgagtaactatttgctgtgactattaattctaaccaatagagggtagcagtgctcttcattgtagttgggccacgatctgttatcatccgatacatattttttgtgcatattccatacagtgggatcatacttctctatcaactcacaagacaaaccattctttntaattacttctaagaatttgctgagtgaatcgcctctctttgggctcacgaaaatggcctgtgaggtttctgaatgcttcaacaaggatttgacaacccgtgcaaggctctgatggaattgcttcgaaaatgtgctgcagcacaagtgaataagtatataaaattcctgggtaaaccgactaatacattgcattttatattatattatcgagacatattgatggtggttgattt

SEQ ID NO: 5437 - DNA, 448 bp, Oryza sativa
  unsure (1)..(448): unsure at all n locations
taagcctggtaaagcatngcaaaaggcaggcgactcttttatttattacgtngtgaaatctggaacgttcttggccatacaggcgctgcgtggccgtgatatatagcagcttgccgggtaaaaagaatattctcttatcacgtaacaacttttttaccacctttcatgcatcatgcatcattcaggtcagattagatgggctcattggaaacggacagggatgatcgatccatccatccatgggcgatccatggtgattcataaaagtaaaactgcctttgtttcttgtgtagcacagggatgcaaacgtacaaaacgaccgtcacaagggtcatctctagctggaatcacatctcttagcttgttttatggatttgcgtcaggtgcacgcttcaatcctgtgccacggcatgcatttcgatcacctcgtccttcgtggcgacatacc

SEQ ID NO: 5438 - DNA, 353 bp, Oryza sativa
ctgagctgacatatctgaagccaacagcaatttgtttgttgacccaaagatggctatacccacttgagaatgcacccgactggcctgaacaaaaagctgccgatctcctcaagcgcgaaaacaaagcaggctgaatcggtataagaatgcctgatctgacaagctataaagcatctcggaccgatgctcaagacgcccaccttgagaagaaacaatatgcgagactatatcggtatcaacctattgctcaggacatctttaaaacctatgaaatcttgaatcgctatactcaaaatactaaaattgactgtgatatatggcccctatttgcagcaagcttgtaaataaagtga

SEQ ID NO: 5439 - DNA, 369 bp, Oryza sativa
taatacaactaaggcccatattgggcccacacggcccacgaacagcaacctaatcctcgcgctggaagagacgagacagtacgccacgcgccgcctgagccctcgcgtcgcgacaccgctcgccgcggcggcgctgctcctctccagcgaccacgcgaggagggagaagaggaggatgaaggcgagaagggagcaagctagaagagtgggagagggggacatctatgtcgtcgacggtctcaatggggtggggcataccgacgcggccgccggcgacgtctacgccgtcgcgggtgcaagcgctgtacgagctctgcaagcgcaccttctcgttgccgtactccgtcgccgcgtcctcctctccgtcgt

SEQ ID NO: 5440 - DNA, 168 bp, Oryza sativa
  unsure (1)..(168): unsure at all n locations
ctgcagcttatgctccggtaccttcactatgattttttcnnntatattaagccatcaccggtctctaaacttgtaccgttgtgtcatcccggctactaaactcgcaaatcgaccgttcaggtcctcaaacttgttcgactgtgtcattctggtccctaaacttgcaaa

SEQ ID NO: 5441 - DNA, 391 bp, Oryza sativa
  unsure (1)..(391): unsure at all n locations
gcttgacatacttttactagcactcttttttgagtgaatctggtctatttttttntagaaccctgnggtagaattgttgaaccactatccttttgcccatatggtattttcacatgtctgcaggatgattaaaattgatcaaatttcttggcattttgctaaaacctgggcactataaagcgtacatattcttctttcgagtcttcttgaaaggaaaatttctccgagcaacaaaggtactccctctggccacaattatagtggataatggcgccttggntttgccatgattcaggggattttgggtatccagtacagcagagatcaagtcactgtccttagatgctctttnttctgccaaaagcaataggttactccaaataagtacatt

SEQ ID NO: 5442 - DNA, 361 bp, Oryza sativa
  unsure (1)..(361): unsure at all n locations
agcttgcacactctctttgatacatagtataggcttgnctatccattcttcaatactnggaagagtgtgctgtcagcgaaaaggaggggtataggataacagaactgaaggatttgaattaccttggtggccatctttgtattacgaatcttgagaaagtggcatgtgtgaatgaggtgtgtgacgcgcgtcatgctgagctgtctaaaaaaatgtacctncagaagttggctctaaagtggaattcacagccagcaacacttgatggttgcacggaaactggttcacacctaaaaccaaatggacaacttaaggatctcgagatccacttgtacatgggagtgaaagttcaggatggata

SEQ ID NO: 5443 - DNA, 439 bp, Oryza sativa
  unsure (1)..(439): unsure at all n locations
gccacactttgtactttcagtaacattatctaagtattctatacaaaaagaaccattatcaattaatatagatataggatcggcctatcactatcatattcttctaagcggcaatatcttcttcagttcattcttgaagagaaataagaagtatcaaaagaattgatgatatttttgtgtgataatccaactgattcatgtggccatggatttctctgtgggtttgtaggtgggtggcggcgcaaagtgtgttctaccacttgtacaaccaagtgtcctacatgtcattggacgagatctcaccactgacattcagcatcggcaacaccatgaagcggatctccgtcattgtcgccttcatcatcatctttcacacgccggtccagcccatcaacgccctcggagccgncattgcgattctcggaactttcatctactc

SEQ ID NO: 5444 - DNA, 349 bp, Oryza sativa
  unsure (1)..(349): unsure at all n locations
atctaccatgacaagatccatgtcatcaacttctttttttntcattgcttcaatgaaaggggggtgactnttcacagtagcttcacattcagcatattccatggcatcctgtaatacacacaagcactacaagataaatctagtaattgacctaatataagtattcactaagtgcttaactatcaaagtaagcatcaaactaaagttctgtgattccgctgaatgttttaggccctgtctctttcacctgggattatattaaatatattattgagtacacactataaactacatcgtataatctgacagaataaccgtactagctttttatatatattagacacaaata

SEQ ID NO: 5445 - DNA, 364 bp, Oryza sativa
  unsure (1)..(364): unsure at all n locations
aaaagaggaaattttggttttgtttattttaaggaattggggcatatgattatgtgaactttggccgagtttagatccaaactttttttttaaacttttaactttttcatcacatcaaaactatcctacacacacaaacttttaattntttcatcacattgttccaatttcatccaaaacttcaattttaacgtgaactagacacaccctgagtataaactctgggcatacagaccgaacttccgacagcgcgtaatatacctctttggcatatgagctgggaatcctcgttatattcctctttggcatatgggctgggaatcctggtacgacgaataatcgaatatccctcttcctgtgtgtg

SEQ ID NO: 5446 - DNA, 336 bp, Oryza sativa
aaaagaacaaactgactgactcaagattccagagaaagaataaccggcacaaaatgaaactctattgcaagtttaagttacgtaaattcaccatattttaatggcattatgttagagtggtccagaaactatatgaaatttgggtggtccatctaagcaaacaatctaaagttttaagcacaacaaattctatcctattcaaaactactcgttttaggccatatcggtaaattttaaaatttcgggagaaaggagtttaaaataaacccaatccatttttattgcacagacgacatatggagatggaaaatttatcatgtctattaagttttaaat

SEQ ID NO: 5447 - DNA, 416 bp, Oryza sativa
tgaagttagcagtcaaagaggaaagatacaaacgaaaggtctttcataaaatcgacgaaggtgttcaatattccaagaattgctgacaagagtaccatcttcgcgtttgagtcgataagaacctggccgagtgacttcagcgattatgaacggtccttcccacaagggcgataacttatgccgatcctgtgtagtttgaattctcctcagaaccaggtcgccgactaaaaaggctcgcgatcgaacattccgattatgataacggcgcaacccttgtaagtatcgagctaactggattagggctacttcacgggcttcttccagtcggttgatatcatccactcgatcttcctcatagcgctcctcccggaagttgcgaaatcgaagggattcaaattctacctcacttggcaaca

SEQ ID NO: 5448 - DNA, 243 bp, Oryza sativa
taactagctagcctaatttgatggtgctaatgacagtttatttctttctcttacggcaggcgcgggcacacacgtacgcatcaagtcggtcgccctattcatcctgcacaaagaaagacaataaatttgcctgtaaagatcttctacttcctttaatgagagtatgaaaatgtttattcgtgcacgtactcgttgcaaatgactctggtgctgatcttgtaagggagggagacgttgcacttg

SEQ ID NO: 5449 - DNA, 328 bp, Oryza sativa
  unsure (1)..(328): unsure at all n locations
cagacggtctagtaccagataagactttgagtgaaacttgcttgcacaagactngcaattcaaggcgtagtccattgttcaagttgtgagtaagtgtagcttggagttctatgtggatggtcaaccttaattggtctccatcgaaccgctggtatataaacagtatattggaaaaggcaaatctcaatgggattttgagaatttgtgggggatggttggaattaatgaatgggccttaccccactcgaagattaattcttngaaaaatcacanaagcccacctcatgggatggcatgcatgtggagtttaataccaccttgcttattc

SEQ ID NO: 5450 - DNA, 449 bp, Oryza sativa
  unsure (1)..(449): unsure at all n locations
tcttaatcttcagattagtaccttgtgtggtgtatgtgtactgtcttatcactcctcctatagtacttcctctgtttcaaaatatagtgtgcattttgtttcgttaggacaagagtttggccaacgattactctattatgatataatttttacgacacataaatttattagattcatatccagaagtacttatgattatacttttgtatcacaaatgatattctaatagagcgattgttggtcaaagtcgtcctaacgaaacaaaatatgccctttgttttgaaacagagggagtacctttttagtgttgacctgtacttttggactgtatntgtggaaggggtttactctgttaactaaatntatatatgtggtgttgcagtttgcacgtgatatatgcttggccctatcatttacgcaactaccttctattggctttttcataattt

SEQ ID NO: 5451 - DNA, 443 bp, Oryza sativa
tccatcatacttccttaaactcaattagaaggagctccctcttattcttgtctagaatcgccaatgattttgatggtgtaatgatggataagttcataacaaacaaatccatcatattgctccaccatataggactacttcatcaagtctaaaatatactaccttcggcccataataagttaatctagtatgagaaatgaaatatcctactatatgaatgttcatattcatactactaaaatatgtcatatgttgtactaaattaacttattctgcgatgaagggagtagatatttctagcgttcaaatattgtcccaaaatatagctacttagagcaccaagagatggttatagggaaatagtgataaaatgtctaaaatacccctatgatcacaaccccaaccctccaccaaccaggattattaacgaaggtaacccactc

SEQ ID NO: 5452 - DNA, 325 bp, Oryza sativa
tctcagcttacacgtatgcggctggtgaacggcacggatttttgttaaggaggctattaaacgtagtgccgaatatcaagcgatttctgctttttttaataagacctgtgacttttgcaccgttgatataatttattcaaaaatacatattatattatttgtgtgatatttatcattaaaacttaacatgattatatctatatattgcataaattttaacagacactaacagtgacaacatatgttaaggcatatgctctataaaacaatgagtttaaatacatgatatttcttacttctcgtcccagatatggattgattaaaa

SEQ ID NO: 5453 - DNA, 366 bp, Oryza sativa
gctatagctgtcactttggccttttggggggtttctcgcacatcttcttctcttgtggatgaacggtaccacattccatcactgctgctaccatgcttccatggtgagtgatattctgaaaacgatcatgtgcgtctttgaaccgttcgatggctgatgctgcgctgctgacactctgcacagcaccctggaagtgatcatgtgcatccctgaacatctccattggcgtggccatcgcattggcatgctgaacaacattttggaagtgattgtgcacatccttgaacaactccattgctgtcaccatggtgctgacatgttgaatggaactctgaaagtggctatgcacattcttaagcattcttg

SEQ ID NO: 5454 - DNA, 391 bp, Oryza sativa
  unsure (1)..(391): unsure at all n locations
agctngacgttacgaaccattgagtctgagacctttggtctcttttccgggnggaccactcggtcaggatgatccgagcggacaaacttgattgttgtctctgaccaccaaagatattggtgcatatcgggctggacagcattgatctcccggtcagacagcttttgctttctcttggatattcataagccacgggtccgccaaagatgtggctgagttccttgcgatggtcttgaaaaccagtcgagtcatcatcttcgtcatccttcttctttgacgtgcattgatctncgtcagtgttcttgcgtgcgttcttggcgtattgttctgcgaactatttgtagacgaagcaatctttggccgcgtgactggaatttggatgatgccgaca

SEQ ID NO: 5455 - DNA, 424 bp, Oryza sativa
  unsure (1)..(424): unsure at all n locations
ctggtttatgtgtgtgaaagtctgggttgctcttttaagtgaggaacccgaaagaataagaacctcaagggatggaattgtgttcaccacaagaggggatcaatatatcatttactgcgcttagggttacgctgctcatgtcaaggtacttaagttgatgtagaatggttaaccatgaaatatctactgagtacatatcagtatccatgaaaccgaggttaaggtgttgttgatttgaaaggttaccaagctgaggaggcactctaccaaacaatatggatgtttcagacacatcaagatatcttatgttcttcattgaaccaaagtactctgggacatggctggcttcaactggatagccaaacttgntaatagagacatcaagctccacaagttttgcgagggttcgntgtgtcaatgactg

SEQ ID NO: 5456 - DNA, 305 bp, Oryza sativa
caagctagttcatcctagctatcaattcaaataagtgaagttaatctttctatgctgttgcaagacacttatttaggggtatttggtacatgtgctggaaatctctctctatgtattttatattcttgtgattttcacaaagcacgaaaatgcaatcatgtgtcaattcagttatcaatataagcatgttctgtacaacattgtgtaactttatgtacaatcgaatttgtacaaccttcagctgcatgcgcatatgtaaccacaatgacgtgcaactcatactataaatatatgcaacctttgta

SEQ ID NO: 5457 - DNA, 271 bp, Oryza sativa
caacccccacgaaggaaaaagcaaagagcatattctagcacccccgcgagccgaaaagcaggggcaaggaaaaaaaagggaaaacgagaaacacaaaacactaagccaagcaataaaaaaaccaaacaacagaaaaaacgcggaacccacaccgcaacccagcacagaacaaccaaggcaccacccggccaccccaacaccagcacaacaaagagtgggcaaaaaaaagaaacgacaggaaagcggagcaaacagggccgagaaaaaaccg

SEQ ID NO: 5458 - DNA, 395 bp, Oryza sativa
tgccttgattctgggcagccgactaggatatgatcaatgctctcatcttgctaatcacagaaaatgcagcggtcgggatgcggcaatccccgactccacagtcggtcggctgtccagcatctgttcaacgcgaccagccagaggaagaaacgacagcaaggtggtgccaacgagttctagattggcgtggaatcaaaggcaattcgcccgaggaacaaagctcggtaggcagattttgaagtgtatttgcctgagctttcccacttccaggagagtgagtcgggctctccggaagaacaatcaactgactgaatcaacgaccaaagtttgaggtattcaagtattgcctgagtcccaagcgcgcctcttatgtccttgatccatctacgggtaga

SEQ ID NO: 5459 - DNA, 398 bp, Oryza sativa
  unsure (1)..(398): unsure at all n locations
ttttttaaaggctgctaatgattattatcttctcaacttttgaaaaaaaaatcaaaacataacaacaggtgaaacatatcagaaaacagatacagatttcttagaatcagaatccaatgccttcagggatgatggttcaacagcttccactgcagttttggtgggtggccatctatatgtagcaaatggtggtgattcccgtgctgttgtttcaaaagctggtaaaggtatgtaacaacacatgcttgttggatgtagctcttcatctgaacaaccactnggattcttatcattgatatctgcttaatgtttctaaacttcccagcatngatgcttctggtgaagaaagttggtacctactgtctcatataaacccccccttgccccttctgctaacc

SEQ ID NO: 5460 - DNA, 166 bp, Oryza sativa
aagagaaaaataagggggtaaaaatgaagaaaagaaaaaacttagctatcctagagccaaataccgtacaaataccaacttaaaacagaaaacgaacagtcattaacaccaaaaacgaaacaaaatcaaacaaaaataaacgccgggctagaccctccttcgggca

SEQ ID NO: 5461 - DNA, 348 bp, Oryza sativa
  unsure (1)..(348): unsure at all n locations
aatgtcatttggaatgtccctgcttgggtggttgccttttattttatatcagttaatgattacagaaaatagatatgttgataaagtatgtcatttgctaattccattttattggacagcttgtgaacaaggtggccgaactgaccttctgcttgcttcctgcagatgatgccgttagtacagaagtgntccctctctcagcctcccaccatcttctcctgtctctctctgagcatcacctccattgctgtcaaggtgatgtntgagctcaatcggtacgagggcaatctggtttgcactcatctcatttgagaagatggtcttccctttcttctctaccttacatca

SEQ ID NO: 5462 - DNA, 206 bp, Oryza sativa
ttacaaaggttttttttttaacccccaaaaatccctaacaagcaggttcacgctaaattatttatagaaattactactggtatagctaattaaacttactcatttggcggacccaaaaattattaaataaattattgcagtaaataagctgtaaatgtactgtataaacaaatattattatgccaaatagtagctgacatttacct

SEQ ID NO: 5463 - DNA, 388 bp, Oryza sativa
tatggaatcctgatgctacaaaacctccactgtgtgtaacactactgcttcctgctcttaattcacgggacaaattaatagtgtagatagcaacccaagaactggagtcatagcctactccttgacaatagttggtaatcgacttaccggactgagatacattagctagctagagatgcagatgggcgctgctgccatggctaattaatggaagactagctatggctagctgagaaatgagaatcgcaagacaatataactaacaaaatacgttccatataaaagtcaagtgtgaaaaagcatagtagcatatataatagctattcgaagatctatgattgggacgaagagagtactacttcgtaacatatataggattgggagacgt

SEQ ID NO: 5464 - DNA, 253 bp, Oryza sativa
aaaataaagaagaaaggtcataccacgtattgggacatacagaatccgccccaggactagggtattgggaacggctatcccattgatcctcaattagcgggactcgaggaaccctaacttggcggcgaacgcccacgaggggacacggtgcggacttctgtagcaaagtgcgagacgttagggccatccaactggtcgaactgcaaggcaacggaatccacagctaccgccgacgaatatcttattgggatcg

SEQ ID NO: 5465 - DNA, 474 bp, Oryza sativa
  unsure (1)..(474): unsure at all n locations
gcagcttatgactggtgggttttggagtatcaaatcttcttgtatggttatgtnctacanaggaacaccttcttccacactttctggaacatttangtaacaaccatctggatattggtgttggaactgggttttaccttactcacgtacctgagagtagtctgatatctttaatggatttgaacgaagctagcctgaacgcggcatctacaagggctggggaatcaaaaattaaacataaaattagccatgatgtttttgaaccttatcccgcggcgttacatggtcaatttgattccatttccatgtcttaccttcttcactgcctgcctggaaatatatctacaaaaagctgtgtaatacgcaatgcggcgcaggccttaactgacgatggaactctatacggagccacaattcttggcgatggagttgtgcacaatagcttcngtcaaaaactgatgcgcatttacaatc

SEQ ID NO: 5466 - DNA, 430 bp, Oryza sativa
  unsure (1)..(430): unsure at all n locations
gcttgacgagaagtgagtagatctcgctggctccttcnntttgttcganncgaagnctaagttctagggtttcatagaaatcgtggagttgacgcatctaataccgtgactagatcgctactttcatactcgtatctctagtctgtaattgtccattgttcaatgttagtgcgcttaatttgctttagcacatctgaccatcaattggttagtcctgttttctgtaacagaattatcaattgagatttgtttttctgcattaagggcatgccgagttctgctcatctgaattagagtaatctaatctagccatccagattagaacaaaatgtttagtgatgataaatataaatttgatgatcgcatggacaaaataaatgctgttgaggaagcactttagtctatgccatcattaattttatcaacactt

SEQ ID NO: 5467 - DNA, 400 bp, Oryza sativa
cagccttaaaattaatttatgtgcgaatacaagctggataaatttttggtgctgtaagctaatttaaacgggttcgacgaacgcccttctagagtgaaaagaatgtacggagcagtaaaagtttctgggcactgtagtcgtgcctctgaccaaacgggccttttagaagccgtacaaagaccaacaaaatccgcgcaagacgaagcccccaaccgcagtcccaggtagacctgacgaaatccacccgatttcccccaatttcctccccttttctattgcaaacatcacaaacccctgtactacttcgcatcgcaccagacgatgattccggtccacgcgacacagcgccctcaatggcctcaaaaccgtaacaccaccactaaaaaatccaagtaaaacg

SEQ ID NO: 5468 - DNA, 445 bp, Oryza sativa
  unsure (1)..(445): unsure at all n locations
tggaggtctcccgacgtggctgatcccacgggctgggtgattctggttttaatgtcgngtgggtaaagtgtaccccctttgcagaggttaacaaactgttcgaacagccgtgcccaccgtcatgggcggatgtgaggtgattcctagcgtagtttgtttgactactgcttgtgaaattgctgttgtgaaaatgggttcgatgtttgaaaaatcaacagctgacgggatcagctagacccgggtggccgtttgaaagttgttggccccggtggccgtttgaaaagctgttggccgggtgccaatcttggttcaaatctaaagactgatacattgcacatacttcgaccggacgagacgcactgtctcaatccgtgtcgtttgagaagcactcactttatcgttttataaataaaggaattcaaataataattattgcgaaaacaac

SEQ ID NO: 5469 - DNA, 407 bp, Oryza sativa
  unsure (1)..(407): unsure at all n locations
caaaaccagctgagctgacgacgagctgcagcactacgctttgttttattcgattcgcattgagaaaagattcagctaggtgattgattgctgctggtgctatgcacaagtttgtggagaaagatatgcggcgactgcaaagaggccacccttttaccatgagatcgaaaacgccgcgcgcgcatgtttcgtcgttgccattggtcggacaatctctgtagcttgttgcaaccaacttcatcgttcgtacaactttattgaaagaaagaaaggtacaagacgacgatcgatgctgtncatacatctgaatctctgatcaaggtcacatatgcatgtattcatctgaagattcttttatgccatggaactgaaatagcaaaattgctcgaagcaaattatctgtagat

SEQ ID NO: 5470 - DNA, 303 bp, Oryza sativa
ccacgaactcttccagcagaaaaagcataactaattaggagttattaaatggaatcttttctatggaaagccgactttcagtgtagaagcttatcttacttatatatgtggaaaaagatggaaatggcgatgacccctcgatcatgagagtatgaaagatatctcacacatgtcacataaatttgactaagcttaatacaatgtctagccactatatgcatataaagctgatcagtaatgtactcgcatttgccttggtaagtattagatgagtaaattggagattgaggtttaaacaattta

SEQ ID NO: 5471 - DNA, 367 bp, Oryza sativa
tgtttattaagttgtggtttatatgaatgcgaagaagctttataattgaggctcttatgtgggcctaacaaagaaattcaagacatgcttgattgtcaaagatatacatctctttctcatttgttacaacttgcttgcaatgctgaaagtaaaatagaggaggacatgaagaagccacatgctatgtttttgtcttctattactaaccatttgcaggaagtgcataatcatgaaaaggaagagagagacatgaaagagccgccagtcccattgatcacactcaaagtcgaggcacctccattatctgaagagggcatcaaaggtaaacttaatggtgctgaaattaataaaggtgagtgtgtgtgta

SEQ ID NO: 5472 - DNA, 317 bp, Oryza sativa
  unsure (1)..(317): unsure at all n locations
catgcaagcttgcntatggtcctgactaccggttttattgtttgttaccatccaagngagaaaaaggtgttcaaaaatgccatcattgtgcataccactatatgtgtactcctatcttatgccatgtacagtacataggtcatttcctcacttctgctgctactgtaattaattgtatctattgttctggcttacatttctcaccgaagaaaattctcataaataatcatgtgtgcttccaatacgattaatattactacactcgtgcgatctaagcagtcnggtgtgtgtgtgtggaggggggggaccactcgaat

SEQ ID NO: 5473 - DNA, 414 bp, Oryza sativa
  unsure (1)..(414): unsure at all n locations
tctgtaacaacttcatcttatgaaacattgcaggaaccatcacatgatgagaaaatctttcacaacatgcaaggaatgtattttttaccattagtggaaccacatgggtgatcaaaaaaggagtttcatcaatggtatgattggtgaattttgggtatgacctagtaactgtttttcccttgatacttggatgatcatacctttctgtcctaatggccttcatgagccatgaggtgcactctaaattggatgttggtcttatttgtctattcctgcaggcagtaccaacaaaatttgccaactttatcagagggcagatatctgaagtagtcaagctagaggtgccaaatggtaaaacatatgatgttcatgtngccaaggaacataacgagctggtccttcgatctggatggg

SEQ ID NO: 5474 - DNA, 219 bp, Oryza sativa
  unsure (1)..(219): unsure at all n locations
cataaaatactcagccagggctgctcccgtataaggagcgaggtattgtaatgttcaggggaatccgccatntcagctactacaatagtgtattccatggccccctcttcatggaaagtagttactacttgagctacggaggatgctctttgaccgatagctacataaacacatattacatcttgccctttttgattgagaaatgtatctgtagctact

SEQ ID NO: 5475 - DNA, 249 bp, Oryza sativa
gcaatagcagcgtccaatgaaccgaaactaatagggatctgcgagaaactcgcaccattctgagaaagcaattgcttgttgtctgcaaaacgtgcagcctcagataacaattcttcaaagctgatattagatatgcaatcaatccatgaaagcggcgttactttgccttgattaccctcgttcagaaagcatgtgaagaatgtcatgtcgcaagtgaaaacaccattggtgatgctgggaaaaaaaaaa

SEQ ID NO: 5476 - DNA, 392 bp, Oryza sativa
tggcaacatcatactttggtgcagagcacaacagcttacacaattaagtgatatgcagcacaatccagacctagagtacataaataaaacaattatgaacttctcctagttctctagtatatttactcggagaatcagtaaaatacaataatatttgcaaagcaagtttaacctccagttctttccaaagtctaacaatatcacacactgactaatgactagtatctggtaatacgatgaatttggaagtatatattcatgacataataaaaacgggcaaatgtacagaagctggaatagtcttcagggccaaaggaaaaaagaaggcatggttggttactgcacacattctagcacaaattgagactacaactaatacatcttaccatcga

SEQ ID NO: 5477 - DNA, 411 bp, Oryza sativa
agcttggaaagagtaatgcgctatctaaagggcactttgatctatggaattcactataccgggtatccaaaagtactagaagggtatagtgactcacactggatatctgatgctgatgagataaaagccacaagtggatatgtgttcacacttggaggtggcgctgtttcctggaagtcttgcaagcagaccatcttaacgaggtcaacaatggaagcagaactaacagcactagatactgcgacagttgaggccgagtggcttcgtgaactcctgatggatttgccggtggttgaaaaaccagtgccagctatcctaatgaactgcgataatcaaacagtgattattaaagtgaaccagtcataggacaacatgaagtcatctagacacatcaagagaagactgaaatct

SEQ ID NO: 5478 - DNA, 403 bp, Oryza sativa
  unsure (1)..(403): unsure at all n locations
tattttgtatttatgactaccttgcagtacctttntacttggtaatggattgtcatttcaacagctatacttttgtttgccaacaagatcaattgcttgttcaaaagttgatttttggttcagttgactttataaattgtaaatattacataaagctcaacttaatttgaaccttcccaagtatatcacataagatcagttttacagcaaacatttctcattcacttgtaatatatacattccccccccccccttaaagcagtattttgaatgaaatatgggtgttgtgattaattttggagttatgatgctttttttttttaatcttgctttcataccagggagcaaattgggacccagaaggccgtactgcattattatccttttctaactcaacaacact

SEQ ID NO: 5479 - DNA, 310 bp, Oryza sativa
  unsure (1)..(310): unsure at all n locations
agacctagaaaatcagaattttattttttcattaaaaaatccaaaataaaaaattgattttattacgacacgctattttttacattcattacccttgaggatagtcgcggtcttatataagtgtaccccaccatttattttactaggttaaaccatgcgcgttgttgcgagagtttattatgataacaataagtaaaaataaatgtgtaaaatagctntaacaacataagcttacataaacataaacataagtttaaataagttgatgtgatttaaatttaaaaagtactacctccgttttttaatagat

SEQ ID NO: 5480 - DNA, 289 bp, Oryza sativa
  unsure (1)..(289): unsure at all n locations
taaactaaaaggactttactagtgctaacttctaaccctgcggataatttcgcaatctgaaatttttatgtacatgagcgagatctggacgcattntatcgtcttcccggtggacgagatgagattgctccaacctttgcacattcaactgtcagataatgcgtttccagctcaagattctaaagctgacatctcactcttagtccaatccatatgacgcaatggaacatatcttgcccgcccaaagcatgcaggcctctattttaatggacgatgcatgtcaattcat

SEQ ID NO: 5481 - DNA, 427 bp, Oryza sativa
gcagccatgacgcactccacaagtagtctatattttcgaaaaagatctcgcagcaaacacaccttgttttttggatattccgctgctgctggtgggcctcttcattatttacaaaactgaaggaggattggaaatggagatgatcctacgagtggagggttgcaaggagtgttgaaacttgaaagaagcggcagctagcaaccagaggacagaaattgcatgcagatgtgtgtaccccttcaacttttgttggtcggtggcaatggcctcccctgcttcgagaatcgagcagtgatcgtggagatgaactgggcaaagtgccgattcgtcctttggaggaccgaggtgagatgccgacagcatatatagaggtcattggacggtgcaaacagctgatgcaagaagccatggatcgcgtattattaaa

SEQ ID NO: 5482 - DNA, 345 bp, Oryza sativa
gcctcccctatttaagctccataaacgctccgggccgtttatctggacggaggaggctgaacgggacctcactcagttgaaggcgtacctcaagtctcccccagtcctggtcgccccggagccagataaagccgttgctactttacctggcggcaaccccgcatgtggtcagcgcggcgttggtcgtggagtgcgacgaggatgaccctcgctccgcgctatcccaccccgtgtcaactcgaccctggagagagcatggaggagaggctccctatccgaacggtggcccaaggcccccgacggccggagctggccttccgcccgcttgtaccaaagtgccacgcg

SEQ ID NO: 5483 - DNA, 387 bp, Oryza sativa
  unsure (1)..(387): unsure at all n locations
agcttctgcccagttagtatntatcagnctcttaatcgtgtcttgtggatcacacagctgcacgaagcanacctagctacatactactgaaatntttttgaaattatactgtttatcgattgattgtgcaaaaatataccggatagcgaacgatttgtggaaataaaccatcggtatcgctttttggaatagcgataccgatgttcgctcgttgaaagtgtgatagcgtggcgaaatcgcgatctgatagagcgatagcgaagttgagctggcgctctcgcgcaagcgagacgcgagaccgaagcggtatcgcttttccctcgagcgagagcgccacgtggagaaatccccacgactaccttcggcggagccatcgctcttgcactt

SEQ ID NO: 5484 - DNA, 420 bp, Oryza sativa
  unsure (1)..(420): unsure at all n locations
catgcaagcttcatatccctcatatgcgatatatgtattgatttattagcaaatggnggaaataggtaagctgtttcaatgttggtgctcttatacttattgtacatcatangaatatcctgtttaaccacttgctgtattcatatgctagccaaatattgttgccattaaacaaagataatcaaattatttctaaccttcatatgttgattcatnggaataattaattgcatggtagatactgtaatgagggaattaattttcagaagaaaaactgagaccaaaatatgggattaaaaccagttaatggcagaaaagagttgaattgactcacgtaaaaaagtcaaatatcattttatcatatgcgtgttcgatggtgtcccacatgttaagagtttatctgttttgaaaagatttcat

SEQ ID NO: 5485 - DNA, 325 bp, Oryza sativa
tgaatgaatttgagagcacactttggagagtgaattataatttgttgaaatgtggtggagttccctctcccggccgggtggcttaagtagtgcacccacaacggtcaaaactgacctgtggggcccactatccgttaccctgccaaaagtggcaagtggccgttgactggccaattctgccgaaccaagcggcccccatcgtgtggttgaggccgatagcccctaagcttgaacctctcggatctggcgtcggtgccaccagtgtcgccattaaattcggctgatgggtcaaggccatggtcagaggtggcgaggggtcaagaac

SEQ ID NO: 5486 - DNA, 359 bp, Oryza sativa
  unsure (1)..(359): unsure at all n locations
tctcccgctcagcccaatggccgaacgggcagtggtgttctttctctctccgagcgctagcggagacgacggngagcataacccgcgccgtcgagctcgtactccaccgcccccctctcgccgaagtcttatgcgggaggaggtgctcgagggggtcgaatgatccgcgacttcgccgcccacgagcgatggagaaggacggcgagacggggagcgtcgcctcctcgtctacggcgatggcagcacgccccatggcgcgctccaagctgcgggcgcgctcttgcgtcacccgcccgtcgtccccgatccagagactccagcccgacgttggctggatgacgtggccgacttggtcatga

SEQ ID NO: 5487 - DNA, 427 bp, Oryza sativa
ctgacgcaacccctacctggcgcgaactgtgaacaagaattcttttatactaaaaggggtggctatcaagcccgaaaagtggatgggtttggagacaaagaatattatacaagttcaagccttctcaatgagaagtaataccctactcctggcccgggatagatcctgcgagtgtgtcattaatccgatgaaccgggagaatagttatgccctcacatgcacccaaacccctccttatatagagggaggaagccctattataagatacagcccatattcctaatggaatacgcaagtatagataaaatacaatcgtaaccgactaggaccctgagtatttccttgatatacacagtaagaatttaaccccgagtccctaaagatattctatttacataaaggacccctatacccagtccgatataca

SEQ ID NO: 5488 - DNA, 337 bp, Oryza sativa
  unsure (1)..(337): unsure at all n locations
agcttccagtctcttttggtttaagcccaaactgttccttcattacgtcagcaattacatcggcccacggtcgttgctcagttgcgccttgtgactgtcgctgcatgggctcaaactgaccgtattgngatgcaaactgaggttgagccaatccccctggccgatattgggcttgcggagaaggaggttgatattgataactcaggttacccccttggtaattgtgagggtccggctagatattgcgcagcaagtgctcatgaacaacctgaggcattactgtgccatccggctgtacgtggtgaaccaaatgttctgggacnaacttggttaaaag

SEQ ID NO: 5489 - DNA, 389 bp, Oryza sativa
acattggtaaagagaccattgtaacccatagaacataattgagaaaccgaccaaagaatggagtttagagattttaccaagagaacggtggcaatggaaagatcattaaagattgcaatcttacccaatcccataacctttccctttccatcgtccccgaagactatggtatcttgtgaagtgccatttggatcaagagatgaaaacattgattcttctctggtcatgtgattggtgcatccactatcaatcacccaacttcttccactggagacacattcctacaagggatcaatttctagttttaggtacccatacttgcttgggtcctctcatgttagtaacaagtgccttgggcacccaaagaactctctttgatagaaatattc

SEQ ID NO: 5490 - DNA, 155 bp, Oryza sativa
actcagcttaagtgttcaacattattaagatagggaggatttgttatttatagtatataaactgatcatccaataatttcagtagatgtttgactgaaacatccaatatttttaacgagttgtctgaagatgtgaataccaaggtttcaaatgac

SEQ ID NO: 5491 - DNA, 356 bp, Oryza sativa
  unsure (1)..(356): unsure at all n locations
tataangcagagcacatcggactgttctatacgcctattattatccatccccttgtaatagacctgtaaatccttaagatccctctctttcagtagatataattctagcaatagaacaggttcataaatatttgaatcggaggaacattaccatctatacgatgaacaagtgctttcaacccgaaaacaaggcgctgaattcctggttgagcaaaggtgtaatggtcttgcataccatcgagaaactttgaaagacaccaataacagttccggtcaatattagaaacatcctgtggagaaagctgttccatggaccaagtgtccatgttgccctctagatgctctgataagaatac

SEQ ID NO: 5492 - DNA, 444 bp, Oryza sativa
  unsure (1)..(444): unsure at all n locations
gcgttgcacactatgccatatcccatcatctgtgacgggctcttaccctcacctttgacggattggttntggtcacagattagtggtcactgatgactacacctttgttaacgacgaaatttggtaaatcatgccacggatttggagttaatgccgaaacggatttgggaggaaatcgataatggaaacagggtatgaatctgcttccgaaccgcatcggctacagtgtgcatcggcagttaccgaatcggacaaggcaagctgatgtatccgattccagcaaggtgatattggaatcattgtcggattgagttgacgtgcttcatgatgatngccacgtacggatcgagtccgaagaaggcagttgtatctattaattaagaatagtttggtagtttcctttctatctttaggaataaagtgtgtttagtgtcctataaggac

SEQ ID NO: 5493 - DNA, 333 bp, Oryza sativa
tgcagcttagaggatcctttgcctacaccttaggtatatgattacgcagggctcaatggtcgttgtgcggtcgtgcctgggcgaaggatgccgctgcttaattcgctccttattatttcgctttggatgattccggaccgtcggccgatgatttaagacaatgcctggggcttatgtgaataattccactaactctcgtgtatgagcatttggattacagctatgaactcgtgtgtccagactacttgatccaggaaatggactatttcacgattgattctgtttaaaaacagggtctcagttatgagcagaagaggcatagtctgtttgcat

SEQ ID NO: 5494 - DNA, 407 bp, Oryza sativa
  unsure (1)..(407): unsure at all n locations
agcttgagataaactaaacattattatatttanaagtgngttacaccnnncactgacgngctagtgacaaaaccaattcgaaaccagaatcacttcgcagtgccaaaagctggggcttttcttgcggagaaaaatatatgggtgttgtcatccatctgatggctatgctagtgaataaacgtacttcatcatcttccggatcgtgatatggagtaattatgtttagctctagtatttgtctacgcgtcgtanaaactgattattattattattctnttttttttggggtgctagccgcttgtgacaattgccatgacggcattgcattcttggaagttggatatgtgttccgcgcagatataaagaccagataatcagataagcctagtacttaaccattgaatata

SEQ ID NO: 5495 - DNA, 433 bp, Oryza sativa
tttctcatgcattctggaaggatttctgctgattttggattttcatcctgagctctcgtttgcttttcatgttggtccaaagtccaaactgtgcttatcattgtcaatctgtcacgcatgagggttgaaataattcaactgatctagttttttcttttaaaaagaaaaagaacaaacatttcaattgggaaattggttattagcatcaagcagaattgcagattctggattgactacagtattgccttcagatgaaaagggacagaaaagaaggcatatctgcgcaaaatacattatcctgtaccgtctggctttgatctacagagatgtttggttcttggaattccttgcctgacgttgaaacttcagaagatgcaccagcctgaataacacggtcaacttctcccttaatatagtattaaacccctctaac

SEQ ID NO: 5496 - DNA, 425 bp, Oryza sativa
cattctaggatggatggttggctagccaaatgatctatgaatgtgccgaaaagttcatcaccttgcaaggacctggaggaaagcaaattcgctttacccctaacacccctaccgcaagccggtctattctaacctgtttacaagtcacctccttggagtcggtgcccataatctgtgcataccccgacgtatttccggaagaattaacaagaatgccaccagaccgagagatcgagtacgccatataactggcactatgcactgccccaattgctaagagaccctaccgaatggcagctaatgtagtagcagaagttaaaagacaaatcgaagaattggatagtaaagggtatgtgcgacctagctcatccccttggggagccccagtgcttcttgttaagaaaaaagatggctctgagagaatg

SEQ ID NO: 5497 - DNA, 305 bp, Oryza sativa
  unsure (1)..(305): unsure at all n locations
agcactgtnttgaacggggttggcttgttcttgttttcttggnaccaaagngacaatctagttagcaaagaaaataaaaaaattcccggcgcccacatgtcatacatatcccaccgcaccatcttgcatgttctntctgtcgctcaagtagctggcaacaaatgtggacctcgctcgacgggcggtggcagcagcatagcaagctcgagtggccggagttggagacagaagtgaaggccgagctagctctggtagtcgcagtggaggcgacgggctcatgcgaccccttgtgcacgcgcgcgctc

SEQ ID NO: 5498 - DNA, 406 bp, Oryza sativa
  unsure (1)..(406): unsure at all n locations
tccattatctaaagagttaaataaattcgcaagttttattgatctgtcctgattggatnttggcaaccatgtctcctgctttttttggcttccctgagaaaggttgcttcttgttaatacaatcaaatttgatctgcatgcatgcgtaattgaaattaatcaacatgttggaacagaacttacgagtgttcaagtttctgtctatttctctcgtaccccttctgagggtagtatttacatatttatactaggttacatacaaaggaagttacaaatctacccctatcactgtagttacctcgaggtggctgataagtgggctggccaaccgctcgggggtccattcgcctgaccgggagacggctgcgcccattaagggggccggtatggtgccatcatagtagta

SEQ ID NO: 5499 - DNA, 374 bp, Oryza sativa
  unsure (1)..(374): unsure at all n locations
gatctgaggttaggcgcgcgctttttgtggggcgacnatgatataaatggggcctagcgctagctaccccttctgctccttgccgaattgccgtgcacagtagctttntttcttcttctacttcgtcttctcccttgccatctctgcgctccgatccttggttgagctgctgtcttgtttgtttggctggatcaataatgcatgcgtccgtggggaggagatgggggtttgatccttgcgacgagggaagtggtcttcagctttcttcgtgcttgatgcatatatactgctttgttctccagcttgtttgatcagtaaatcgatgaagatcttggatttttgtcggatcttgccaaaataatatggtattggcc

SEQ ID NO: 5500 - DNA, 297 bp, Oryza sativa
tgagtgcactaccacaaggtgtcaatgctcaatttcagccccagccaccagctgacaagacaaaggccagtatctgccgtgtaccttaggaagtttcaatccagcagctgagaaatcaagtacaagatgaagaacccaagtgttagaacagtgttgtttgttacaactgcagtgaagaaggacattacttctaaaactgttcccaaccaaggcaaaatcgacctccacattaccagcaatttacacgaagcagacattccaatcgtattgtggtcactggagcaaacaccgtacccg

SEQ ID NO: 5501 - DNA, 385 bp, Oryza sativa
  unsure (1)..(385): unsure at all n locations
agtattgggatgccatactattaagagggataccacatgcatataattggtagaacactagtgctcaaaatcctttctttgaagtgttccttgtttattcctgtcggactatccgatcttgatcagactatccgatgctcagactatccgaaatttcacagaactntgccctctgtctttggtcttagtgttggtcataaaatatcggactatccgatataaggtcggactatccgatacatcggactatctgaaatttctcagaacttcactctcggttttgaatgcttttattcctctgagtgaattccaatagactatcgatgtgacggagatncgatgaccaagactcaaaactaatggaactgattatggagagataaat

SEQ ID NO: 5502 - DNA, 61 bp, Oryza sativa
ataacttgactccctaatagatcatgcgctgatttcttgtggcgggtcatcttagaaatac

SEQ ID NO: 5503 - DNA, 400 bp, Oryza sativa
tatgtctccattctatataaagccatcaccagcaacgggagtattgttctttgtacctatagacattctagttgcaagaagacaggttgtgccctcaactggagtgaatggagcacgctttataaccctcatatctgcaatggttggaattctcgatgatatttcaaatcttgacatggactgcaatcgtaaaatacctcattggatgacactatttgttcagtcaatggtgcttttcagagagagatatgatgctttccttatttgttgacggagatctctccctattatgtgaaagcactacgttcctagcaatagtgctggattactattatctgtaagtctacaaagtaaccctataaactagcatacttactataatctgtaaactactgcgttg

SEQ ID NO: 5504 - DNA, 293 bp, Oryza sativa
cattagatgatacttttacccttttcgcagagaaatgtttatggcccgcaaatatgtcaatgacctatatgatgatgaacaaatacctttgaaggcattgaattttgatgaaagtaaaatattttaccagttgaacgctcagcgggactaccgtgtcctgttaactgacttcaagttggagatttcaccaaccggtaatgcgagaaataaccggagaggcaagggtaaagcttctagcacaggtatatccacagacatgttgaacacatgcgaatcatggataatctaaaata

SEQ ID NO: 5505 - DNA, 455 bp, Oryza sativa
  unsure (1)..(455): unsure at all n locations
gcaagcttatgtacttaagagatatatagttttctatttatcacttaactntccatcagtcgccttctatgcaaaaggagacgcattaattgttcgcccccttgccatgaccatcaggcccaatcgcgtcagacgagtcattcacatcgtgcaaatataaaataaattatttctttatcattttacatatcgccgatgattattatcatgtcatgtgcttttgataaattgttaatatcaaacttcagcgaccccaccaatacccggtgtaacgcacgggtattttgctagtaagaaataacgaaggaaacacacacataacgttaacacagcaaaacttacaaagtctagtggcaatctatctatgcaacgttgatggcgcggaatagccaccttatcttcttaaaaaagtaaacatatgcccacatatttttttagttatacataccttacat

SEQ ID NO: 5506 - DNA, 365 bp, Oryza sativa
  unsure (1)..(365): unsure at all n locations
ggtatattagagatgggctcatcttgattttggtgaatcacatgactcgatatgctatatgtatgctaagctcttgaacattaatgaccataattcctatgcttgatgaaatcattgtccaaagggggagaacagatgtgtcttgggagaagatattcgaattgttgaaaagagcatgttntttggntcatgagggaacttctctcttctaaaaagggggagaagttctcttttggagttttgagcacgatgtgtacatttgtacgaagtgtgcttnttaccacttttgttttatttttccaacaccaaacattttttgatggtttgcaatgtgttataatgggagatgtaaataacaggtttta

SEQ ID NO: 5507 - DNA, 338 bp, Oryza sativa
  unsure (1)..(338): unsure at all n locations
gcattataatttaaaatgctatgcttatttttgttatgtactctggtagatgcaaatgaccagtatttaactggcaggttactcattaagttatttcacaggaagagcaacagtgtatggcatggaaaagacttttggcattcgaaaagtgagtaaacatatgcatgatctaattcattaagagtcacggcatctctttgctggagatatataagctaatctttgnttcatgttctttttctaaaaccctgtcccaaccaagtaacattgtgtatgcttcttgaatttattcaataacttgagcctcactggtcactacctggtgcaattaagcatat

SEQ ID NO: 5508 - DNA, 402 bp, Oryza sativa
agctttggaagaattattcgctcttgttgtttctatatcaaatgaaacaaatagaacactagtatatattgtcaaagaggcgttatgtattgaaaaagtttttattataactaatcagtcgacaaaactgtcaaaattaattacatgcttcaataaacaaaatgctaagaaaaattagaaaattaatttattcttgaaagtataaactcatcgcatatgccatgtcttcattccttatcgtacagtacaactacttcaacaagtacctcattagcagtaagctcaatctagtttctgactttctgttaaccgcaagaatgtgatattgaagtatgttatgtatatataatatgatgtggagtcttagctgagtagtaaatcatgttcctcagagcgagctct

SEQ ID NO: 5509 - DNA, 334 bp, Oryza sativa
  unsure (1)..(334): unsure at all n locations
tggtgtgtgacgaaggcggcatacactgtgttcggttccctattgcaggncgcatcgtgagtgaagagatctacttcaagatctcctaacttgattgagatatgctactgctacatatgacaatgcctagtgattaatgatcgacttgttctgtatacataaaggatgaacccatatgctttggatgtactaccatgttttatggatatgggatgtagccccaagaaggatgtgttatgtaaaattatgctatatgtttgttatgaataacagggtttcgacttgtgacttatgacatggcgactacttaatagttatattgttgagaaatatt

SEQ ID NO: 5510 - DNA, 306 bp, Oryza sativa
  unsure (1)..(306): unsure at all n locations
catgcaagcttnctagaagattcacccaaaatctccatatactgcgaccaacagtcaagctcacaaacgtgaattctttcaagaatgctttgcaggacagcaccttcgctaattaaagccagcagaactcattaaggcattgccaacctgccttgcagcaacgagagtacatgcatcttcacttagagagggtataaattggtactctcctctactttactaatggntagttcttcccaggttctaatccacgggatctccgatcacatagactgggttaccaccatagtataactcacatgggtc

SEQ ID NO: 5511 - DNA, 394 bp, Oryza sativa
gcaagcttaacaagagatatgagttcacttattctttattataaagagagagaaagaacggatatgtgatttcactacaagctgggacacattaagaatcaaggtgatgaaattaaataaaaataacatttaaacaaatcaccatttccctgccgtctataaacttatcaattacttggcatgctaacatatcataaatctagctgacttacagggcagaaacgtctgttcttctggtcgtctccttcttcaacaacaaaagtatgctacgacgatgagcagcattgcagcaattgtaggcataacaatggctagaactatacctgtcttattcctctctttctctgcaaataaatactgttcgattcaaatagatctctgtactagaactatg

SEQ ID NO: 5512 - DNA, 380 bp, Oryza sativa
  unsure (1)..(380): unsure at all n locations
attagactagcatatacaaacagaaataatggtagaacgaataacactatatatggttttcaagtcctacctacactgtcacagtgtcatgaactgataacaacctacaacaactcctaaaattccactccaatcccnctccgattccctntgctccgatcctccaatgctggaggtaacaacaaacctcttcaacaaagggcttcattacattagacaatttcagaatgctacatgactacatatgctatactacancgtgtggtggatacccaacaatcttgttggtggttcccactttgtaaccttttcttatcctaatcttaatgaaaatggtcgacgntccatagccagcacagtgaaaaaacatacactagtac

SEQ ID NO: 5513 - DNA, 428 bp, Oryza sativa
  unsure (1)..(428): unsure at all n locations
ctagctgggcgangggaagtcacacatggaagggagattatcttatgttcatgtacaaattgttagttaagtatatgcaatatggtcctagattatactccgtatgagtttgacctctatcttagatgaatcaatcgatctggactttctttaaaaaaaagttgacaaagagtgatgtgatattatttatgctctgcacatcatactatggtctgacatttacatggacagagattttgcttggcagatcttggtgaagaataacacgacactgtcaaacgcgtgtgacatgtgaacttagataagatgacctatatttacgaaatatctgattatagcttggaaagaacacgtttaacttttcttatgaatgtctgaaataagtttctggtcgattggctcacaattatgtctggaataacttttat

SEQ ID NO: 5514 - DNA, 308 bp, Oryza sativa
tcaagccctgcctctactgcacactccaccctgcacaggttctttattcatctagaacttgctgcgcgctttgcggcgccctatcaactcatactctacgatgtataaggagtaaattgctatcaggactattcgaatcagtctttagcctatactggtagtttaagcctcgctcagctggctaattgctaggaaaacaataactgactgaacacgctgagaaaacactaagcatctgtgacatgatccatgagcatggaaggcatggataatgtagcttaaagcatcataacaaggcagtgcgatgt

SEQ ID NO: 5515 - DNA, 302 bp, Oryza sativa
  unsure (1)..(302): unsure at all n locations
tactaagcttactgtntcctgngattggctttgggcctttcctgcgcatcttatgtgtgtggcgataaaagccccattccggaggggcccgagccatcagcgagataccactctggaagagctcggattctaaccttgtgtcagacccgccggccaagggacagcctcacgttgacagattctatggcgcgtacgcctcccacaaggttacagaggcgtgcataggttctctcgagccatactgacattaggcctcgagtgcacaggcataatggatcttgactgcaagactcacccgtcga

SEQ ID NO: 5516 - DNA, 371 bp, Oryza sativa
  unsure (1)..(371): unsure at all n locations
gcttgaggaacattctgggcgatgataccatagctctcagattccttgatgattcagaggaacactgggcgattgttctgctnttactcgagcctactgcatactactcccttcgtcccatttcaagtgtaatcataatttttcgcatctaactntaatcgttcatcttatttaaaaaaaattataattgatattttttaatgtgatgataaaacatgaatagtactttactcgtgacttatggttttaatttttttcaaaatttttttaactaagacagacggtcaaagttgagtgtggaaaatcatggctgcacttataatgagacagggggagtacttctttttttagtaatttatatcaccggcaca

SEQ ID NO: 5517 - DNA, 382 bp, Oryza sativa
  unsure (1)..(382): unsure at all n locations
tctctcacatcctgtccgtctcatcaacaacctgaaatgtctatatatatagtagatattaaaggcactaaaaagatggataagaagactcttagtgctataatcaaagtgcatatccaagcataaactgctggtctgggcaatccaataattatgtgaaaccaacataaggcaaaatatattaataaactatcttccttattccaagctgtactcgaataatcaagttcatgctattgctgattgaacaaaagaacaaacaagtaatcttatgataagtaagcaagcggggaagattaaagtggtggaatataactcaagaggacacatagattgttcccatcaacctaccangtattgaagatgctccaggctgaaacct

SEQ ID NO: 5518 - DNA, 261 bp, Oryza sativa
  unsure (1)..(261): unsure at all n locations
ttttttttgcctangagggaggttgatatttgaaggtctaatatgtgcaaattgttatgtcacagctgaatgttgtgatgagatcattgctgcgaattgcaatgcattgtgttggcaatttgcatgttaaacaaattatgtaagccactgtgcaattttgtggcaattgcaatgctgcaatttttgcaattgtaatgtgcaatgtaatgcttctataagtggctatctagcttaagacatcaaatgaaatcatgtaagcta

SEQ ID NO: 5519 - DNA, 338 bp, Oryza sativa
tcatcaaaagacaatatagatagaagactgctatgaaaatttaatgatgtcatactaattaaagcacaaaccaaaaatctagaacatcaaacatacccagatatggtatttgtcatggatgagctgcatatctccccatcacatatctgccgtaaaaatatattggcattgtcatgaaccatcaccaattcactccaaacaacaggacatttccctttctttcctattcacatgtaacaatcttctggacatcataaaaaatcatgatctatatacagagaacaaactattatatattacaaaatgaaagatatcttcatagattacagatgaatact

SEQ ID NO: 5520 - DNA, 321 bp, Oryza sativa
  unsure (1)..(321): unsure at all n locations
gcagctttgtagataagtgtagaaaatatcttcttataaatttatatgatattatgatagtactttcaagccaaatctacacatatcattatttcctttntaaactaagcgtttgagagttattgatgctaaaaattttagaagtttatgaattatggttagagtgtgtattactggtgtgttgtctagtaagtgagaacgaagaacgaaggccgtaccgaaatactaagtatcttcaaaagaggtgctgcttccaaaagaaacagcgtccaattgatgccacacgttggatgaatgcggtggacatccaccaacgtcaaa

SEQ ID NO: 5521 - DNA, 396 bp, Oryza sativa
  unsure (1)..(396): unsure at all n locations
ctaacagagntgtcattgagagcaatatcggccttgtatcttatatgcttgacctgggacacagagcacaggaagtcaggtgcttcgagtaaccgacgttgcaaatacaagacgaatttaaacagatcttcaccgtgtagtcaccctggaagtctgtggaaacaaggtcctcctcaacggaacccagaataccctggagttatccctcagactcctccctagaaaacagaacacacaaaaggcaattgctagtcttagatgacgttctggtacccaatactatatcctcttcactttctgtaagggctattctaatatatgctacacttacttgatacgcgcctaatctgacataagatgctggtgcttaacctgacggtaaactacgacagagac

SEQ ID NO: 5522 - DNA, 287 bp, Oryza sativa
  unsure (1)..(287): unsure at all n locations
tttattgacccaccatcctcctcagcattaacagtgggatggtgtatctggggttgtgctttggattatagatcatattgaatgccattgcttattgtaccatgaatgcaccgngggttactttatgtggtatgctaagtgactcttccaatgggctcactgtaagctaattttctgcataccttacctcgctgatggatgacgtgtgcaatattgctacctccatttcaactttgtaaagagacacatcagtcatcattcaccagtgcttggcgtatgcacaatat

SEQ ID NO: 5523 - DNA, 62 bp, Oryza sativa
tttggcctatgacgatgatgactgatgagagccgtgacggtcaataaagcatccaaaacatc

SEQ ID NO: 5524 - DNA, 261 bp, Oryza sativa
gcttgatgacatagtagtagaatctttatctctctatgcccctacctggcgcgccactgtcgactgtggatacccgtagaccggatatagagggtattggggtacgcttgtacgaggatctacgtaataccacatcaagcaaacaggaaacagggattatactggttcacgccccttgataggtaatagctctaatccaggtgatatgggattatatgacgacaaccacagattacaaagggaatagcagaacttgatgat

SEQ ID NO: 5525 - DNA, 222 bp, Oryza sativa
gcgacatctaccgcagtatgaatattcttaataactatacgaataatcgtgctcacgggtattcggcattgggactcacaatggcatctttggtagaaacataattccatattctattaaataccattggcttaccgacatcatagaccctatacttctacaatttcagacattctgcgagtaaacctagctctacacagatgttaccattttatgcgttca

SEQ ID NO: 5526 - DNA, 371 bp, Oryza sativa
  unsure (1)..(371): unsure at all n locations
acctagtactcccattgatttaattacttacttgagatcaaaataagggagtatttaattactttagataaaaaacaggagcgctaaattgtctggtgcttacgatctacagacatggactgatagtgatggataaactgaatagaccaaacacagtgaatttatctatccctttttcggtcagtatttctagtgcggtggtaaaatttagtgaagaattacaatatctccggntgttaatactgtacctcaaatgataatgcagcttcctctaaatcacaacaaatggcagcttcacttaagattcttattaaacttcggcacattattaatagagtaaattaatatattatataacgttgatggtaatt

SEQ ID NO: 5527 - DNA, 448 bp, Oryza sativa
  unsure (1)..(448): unsure at all n locations
tatgttcatttgaaagcgcttttttttttctctcagaanaacntggctagagcattatttttaattgaaaacctgtgaaatatcacttatntggctttcatctaacgttaaggaagaagcttcaggaagggccaaaagacctttataataagtggtgatatgcgcctttaaattcgcatcaccattaatttcccgatcaccattaattttcctatgcttaccattngctaccaaatgaaaatatttagtattcaagttccctttcaaaatatcttaattttcctatgcttaccatttgctaccaaatgaaaatatttagtattcaaggtcccttttaaaatatgttagtcttatctcggtgatactatttaatattctcttgccttagcaaacaagataccctatccctcatataaagtctataatcaaggtcctctcgagttaacag

SEQ ID NO: 5528 - DNA, 426 bp, Oryza sativa
  unsure (1)..(426): unsure at all n locations
ggagagagaatccaagaatgagaaagaaggaagcgagcgtcaaattaatcgccgggcagagcacaatcctccatgcactgcagctcaagagcaaactgcacaagcgataaagctggcattttgcaggcccgcatcagctccatctcctctaatactccgtattgaactaactaaaaaaggaaaaagttgttagtaaacactgttgcatgtataaaatgtactccctccgtcttctaatataagggaatttaactttntacttgcattggttgatcattcgctntattaaaaaaattaaaaatattatttatttatnttatttgtgacttactttattatctaacatactttaagcataactcttagttttttatattngcacaatatcaaacagtgtaactaanatgccaaaatcccttatattag

SEQ ID NO: 5529 - DNA, 474 bp, Oryza sativa
  unsure (1)..(474): unsure at all n locations
gacacttnaaactcaagctcataaagctcggctgcgaggctctgcgattaatgaatatatcctctatatcataacaaaaacaattactgacaaagatactgaagtagtagcgtttataactaaagagccacagccactaccccggccacttgactctgttgaatagtcttattaattcgtggaactgacgattcatcgagtacacccatcttatgagccttctatgaggggggacctgcaagatatgaggataaagagattactctaaacaaagtagaatgtagtgtacaaacatattgtttggtcatccagaatgcagaattggattcgttatataacacaagggaacaacaccctgcatcatggagacataagcaactctagagaactttatacacacactctcgcttgtgaatgtgcaacagtaatcagttggcacaatataactatatcattcaagatgcgcagtggaat

SEQ ID NO: 5530 - DNA, 339 bp, Oryza sativa
atacccaaaaagaaggcgaggactttttcgacacttattcatcggttgctcgcttgaccacgattcgagtactacttgctctggcagcctctcatggtctactcgtccatcagatggatggtaagacagctttcctcaatggagagttggatgaggagatctatatggatcaaccagatgggtatgtactataaggtcagaacggaatggtgtgcaagctgttgaagtccttgtatggtctcaaacaagcgcctaagcaatggcatgagaagtttgacaatacacttacatctgctggctttcgtgtgaacgaagctgataaatgtgtatactatcgct

SEQ ID NO: 5531 - DNA, 292 bp, Oryza sativa
actcctatctgagcttttctatttgcaacattcatctaatactgagctctacatgttagtatactttttatgtactgctatctcggtgtataattgagtctttcctcgttttgcgtaccacccatgtagaactccctcatatatggaagtctcgctgtcgcgagcgaaaatagttctgtaacatcggtttgatgaagctaagcatgtcacacactccgctcgagcatgttgatcctaccttacaaaagttttccatttgcaaatatagtatgcatatgcttgctaattacat

SEQ ID NO: 5532 - DNA, 448 bp, Oryza sativa
gctctaaaacgctctaagctacctcatggtgctataataaaatagaaaaaactttgaaagcggtgagaaaaaagaaaaaaaatctatccctcgattttcatttaattaagttggtggacccatcagtttacaccattggagtagatctgttataaatattataaatagtaatctatccctcctaatttatcgagtaatactttccataaaaaaatggaccagaaaaggctgagaaggcatacgtacgtgcgaattaccaaccacgaccgagaaaagaagaaatgatatacagaaaaaaaacatactgtacacgtactactggaaattaaaaaaatcgcttttttaaactggatttcacctttcgctgatttttttatgacggcaacgtaaatattagtgaactaccgaagaaacaacctcttaattggattctatgaacttttgattt

SEQ ID NO: 5533 - DNA, 423 bp, Oryza sativa
  unsure (1)..(423): unsure at all n locations
tgcaacccattaagaaggagaagtggccagcgaacaacactgttatccgtgtggcatgtcgattntgctgaactttagtctcttcaacttatagaaactgaagcattgatgaactttgtctatattattcgccgaacgtattatcatatcataatcatcttataatagtgttatgtagagtgtgatgatgcaagactgaagttagacagcaattctcatacatagttaaatgtgtgattatgccacactccactatttccgatatgaattcttgacttccgactagattccgtttcgacggtccgctagtgccatattctggtctaccgatctgattcccgtttctagagaaatatatggaaatgaaaatagtacaggaattgtccgactagttacatccctacatggcacttatataatcac

SEQ ID NO: 5534 - DNA, 420 bp, Oryza sativa
  unsure (1)..(420): unsure at all n locations
gcagcttagcaaacgcttncgaaccttcctcatctattacgctctcctccgaaacgtcgaaaactaaagcaaaagaataaaatcaacaaaacagtacaaaaacaagcataaatagtacatgtggatatttttaacatgtagatctcgattttagatgaatatagcaacttgaaccactagaatcggagttacgatgatttagttatgaatttctgaactttaatcgattttcatctaatagagaaaactaagaaaaagggatttatgtcgtcatcgctaacgtcatcgctggccatggcacggctccacgcgaccaccggtgctagagagctcggttcggctatccgaggacacctacacgcagaggacgacgacgcgaactcaccggtacaagaaactacgacggatgatgacgaacga

SEQ ID NO: 5535 - DNA, 363 bp, Oryza sativa
  unsure (1)..(363): unsure at all n locations
actcaagcttctgagactgccgncaaacggattccatgattcgtgtctgccgtcagaagttggcgctgccctgcagtccgaatccaccccgcgcgaatcctcttccctgtggatctctctcatctgtcctgagtaaaacacgagtgcacgcgtctccgatgtataaagacaaggaatatgaactcaagacagaactcacctcgatatttatgtgacgtgcacgagcgcgggttatagaaccatcatgctgtatatggcgggacgtggatcgatcgatggtagtgatgtcctcatgacttggagtccgtgctacagctggctacaaatctgtaagccggtgcacctcctctatccatatttatc

SEQ ID NO: 5536 - DNA, 330 bp, Oryza sativa
  unsure (1)..(330): unsure at all n locations
ttttaaaaaaagtacatgtactttcaatagtattgccaatctttctaaagtatcagcttcatatccattatagtttagccattaaaaaaagaaaaattatgacagttttaagagtatatatatctgttaaaattctgagagttgtacataagtggtaaactattagaagttgcacaatctttcttaaaagaattttagtaaaaattattagttggtatgcacgaaatatgtaccggaagtttgtgtgcacgaaatatgttccctttcatcacctaccanacatgcatagttggaagcaatggtcggaaactaataaataagtatgaatac

SEQ ID NO: 5537 - DNA, 364 bp, Oryza sativa
  unsure (1)..(364): unsure at all n locations
gacactataaaaactcaagctcgctagaagattcactcanaatctgcatatactgctttcaactttctagctcacaaaggtgagttctttcaagaatgctctacaggacagcatcttcgctcatttaagccaacagatctcattatggcatagccaacctgccttgcagttcacgagagtacatgcattttcacttagagagggtatacatcggtactctcctctaattgacatattggttcgtactccccatattctaattcacgggatcttcgatcacatagactgggttaccaccataggataactcacatgggtctcaaatccatctncctatatgcactgcctatcacatgtcatgata

SEQ ID NO: 5538 - DNA, 409 bp, Oryza sativa
  unsure (1)..(409): unsure at all n locations
gcttgaagactttcggccaccggcactgtttcttaattttccacaatcaggcgtcgctagggccgacgaaatcgaggtctggcaccgcgaagactgacctccctggctgatccacccacaagatttcagatctgaagaagggaacactggactcttcatagaggaccaaagacgaagaataggaaggacacagaatgagactaactcgactacgagactaacccgactaaactactatacgaaggagacgcgattgagcctgacccctctccctcccgtcaccggcggcgagccaccggaatcaaggaggaagaggggccagagaagagggctttttttctctgtctcgggcaagctaggaggttncagagagcactggagtactactggagttgagattgtaccaccg

SEQ ID NO: 5539 - DNA, 252 bp, Oryza sativa
  unsure (1)..(252): unsure at all n locations
cgacgaaatcgaggtctggcaccgcgaagactgacctccctggctgatccacccacaagaattcagatctgaagaagggaacactggactcttcatagatgaccaaagacgaagaatatgaacgacacagaatgagactaactcgactacgagactaacccgactaaactactatacgaaggagacgcgactgagcctgacccctcntcctcccgtcaccggcggcgagccaccggaatcaaggaggaagag

SEQ ID NO: 5540 - DNA, 412 bp, Oryza sativa
tgccaaccgctacagggttcgccttcatacttacgactattataccaggcatcagctccgtcggtcgaactttatgttgtagttgccgaagtgcttgtggcgtacttgtgcatgtgctcgagcgcttcgactcttaccccttccaagaggtcgagcgatacttcgcggccctcttctgccccagagaacatcacccttggtgagttagcccctagctctactggggtcattgcctcatcgccataaagaagcataaactggctaaacttggttggtcttgtgggggtcgtccgaacggcccatagaaccgatagcaattcctctggccatttgcctttcgctgacccctcgagtcttttatttagtgctgttagaatcttgccatttgtacgatcggcgcgcccatatgact

SEQ ID NO: 5541 - DNA, 435 bp, Oryza sativa
  unsure (1)..(435): unsure at all n locations
catgcactgcacttcacaggagtactgtctttcagaacgacaatactggaagtcattctcagatctcaacctgcatctcacaaacagcaattacaataaggaccactatgcaagcaaaaacatatgaaggattagcttcttatttgtagcttaccattgaagagaagttctgagatgtgctccgactacatcctgcagcatcttgtttagttatagactcaattgcgagggagttgatattggtttctgcacgagtgaaacgacagccaaccaattgatggaactcctcgattncacgagcatactcaacccttcagtccttccacttgctccaagttcttcttgcccacatgggcaccccatggaggaacccttgtccctcccaactgcctaaaaaccgacangacatacaccttttatgtaaactgataccat

SEQ ID NO: 5542 - DNA, 401 bp, Oryza sativa
tatatactcagcttacacacgaacaatgcgaaccatttctgaattgtcttaaggattaagtatgcagcacctgttggctgccctcgtcgtcattctcatcattgacctcggacttggacttgtcagattactcctcgtcgacctgctctatctccttggcgggtgcctttttggcagtgctctgaacaaactaaccagatcatatgtttagaacaatatacatattggacacggtggcaagcatacaaggtaatctagttgttataccccgcccttgttgaggcagcatggccttgttcactcagcctttagctggtggccttgctacataggagccttgcctgaataaacaccatggtacatataacttggcacaggcattaacactaaataatgtacta

SEQ ID NO: 5543 - DNA, 240 bp, Oryza sativa
tactggttaacttatgtcaagtgtcaaaggtgaaccccgataaaactcttaaacgatacacatttaatgatggtacttacaacggtcataacaactaataaagactgaccttaatataatataaaactattactgttctgttctttttccaaccatcatggagcaacaatatttatctatccactcattttctctctttgcatcagcaaatattctaactagaaagataagagccatatg

SEQ ID NO: 5544 - DNA, 317 bp, Oryza sativa
tgcgtctcagaacacacttgcgtaacaagaggtgagaactacttccatcattcgctaaatacatgcatatgctgatatatatgcatagttcagagggaccacctatatatttatcgataaattgtctcttaaaaatgtgacagatggtattatagtacaatcatagtgtaattacactgtaacgcatatgtaattacactggaattagcatgtaattacagtgttacttatatgtaagattcacgtgattttgaatcggtagatatattacaagatttattttggtgaggaagagaaaaatctcagcacacatatat

SEQ ID NO: 5545 - DNA, 415 bp, Oryza sativa
tcaaccgcaggtgctgcggctaacgctgtgaagactggaatctgctcaacggagtcaagatctgctggtgtgtcaactgacaaaaacaggaactatgctgtcctggcaagcactgttgctgctatgagtggcctgaggtggtatctcttgtccaagcctaagaagtctgaagatatagtggactgaaggtggttaatgagatcctaaacggtctgtcattgagtttcaccctgttttaccttgttagaaataaatgctgaacacactgcactgagtttctatagcatcacaaaactgtcaagatgcacccgagaatgttctcagtcttcatgccctgtttgactgtggcactgtctctgtgctgatcttttgattgagagaattcgatacaatatactgaaatcccgtgtttagg

SEQ ID NO: 5546 - DNA, 460 bp, Oryza sativa
  unsure (1)..(460): unsure at all n locations
gctcactagacagaaaaaatgtatctnctataatcattgcacagaacaagcgagcccacacgctgtgatcagactgtcaataccaatatactcactccattccatatggatgattatatgagttnttcatcgagataaaggtagacttaactaccatatatttcatttaatacgagtatgtgggggttgattttttatttaatgtgagtatgtggtggtgaaaaataaagaaacatgcatactttaactttccacatgcacaagaaacgaacctttaactatccctaaatgcctgcatgcatgaatgcagactcaatttacatgcatagatgcaataatgctacatatcaaatgaaggggtcatggttatgatcaatttggaagttttattttggtatatngataaattaattggaatgaagggagtaccaatatactatanaactaccatcgcttaaat

SEQ ID NO: 5547 - DNA, 396 bp, Oryza sativa
  unsure (1)..(396): unsure at all n locations
ctgcagtgtcgtngtggtaacggtatacaaagctgtntacttgctcagttctatactgcgaanagaaggtggaacctttatatttcattcgactataagcttgattntatttaacttccaatcatgtatatagtgtgatatggtagctgcgacaatctaaattatgttcctctttcgtttaatataacttatacctttcaaggcgtcttgttatgaattattgttatcggatgtcaccgaagtgacgtcttgctatgaattatgaattcacgttccagccaaagataatttttaatagtctgaaactgtgccatagacaaggtggcgaaattgcagttcataccatgataatataaccgaatataacggcttcatcggcgttacatacgaccgaat

SEQ ID NO: 5548 - DNA, 455 bp, Oryza sativa
  unsure (1)..(455): unsure at all n locations
cagctttataatcgcantgcactcactctggctctcactgatttgtatgtggctagccttcttcataagtataattgcagtgatggacaagaataattctataaggattgcaccaacacgtgttatgtatcacggattgtacatcttgatgatgatgctaacaaaggctacaatgcctggatcagttaaaggcattctaatgtttctgatagggggacgcttggaacaagaacgccgcgcgaagagacgcatcangcggcaatatccgctaatcgttggttacatattcaacataattgtctttgctgtggtgactattatggcactcactgccattgatgtcattggaaaccttcggtattaagtcacgcaagttggtaggtcctgcatgtataatatagtttattagccgcaagaatatagataataatcaagtatattccttntatgtatat

SEQ ID NO: 5549 - DNA, 455 bp, Oryza sativa
  unsure (1)..(455): unsure at all n locations
ngatggagagaagaccggttgatgattcatcggtcacttgttaaactatttctgttacatctatgcctaagaccggaattggtagtgatcctctccctgttagtcctattgatgttgacaaatagaaaggaacaagtgttattattgtggatactcggcccaagaataggataaaaaatgcgaaggccgaatatcgtaaagttgcaaagggtgagtcatctagttcccaaaagactcaaaagccgaagctcacttttgagatgcttatggctaagtacaagaaaggattagccggtctacatgatgataatcatactagtgattctaaaagaccaagatcatctcgtatgaagagatttggtcatacatcatagcaatcggagccatcactattccaactccatgcaaacatccgaatgtgatgccatgtgatccatatccagatgtcactatat

SEQ ID NO: 5550 - DNA, 414 bp, Oryza sativa
  unsure (1)..(414): unsure at all n locations
gcaagcttagctgatttccttgccgagtggaccgagtgccaagaagacatgccagaggaaaagagggaatattggactatgcattntgatgggtcgaagaggcttacaggcactggagctggggttgttttaatctcccgacttgagaaagattgagctacgtattgtggatacattnttctgcgtcccataacgtggcggaatacgaggcgctactccatggattaaggattgccatctctctaggcattcgccgattaattgtccgaggggactctcagttggttgttaatcaagtcatgaaagagtggtcctatctagatgatactatgactgcttatcgacaagaggtacgccatgtggaagacaaattcgatggactcgagctcacccatgttctccgacataacaatg

SEQ ID NO: 5551 - DNA, 310 bp, Oryza sativa
  unsure (1)..(310): unsure at all n locations
cacttcacactatgctgcatatttattactacatacacgttgagatcgtaactttattcatattaatccaaagacttgtgctatcaattggataaaagacttaactccctcctttcacttgcctttatatgccgcgctacaagcctgagtcactggtatggtgttgtgggataaagccacgaggtacgtactaagtcctttgccatacgatctgaaactgccctgttcatgctcatatacctcatgatcgtcatgaagagaatcgccgaggcaaagtcacctngagcagtaatatagtagacgtcccctc

SEQ ID NO: 5552 - DNA, 407 bp, Oryza sativa
  unsure (1)..(407): unsure at all n locations
gcttgtgtgaggagccaaattctgggtgtctctattgatcccncttaattaaggtttcatgtcgggactctgcatgagtaggatagacaaggngttactcgcgattagaggaattgcaagaggaggcaccaaaccagtcgtaggacactagttgtgccaatgatccgtgggctcaaaggcgagaagcangtggcgtgcgtggcgttcccaactcaagatgtgtgcgtggcattcccaactcaagaccgcagatgccaaactaagtcacgcgttcttcgtcaaaacttgtangcgcggggcgaggcgcgcatgtggagctgcgcatttagaggctgtatcccccgagcaagtgtgtcgcccctaaagtggtgccgctcgccagatctggcaaacccaaagtctgatct

SEQ ID NO: 5553 - DNA, 348 bp, Oryza sativa
  unsure (1)..(348): unsure at all n locations
gctcaccgacttcgtatgtgctccggnnctgctcttgatgaatgaattcttctgcagtccatctattgatcaactaggcgtttgactattacataatcttctggaaatacacttaagtacaacaaacatgttcttagatgatgaggaagactcatgttactgacagacaatctctgtgtcatattctcaacatcaggagtctttgctagtgcagaggcgatagcagatagcatgctgtgccattcttgtttagcatgttgatcgaccagcatactggatatagcactttatggctaatggtagaccaccacatttctacaatatccgatgaaagacgtcttcaagatg

SEQ ID NO: 5554 - DNA, 147 bp, Oryza sativa
  unsure (1)..(147): unsure at all n locations
ttaacattagctgacatcatgtccttgtttcaacttctctggngtcccttgttcagaacatggtggagaaatggttcatatctattctgtgctgaccgaaagtcngcaaggtgttattaataacacaaacttcatcatgaaaactga

SEQ ID NO: 5555 - DNA, 449 bp, Oryza sativa
  unsure (1)..(449): unsure at all n locations
ggctntctcttccaagccactcgtattgccatggcgatgcataaactntattccttctgcggttctgcctattatctgtatcgtatatgccaacctttgtttcttctttcctccccagaacgcctatctcatgtgactagtttgcacctgacaactacctcattccccatcagacaacaagacatatagacccatacaaagttgcaaactataattcagatacggcaagtagcaacagaacaagatgagacaacagtcgtacggttagaatatcacacaggtggcaaattggcactgatccatctgaaatgtgacgcgccatttctgtgtgcatacatgctcgaataggagtgtgtgcaccttggttatggtagccaagatcgagagagaagcanaacattcattcctcttgtatctggatgcagagctaagctcaataatttctctgc

SEQ ID NO: 5556 - DNA, 393 bp, Oryza sativa
gctgcaagcttattacataatgccttaaattcttgttttattagtgggtggcatttcttttctgagctaaagtgaaggcatggtctttataatgctgatctagcttgtagacattagctattcatagcgttctatattcacctggtcatatggtcaaaatacatgttgttctatgttgctgtctgtgacaactgataatccttttattgagttacgatatacttcagttctggataaaattgaaatatgaattgaaatgtcatgtcatccttttggtactgaattcagcaaattatttgctgaaattaattttttttcgccccttcggcccttgctgaagttggatgttactgggtgttatcgtatggatatgagctatgctaatattacgct

SEQ ID NO: 5557 - DNA, 438 bp, Oryza sativa
  unsure (1)..(438): unsure at all n locations
agctngacggttctttaggagcacagaaattatgatgttcagccagcgacgcacacgcagatgcttttggtctttgcatgataatttagtgagagagaagaaatttaccgttagcctccgtgttccttttcttttcatatgttaaagaggcgcacatgcgtatgtaagtcgttttcatattttttttagttaaacctatttaagtttgatcaagtttatagaaaatatatagtgacattttcgatacaaaacaaatcaagatattaaattttagttttaaagaaactaattntggtgttgtagatgttgtcaaattttnttatagatttatttaaatttaaaaagttntgacttgagaaaactcacaactgattataatatgatgaaacgggagtaatatacatacagacaacggtttcagcatcatctaagccctaa

SEQ ID NO: 5558 - DNA, 458 bp, Oryza sativa
  unsure (1)..(458): unsure at all n locations
ggtcaccatgatatgtgctctgcatctcaatgttttattctataantaactagatccgtcatctgtagcatttggattaaaacatatgctttaactagaagtttccatacaagtatttcttcatagcgtgtatctgtcatgttcctattggcagctggagctgtccatcaacaccttgtctcacatcttgagaggacacgcataggaatgttagttgaatctgctgaacctcgcgaagtgcaccatttttccacccttattggatttggagctgatgctatatgcccttatttagctatagaagcaatatggcggttgcaaattgatgggaggattcctcctaatgatgggaaaccttatacacaagaacaacttatcgagaaatattcgtatgcttcatactatggagtgatgaaagttcttgcgaagatgggaatatccactcttgcatcttacaa

SEQ ID NO: 5559 - DNA, 442 bp, Oryza sativa
  unsure (1)..(442): unsure at all n locations
tgcaagcttagcananactnttaagaaatcaaaaacttctcaagaatcatcaagcacagcataaatacaccagtattgtacaaattgagcctccatgtattacattcaaactcagtcagaatcagtcctttcatcatcagagtcttcattactcggctggaggtcgttgttgcgaaattgctctacaacatcactcgcaattttgtcagccgcattttgcgcactgctgataagatcaagggcagcttcttcacttgtcccgtctgcaaatccatcaatggtgtcgacttcaattctcgggtacaaggattttgtcatcgccaaggccatgctagctcccatacttccagctttcttgatattcttgaaatatacttccggagcaacactcagcttgtcaaatatttcnggtgcgtcgagtgcactcggaccaccattattg

SEQ ID NO: 5560 - DNA, 151 bp, Oryza sativa
catcacgtgacaagctctaagtccgtgtgtgattgatattgccatggtaatctgctctctctcccatgtgccacgcatctgcattctgcattataacatatttgatttgaatgtgagctataactacgcaacacgatatatctagtcctgc

SEQ ID NO: 5561 - DNA, 438 bp, Oryza sativa
  unsure (1)..(438): unsure at all n locations
gcaagctngacgaatccatttggcaaccttgaatttattagagcagtcatatggtctgcacatagttaaatttccctcagatttcgggctccatctacaaactaatttagctgtttagtgtagtgaatctatattaccctgctcgtcatacaagtagcagcttgcaaacaaggaaaagtaatgactgtattcacgcttatacgtcggcctgatcaggaatcacgatttctggctgaaattggttctggaaccctaatccatctgatccatattatcattcttttcatagaaatacaaatgtgttggcatgaaatattcaaaagggtcatatgaatatgttgctgcctcgatctgatgttcacattaccaccacagttcgtacgatcacgtgctcacagaagatngccttttggcttctaacctttctatccacattct

SEQ ID NO: 5562 - DNA, 428 bp, Oryza sativa
  unsure (1)..(428): unsure at all n locations
agcttagagcttaacacaagtttaaagcttttatttattngttcaatactagactagatttagaagggaaaaaaatacccggggagaagagatccatgcatgatcaccccttgtaaatactacttcaatctgtagatacaatcatacaaacctacaagaatatataaaagttgattttgtatttttatgtacatttcccagctgctatagattgcagttaatggaaactttcaatctcctgacgcactgcaataatcgtgcaatcagtaaaacactgacgatcgaaatgctgctactaactnttcagtctacccaataagaaactcaaacttcaattccactgcaaaaaggggattaaacagggtaattaacacctactgacatgcttagcatattaatcctncaatcctatgcatattaacacctac

SEQ ID NO: 5563 - DNA, 232 bp, Oryza sativa
cttcggtccgtgaagaacaagtgatggttttctggagctgacctaaacccaatccttcccgaaagagaagtttcgttagctgctaaaacgtgtgttggttgcttgtgtgtaagggtatggtttgcatcattggtggggatgcgaacatactatagtggttgcttaagcaacttgaacaataaaaatctactcacaacagatcagtggtcaagtggtttaatgtcttatcttt

SEQ ID NO: 5564 - DNA, 395 bp, Oryza sativa
  unsure (1)..(395): unsure at all n locations
ttctgctataaatagcagcagcaccttacattcaagaatcacctctcaacacacaactaagaaacatatctaggtgaccagggtacgtatcctcagcagcangaagcaatggagggaaagaagactaccacttctatggtgatcatgtgcctggtcatcttgagcctcactgtcgacttccccaccgcggcacaatgccggtgctgcatattctctcgggcaaaagcatgttgntgtgggtgtattgctgctggtggctccgactcaatctgcaagaacactcgttgtttcccatgtaattctgccgactctggtaaattcactgaagtcactctttttaatgcacttcttatattgttataccaactctgtagcataatcgggactaatacata

SEQ ID NO: 5565 - DNA, 459 bp, Oryza sativa
  unsure (1)..(459): unsure at all n locations
gctcaattgatgattcatctctaaaattgggttattaatctatagctgcaggacatgtaaacaatgataaacttttggagttattcggtttggagtaaaaacaaaggatttggattttgaaggattaatctctatgantttttttgtttgtaagagcctaagcctggactaaagattccctcttacatcttataattaagaatcataaaattaggttagtatatatactacatgacttactatgaataaatttgcaaagtgctatataatttattagaacacatataaccccgaataataaatttttataatatttagcaaaagttgaacaagctcatgcgagtcgcttggtgggaaactgtgctggctgaaaacaacatgaagaattagaggttgttgtaacttggaatataattacgagttgccagatctatacttatngtactattntctatccta

SEQ ID NO: 5566 - DNA, 470 bp, Oryza sativa
actgcaacagcatctagcccactattgtattatgtaaagcggattgttcagttaaggtttattactcagtattgcatcgttggcatatagtgagggagactgggtgaggcaagattaccttccatggacaaaacccgtcgtgacgaagcctatcggccatctgaatgcctttcgtgtagaatcgccgtctggcagctggagattgctggtgctatgatctcaccaagagaaattagaacttacatgggattgagggagctggagttcccatatttctagacattcttcttccttctcttctgatctggtagatgtgagaacagggatgagcttcttgattgatatttcccagactcatctctacagaagaatgcagtgggatacaaactaaaatgactcatgccagaatcaatcttagaaatcagatgacattcatctgacagaacatcgatccatgtgtaaagatcact

SEQ ID NO: 5567 - DNA, 451 bp, Oryza sativa
  unsure (1)..(451): unsure at all n locations
tcgacttgacttccgaacatacttgattctggcgattnngccctccaggttgacaactaagagagttggagggacagggaggagcaatttaaaaaactacttcgcatagaaatgccgaaggggaaaaggagacgttttgcaaatatgattttctgaaaacttgtcattagggtttgaccatttggctcaacctacagtcgagttggctctgataccactttgtcacgcctagaaatttaacccaaatttccagactattttgtgtattaaatacctatccaagactggctagggtacacaaaacgacaagtaataaacagttccaaacgtaaataaagcgtaaaatacttacagaaggggcacttagtcctcacaccgaaacaaaagcagcagcatcagaaaaggcgatcctagcggggcttcagctccacttccacaggcaaactcaact

SEQ ID NO: 5568 - DNA, 352 bp, Oryza sativa
catctagcaccttaatctttagaatcagacatccaactcctctaacgtttgatatactattcatattatattacctcataatatagtttaggatgagggttttgcaacaactttgaatagattatataacatattcggatatcatcgggttgtaagtcatcaatttatacgtttacagtgatacctagttcgtatttgtttgcaagtgatagctaacatggtgtaataaatttaatagaagattctacatatatatgtcaaatttgtatgtcacgtgatcatattcatcctagttatatatatgatatataaaaaccattgtgttaaaccatcttagagtggttataaatga

SEQ ID NO: 5569 - DNA, 370 bp, Oryza sativa
agcttgcataccatggtcaagtggtaatcggagctgaaactctctcaggcttcagagagatgatgatcgagaccaaactcctccagagcacctctgaagtctgaaacctcacttgcttttcctctcctctcctctttcttgatgcttcgtttcttgaaggaaccaaagtgagatggactgatggaggaagaaagggcgagtgattaagaatggtttcttgtgccgtgacgaatgaatcgaacagtgcaaagtaaagcgagaggaattgaagaaaaaaggaggagaagaaagcgatggggatttggaaagaacagcacagcacgtcagttgagtcttatcactcatcacgtagtcgtcagggattattcct

SEQ ID NO: 5570 - DNA, 467 bp, Oryza sativa
  unsure (1)..(467): unsure at all n locations
tgtagctgatgtcttatgaaacactntgttccacaacctgatgtatcatgaaacgaataacacaacctcgcatcacagaagcccagatatctagggttctgtgaaaattgcttatcgtggtcgctgcctccttctttgatggctttgaagtgaactgtcagctccaaagttcaatctcaccggtcaccatccacctcaactcctgaccctgactacctcgggtcctacagcactcaaagacacaaggactttgatggaaaaatctacatgtcctgtggttttctgcaaaactacgaacagctaataatgtgtgttccaactcacaggtgaaaggggcaccagtgcgcgccacatcagaccgtatatgaattggttcggctcggatatgcatggactaacttatatcgaatcagacacattggatatatcggtgatctattatacagcatggcgaccatgtcatgtgc

SEQ ID NO: 5571 - DNA, 462 bp, Oryza sativa
  unsure (1)..(462): unsure at all n locations
gcttgtagagcaatagcaaccgactgactgttttctggaaatgaagcggacaaaatccacaaccagaatgaaaggagaagaactgaaataaggagaaaaatggacagggcaaccaaaaagatccaagacttgagaagcaaaagacttgccgaaatcaaagttccaaccccccagcggagagggagttatcagatcctccttcatcatgaagaagcacagaagagctagtgccaagaatcaagatcgccatggccgacgatcgccaccggaaagaacggagcactcgccatcttccatgtgataattctttntaaaattaaactcaccataccgatctctttgacaaggtgacaacgcagatgcgtcattatattgaaaaatgaaggtggaaatatcaactcaaagctgacaagacattgcaccacatcattttgaagggcttctaatctatcctgatcgatg

SEQ ID NO: 5572 - DNA, 412 bp, Oryza sativa
  unsure (1)..(412): unsure at all n locations
cgctctcgctcatgatcctngataaagatcgaacccctgattactgaagtacgcttgaaggtcatcgtgctgttgcagcatgatgttgntgaacttggcgaactgagcatcagcagattgctgccattcttgcgtttgagctatgtgctccatgaggttgtactggatctcccccatctgcatatcaaggaatggacgctcaccacttgatctggaaggttggctgtccacccattgtatgtcatgaggcgcacgccaccggtcctcactggcactcgcccagtataagactccgatgctgtggcgtacagctcgtgtccatccggttgcatccccatctggtgcccaacctgcttcatacatctgtactggtgttgaggatgaggaactctctcgatcattcattgttatg

SEQ ID NO: 5573 - DNA, 390 bp, Oryza sativa
ggtgggaggaggagcagcaagtctgcccattgcctttatgagcaaacctctcggccctttcgtggtctctcaacgtacgagaaggaatgcctcgccatccttatgtagagcaatggtgcccgtacttgcagcattctgaattcataattcgaactgatcagcgcagtctcgtgcatttagaagatcaacgactacaccttggcagcagaaggccttcactaagcttcttggacttcaataccgacgcaagggagccaagaatggagcagctgatgctttgtcccgacgcagccatagagtcgatctcgcagataggcggaggtacgattgcttgctccttgcatgtgaaggtgggaaacaaggaaacagaggaaatgcttactgggacat

SEQ ID NO: 5574 - DNA, 472 bp, Oryza sativa
gacctataaaactcagcttaagcttctatgacatatgccctaacattcctttatataaaacacatatatcacggagttagccacattatccttatatgattagataaagcggatggtatgatcaaaatcactcttgctcccgcggcttaataaagactgaagatggttgtgtcaacaagcaccggatccaaggaagatcgagcaagatccagagctggtactctgaccattcttgtttaaaaaaggtattcggtgagtccggaatctttatgcgaaaactggagatcttctgatgcctgaacgatgtctatgttcgtgcccaagcccctaatagatcctatgttgcctcgtagatctgcgagcaaatttactaatggcggccggaacctacagagagtccttgtcccagtggatgaggtgctggaagatgaaacgctattgctatatttatcggagtatgtcgatcttatat

SEQ ID NO: 5575 - DNA, 446 bp, Oryza sativa
  unsure (1)..(446): unsure at all n locations
agctaaaatccaactcaaacatagatatatatatttccaaaaatgaaagaacttgaggaccgactcaaatacgaatgacgtatcaaaataccggcaaaaatatttttaacttttataataggagagatatactatcctccaatgagtcatcctgtttcactgctagctctccctaaattttgaaatcacatacttattcaataagaaaaatcataaaggtactgcttgtactaaatacgtgcataactgacttgataaactacaagctcaatttgtttttcgttgcaacacacaggctcttggctagtaaaaacaaataatggtggtgtccgttttaaactgcttttcgatttagctgctttcttatctttttcgctagcacatattttaaactnttaatcgatgtgtttcataccggaaacttattatagcaaatactttaaata

SEQ ID NO: 5576 - DNA, 324 bp, Oryza sativa
  unsure (1)..(324): unsure at all n locations
gctgacctacatatccaaatagatttttttacgngatgcacgtcgacatagatttttataaaaataatctatgtaggtgtggatcaatgatgtgctgaaggtctgtggatatagcctaaattaatgcaaacccttatttcttgaaggggtaaatatagactaaagccttatcaacagaacttgcttgaggctcaagtagaaatgtgatatatattacataaacaaggaagatctactgataaatgcaagtatccattaacaattcacttttctaagcttatttaaagaattactggtacacgataattatagactaacatctcc

SEQ ID NO: 5577 - DNA, 383 bp, Oryza sativa
  unsure (1)..(383): unsure at all n locations
atttgtgggcgttagccgctgacatgtgggtcccatgagtcccacattgactcagctttgacatgttagctaaaaccgggcataatactgccttagaacctcggacgatcctgttttgtatattgagggacccgttatatatgattntgctacacgtctatcgtgtgattttttcttatgcatttcacgtttttttagtcgcaccatatgtgggccaagatttatgcaagaattggtggggctgcatgcatggataaggccgtgtgttggatgcttatgcccggttcttttctaaataaaaaatgatttctttaacggttaaaacattaagacattttgaactaaaatataaaaatacagtcctatataactaannatacata

SEQ ID NO: 5578 - DNA, 425 bp, Oryza sativa
tagctcagaagtatcgactaaaagaacaattggtgctttgtctcagactatctgagaagctcttatagatcaatcagctatcataatgaggaaaaagagatatctagacagcacgaacagaagaccttagtgttcacctttagaagaaccgtaaatgcatctctcttacaatcaagtgggaaatcatcataatcaattagctgagataacgttccaaaaacagtccttataacaggaaaatggcagatgcttccgtgagacataaaacataaacatttcaatgacacggtcttcatgcaatgagaagattcatgctccaggaacaataacagcaattccacctgaaatagtaaatgcgaaataaggtcactgcgaaatcaattcactaagggaacagagaacacttgtattaatgaccccagctt

SEQ ID NO: 5579 - DNA, 413 bp, Oryza sativa
  unsure (1)..(413): unsure at all n locations
agctnggtcgcgtagtactctcctatgttatatgtccnctagattatctaagaggcgatcgtgcatgtcgggcgcctggtacgtgtggtctggtggatgtcgtgtntatggtcatgatgaataaaatgcagtgttccttcgataaatctagtggttgtactgtttttttttttaacgataagggcatgagttccgcataggtgaagaaaggaagaaaggagcaaacagaagcagaggaaaaaactggtggaaaaaaaaaactctagccttttattntactaaagtatttggtcttgtagggtagttgccgagggctctcgtcttgaactgtcttgagaagtttgtctactccacgccttccaatgttctatgattcaactttgcacgattgtgaaatttatagcagtaacaag

SEQ ID NO: 5580 - DNA, 141 bp, Oryza sativa
tcacaccacatgtgtgacacgccgcacactgatatagacctttgcatccctctcattggcgctcacgtggtgacccatgtggtacgactgatacaatgcgatctcggcgagaccatacaatgtgcaacatgaacaccagtt

SEQ ID NO: 5581 - DNA, 448 bp, Oryza sativa
  unsure (1)..(448): unsure at all n locations
agcttaatagaaggcgcaagtcagagacccttcgtgcccaatatatcgacattaaggaactcaggcatgcatttgttctcccttcagattatctggacttgcctagttgtttgttcacagtattttccgtaagaatttgcttcagataagctaaatgacttggtttgttcctcaatatatttatctttcctagcacaagaataaccccttaagatcaagcctaattgcagctgaaacctataaaatctactgccgttctgtcactattccttaaaatgttggtttgatatgcagggtctgcgtangaacatggaatgttgcangaagacttccacctgatgacttggatattcaagaatggttggatatggaggagccagctgatatttatgttcttgggtaannatgttgcatccatcttngtacttattcatattacactatgact

SEQ ID NO: 5582 - DNA, 309 bp, Oryza sativa
  unsure (1)..(309): unsure at all n locations
nganatggtataactgatatactaagtgcgtcaactgggttctcgtgtgctntaccttctctgtaccatcctcaagggttgtcaatacctcctgatacaaaataaaagattaagagaaatgcaggttgtcagagcatgaacagcgaagagaacaaacgtcacacgaggcatgttcttaccacttcaccagacacgatgatgtagcagtccgtcgaagcctcgttctccaggatgatatccgccttgnggggaaatgactctgccttcatctccgcgacctgaatttaccacgttatttagtcagtcacc

SEQ ID NO: 5583 - DNA, 393 bp, Oryza sativa
  unsure (1)..(393): unsure at all n locations
agcttattacgagctttgctcgcacatagattactccatcccgcttacagcatgacgggtttcggtgccttcctccatctttaaataactgataactttagctttactatttgaatattgactagtaattactctgaaatggttagagtaattgaataaaagtttcatgttttatgtttagaatataatacaattcaataacatattattccttttagtccttgtaaatatttagtaaaacgacgagtggctaaattcaaaagggaatagtgtccactatcagtcatttaaaaaccatagggagtatttgtcttttgtntacatcattggcaagtatgaggaagctatcactgaattgaattgtcaaccagtagtaacaattctcaacttatg

SEQ ID NO: 5584 - DNA, 405 bp, Oryza sativa
  unsure (1)..(405): unsure at all n locations
ccgatttgactacaggaagtattgtatgatgtattgtacacancaaggctgtcagaaaagtaacttctccaattaaacaacacctattcttggatcaccgtaccggtcgatccagatcaacctaacgatccaatgctaatatgagggtcgttggtcaatggccaaagttaattattccatgacacaagtgaacacgccgagcatgtataaacagaaaatgatgaaacgcaatacacctggcctgtctttaacctaaccgttaggactatatcacattaataagtgaataaattacgatttacctgctcaaccatcacatgaactgatgaacaaatttccttggatttactaatacagtatcaaaatagcaatgacttatccagacatgagatgcatgatgagata

SEQ ID NO: 5585 - DNA, 313 bp, Oryza sativa
tttatcattccactaacaaaaatagtatgcaacaagtgatgcgtctttccattctaaatattggtcaaatttcaattgggtattgaccattgacataccactagtttcggtaccattccgagcaaaagtgatccttccattgaattccgcttactcgattccttcaaattacatttatctataaactcatttttctctatcatatttgttccgattaccaccatttttacatataatatcatgtgaaattttgataaaatattgtataataatactatttggaaatcaatcgaatgggaaaaaagagagaaaa

SEQ ID NO: 5586 - DNA, 422 bp, Oryza sativa
gaattcgtaagaaccactatagttatattctgttagctgaaacttccgtccgaaagtgggaattaagcgcttcttaattattttgggccccaaagtttctctcatactctgacggctgaaaagattattacactgtcgatcgagaattcgagattgtagcgaatcgacaacctgatgaagggatcgatcgatagtgaggtgtgcaatggacacaggaatggcgggccgtcggtttgttgagatggcctctctcccgtcagatactgtcggtagtagctttttgccgcgatctccgtcgccgtaagatggtgtcgtccatgtgaatgaacactgtagaatgaagatctgatgtgaccgtgtagcggatagcaatcttgatcatacaaactgatcgtgatcggaaactgatggacgtgatcata

SEQ ID NO: 5587 - DNA, 367 bp, Oryza sativa
catacaagtatactctatatgttcatccgatatgatctttatgtatgcccggtgggtcaatacgttctgctagggggccgctgttgacgcgtggaccgaaaatgagttttcaggttatagccgagtatatatgaacctacagggtcgcacgtttaatgggcctgaataacgggattgtatagagatccaatatgagcttaattcggatagagaccgaataggagtcctactggccttggaggcccgagtgatggatcctatatattcatgatgggtgtgaccggcggaggcatatcatcacgtgagaaaccctagccatcactttccttctcaagcaaaaccctaaccgcgcgcgggtgctatcaca

SEQ ID NO: 5588 - DNA, 173 bp, Oryza sativa
tccccccctctggccttaacctccgttcttagaactagagaaaactaaacttttggggaagttttgattctggagaaactgcaggtccacaagctcccccagcctgccttaaactcgccctgccatgcacacccctatctccttaccaccatccaactccaaacctatcatag

SEQ ID NO: 5589 - DNA, 463 bp, Oryza sativa
  unsure (1)..(463): unsure at all n locations
ctgcagctgactacaatactatccgtagtttgttcatttaatgactngtgtagtctagtagtgtacatccagcaatttaatcccctttcattctctccttctctctcgaacagataaggcagcagcactagttattcccctcctattctcctcccttgctgctgntgctaaggcttttgttcctcccctaactcaccatccactccatggctaccgatctgctgcttctaggtgtggatcagctctactgcagctaaggcggtgacggctgctgctatggctatggcgacggcggctactgcagctgcggctgtggctgctctttctctccctctntcctttcctctctggctctagcatttgtgtgatggatacaacatgttggtggttctcatagtgatgtgcaagtgcagagaaaatngatgctcatgccatggctgcactatatgctcaataaatgatg

SEQ ID NO: 5590 - DNA, 311 bp, Oryza sativa
actcagctgctgctagtagcgaaagaagagtaagtaaagcgatattttgttatctttcaatatcctctttaagagcatattctgttcatatagacataccacccttcgttcattgcgcgttcatattatgatgcaggtttaatcatgtcgctggcatctgtgtgaagaaaatacgtaccgcattatttaataaagccaaattgcatgtgcctatattggtcgggaattttccccgagaagttaactagattatcgtagcatgtgtggacgccctatgttgcgtagaatagattacgacatacctaaaacat

SEQ ID NO: 5591 - DNA, 236 bp, Oryza sativa
caagggcatcaatatattatcaggaacactagagaataagtccagggaaacggctggtcacaagcatggaggccaagaaccctatggaaagatgaatatctatcgagtacaaaaaccacgcatacttggaaaaaagttgggagaatgccggacataccacaaccgcgaatactcgaatatctgtaacctaccaattaataaaaagcacgtacaaaattcagaaaagccactactta

SEQ ID NO: 5592 - DNA, 436 bp, Oryza sativa
  unsure (1)..(436): unsure at all n locations
gcttgatgtggaagttgatgagatcaatgactctatctaactgaaagtctangttgaatagcttgtggcgagcagcaatgactgatatcaaagactagtcaagtaagacatttcacttagaattgattaatttcatgttatttgactagattagcattaaccggaacatagatctgcacattgctctatttatcttcataagtttattttcctcggatgcttaattcaatgctgaatgaaccatcatcacagtaaaaagaanaaacactgtttctaaagcgtgtggtgtttgataaatctattaatgtaattnttgttgtattgctaaagtttgatagtctgaaagtggaagacttcgaaagttgcatcctacaaattgttggaatatgtcgcgcattgctagctagttcagaacgagtactttacatgacaacag

SEQ ID NO: 5593 - DNA, 454 bp, Oryza sativa
  unsure (1)..(454): unsure at all n locations
agcttaagattctgagaagtagctagttggttactctcttctangaatctggagaagntggatttcctagcttctagtttctagttcattttctggattntataactacagtttcttagaatctagatgaaaaactaaactttttggggaagtttttgattctggaagaaactgcaggtaccagaagctcccccagccatgccttanaactcgccctgaccatgcacacccctatctcctccaccaccataccaactccaaaacctattcataggtcctctaatagagttcttctagagttgtcgcccactgtacgtcattggagtcaccgtcatcacttgtgagtctttcgtcgcgaatccccacttctccctcaccctctctccggcggctggccggcaagcaatcgaccatatatgtngtcagcggcgtggtgtagggatgcaagcgggtc

SEQ ID NO: 5594 - DNA, 458 bp, Oryza sativa
  unsure (1)..(458): unsure at all n locations
agctntgcttgaggtgtgtgagtgaagtgttttgttagctccttttataggcaggtaatgacggttatggcggttggaaaggtcggtaataccctccaaccggcatagggaggcaatccacaccgtccatcgccaaccctgcatccagcggctgcacgacgggtggttcgaccaaaccaggggacggcccaatcctgtccaattttggctggcggcctcctcttctgttgctcacttcagacttgtgaattttggcccaattcgtcgtgtcatttctgagttcttggcccattcatacataagtctgattgtcgacatcgtccgattgatttattgtctgatttgatgttgattctcctccactctatagntattctctgcgaaaggttagtgatccaaatactagtggaatattattattctaacaaggatatgcattgcangcataactaattctc

SEQ ID NO: 5595 - DNA, 85 bp, Oryza sativa
agaaagaggaaagggaaaagagaagggagggagagtgcaaggggaaaagtgggaagaagaagaagggaagaggggaaagagaaga

SEQ ID NO: 5596 - DNA, 412 bp, Oryza sativa
  unsure (1)..(412): unsure at all n locations
catgcaagctntccaatccttcagctgtcttatagtttatatgaatctggggatatattgatcagaaagaatggaacaactgcagaaatttcaatataatacagtttaggcatcaagtgacataaccaagtaaaacaatcccaattaggtattcatctcaaacctgttgtttcacttgatttacgccactcagtaaatgcattagacaaggatgttgcctgcagaaatagaacaatctttagtgccaacaaggaaatggtaaaacaagaaaaatcttttgtcaactgtaattctataaggttcaaaggaacatgacctcttcttgcttaagcacttgtgaggcaagtttcaagctgagcaaagttatcttggagtcaaaaatcaacgaggggaatgcgacattgtaatatac

SEQ ID NO: 5597 - DNA, 400 bp, Oryza sativa
  unsure (1)..(400): unsure at all n locations
gcttgagctcccgatgaacttgctgtgtctgtctgagtccatcancctgtcctctcaagtttaatcgcgtgaggtgaggattatcttatcagagaaagggggtgaagagacagataatgtgagagggtgagcggtcaaaaagataacaaaagaaagaagctagccagtgagtcgtcatgtagttccgtgtctggctgttaccagcaagagttactgtggttagaaaatagtactacaatgcaacaggtgcgtctcactgagataattgatggcattatcccagtaacaggcatgatgtagtttgatcagcaaggacgctagccaatttaagtgctttctaataatgcattaattaaatacacaataacactgacttctttactgagagtaacattttgta

SEQ ID NO: 5598 - DNA, 422 bp, Oryza sativa
agcttggatccagggcattatgattaatccgtacacatttatgcatcagttgctcaaatgctcagccacaatctgcaaccagaaaaccataacccagctaagaactactagtacatgaataacaatgtgagaaaataatccaaatattaacagtcggcattcaattgagaagtaggaaaataggaatattagcatgtgacatcgtatggttgatctgtagtaaaacagttcatccgatggtcaggtcgaaaggaagggtgttttagcatattactatacaaagtgtaattaaactaaaatgcatgatgtaaaatagaagctgaaagggtcagaactgcataagcacccccgataaaagcatcacctagaaatgatatcctattactggaccaattggatctcaaaaaaataacttttacata

SEQ ID NO: 5599 - DNA, 386 bp, Oryza sativa
  unsure (1)..(386): unsure at all n locations
cgattcccctctgaaacaagatgttctggaccgggaggtataagatcaatcacttggcgtccatccgatgcatcgactatggatatttcatatccccccttttctttacgcagtatttttcttactacaccttgtgacgttgcattatagaccgtattgttactcttgctaccatcaggatagatctgtccccttcctcggtttccccccacatatatgggatattttaagaaatgaacgtctttcttcatagcagggtcggnggaaagaatgggaaagacgatttcactatatttcttaccgggaacagggcctatcacaagaatattttttttattgggacgataactctgaaaagagagaattcctatcttttctttcaactc

SEQ ID NO: 5600 - DNA, 437 bp, Oryza sativa
  unsure (1)..(437): unsure at all n locations
agctggttcaccgttatgagatcacttttatatacactcggcttcangagacaaaccgtgatgatgaggtaagcgaactgaatctaacacatgttatttttttcttttttacatttgaaaggcaattgcatgtcccacaccanattcctaatcactcaaagcttcatttctacaactaatctacatgtgtgatgctgccttgcagcaaatggtcatggagatcacaaggctaaggaatgagatcgaccagctcgaagccagtttaaggaggcaaactggagaagacctgtcatctgtgtccacagtggatgagctcagccagctgcagctgcagcttgaatcatctctcagcanagttcatgcgaggaaggtactagcacttgcttaaatatggcagaagaatagtgcagatcagcatcaaatccttatggaatata

SEQ ID NO: 5601 - DNA, 349 bp, Oryza sativa
cttgctctcaacctctcttttcaccagcctcagttgggccttacaacgattgtacacggcccattcggcccctttgtattttctattctccatccggatacgcctgcctctcttgacaacgccttcttgctttccaccttcctcctgtacttcgtccttcgccttgtcgcctccttgatcatcctctgggtccttctcctcctcaacagcttgatgatgagatgctttgtgcgctctgacactggcataggtaccttgcgtgataaaatgctttctaagtcaaagtagtaatttgcaattacctatctagatacaacagtgacatcacgggaatatgaaaggacgagca

SEQ ID NO: 5602 - DNA, 406 bp, Oryza sativa
  unsure (1)..(406): unsure at all n locations
ctcccgcaggcaatgtactcgtttttacagacagccaacanagtcttttcattcttggcctctgaatgtctacctgaaaaggtaccattttaacaaaaggtcaacaatctgttttctgagaagcctagcatgacgtaactactaaaccaagccagactaatagatgagctaaaaaagaaacaaaggtgaaaacaaatgcttatccaagaatttcggacctaaccaaaggtttttcaaggaccagaattcttcgaaaaaaaagcgaagcttctcaaatagttttttcccaggagataaagaaacactatagctccaattnttatcgatatgaaatagagtatatcctacaacatcactttntactaataagtcatagctgcttaaaaggcagaaacataatttcata

SEQ ID NO: 5603 - DNA, 298 bp, Oryza sativa
actgatcttctgcaatcttggacagagcgagcttccttatctcctggaatatgaaggagttgccttcagtgaaacagatgtatcgacatgctcaattatattcaccgaactgaaacgtttaatgtgcactagagtcgctactgacccttaacagtatattcttgtacctaggaaatgcatctttcattcagaccgaaagtatggctacagtggtgttatgacgaatatagacatccagatcgaataagacggagcaatccgctcttttgtcaaaccacctcccgtttaatatacctcc

SEQ ID NO: 5604 - DNA, 369 bp, Oryza sativa
  unsure (1)..(369): unsure at all n locations
gagatagaacctacggttgccgccgtcgagcaagtctgatttttgcagatggagcaatggaattctggagtactagatggagcattttttgcacatggaacatgaatactggaataattatacatctgtctatcctaacaaaataaagctgatttctagatggggccggcgtcagcacacgtcttaggactcttgagattgtcaattgaccatcatctgtgcatgtgacttgctgtaaaaactcctgtaaaacactcccagtatgcatattgccgaacataactcgaatgtatgcttacatgcgttgatagaactaaacagctgcaggacaatggctatatatttcatcagntgaatttgctatctttt

SEQ ID NO: 5605 - DNA, 484 bp, Oryza sativa
  unsure (1)..(484): unsure at all n locations
taacgggggcctctcaggaaaggaatcgccaattaatcgacttatgtggttctgatgtagtagtacgcgacaaaactcgcctttcattaacccacaaatagtctcacgcctatgtcgttggtaatcagagaaaactgattactagtaatagtattaattaggaaactttgttacttacaatttactggtgagaatatactgtcgccataatagggagaaatgtctctccatatactataaccataagagaattactatgcatacaactcaattgtccacgtacgactataattgatcaacggttataaacgagtgcagtgcgtataaacaatgattgatatatggctgcatatatctcattgtacatgatgtgtacatctgaattgttcgtatagcgggactatttctattattacaaatcactaggtgatgtntccgcgctaaagctattccctatatatctcttggcaatccttaccatagc

SEQ ID NO: 5606 - DNA, 456 bp, Oryza sativa
  unsure (1)..(456): unsure at all n locations
agctntcgccgatcgcatgcaatcatatcatctcttatccggaaatgtaccaccggagagccccaaaacacatccgactcatcatcatagcttatctcatgcgacccggtggagatctgcgacacgaaatccagcagcttgaactcctgagagcacttgccacacgagctgaggaggtcggatatcggctcctcccctttcttctcatacttgagccatgccccgaatatcagcttctcgtgtatcgtgctcgccttctcccacgcggactggaggctcctccgcgacagcttcacctcgccgaggccgcggaaaacctggaactggagcaggtacaggcacgacttctcatcaggagggcaagactccagctcctcatgaatctgggccaatatgtccacataatccgcaggcttgaagtggngaagaaccaccggctccggcattttcatcagc

SEQ ID NO: 5607 - DNA, 332 bp, Oryza sativa
gactgtattcatttctgtgatctgagaagcttcacttctgacatcttctcaggaagaagtccacatttttccaccccatctcgggagagcattcacatgattactaacatgaggcaggagccggaagataaccttgtctagttcccaattattatttaccaaaaacgtcgcatcgaatctgtggacatatacatggagcattacatatagataaagcgataaattaattgtatagtacgcatggagatggcgagactaatcttttgagccagactagatcacgattagccataagtgctacagtaaccccacatgtgctaatgacggattaa

SEQ ID NO: 5608 - DNA, 435 bp, Oryza sativa
  unsure (1)..(435): unsure at all n locations
cttcttagtaatggactgcaatgcctcatgcaataaacaacctcgaatttatcagcaatcatcaagatatccagcagaagggttggctgatttgttgtcaactttccactatacataaagctcanaagctccatgagggcattttcctctgtttcagatagacatacaatgatcagataaaagctatctgtttacaagaaaatcaaatagcagaaaaatctcccttattctcatttggaaaagtttcaaatgaagcatacacttcttgataattctcgagagatgatatangaaaatgcacaacattgaattctagaatatcaatttgaataaatattcaggactattaaatatcagatcgatataagctctaagttccaccaaaactgatcatatcagcaatataaagaanaacgttacagacagtcataggat

SEQ ID NO: 5609 - DNA, 442 bp, Oryza sativa
taactatgctctcctagtgtttcgaaagaccacccctgattgttgagttccttacgatatcccatcatggccattcgaccggtaatggaaacggaggagtacccataccgggaaagtttcttacaatgctaacgtggaggaatatacgtactgagctgtcaccatcagcggcccacctctactgacctgcaacatataactgcaattaatggtatttaataatctaagcaccatgctcacattaccacgtactacttcatatcgctgtagcagacgtagagcaatcataagaatgaacattatacccacaccagagcatatctctcgtaagacagttacactattatatcgagacatgtgcgaactaaagtcagtactcgagtaatatgatgtaaggtaaagacgaattatataaagataatatttcattatactataagct

SEQ ID NO: 5610 - DNA, 472 bp, Oryza sativa
  unsure (1)..(472): unsure at all n locations
ttagagcaccgcggctgcagcttgaggatgaatggtggctttttttttgcactctngnattcctcatgtaagactcatgatcagtgaagctaagaaatgtctactgggatgggatggaggacctgtctggtggcattgtcaaacccacattgttcttgaacacatgctgagtgattgctgtttccacgtcactgaaaaacgagttctgaagctcaaaaacgagttctgttttcttcagaaggaacaacagatcgtaggtagatttctatcagaagaaaacgacgtaggccagaataaattctactccctccatctacttatctacttttaatagtcatatttttaaatctgaaatttattttttgataggcatatttcattccaacaacttatcatcttaatggctttcttggaataatgcgtgatttttcattcttccacattatatnggctatatgtgtatcgagaaatg

SEQ ID NO: 5611 - DNA, 512 bp, Oryza sativa
  unsure (1)..(512): unsure at all n locations
gctgactcattgtgatagtctatgccaacagagctccattttctaacatgggcacttcagtattactccaccgatgatgatacagagcagcccatatgatggttagtcatcatacgcaaacggaggcacaaaacttgacaatacaataccctatacaagcatcaaaatgaaccaacgcagcatgcagcatgcgcacgcaattacaccctgtgggccacaacatgcgcaccgatgttgaagtcggcagaatatcaccgtatcaccaccaaacctactagctagtattcacaagcttatgcatgaccgatgaacacgcctcccgtaaccgtggcgaacgatgggacggngagctagagcaacacgcccgggtgctttcctctggccttccattgctgctcaatgtcgtgagcaattctccgagcatncaccgatgttgccatcagcctgcgccgggtgaaccngaccgagtagaagcacgtctcacgcttcaaccgttaggaatgccttcttgc

SEQ ID NO: 5612 - DNA, 423 bp, Oryza sativa
  unsure (1)..(423): unsure at all n locations
agcttacctgccaatctcaatccaaaatgtctatgatcatgtcagtgtcattggctactcgtcgttagaccacaattaatcaatcaaacaaaagagtgttcaactcgtaagcagttcaggtgtctctccagccaggtgctgtatactgcagttggctaactcagctccctgcagaggtcttgtctggtgagaggtttcagttctgaaggttaggtcgattgctgtctctcaatggtcactccaatccgaaactgcagtagactatacgtacaaaacttgtctagcttaggtccatcttaactgcacgattgaatagattgtggacagataaattcctaatacagataaataaaatgctgtcacagattntctttttgaagaaatggtattntataaccgatgcacgaataatccatacaccct

SEQ ID NO: 5613 - DNA, 358 bp, Oryza sativa
accatgactgtcctaaccatgtgaaaacatggtggattcgatcacgcgtgctcgaattgcttcttcacatgcatattttacaccaatgaagaatggatgcaaagaggtggttaaaatgattatcctttctagtgagaaatcacataattttgggactagagaaaatggaaaaagccatgccatttccggatttgtgtcggtgaagaaggaagcgattgttcttcacagttaggcgggtggcttgcactatgcaggtgctcttttttctaatacacatctggttaatttcatgattgtaatagtacaataaacacataccaattgtcaattctgtttttcaacccggcgaagaatatta

SEQ ID NO: 5614 - DNA, 458 bp, Oryza sativa
  unsure (1)..(458): unsure at all n locations
tacttntttagctaacagtttatcatgcggctaccaaaattgaagccacactgtagttcgaagagagcaaccttgccacactnttatgtgccaatgacatctgggacccatgtgatgatgaaggaatcttactacaagcgtggcacgaaccaaacagacacctaactcagtcaaacctgcctaacttgaggcaaattgtggtagtgaaccaaaaaatcagaactacaaggcacattacatgcaaaggtttggtagactcaaactgtgacaatgcacattgacactaaaaatgagaaataatcaaagtgtgcaaaaactaggcacatattttagtgacatatgcttgtctaaccaacctttctacctcttagtatgtggctttaagtaaacatagcggtgtactatagaatggcattgacttggatgaattnaggatagctatgatacatcatgtggat

SEQ ID NO: 5615 - DNA, 489 bp, Oryza sativa
  unsure (1)..(489): unsure at all n locations
ntaaccattatgggacttgtagattgggatgtattgtatatattaatgaagatgaaccattcacatcaccaataaactcagatgtcttatcacgcttgctgtcaacaatatatgtattatcactgtgaacattaactgagaattcatctgaactctcaagcatcacagtatgctcaacttcttttccaactatggattcaccagatgaattagtcatattgggttgtcctgataactgatctttcgatactccatccatttccacagaaatttcatttgctgctacacttgctgctggtgaaacactatccaaattcttaatctcttcaatagagaaatctgacttatgtgctactgctgcaccaacttcagaatctggttgatgaagaanaggagacgcgtcctggtactcatcaagactatcttcttcgtcagacggacgtccaactgccagtggtgaaattcagagcatggtctgcaactaatttt

SEQ ID NO: 5616 - DNA, 439 bp, Oryza sativa
  unsure (1)..(439): unsure at all n locations
agcttcagtgccacctggtgatgctagatgttcgtttggagatgctgggttgccattaggactccgagaatgacctggcacaaactcggctgcgttagggttcatcaccctagtggcaaatgtgtttgcttcggtaaggccttcactgcttggcaaggcagacttgttacgagggccacggtgacctgatctgttgtagcctccagccaaccgtggaccataagggactcttgcggttgcagattggtgagggtgtttacgaagagggatcgacaacatcggnggtacattggctggtgatggcagcaatcctccatgttctctgaaacctggaatggccattgacccaaaagctggaacagtggagggatngaatggagcagcagcagcagaaagcttactggcccgctctttggcacctggtgaatcattcttttca

SEQ ID NO: 5617 - DNA, 396 bp, Oryza sativa
  unsure (1)..(396): unsure at all n locations
agctttcatgagaacctaagttagtgcactataactctggacanaatttgcattaatcgccatgataagaggctactcaaattttcaatcttctttgctaccattccatacgcgaactgttcacatttcctattagccacatcatcagccatcttgtataaagaattcttgcttttagcccaaccatgtccaacacaaccaagaaccgaacattttttttttttggtgctatccctaaagtatgcatgctgccgaaacaagaatttcagcagcctattacatctgataagatacttgtgttctggggaaataaaatttcaaagaagatttaacttacaacagtttgccttttagaaggttctttccgggacaatgaacgaagatcttcacattctt

SEQ ID NO: 5618 - DNA, 448 bp, Oryza sativa
  unsure (1)..(448): unsure at all n locations
agctntactgtntgacaccttctaagatgcatttgtccaactcctaaaaagntaagtaactgcggtataaaaggattntaaggtattgggcacttgatcacgcgcactttggcctaagcaaaaagtgcctaagtccctaaaagaacgtgacaggccacacctgaaaatatgggctgcagacatattaggcctaggccaaaaaatatgccttcgataccctttaaaggatgacgcatgtaacatgctcccgggtaacaaatcttctgggtaatatagaccaagtgtagctcatatgaatagcttctgatctgaatgattatcccttatgggatactccaaaataaatataataattgaatcccgactgtgcgcaagtattcggtgatagcctttacggggagataataatggtccagtctttgagcatagaagatagactcatgactat

SEQ ID NO: 5619 - DNA, 348 bp, Oryza sativa
  unsure (1)..(348): unsure at all n locations
cggtgacaggtgggaccggtctccatggttgtgcatatacctctcggtctcatatcatgcacatcggtaatggtgacttggctgtccataatgggcggtctcttcaagactgccacattacttgagcgacgtacgaatctgggtgagccgatttgctctccctggagatatggtaacgntgcttctgtcggcgagcgtaattaacgcgcgcacgatacgatctatcttgactgccacaaccgcatatctacctcatgcgccgcaagcgggcgaatgggattagtggaagcgtgggcacgagaaacgatggagcgggatagtatgaaacgagggagcgagatagtgggc

SEQ ID NO: 5620 - DNA, 377 bp, Oryza sativa
caaacattaccagaagagtatgaagaatgtccaatctcgatcatgtaccacattaaaacaccaaaagggtttcaaattttcaagttgatggatcacaaagtgagtgagtaaggtcaactcaacaaactacaacctaatactcctacataaccaacagctcatgccatgccaccaaagcttaactactaaattcacgaacgttatttttctttaattgagatgtgtatgctaagaccttgttataatctctgtcacataagcgtttaaaattcgcccaatgaaaactcttgtttctatgggttatagccgatcacgtacgaataattaacggaacaccataagtatttctccgccggctaatttatcagataatcact

SEQ ID NO: 5621 - DNA, 472 bp, Oryza sativa
cttgcctcgtatctactagtatagcaggaagcatagtgaattaacactttataaggtcaagccagaaaagcaagcacccgcaaaaggaaaaggactacagagtatatcccacaacatcaaagtcctttatttttattgcccgcttttacccaagacactgactctttcttactcttatcgataatggtgataggtgtggtggcgacctgccgaatagtccttgcatttcgtttgcaccacaactctcaaacaatcaagatgacacgcgaatacttttatgggctttcttggattttcgggtacttgaggtaagcgctgttaccattaattacttcacttatgtgcatgcgtgctactcttatatacgtaggcgagattcacccacctagtatctttatctatattcttctcgagagtctatattgctctaggaggtgtgacactatttctagaataggactatgcataggtg

SEQ ID NO: 5622 - DNA, 446 bp, Oryza sativa
  unsure (1)..(446): unsure at all n locations
gcttggcgcacacganagaggatgagagcttttattttctcgcgcnccctacctggcgcgccagatgacggagcgtggggctcctcaccgggagaccgcgcgggccccccctttgcggttcggccaggggcgctaagtgaggttctaagcccttgatctgtggaatggttcgcgagagagcaaacgcgcaagacacgggcgatgtagataggttcgggccgctgagaagcgtaataccctactcctgtgttctggcggatctgtctctgaaggagttacaaagagctgaagagcaagagcctttaactctagagaccctctccctactctttttgcccgtcctttctatgagctcccctctctccttgttgcttctttnttttttcttgcattctcttggtaggcatggtcctncttttatatctcaaggggataccacatatacc

SEQ ID NO: 5623 - DNA, 310 bp, Oryza sativa
  unsure (1)..(310): unsure at all n locations
cctcgcattgtcagtacccgctccatgaactttatcattctcatacacttctangcgtacactcgtatttatcagtgtatatgagttcttgcgcacctccggatgggaggaacttatacatgcatgaaattataattatgtatagattctcacacgggagtcctactatggcgacatcactgtatatacccgacccgcggtcctaccaatgtctgtcgcaccgaagagtccctgtcttacacattaagagaccactttgcatggatactgccttcgctcagctatctactccgctttgtctatatccata

SEQ ID NO: 5624 - DNA, 385 bp, Oryza sativa
ctattaaaaaacaccagaggactatgcaaggtttttgttatttttgaaaagacacactgaaatgtagccactttcatgtggccgatgcatgtattgtgcgacttgagggaaatcaataatgaagtttgtcttcattcagaagagcagcatatccagatgaccagatacataagaaggaagagatcgtgtgacgaactccaagactccgccggcgtcacgccaagctaatccggaattcgctacgggatttgggttgaattatagaggaaggcgatgaactgatagagagagagagaggtagtctgatagcgtttgagttcttctcatccatacctgctcatcggcagggagttctccttttaacggggacaagacacacgctctc

SEQ ID NO: 5625 - DNA, 448 bp, Oryza sativa
  unsure (1)..(448): unsure at all n locations
tactcaagctnttcacggagacgagtattattcggagcataattagccgcatgttataatatatggcctcgcatagctgatatggtgttggcacaggatcaagatgaatttcgatggaatctcacccacaatgggatcttttcggtcaattctcattacttagctcttgtccatacgggcatcccgaatataaatagacgtatcttgaatgtaaaagtattgctcaaagtaaagattatcttttggtacttacgtcggggcataattctaaccaatgataatctatctaagcgaaagtggaaaggtaataagagacgttgcttctgtcataacgacgaaaccatccaacatttgctcttcccatgtcatgctactcgttgggttgatccgtgatcatatggctgatactaacaacacctcaaattttatcattgcttggcgtcgttac

SEQ ID NO: 5626 - DNA, 208 bp, Oryza sativa
  unsure (1)..(208): unsure at all n locations
accactatcgcctncgccggatcttgccgtcggaaacgccaccgncgncaactncgcaagatccgctagcgggagctaccgacgccactgccactgccttcactggatccacccatcggatatgccaccgccaccgatggatctgcgggagggggctgangaacgccgaatctggcccgcaggagctgctgacaccattaccaccacg

SEQ ID NO: 5627 - DNA, 507 bp, Oryza sativa
  unsure (1)..(507): unsure at all n locations
tatntcaactattatatntgagtcatatcttagtataattctataaacagagaaacaacgagactatagtgaaaacatacaaatcatcaaccttcaccaagaccactctatgaaatcagatatacaatactacacataaacagaggatgaagatccattagtgccaaagtgggccttgattccagtttataagaagtattctcaatctcagaccaaaacatacataataaaaaatcgccaaaacactctcacaaaggtatatcatatacattaacgaccattgtactgaacaatttcaggattgttaataacaagaagaagcaaggttatacttatcaccaggaagtagaacacttgcgatttgccattatataaagaagttgacaacatagaaaatatctgtgaatgttaatctagctatgagaattcctacaacgcgagttgaacaccacatgagtatctatccatggtatccaaaatggacaggtagaagaacaccttaatacc

SEQ ID NO: 5628 - DNA, 434 bp, Oryza sativa
  unsure (1)..(434): unsure at all n locations
agctgatattagctttaagtggctacttgttcttgtcttgccgtcatgaactgttggctatggttcttgactctttgagcccctcaagtatgggagtatttcttcttttgggcttaggagccacgtggttaaatagacatacttgtgattatgtcaagttgatcaagttatacanttgttgtgtcttcgtagtatcgagtgtcgcaatgcagttttgatcccatacatgcaccagtgttcattgaaagcatggcgtgggttttatatgcaactaaagcgtgactgatttttattgttaaaggttggcaaatctagacattcttatcatattaaccaatcaatcatacagtgtgagcttattgtggataattttgctatactctacccgtctcttcaagatgatagtcgcttatatcagcgagacaattattata

SEQ ID NO: 5629 - DNA, 427 bp, Oryza sativa
  unsure (1)..(427): unsure at all n locations
cttgcattcactcatccaagacggatgatagttgaagaagcttctgcatcagaagagatgcagcatgtccatctagaaatgcagaaaatgttgctgcaagagctgccattcctgaaatgcaagcgcaaagaactggtctgatgaagctcactcctgtggccaagcatatcctgatgccgagtgacaccacaggggacggcacctccatgccagtgtactcctgtgtttctttcgggagtaggagaggaaatgcttcagcaactcgcaacatgggagccgagctgtacaagttatagtccaaataatgcttaaacttgggcatgttcttcctgagctgtngcggaggagtaagctgtatgttgaaggtactgtagattctctctgtatgtgttcagcgttgagcacacatttgggattaatttttttc

SEQ ID NO: 5630 - DNA, 283 bp, Oryza sativa
  unsure (1)..(283): unsure at all n locations
tagtagctggtgatgtcgcggtggtggtggtcttcttggttgtcgtcttcttcttcggctcctgcggcggatgcgatcagcgggggaatgcggcgatcttcatgcccttgtacgcccatggaatgcttgggagggtcgtatgcgctcaaaaagccgtgtgaggagattaaggagaggaagattntccatgcaaccgacgccacagggattggcacccgacgtcctcgtctgccgggagaattcaccttagacgccgtacgccttgctccacgtgacctccttg

SEQ ID NO: 5631 - DNA, 448 bp, Oryza sativa
  unsure (1)..(448): unsure at all n locations
gcaagcttccccgcaatcatgcaaagaacgcattctgctctactattcgacctttgctccatctaataacagctagtactaatattttttttgaacgaataacagctactaatatcaccattgagagaggggagacagcgagtgtaaatgaaaaagaggcttataaatgcaatcttctagtgctcctctggtacaacaccggttgtcatgcccggcaagattgtacgtactggattaaatgtggtgataccggaaccatgtgttagcgatagagttcaattatgcttcttttttggcagtacaacagtactggtaagattgaatcgggcaagccaacggatgccggcagcagaaagttgccaataaactggttatagtagcattattntctgtaacctgactctatacaataaaantggaantgtctttgtgtcggtcgcaaaaaaat

SEQ ID NO: 5632 - DNA, 421 bp, Oryza sativa
  unsure (1)..(421): unsure at all n locations
cgtgacgcgtctattatgttataactngagtatctggttgttaattggcttttaaatctctgtataaggttgatgaataaaatactccgtacgcttgttgggttgatgatgctgcttgatattataaccgatgctgatgaccgtagcgttcttgctatttgaacaagttataaaagttagttgatatagtagaacaacgactaaccttctctatcttttcagtcataaatcacctaacacatgccatatgacgacatacgaacacatgatatttgctaacaatggctagcccatacctatatttctggggtcctattattggcgctccttcccaacaaatattactatccctacagtcctggcacttggcatctctccttgtggtacctcattgagtccatcgtacatggatgccccttta

SEQ ID NO: 5633 - DNA, 401 bp, Oryza sativa
  unsure (1)..(401): unsure at all n locations
catgcaagctggcaatctaaaaaatgaagaacataatcttttaatcgaaagaaaaacagaataaggcgatgagtatgataggaatcgaagcatggcgatggaagagatgtgtacgtacttaccttcgttccatcagaaagctaggaagagaagaccgatggaggatgcgagcgaagaacttgggcggaagatcgaagagcgaaaactttctgcgctgctcctcctcgtctcggcggctgggtgtaggcgtgcagtgcagtggccaaacccaccgagtggagaggaggggaggggagggccnaccatccactatcaccaagcagagcgggggaaaggcaagacgatgtggcgccgtggccgccgctcgaagctcgcacgcacaatggaacatttgtaccctt

SEQ ID NO: 5634 - DNA, 310 bp, Oryza sativa
tatactatgtacatgtcatactgaatatatggctagctcatctgggagatgccttggagcgggtataatgtttgcctatgcaattactctatgtcatgacgacgatattagaatactatctgggactttagacgtcggtgctagaccacgggatatcgctattaggcgtatatattgcggatgataggtgtgccacttatggagacatttcagtacggatattcctccgcgccggtatataatcctaagttaactaatttccttgggaacgtattcctccgtattgagcctcgtgtgtatggtcatgaca

SEQ ID NO: 5635 - DNA, 417 bp, Oryza sativa
  unsure (1)..(417): unsure at all n locations
catgcaagcttctaactagtaactggttttgctaggcttatctgtgagtngagnaggatttaaggaacatatactctttgagcaagtttatggccaatttagtaaaaatctcacatcttattaacattcttaaggggatattnttgtgacagacattatattggattatagaaggaatcaaagagatgctagccatgacctttcttctcaggaggtgatgcttcccttttaccagtgacaatttctactttatgaactacaaactgaggtggagatgcagcagtagcttcccttcctacttcaactaccaactgcactaaaggatccaagctagaaaaaatttcttccttggagatatcatgatctatatacttggatngaactgagttcnaataatgctaccacactaacattaac

SEQ ID NO: 5636 - DNA, 424 bp, Oryza sativa
  unsure (1)..(424): unsure at all n locations
gcatgcaagctgaaagcgcgcacacaaacacacaacatattgtatgtctggcctagaagtagttagatacaataaagatccaatcatacttctatattccttttgatcaacggcttcaccatcttcatcaggatccaacacagctgtagaaccaattggtgttgaaattggcttgcaattctccatcttgaacccgctcaaaagatccttcgtatacttcgtttgatgcacaaaagtaccttaaggtgtttgcttaatttacaatcccaaaaagtacgataactcactcatcatgctcatctcaaaatccctgcgcatagtctcagcaaaatctacaaccaaagcgtgagttgaacaaccaaagatgatatcatccacataaatccgaacgaacangtgattatcaccatgcttaagaacaaaa

SEQ ID NO: 5637 - DNA, 455 bp, Oryza sativa
  unsure (1)..(455): unsure at all n locations
agctttatgtcaagattaagcaatcaatcaatcaacgagtcaattcggggagttattatcttcgtctacgcttcagaaccgtcatttaatttcagcgactccaattattacaccggcaattttggcttcttcacgccgtcacaatctactccaaatatttccagtatcaattttgaaatttaatctacatgttcgggagtttggagttatcaaccaataagttcagttttgatgagttgggcaacagcatctactttcctccaagtgaagaatctgcaacagctataacaccaaattctactgccatctttataaatcaaggagctntgcatcaatcttcgttatacacactctcgcgccaaagaaactactcgagcttcgatatcttctcaacagtttgatagattattgtcattgacttcatcaccagcacctctaattcatcggccctgaca

SEQ ID NO: 5638 - DNA, 353 bp, Oryza sativa
ctatagatacccaagcttgctgctccgccgacgaggctgatacgtgctgagatactactagtatcacctgtacgtctaagctagagctatggggcgcgtgtgctccatgcggtttctggacaacgccgcgccgcgctcggtgcaggcgctcgccgtcgcctacgaagcgcgccggggtcgctacggccctggcgacttcgactccggcgagctcgccatcccgccgcccaagctactcacctcccacatggtactctactactactaccaccggaattttctatgcatcatgtgctgcatgtgttggaattttcgagctccatcgaaccatcgagatgtgcttcagctgaact

SEQ ID NO: 5639 - DNA, 408 bp, Oryza sativa
gatcttacagcgactgggctgcagcttgaaggcaatgggcgccgtcctactttactgaagagaacctgaaggagatggtggcgcacggcgttctccctgccaaggagatcatcgggtggcggccagcgtgcggtgagatttttccgacccccgatacacacgagattgtggtcttctctcattttttctatggcggcttcgctcttccgacctcaaaatttttccgcgggatattaaacttctatggaatcagcttgcatcacctaaacccaaattccatagtccatatcgccaatttcatccatgtttgtgaagccttcttgggaattaaaccccacttcgctctgttccgccgaatcttttttctcaagccccaaccgaacaagaataagccatgtgtagtcggag

SEQ ID NO: 5640 - DNA, 185 bp, Oryza sativa
actataaatactcaatctttattgagacacgcgcagtctctatcttccttttcttctattggaagactcgactgagataatatcaagtataaatacactaggggggaaagtgataaatcaccaaccactcgcgtggctttgtgacactggcacgtgtgacccacagcaccgtgacatggcacgta

SEQ ID NO: 5641 - DNA, 90 bp, Oryza sativa
  unsure (1)..(90): unsure at all n locations
agccttgcttctggacactaccaaaacatggcctttacaacatgacactaccttcattnttcttaatcattgttgtcatttagggctggt

SEQ ID NO: 5642 - DNA, 417 bp, Oryza sativa
  unsure (1)..(417): unsure at all n locations
agtcaccttgtttccaactgtttcaacttatcctgcaggtttggtttatcttgatttctaaactttattcaaattaatccaaaaacttgtgctgttaattggatagatgtcttaactccctcctttcacttgtctttagatgccgcgctacaagcctgagtacttgtttggtgttgagggttttgtccaggagttgcgtacgatgtcctttgtcattggatttgggactgtcccttattatgcccagattcctcatgatcgtcatgaagagaagtgccgagtcaaagttactttgaacagcaatagtgaagaggtcccctcagtaatgctcgaagctggaggaagaaactacatccatgcatgtcacgaagtggcaaggatcgcgataagagagcntgctgatcgctacagtgatca

SEQ ID NO: 5643 - DNA, 466 bp, Oryza sativa
  unsure (1)..(466): unsure at all n locations
agcttgtgaaaaagagaaagctgagttctctcggccagcatctttaattgtgcctccttttacatttctcaatagatctgttggtgtcacccattaactccactactccaggacaaactntgcatcatgggggtatatcatattatcatgtttgggagatgatgcgagcaagagagaaaatggatgaaaaattgcaagggaaagtgagccatggaaagatgcatgcatgcatcagccattgaagttgtcatctctgctaggtggtgaatggtctacacattcttgattcttcacataataataataataataataagcccattgtcataggccagctgagccccattacacgtggccgccaccaaatagtggggccagacctctggcttcttctctttttcactgtcgtctgggccttcttcaggcaatttcaggggttcacattgccagtggttccaccatgtgt

SEQ ID NO: 5644 - DNA, 321 bp, Oryza sativa
tatacacactcagcttatattgtctattcaactgacatatgtatctataacaactgttttataatggactgagatatgtcgctttgaagcgcatgtacacgtcgatagcattaccaagaaatccctacagctactctcaatttcgaacttgtgggttgtttgtaagataacaaagggatccaacagatatcagaactatagctctgataacattgggaccctaattccgggcctgtcacaggaggtgatgattactgaatgattttcttcacgtttaatcaactattgagttaggattatattgagtttctagagcactaa

SEQ ID NO: 5645 - DNA, 476 bp, Oryza sativa
  unsure (1)..(476): unsure at all n locations
agctngcataaagaanaattacagtaaacaagaggacattgtttgcaagattagtactaaaaacgaatcaaacgggccccgtatcaaactgaatcgcctctcatggaatacagttccgttgcgtggatgcacgaaagtaagaacaaattaatggcttgctcattccgtcatgtagtacgattgtacgaacgtacaaaccggcagctaattgacaagggaaaaacatcacctacattatatacacatacataatcacgcggggacagctgtcgctaacatgaacagctggtgaacagacatagcatgatgttcatgaaagagtggttcttcagtcttcaccgatgtgtgaagaactatagctagagactaaagacaaagagagacatacatacctatacatatatactctcttcttgtacattgcaatgctagacacacgtacggacacaacatagtttacgtcgaaatcatccatc

SEQ ID NO: 5646 - DNA, 498 bp, Oryza sativa
  unsure (1)..(498): unsure at all n locations
ccttagatactcagcttctgaagaataagagaaagaatagcaagatgaacaagagtgtcttatgatgatgagaacatatgagagagagaagaaacacaggagataagagaggctgatagacaaagagagggataaagggaaagaaatccttgggttgaaatcatcagatgataattcatgttcaactctcagaaactcaacatctactaatgatgaatcaacaaatactcctgactctagagattcagctagtgaagaagaagataattccacagtggtggatctttgctcccctgacaaccttgttgatcaaacagcttgcagggagattagtgtgcaaaacaatatggactactgcaatacattgacagaatttgctcgaacaaatagcagtgactctcttacatctggacaatcaaaatcatcaagatggaatctgacgctgagacaagatctccctcangatcagtcctctttgttgtatgatgagtgcggaga

SEQ ID NO: 5647 - DNA, 448 bp, Oryza sativa
  unsure (1)..(448): unsure at all n locations
agctngcattaaacacctaaattccagtgacttgctgagtactaaagtactcacccttgctctatataaatatatatagttcctccgcccggaagttgaagatgaagtaaagtgaagattagggtttcgtcctggttcccagccgtcgcctgtggtgttgggtgttagtccgatggttccactgctgctgctgttgttggtgtttccccgtccgtgttgtcggttgcattctcgggctgctctgagttgcaacctaagttaaggtaaataagtctctatttattttaaggatttgaaatgattcatatttgtcaccgtgggtaccaacactatgttctgtgactgataccgagatcgcggtttcgcaggaagcggttcgcgcccgttttttctacgacacgctcctatcangtgccgttgtatggcggtgccggattggagtgtgaca

SEQ ID NO: 5648 - DNA, 459 bp, Oryza sativa
  unsure (1)..(459): unsure at all n locations
tgagatcatgtgtccattggcgcatatatatagctagctatctactctattactcatacgtaggcaggtggcaagatctatcgagcgatgacattcgcgacctcagatgtgctgcagtcgtgttctgaaaccatgatttcattcgttcacaacatgacggcttnctacgccgacaagagcaacgagtcctccgaggtgtccacctccgtcgtcatgttcattctcgccgncgttttcttcaacgtcaacctgttcagcggcgtatccgacgtcagcgccgtgctcaaccccaccgtcctgcatcttgctctccagcgcgctcgacctcttccgtctgcgcatgtactacctcttgtccgacgacaagcaagcgccgctccgagtctgcgactccataccaccaccagagacgcctactcgatgacctctcgctgctgggcgtgcatcctcacatgtgct

SEQ ID NO: 5649 - DNA, 429 bp, Oryza sativa
  unsure (1)..(429): unsure at all n locations
agcttgtcttctcacttgcagntgatacgtgttacgcattcagcgttttccactgtgctatctctatatacctttgttgacagcatatactaatttttctaaaacctgcagtaccaggaattaacctccttttatggtagcctcactttactgaaggtcttcacttgttctagctactgacattattacctcacccacaaatgctttccttcacagggtagtgctctggctgcagctggtggtggcagtggatcagtgaagctctgggacacagagaagtggaagccaattaccagccttgctgttccgcgtccagagggagctcgccctgataaaacaggaagcggcaagtttgtcctttcagatgcatggagtcctgatggcaagctcttagcttgtggtntcatggatggcaccatcgctgtgtat

SEQ ID NO: 5650 - DNA, 394 bp, Oryza sativa
  unsure (1)..(394): unsure at all n locations
agctnggctttcactcanggtccttggtaaggattgaacccctggaagcggaagtacgcttaaaggtcatcgtgctgttgctgcatcatgttgttgaagtttgcgaactcagcgtcaacagattgttgccattcttgcgtttgtgctatattttccatgagggtgtactggatctctcctgtctgcatatcaagggtgtccattctcctagtgatttcacccaagtcccaatgagaggaactcgagcgccatttacttggagatggaggcacaccacttgatctggaaggttggttgtccccccccaatgtatgtcatgaggcgcatgccatcggtcctcactgacacttgcccagtttgagactacgatgctgtggcgtggagcttgagtcca

SEQ ID NO: 5651 - DNA, 345 bp, Oryza sativa
  unsure (1)..(345): unsure at all n locations
nggtttaatttaccacactnttacaactaaggtgtgacatgttacaatttatctgactatgtaatccttagccacaagttagataagagttggcaaggataattagtgaaatatatatagtgcttgggtacacaaacttatgggcctacccccacccaagcccctacccacctccggccgatctaggttagggttctgggagggagagggagaggaagtagatgtgaggggagtctgtagtctccactcttccccttctaccggtcggacctgatatgacatagaatccatcgtcgccctcctctcgtacttactgccaaacctgtgatggaggggattcgattt

SEQ ID NO: 5652 - DNA, 404 bp, Oryza sativa
  unsure (1)..(404): unsure at all n locations
agcttngctgtcattttaataattcaatttattgtcgtcaattntcaattctagcggagcttaaggccatcccggcccaaatgggtgccgttggcgaggagccttgttcacgccgttcggctcgccatcgcttttggagccggagccatctagtgcgctccctagtagaggtacgtgcctccctgtgctcctcggctccttttcatcgagccatggagctaggctctgtgttgggcgatgtcatgcctagcctcatactcatggacactgctcccgcaccagagatttcttcttctaccctcggccttgtcgctaggagtaggaacactgcggtgggaaggagtcataggcggtgagatgatggaggagctgtcggcggtcctggtgaagatggatctgtgata

SEQ ID NO: 5653 - DNA, 459 bp, Oryza sativa
  unsure (1)..(459): unsure at all n locations
agcttcttgggttgcgttatcgcattgggtatattgttggcactgagaatggggcggctgacgcattgtctcgtgtttctgatcctttcctggttatgttgttggctatgtcaatttgcattccggaatggatgcaagaaattattaatggttatcaacaggatccggatgcttgcagtaaggttcaggctctttgcatcaataatgctgcagntcctcagtttactttgaagaatggaagtttatattttcaagattgcatttggattggtcagaatagctctgttcagcagaagatcttagctaaccttcatacagcggccattggtggccactctggtattcaggtgacttaccaacgcatcaagcagctctttgcgtggcctggatagcgtgcagatgtggtccgatatgtgcaaagatgcgatatctgtcagcacgccaaatcagaacatgtgc

SEQ ID NO: 5654 - DNA, 208 bp, Oryza sativa
cggacctaaaactactttagcacactgccggtcggttttttgaatgtcctaccggcagatagcctttatcctaacgcttatgaataatccgccgtccaggaaaagctcgggttcaccatacaaacctgagttaaaagacacatgtttattacatggataatagttacattattacaaacgcgctttaagccagacaatcaaaaataga

SEQ ID NO: 5655 - DNA, 436 bp, Oryza sativa
  unsure (1)..(436): unsure at all n locations
agcttggaacttacggtcatgcagatctttgtttatttcggctggagatttacaaatagaatttaataattgttttctccttaagtgttggtgtttgttagccaaacttcatgggttgtctatttggtttctcttttcgagggaattgtgtaataagtggttgtagcttctttgaagtaaatgccaggatttattccattatctaaaactagtttaaactaataacttcattacaggacacgatagggcgacaacccaacctcacgagccaccttccgcatgaccaccttaccgcagctgctggcggtgccacactcatcttcacatctncaacccccaccccctaacccactcccactttcatttcttttcttcttcctactgtctttacatgagttcttcatatgatccaacatgaactgaagtagcatcgcac

SEQ ID NO: 5656 - DNA, 357 bp, Oryza sativa
gcagctatatgtggggagattaagattttttctcggacctcatggcgtgcggggtgaactcaatctagttctaaaggagtataacatatgctgcgatctttattttgtagaagattaaaggacctaagctattctttgtgttgcacagatacgagaacctgtaatgtgttggtgctacatagctaaacatgctcacgacagccaatatgggattcacgcgcacgattataggggaataatgggaacgctagattggattgctctcttgctcccggagaggaacaatacgacgagagacgatatgactatcaaaacttacctagaatatacaatttggaagtaaagataccatactgg

SEQ ID NO: 5657 - DNA, 437 bp, Oryza sativa
agcttgcggcatcttttggggtaattatcttctattccatgtatatcttgggttcttgagtattaggatgccgtactattaagagggctaccacatgcatataattggtagaacactagtgctcagaatcctttatttggactgttcctattttattcctgtcggactatccgatcctgataagactatccgatgctcagactatccgaaatttcttagaacttttccctctgtctttggtctgagtgttggctaaaaaatatcggacaatccgatataaggtcggattgtccgatacatcggactgtctgaactttctcagaacttcactctctgtcttgaatgctttttattcctcttgagtgatatttcaaatcagactatccgatgtgatcggagtattcgatgacccacagactctgaaattaatggaactt

SEQ ID NO: 5658 - DNA, 195 bp, Oryza sativa
tagatttcccctacagaattgtaactctcccagctgttgacttattagatcctatcttaactatattcaagactataactgaatctgaccccctccttccttgtacagccactctacaacggggagctcaccggcaaaaagattactcctatttggggatatgttctcactctttttttatcaaccctatttaat

SEQ ID NO: 5659 - DNA, 472 bp, Oryza sativa
  unsure (1)..(472): unsure at all n locations
cgcttnnttttaatctaatatcaattgagaaacaatcatttattattataaaaaaagtaatacatacttcgggtgatgggttatacccaactaatgtaaggtacaattgataccaatgtatatatacacatgtatggaataagacaatatgggacaatgatttttatactggttcagatctcccgagaacgataatatccctattttagtttagatgtattaatctggagtgtatcactctgagtataaagagggagcaagttagctaatctagtataaaaatcaacaagaacgggatgaaaggctagttcggcaactgttttatcctcctgatgctaacgaaattctcatgttgcacgttccacattcgcccaacgatgattttatagcatggcaccgcggaccaagggtgctctagcttgcaattcaacgggagatccctgttcatttctgcttgtagcagagaataaaa

SEQ ID NO: 5660 - DNA, 312 bp, Oryza sativa
  unsure (1)..(312): unsure at all n locations
ttccatactgcggatcgttacaaaagtatggtcaagcaaaatatgtcaaagaccttctagaagcttgaacacaatcagttggatggccgcataatttctggattgcttctaactgcagctctaatatggcctcgaagcatntatatacctcaaggaaggaggggaataaggcacacgtgataatctaggagtatagacatttggctcttgacatgcttcagaattaaaaagataacacgggatcatttatctgaatatacatgtgtaccagcaaatagtaatatagtgaatgaaatcttatctctgtcaatc

SEQ ID NO: 5661 - DNA, 407 bp, Oryza sativa
  unsure (1)..(407): unsure at all n locations
agcttgtcatgttntgtaagctatatatatattggtaatttattacatgtagaactttacggctatgtggatttattctctttgaattatataatttcaataataaaaacaaaattatagtatgtcatatggttttcattgttccattgacactcttgtttgtaatatgaaataagttaatgcaataacttttaaattagctttgtagaactttacaataactcaccaacttgctctacttgtggtgagggactgatctattttatatttttgtaaaataataataataataataataataataataaagtcgtgttgctacacctaagccgatgtagaaggaattctcatatcatcaactatttgctgcttcctccanactgactaaagaagcagaagctgaaaga

SEQ ID NO: 5662 - DNA, 439 bp, Oryza sativa
atacacatttgctgtgaattagcacaagctaaccatcagcttcttttcacatgccagagtgcaaacatcagtctgaaatcctacagcatcacagatgtcattaaaactgagtcctactgatagtattctggtttcctcaacgaatgactatacaagaaaagagtgataagcatcagttctcttcattctcaaggtccacaaaccagtaacaccatgataaataggatctgtcctcagaagtttctacacattgacaccattacgtattactcgtcaggacccctcagggcacattccacaacatgcatacatctgatcctgctgctcaccatggtggtcatgcattgctagatccaatattggcgctacattctgaattcgacttttatgcaccaatctatcatttcaagttggaggatcatcccatcatccatcttta

SEQ ID NO: 5663 - DNA, 479 bp, Oryza sativa
  unsure (1)..(479): unsure at all n locations
agctngattngcctgcagattcagggttagtttcacatttaacgttgcagatttgaagccgcattatggagaagaagatgagcttgagtcgagaacgactcaaatgcaagaaggggaggatgatgaggacatcaacaccatcgatacatccaagtccccccatgtacagcatgatggtcctattacccgcgctcgtgcacgtcaactaaattatcaggtgagttctttcttgagttcatattcctcgtctctataccccggagacgcgtgcactcgtgttttactcangaacgatggagaggatccaaagggaagaggattcgcgcggngtggattctgactgcagggcagcgccaacttctgacggccgccacgacttcatgcgaactccgatttaggcgtgcaagtacttcatgcaaagcttatcaagtctactttcaaatggatccagccacatgtccatatctgttctggagcgg

SEQ ID NO: 5664 - DNA, 435 bp, Oryza sativa
tgctcacagtgtcgatggtgtcattaatcatcaacttctacatgattctaagataaacagtatcattcagcggtgtacgttggccacctgataataatggcacagctgaatgatctcgcggtacctcgccacggtaattcatggtaagtaaatagtccaacagaggcttcatgctctcaggtttgccacccagctttgaagacatgatattggagacaaactgaagcccattccctattgacgagggcagtgtcaaatggggtgttgagaggtcatgggcaccgaaatcaacttccagtgagttgtcatccttggccctgaaatcacatggtcagatcgaccatttttgtttaagttccacgctcctgttcatcttaatacatatatggaaactgtcgcatagcttctacctacttgattaatggatcatggata

SEQ ID NO: 5665 - DNA, 374 bp, Oryza sativa
  unsure (1)..(374): unsure at all n locations
agcttatcaagttaaagatacctcaactcacgcattctaaccgaagncagtacataaatctcgtcagaaatcaatcgcttcatctgcgcgaactacttttggactgtagctntcttgcttaagaggccttctaagttgaggttattgatcttcgcagcaaggatgaaatcattgtcagttaagcctcctgcaaccatagcagtggaatcacatcattatanactagagtgatggactgatggtgatttctgttctgttactgtgcttatgttgcttcagtacggtttcctaaatcctaacccaattctcaacaaccaaatactgtgataatgtgccttcactccagtggctatgtctggcccctatttcttgac

SEQ ID NO: 5666 - DNA, 346 bp, Oryza sativa
  unsure (1)..(346): unsure at all n locations
ccaccgtgttcgccagccactccttatggatgacctcgcggatgaatcctgcctncagaagtcgcgccacctcctcgcggatgaaggctngacgttccggggcctgccgccgcactttctgccggaccggccttgcgcccggccgtacggcgagacggtgctcaatcgcctccctggggaccccgggcatatccgccggtctccatgcgaagacgtcagcgtttgcccgcatgatagagacgagcgtgtcttcctatntgccgtccagaagaccaccgatccgtgtggtcttggacgggccgtcgcccatggcaacctccttgaccgggacctcatcgcacgtgac

SEQ ID NO: 5667 - DNA, 442 bp, Oryza sativa
catgcaagcattcactcggaaccaccaactgccggggttttgtctttaattcttatccaccatctaaacatcgcgtgagcagtggcacatggcttccgccacacccgaccgatgcccttccgccagctagcttcgagtcctgccaacaacaagactgccatcacaccgcaccgacgcccctccgtcggccgactttatcaaaccgccaccctgagagctgtgccggctagcatcgagttctggcactacaagactgtctccacaccgcaccgacgcccctccggtggcgtacttatcgaaccgtcaccctgagagctggtctgtctagcttctagtcctgtcatcaacaagattgtcaacataccgcaccaacgcccctttcgtgggcgaatgatatgaccagcactctgagaactggcccaggacccctcctgtccaccac

SEQ ID NO: 5668 - DNA, 418 bp, Oryza sativa
  unsure (1)..(418): unsure at all n locations
tatatgctcatgtgcttaattaaaggaagggagaacaatgcttattagtcctacaatgtgcatgctgtctcagaagtcagaacatagaacttttcatgaatgagcacagcaacctttgatagtaccagtattgtttgttagtttttgctcaagataagactaagggcattttctggaacggcgctgtcgtgctagcttcatgaagaacaatggttaaagacttgattcatacatggactgcacaacaggatggttacattagcaggatgtttcnggcagtttaacatggcatagtcttttgttacaagtgtggcaataattatcactaagggaaaatagctcagggttttgagtccttggtttcgtataataattntattctccaaattggtggttaacttaagtacatgtggagatc

SEQ ID NO: 5669 - DNA, 461 bp, Oryza sativa
  unsure (1)..(461): unsure at all n locations
agcttgttgaaacaaagaagcatgatctntatgatttggtgtatttgcttcttaaattggtgttgatcctaccggtggtgacggcaagtgtgaaaagggtattttctgcaatgaatttagtgaagactaaagtgagaaatagtatgagtgacaagttattgaataattgtttggtcaccttgattgagcgtgatatcttctccaatgtacgtgaggaagacataattcactctttcatgactatgaagaagcgtaaagcanaagctcttgagtcttgattagtattgtaatatcctatgtatctaaagaccttatattatgtttgaacaatttacattttgatttaggtaagatttaaacttatttgttattntctacttgtattgaaccatctagagttatataccgtatcgtttaccacattatatatcgaattatattgtattgattcgaattttttt

SEQ ID NO: 5670 - DNA, 420 bp, Oryza sativa
caacaagtgtgcatgtacgttctacggtcgccccgatcccgccgatgaggccaattcatgctccaacacctcaagctttggtggaggccgcttcggctctccaggcacaatatcaagctgttcttcaacaattgagtcaaccccacatgattccaagtgtaacctcttcggtccaaggcaattgggggatcgagccaggacgctattggatggcaaccgacgaaccagctccacatgtgcgcaccaacccaagcgccttcggcaaatcctcaaggatcaatggttgttcttgcagtattcgaaagttgttcaccaaacatcgtggtcagtccatgacatagcttcccattggccaaccatccaggcctacatccataccacaagatgcgctgggcaaggggaaagtatgccctgcaaata

SEQ ID NO: 5671 - DNA, 466 bp, Oryza sativa
  unsure (1)..(466): unsure at all n locations
agcttgatctacgaatcanagaatgtcagatttattgttgcgtggctagcaagaacaaataatggtaacggataattgcaaggattatgagacctgtttttttgggccagtagtaatcaggatttgttagcaatcgactccaaatctcacgtttctatatataagcttattgggatatttgcttgtctagatagccaacgagagtagacatcactattcatctctaacctgaattctgttggtttggacttggagcatcagaattcagaacagagagaggcacaaggtgcagagtcatccgggtttacgcgccattcacctgatcatcattttatagtgacagggtttcacttgtaaatgcgccacatgtattaaaagaaaatcaattcataanatactgcagaatcagttgcagaattgcatatggtgccgatcggagggtattgcgtgattactacataatagt

SEQ ID NO: 5672 - DNA, 235 bp, Oryza sativa
  unsure (1)..(235): unsure at all n locations
gccgaaaagagagacttgcgtctcgattcgactttaagagatgtgcttcaacagctcatttagtaatggaccgacctccccngtcagatcattacttctcggcgcccagagccatcccacttgattaatcggcgtccatagcctcttgcattctctcagactcctagagtccagctgccccgcagcaaagcaatccgcttccactcgggaaaggctaatcaatggagcccacaga

SEQ ID NO: 5673 - DNA, 467 bp, Oryza sativa
  unsure (1)..(467): unsure at all n locations
agctntagtaaaaaaaataggataagattacatagttgggaaaataaagataaatcaccattagagttactaacatggctaacaatacaattgtctatataaggaatggtttggttcacatcacatgtttttaatatataacgcaattgacattttgttggcattttttaaacaaaattgagttatatattaaaaaaacggaggtaacagtagtatacttgcattctctacggttcatccggatcggtagtctagcagaggttgagtagcacaaaaggaatatggatcatttgccgtgtcgctaaccaaaagaggacaatgataaaagtgtataattaggcgcacgcccgaccatttgattcatgatcaataatttagattgaaatgctacagtaaattaatgcatgattgaacctgtgagagatgtgtataatggtacaaacatattngtttcatgccaactgcat

SEQ ID NO: 5674 - DNA, 429 bp, Oryza sativa
actctagcttctagatccgagcataacacattgtgttgacttgccattatattcggtcatcaaccatgcacaagcatgctagagaatgagcaaaaacccctatctgcgttagcactaggttatatgtttctcaagccaggcacaatagattgtcttgccggtgcatgtttgatttgtttccatgaatcggcgatcgaccatactaacgctggagagagagttaacaaatgagaatcagatgggcagaaacagcacggcaggggctggacctgctgtatgtggccactacgggcccatgattggccatcacgcaacagaggcactatctaccgcgtcagtgagagcctcatggaaagatagaaaataagaatacgattatctgtgctctgggtccgtggcaccggaaggacatctgttcttgattgtcgc

SEQ ID NO: 5675 - DNA, 477 bp, Oryza sativa
  unsure (1)..(477): unsure at all n locations
agcttagctgctcctccgccgccgttcgccgtgtttattcgtcgntgncatatatgagtgaggcttagtgcttctccctcctcaacgacgccgccggccgactcgccgtcgtaccgtgaggctatattggctccgatgaggcagcggntgatgctactgttcatccacgaattcggcatcggatataaaagggcatccaaaaccttaaaataatcaaattcaagctgttcccagaaaaatcaaaatctcaacacctgatatccaaaaacctcccatatgcctcaaatgttaccatagacgacacgagtttgatattgacggctagctactagataaacttgatagcagaagaaaacacaacatgccatgttgccatccatttgaaccaatcatatgatctctcttgttttctcaatcctcattntgatgtattangtntacatagtagacacataaagagtaaatggtcccggtata

SEQ ID NO: 5676 - DNA, 427 bp, Oryza sativa
  unsure (1)..(427): unsure at all n locations
taattagatccaatccacttactaatcgctatatgtacatattacatgncatattagaagaatatctagaatagtaatatgcctgacagacaccttggatccatcattgatgaattgcaatatagtacatgtactagttcccttggaaacacatacagaggcatgtgtcaagcatgatcgctgcttccgtccaattatatatcatcgtaatattcctataatcctatagtctatgtggggcgatgcccatcgattgaagcgatcacatgatcgatgatcattctgatcacttaatctctgatctcaaactactaatgacaagacaatatattgttaataattaggaagaaaatcaattaaactgcatgaatgcatgcatggatggtcctatatataactacggtcgctgcatgatgacgatgatgat

SEQ ID NO: 5677 - DNA, 448 bp, Oryza sativa
  unsure (1)..(448): unsure at all n locations
agctntgccatcacattggggttacaatgtctttaatgatggttgtactttgattaactccccaagtataaaaatgaactgcagttacctcaccaaaacattgtttatgaggcacatgatctgctccggtactatcaccaaacaagcctaaaacaaagagtggcattggatctatgcccagaaccccataacttcactagagaagcctctcatttgataagacagtgattatgaaaaactaaactacctcaccatccgatgatatagattatgccgatctaacggtcagaagtgttcttcatgtatggatagccatgtctttctttttaatctagctctaaatgttctaaaatttaggcagggtcaactgatccacatggtcttttgatttcttctagttggctgttcccctgtcttccttccatggaaatgacgcccagaagaaaac

SEQ ID NO: 5678 - DNA, 375 bp, Oryza sativa
atatggcatagctttgtcccaagctccaccaaaatcaagagcgcaagctctcagcatatcctccaagatttgattgacttgctcggtctgaccatcagtttgctggtgataggccgtgctgaagtttatacgggtccccaattcttcctgcattttctgccacaactttgaggtgaactgactacctcggtctgatactatcttcttgggtactccatgtatgcacatcgatctggagaggtaaagctccgccaaacctttgcccgtatatgtggtatgcactggtatgaagtgagcaccctcagtgagtcgatcacgactactctaattgaacgtgacccgatgatgttcggtgcatctctcgttataattcca

SEQ ID NO: 5679 - DNA, 467 bp, Oryza sativa
  unsure (1)..(467): unsure at all n locations
agcttgtgtgcttgtagatatctacaagaaatttgccacagagtcgaattctgccctttccaaagtgtagtacaattttctgctttgtaatttgagattgtaacagctgtttatttcagcccaactccatactgcattgctcaaaaaatttgtgatgttcaattggattctcttatatcatctaaagttcgaaacaatgttaatggttatggagtctaaacattcttctttcaaagtttcaaggccttctctggaagactagaatgtgggagtttctactggtctaatggaattaaaccaattcatatgaaactagtaataaattgaaactagtaatatgcccgtgctaatgctacgataaaaattgatattgcanataaaacacccaaaacattggtactttcagcaatggaacagatatgttaaaagtttacgttagcactgaatttttttcgcaaaatattatg

SEQ ID NO: 5680 - DNA, 453 bp, Oryza sativa
  unsure (1)..(453): unsure at all n locations
agctntgttgagcctaatacccgcanaagctattataaactttcaatcctcgcaaaccaagtagaaaaatcaagcaaggcaatgatagaccgagtaagcaaattgaattgataaaaatcacgctccattattattatggtagcccccgactgacaacctcgagaaaaagcttgatgttgtcagtcaagacagggaaatacatagataaacttaagcgtagaaacgacgaagatgttcaatattccaagagttgtcgacaagtgtaccatcttcgcgctttagttgataagaacctgaccgagtaacttcagagattatgaatggcccttcccataaaggagataacttgtgccgatctcgtgtagtttgaattttcctcagaaccaggtcgccgactagaaaagctcgtgatcggacgttgcgattatgataacgtcgcaacccttgtaaata

SEQ ID NO: 5681 - DNA, 447 bp, Oryza sativa
  unsure (1)..(447): unsure at all n locations
tgttgatcatgccattgttcttgtcttcacgctcttgagcatttatggccttctccgtgcgatgtccatccatgggcccaaagtagctcgaccacatggcacaaggtagcatcgtcttcaagtccctcaggatccacgtagctggcttgngtacgatcatgggtttggcaaggatggtagcgatactccgtgttgaccagctgatcgttgtaaaggttgcggagttctccaatggcgacccttgccacctcctgacaagcatgtgataccttcttccaccagcttcaaacatcaccgatgggatatcttcatgatcacttgttatggtgaccttgacacggcatttctcctcatcacgatcatgggggatctggtcataaagaggggcagtcttgaatcctatggcaaaggccatcgtacatagctcccggataaacgcttaactcc

SEQ ID NO: 5682 - DNA, 446 bp, Oryza sativa
  unsure (1)..(446): unsure at all n locations
agcgttactacttaatgccttcatctgttccatattggtttttttctcgggcacagngctagatcttgcgatagcccaaagttggntctttagtgtctcccctctatgtaacacttgagaattttgatatacatgcctcacacagaatctttgttcagcatcagaaaactcccttctcacagctagaacaagcccctggaaacgaattataaagaattatagttaggaactaaaatgtgagttaagtatattatgaaaaatcagacgaagtcataccttctgcctatcagctatcactggccatgcagatgtattctcaatgccaaggtctttttttagagtgtcaagaaaccaactccagcttttcaagctctcaacttcaactactgcaattgcaatggaaaaaatgcagtcatttgggtccataccaacagcagataggatat

SEQ ID NO: 5683 - DNA, 474 bp, Oryza sativa
  unsure (1)..(474): unsure at all n locations
taaatgccacaatgggggtcctctggaagtagtcgatgcctgtctttcttgctccaccgacggcgaagattacgccatgggagacacttgaactattcgctagggaggctggaaggaaagggagaccaaattcctctgcttgaaagcacaacatagaaaagtttgtactgctgagttgtaccatgtaatatgtaagtaaattgctctcaatcgcctcgccaacctaatactagtacctccgtgccanaatatatacaattttggctatgaatctggacacatagttgtccagattcataattaacaatgcttatattttgagacagagggaatacctctcgtttgaatatatggcgtcgttgacttttgataaatgatcaccattcgattattcaaattttgtgacatataaaaaattagtcngctaaagattttgcgataatcagtctaataaaaaagatgtatttcttaata

SEQ ID NO: 5684 - DNA, 484 bp, Oryza sativa
  unsure (1)..(484): unsure at all n locations
agcttgtctagatacatagctacaaatgcttatatttttggattctcttaaagctgtagaaacttttatcgccccgccatggcaagtcgagatgccatccccaatgaaagcccccacacaggtttcatgccctgctgcacaatattgagcaaccaaaaatataataatatttgtgtcagaatttgaatcaaccttacagatactgggtggccagaaaatctagtccaagtaatatcctgaaaaatagcaactggcaaatactaaaggcagtgaagagtttcctttagatcagatgataaaaaaaaatcatatgttcaatagcaataatcactcacantttttttgctgtttagaatttagataattagtagttaaacttctatagcttgcgtagctaagatcaatggtgattattagttgaaaaaataatcaaatcatcaaactgaggagacttatacctgccataagttctgaagattcaatg

SEQ ID NO: 5685 - DNA, 467 bp, Oryza sativa
  unsure (1)..(467): unsure at all n locations
tccactcatatattaattcgtccacaataagataggtttcataacatgattcaccttatttatgaaaatagttntgatatggcaattagtttttttaatatatatatatatatatatatataatggctaatcatggactaactgtctaaataaggtttttaatctatatataatgctccatacatgtgttcaaagattcgatgtgatgntttttggtaaaatttatggggaactaaatcaggcctcagttgccaattatgactctgtgggcccatgataaaccatcgccttgagggaggccttcttctcctcgccaccgtgtgctgcacaaccggtgacggcatgtgcgccgcgcggcatagggagccagcggccatcactcttcagtcttccgtcagaatccctgtaaggttcagtagcagcagagggcaagagaacttggctgagccagcatacatggtggatgt

SEQ ID NO: 5686 - DNA, 413 bp, Oryza sativa
  unsure (1)..(413): unsure at all n locations
agcttatggagtctatcttcatattgttttggttttacatcaaaantcctaccgagctgccgggaatctgcaaaacaagccacgtatctcatccagtccgaatctgactcgggttttgggccttgtaattgtgtcgtgggcttagccaagggggtgtgcgccctatggcaaccctatgacgtcctaatcgtacttaatccgtagccgtcatcatttagagttgggttttgcttagattaatctgtcgagaacagtttcgccgctagatcggnttgtaagaccctaactagtgagcttaatcattcatctgcaattctggttgatttctatctcgttcttggttgtgttcttcgattggcaaacagggattagccttctcggcgaggtcattcgcgtttcggcacgggagataa

SEQ ID NO: 5687 - DNA, 424 bp, Oryza sativa
  unsure (1)..(424): unsure at all n locations
acacataaaactcagcttgatcaagtggaaggaccatcctcatcagccttattctgactggatcttctcgattggcgacactacaaggtgacgagttcgaccattcctggaacgccgcctctctcgagcgcttctatgtctagaatgggtggcacccaaatcgccaacttgtaaaaatgtacatatcagccctttggcattatgcaagcccttcggcactatgtaagcctttcggcaagaaaaaaacggacataaaagacaaagagaaaagaaactggatgtacggctattatccaccacagaggcccgaaccagtataaaatctttgtgtcctccgccttctttntatttttgtgtgattgataatntgtggaagaacccaaggcaaacgcctgatcatcgaataatgccagtggggaaaacc

SEQ ID NO: 5688 - DNA, 447 bp, Oryza sativa
  unsure (1)..(447): unsure at all n locations
agctnggaacanaatcgtgaaggaattccatgtatattgacagatatgtctgcttaacaaagtcccaaatccaagaaaaggagaaagagctaaaaagagaatataggatgctgaaagaggctagaaaacaaagtggagcttcatggaataaccagagatgcatcattgaggctgagcctgctatatggaacaatataatcatcgtaagattatttctgaccattacttaattttgtagttaattacattatgcatctttttagtgttttccttttattgtgtagtcatttcctaaagccaagaagtttcgcaccaaatctttccctctatttgaggccttgggagaactttacgatggttagttctatcacaagctataatccttgttttcaatatcacaagttataatcatgctntcttgcttaccctttcttgactcaatttctt

SEQ ID NO: 5689 - DNA, 487 bp, Oryza sativa
  unsure (1)..(487): unsure at all n locations
tgcacatgtcgcaaccgcgccgcgaaaggtgggaaatntcttaccggaacgggacgacatgggtggcgatgcgtccggccggtgagatcaaatccacacgaaagggatagcaggcagccgcaagaaagctcagctcagctcgcattctctcctcagaaaggcaccggctnttcttacccagagagagaaatagagaatggatgtgtggtaaaaggcccaaccaaatcaaagccagaggtgggtagcggcgaaaatcaggaacaaagccaaagttaaagaatccatggatgtcccgtgattgggggctattattatgaatccatggaaatgccacgaagaagaagaagaagtgggcaggaggagatcatgtntgctactactttgctttgcagtttgtagccaatgcgagaggcgggagaggaaatagttgatcgatcggcatggtccccatggatggatccggttagtagtagacagcagatgggat

SEQ ID NO: 5690 - DNA, 466 bp, Oryza sativa
  unsure (1)..(466): unsure at all n locations
agcttcccttttcgttgaaacctgtgcacacctcgcaatggcgtgacccgaagatacacaaagtcatccactgcgaattccagatcacggcgacggttatctgcataacttttctgccgagactgtgccacctttagattatcccgaatgattctgactttagcttcagcttctctcaggatatcagtcccgaacacttggctttctccaacttggtcccacagtagtggtgttcggcatttgcgcccatacaacgcttcatagggtgccatttgtatgctggcctggtagctgttattgtaggagaactcggcataggggagactcttatcccaggtcttcccgaaatctaggacacatgcgcggagcatatcttctaggatctgatttagacgctcggtctgtccatctgtctgcgggtgataggcggngctgaaattcaatcgagtacccagctcttcttgga

SEQ ID NO: 5691 - DNA, 448 bp, Oryza sativa
  unsure (1)..(448): unsure at all n locations
nngcttttatggcaaataataacagagctagtgtgattaaatcatctatatgaaagtaatcaacgacatatcccatataatagcatatagtaggagaggtgagcaacccttagttaaccaagcagtaaatagaaactattcaaataaatgattcaatatattaagatattgtgcacacatatattgtacatcccattatagatatatggtatcgtattaatttgcttgttgcatatattaatttagagggagtatgtgacgaacatgaatattagataaatactagttatacatcttgtcctcgtataattacagatcaactgtaaatttggattattcattgtaaaattatgtgatgggataatccgtaaccataatatgattaacctaaacatgggtaattggtaaccttctataatttattntgacaagtgaaatatgtacataa

SEQ ID NO: 5692 - DNA, 429 bp, Oryza sativa
  unsure (1)..(429): unsure at all n locations
actaagctntttacatggntgcctggagaacaagtgggcagcctgtgtatgtagctngtataacaatcagaccatcagacaatcctaattgtagccccacattacctatcatgggtggaatctcattatagttcaggatggccccctctctcaagaagacaattaacaacaggacaaggtttgaacaaagagtggtagagtactaatagaactgatagccatactactttacagactagtgtaaaagattctaatgaagatgggattagtaaccttgcttccaatttactctgaacatagatggagctactctaattggtttcaaatcacaaattgtgatccatcattactgtaattngaaatattgcagtgtgctactagagagataaggcacctctacccagatctgaactatctaaaaataatata

SEQ ID NO: 5693 - DNA, 407 bp, Oryza sativa
agcttatagctataaacgtttaactatttcttgcattaataaaagaattgtaggtacattttcctggctgttaaatgcctatttgatttggcatagatatgttagcatttcagcttgtattctatttttgagttccactttgcattttatattttccagacattgaagccagggggattctcgaatgcacaacctacacaaaatcttcccagcgcgagcattccgtctgggcctcctctcccacaacaattatctgtacatccgtaccctcagccaactctgccccttggacctttatccaatctggttggctatccatatttgcctcagaactactatctaccatcagcagcctttcagcaatctttctcaagtaatggacctttccatcaatctgctgctaccac

SEQ ID NO: 5694 - DNA, 476 bp, Oryza sativa
  unsure (1)..(476): unsure at all n locations
cttggcgcacacgacagagtgcaagagctcagtattatactcttatagcccnctacctggcgcgccagatgacggagcgtggggctcctcaccgggagaccgcgctggcccctctttgccggttcggccggtgaccctgngtgagactctaagctcccaatctgtggaaggctcgcgagacaggaaccatacaagacgcctgcgatgtatacaggttcgggccgctgagaagcgtaataccctactcctgtgttgtggtggatctcggtatgaaggaactacaaagtatgagccagcctctccctcgttctgggttcccaatctggataagtcccgtcccctctcaaagcgggcagggtcctcctttatatctcaggggatccacatgcccatctctccttcagttgactttttttttaatggacgagaatgcatcgcattgccgaatgatctttaacagacggtctacctcctct

SEQ ID NO: 5695 - DNA, 456 bp, Oryza sativa
  unsure (1)..(456): unsure at all n locations
gatccttagagacgacccgctgcatgcaagcttgtgaatttagagaagttaaatctttctctaaacatgctcattggttccattccacacagcttatggaatttgactaaactctccaacttgttgctttggagcaataaactctctagacacattcctaaagaactaggtaacctggtgaacctaaataacttatcacttgctgataacaatctcacaggttccatcccgaacagcntagggaattggaataaactctattccataaatcttgtttctaaccaactttttggattaattcttcangacctggccacctaaatgaatctagagtttttggaaatcagccttaataatctctctggtgagttaccatcaggactatgcgcagcaagtcggctacaaaatttcactgctgatcacaacagccttgtttgaccattgccaacagcttac

SEQ ID NO: 5696 - DNA, 384 bp, Oryza sativa
  unsure (1)..(384): unsure at all n locations
taagatggcatgagtaagaaagggttcgatcgtgaagagatactgctagcttctatatctgatgcagcaagtctagtctaagttgccagatttaacacgaaatcaagaatttgaccaatatgcattctgatttgctctatattttaatcctttaacatatgggccttttactactccctcccgttcacaatgtaaaactttctagcattacacacgaaagttttttgaaattataccgtttattcgatgattgtgccaaaatataccggatagcgaacgattngcggaaataaaccatccggattgctttttggaagagcgataccgatgttcgctcgttggaagtgcgatagcgtggcgaaatcgcgatctgacaaagcgata

SEQ ID NO: 5697 - DNA, 468 bp, Oryza sativa
  unsure (1)..(468): unsure at all n locations
agctntntatcattctggcatcgagctattntgtcgcatgacctcccctacagtatcgtcaccgcagtagagtttaaccaccaaattcgggatggattggtgtggttcctctacgcctaggacaccagaatatcgaaccatgaacgaggaaaggcatgagagaaatattggctagtaattgtgaagccccaattcttgactggaagggacaccaaaggcctctgccctccctctctatctatccaagagatggaagggcagagcttttttttggttttttcatcttttcatcaaagagttgaacaatgaagatagatggcaagtgcctgatcgatttgatcaggtcgtgtacgaacaaggttcanatcgttcgttcgttaggatgcctcagctgcatacatcactgcactttcacttgacacctatttaaacggctcgtctcgccgctaccttatcctatatccatgc

SEQ ID NO: 5698 - DNA, 504 bp, Oryza sativa
  unsure (1)..(504): unsure at all n locations
tacggacctataatactcagctaacacctcttattngactntntcactantttgaaatacgattattatccatatccaaaatgcaaaggtcgtcttattcaaaacctcaatcatcacatcccctctctcccacttcacacctcggaacgcactgttcttatagagagaaaggggctntcccatcttcttaacccgaaatgaaatggctgaggagagggaggttccttttggggggtacccccgggaagagatccagtggagacggngtgggcctgtagctcagaggattagagcacgtggctacgaaccacggtgtcggnggttcgaatccctcctcgcccacagccttccaaaggggaagggcctttactttccccctgagggtaggaaaaccatgatcgggatagcggacgtaaagctattgaacttgggtatgctctntccttntgtcgaagtggaatcgtagaacagaatgtgatacgatgagataaaatgcaatagaaa

SEQ ID NO: 5699 - DNA, 433 bp, Oryza sativa
  unsure (1)..(433): unsure at all n locations
acctgcggcatgcaagctttctgacaaggcatatacaaagccgactcatgcattattntatgccgacgagagggggcctagaccaacaacaggttaggtcccacaccatactgtgccaggaagcccagggggggtcctctccgacaccaccccgacgaatccacatgtttctcggcgtcatggcttccctgataagctagttactcacccaggggtgtcccattccacccatgtggccgtacttgtcttatgttcggatgaaataccaaggaatcggaccttaaatgcgggagcgggaaaacctgacacccggtacgtgcccccgtccgcggttgtagagattcattgtgttcgcaagcaccgccccatgtgtcgggttttccaaatcttttggtgagcccacgtttacccacgccgtttttcgatttaagtt

SEQ ID NO: 5700 - DNA, 365 bp, Oryza sativa
  unsure (1)..(365): unsure at all n locations
cgctaattcaagaatgaatcatgacgaaatggaccgatgccgtattctgagagacattaaatcttcatcgatgttggcacacggcacgaaatacttctcgttattattatattctaagacgaagagactgctccctccgccaagaaaaaagccaacctaagtatggatggaacactacctctaagacaacaaatctagatgttctgattcgatgtcttaggtgatgtctcatccccatctagcatggtttttntttacagactgggttatcttacggactgagtatgtcatgtctcacagttctcatgattacatgaggacatattctgacagcaaataccgcctctgatataccccgcaaagaa

SEQ ID NO: 5701 - DNA, 452 bp, Oryza sativa
  unsure (1)..(452): unsure at all n locations
agtcacctgcggcatgcacgctngccattggtgccaagagtagcttgccatcctccaccttgactgatgtgattcttggaaaggattcctcttctagtgtaaatgaagaattgaggttactgctgtcacagctctcggcttccagaggactcgaggctccatgggtcgacccaggccctagcccacgtgcgtatgggcgtggtgatgatttgatagtgcagaacatcacgaacagaatttcaattgagagaaatgcatctgtgttggagtcactggagggtagcactgtaagtgagatggaaggtgaaagtgccactgaacggttgagacgacagattgatcttgaccgaaaatctatacacctcctctgcaaggaactggaagaagaaaggaacgcttcancgattgctgcaagtcaagctttggctatgattaccagattgcaggatgac

SEQ ID NO: 5702 - DNA, 485 bp, Oryza sativa
  unsure (1)..(485): unsure at all n locations
tctcatggaaggctgcttcctagtatcaactatgagaagtggtcatttacataagaaaattgcgagccttccaaaaactggcaaaatccattccgtattgtatggtacaactcaaaacacaaattaatggtacgattgggtggtgataatacatctttaatggacataattaaaacaaaccatgcaaagctaactcattatagcccacctcgcatgcactctctaggaataggaaaaactatgtatttgtgcaaatatcatgagtcaattgatatttgggcctgaccttgctgtgatatggatctaatttcaatagaatgcatgagtgctttggaaacatatgttgactgtcgaagcatcaacaagccgaagcctttgcagtctaaataatgtcaaacactaaacattgcttatcttgctcctanaatacataaatgagatattcttcatggcatggtatgaaacacattacatatantactgat

SEQ ID NO: 5703 - DNA, 358 bp, Oryza sativa
  unsure (1)..(358): unsure at all n locations
agctnggctatcaagcggctntaaatacgcaaaacccgttcttttgactgcataatcccctgacaaacgatggggagatatcagccaaattctccaccgtaagaacgacggcatccagattaaaagctcaaagcaagtttaagttatatactgattagtcgtgtgctgtgaagctagattgtggtatactggtattgagaatattatattgttttcgcgtgcaaagtttttacgcgttcaaaataaagacttttttttttcggcgtaagtggtattgagatnttgagatcatctcctagatttgttccgagctggccagaatatcagagaatttgctgtccattttaagtttttcttt

SEQ ID NO: 5704 - DNA, 362 bp, Oryza sativa
  unsure (1)..(362): unsure at all n locations
tactaagcttcatgttggtatattctacttgctntaatatcttagtatagatttgtttcggagtattagccgatacatgctagatctacctgatcagctatgttatgaatgtatataatcctactattaatatatatttcgatctaagtgaattatactatctcggcaaggtgaccgatatatcccaatcactcgatttaagtatataccgatataaggattatatatcattaatgtatacagttgatcgagtagatctagttctgaattgcttattgatatttgccgatcgatgtacgcatgacatcggcttgaaataaatgatatgtcatcggcatctagtcgatcggctatcatttata

SEQ ID NO: 5705 - DNA, 60 bp, Oryza sativa
ttcgtatacgatttgccggcatggagctctatctgacggatgtggaatctaattgtcgcg

SEQ ID NO: 5706 - DNA, 463 bp, Oryza sativa
tcaagctttcatcttgcggtgtggccatcttggaatgcccagctctctgcacttcttcttcaggagggtgagcccaacattcagctctcgtgccgcctgcgtgatcggcatgtagaagtactgggacacgagctcgaacgtcaatgccttctcctctgatctaacatcgtctctcatgatcttggaggctgctccgttctcatcaccgtaatagagcagtggcaatcccttctcacttttctctaccttgttctccgattgctccatctcatcccaatacttcagcacatcatcttcaaagatgacaccaagctcgtctgcatggcaagaaacaagggtctaagcaccacatatacacagaaattaccattcttcttcggttaaaagagagatgaccattctttcagtaatccaagaagaaagaaaaaacgcatacctttgtaaacgttgctttgatgacagt

SEQ ID NO: 5707 - DNA, 442 bp, Oryza sativa
tactctagattgcatcctcttgtggcagcgtactagtctctacttattggctacgtcggaagagctatgggaagaagatcccattcttctctctcaccctcacgtcggaggacctaggggaagaggagttccattcttctctctcaccctctctccctaactcctgatggcttggatagagtgaggctagtgttgattgtaatgggttgataacgatctgacccatgtagggttggccgaggcccaataacttatagttgcccggaccccaacagttcatacgcacacccactcggtgaaaggcccaatctccctaaaagactagtccgataggggaagggtggctctcctctgtaaggaggaggactagtccgatatgggaagggtggctcttctgtttaaggtggcgtcctcctccctagctcaacaaggtgggattatt

SEQ ID NO: 5708 - DNA, 464 bp, Oryza sativa
  unsure (1)..(464): unsure at all n locations
agctntgaaatacaccttgttggatgatgaattgtattatcggacgattgatggggtgttgcttaaatgtttgagtgccgatcaagccaaggttgcgataggagaggtacatgaaggaatttgtggcacaaatcaatcggctcataatatgaagtggtctcttaggcgggcaggatatttttggccgataatgttggaagattgtttcaaatattacaaaggatgtcaagattgtcagaagtttggagcaattcagagagcaccagcatcagctatgaaccctatcatcaaaccgtggccattcagagcttgtggaattgatatgatcggtatgattaatccaccatcgagcaaaggacacaagtttatattggtggcaaccgattactttaccaagtggatagaggcgattcctttgaagaaagatgattcgggggatgctatactaatttgtcaagagcata

SEQ ID NO: 5709 - DNA, 474 bp, Oryza sativa
  unsure (1)..(474): unsure at all n locations
tctcctgtgaatgatagcattatgcagtcctatcacatcatttcagaaccaatcaaggatgcagtcactagaacaatgccagctatatctctccagaatcaaaatgagcagccatgtntgtggttttcagttcgctacttatcatggtgtaatcgaaagtttgcagcaaccatgtaatacataaatatattcatgtctataaacagtgagcttgctatgcttatggatgattcatgttgaggatacaatgtaccgatgttaagcaccgtccctttttgttaaggcagggccttgtattcatgtaataagggagacatgtgtaataaaagcaagttctaggaggggctatttggaagatgctgatatggaattatgtgtataatngtttactgtcaaaggagacctagggtctcatttcagcggaactatgttctaacctcgagnaataaccaacctgatgatagaaaagaaatg

SEQ ID NO: 5710 - DNA, 444 bp, Oryza sativa
gatcttaagtcaccgcggctgcagcttatagattctatttccgatttgtctctcaactattcattgaaaagaatccaactcttatgggtaaatgctcaatatccaagtgggcttacaaaattgatcatgatcaattgctttgtggatcgtctcgcgtctcttgattagttggtatttatcctccccaatattgcaagtttcttacgtccaaacaaagtatttactttgtactaataaaaaatcaaaaagtttagcctacgttcttccttatatcccttcttatactacgatagtattgcagatcgcaatcgatgcaaagaaaatgaatgcattttcatactataactaaaaagtaagtgtaataaatagagatatggatcatgtcacatgacttattccatttctactctatgggatcttacggagcctcttcatggatgacat

SEQ ID NO: 5711 - DNA, 463 bp, Oryza sativa
  unsure (1)..(463): unsure at all n locations
agcttcatactntgtccgtatgagataataatttctgtggttgggtccagcgtcctctcagttgtgaaaaaatatcacaaaataaaagaaaaataaaaaaggtcatgtctctctccttagcactagagagagaaagcanaaaaaagagaacgaaagaaagataagtgatgaggagctgacttgcgtgagtatcccccaccattccctgttgtcaccaccaccttcctgtcattgctcatgtttggtttgtgtattgtggcgacctttgtgggtaggcttgtgactctactctggctagcctaggaccaacattgtaccaaccttgagcgattattcaacttgctttgactaacgtggnttctggtttctaacacagcccacccatagctacaccggttcgactaacacttgacagggattcagcaaccaaggcatcaatacaccttctccagagggtcatcca

SEQ ID NO: 5712 - DNA, 468 bp, Oryza sativa
  unsure (1)..(468): unsure at all n locations
agcttaagtgtatttaaatatttgtatggatgtattgatttaatttctttggtcaaatctacgctccatcctttcaaccacctatgttgaagaacaaaatgatgttagtgcacatgggatctaggaggagcgacccaagacccacaagctgcatcaattagtgctaacactggcggcaagacgatgaatagtgcctctttcacatgctactgcctgacgctcctgcaagcgcctactccactctctctcctcatttctctctcgtccacataagagtacgttgatgtgtatttttaatcgttgttggtatttcttacgattatagataaatccgcaagcgcacggatattgttgtagcatttcactcatgagtattcccaaggatatcgcatttatatttccgcagggaacggcggcggatgaaaacatacnntatgcctcttaatcaatctatagtatcatccacta

SEQ ID NO: 5713 - DNA, 398 bp, Oryza sativa
  unsure (1)..(398): unsure at all n locations
tcntcggttcttggtttctgcccgaggcatcgatgtcaactccgagaagatacgagctatagagcggatgcgcccccccagcaaacttagggatgtgcaatgcgtcaccggttgcatggccgccctaagtcggttcatatcgaggctgggagagaaggcgctacccttatttaagctcctcaaacgctccgggccgtttacctggacggaggaagctgaacgtgccctcactcagttgaaggcgtatctcagctctcccccagttctggtcgccccggagccaggtgaacccttgctactctactttgcggcgaccccgcaggtagttattgcggcgttggatgtggagcgcgatgaggacaaccctcattccgcgcatccccaccctgtgctggctt

SEQ ID NO: 5714 - DNA, 472 bp, Oryza sativa
agcttccaggagatgcgtcctgttggtagaaacacacaggatcgatatctctctctcacttgacaaaaacttgaagatgaacagtaagctaaagagcaatgaacatagaaagttttgtggtgcttaaatcttgccgcaccgttttcatgttttcttcttccttttattgaagggaaaatgcacactacggcctaacaaattggccggattactcgctccaccatccggattacgagcgccatcccactcgtcagatcgtgcagcgagagactctcacattaccgcctcgacgtgaactcgcacgcctcaggcctatagacgcgctcaactctgactagagcgagcccagaaaaacagggaataaaaaacaaacacataacgtgcatgaaaggaaactattctaactaaataaaacagcttttgcaggcacaaggttaacgtaatatgcaacaaatctcctcctaaaccttgt

SEQ ID NO: 5715 - DNA, 493 bp, Oryza sativa
  unsure (1)..(493): unsure at all n locations
taaccaggttatgggcaggcatatcatatgttccatgtgaaagcttcataataattntttttaacatatgatccatgtcataaattatgtcccatttctggtggtggtggtagcggttgttaaggtcgtaaggatgagttcataccatatatttattcatatataagccatcagtcatcactaatcgttgcaagtctgtaatccctgcgaacgtgaagatttaagtgcaattcngtttatggctaatcactctaggtagaaattaaaaaccttgattccgtattttacactttgtcatgaagtatttgcacaataattggtttttttaaaaaaaaaaggtgcatgcactactgttgctacagtcgatgtatctcattatttgccacgtttgttccacccctatcaatgtatagattaatccatctggttcatgcctcaatcattaggtcacaccacagctatcagcgtatgttttggagtggtcttcttcttg

SEQ ID NO: 5716 - DNA, 476 bp, Oryza sativa
  unsure (1)..(476): unsure at all n locations
agcttatctaatgtatacatatccattcattatagctattcacatgggatgactataaaacatctctctcacctgctttcttctcgattggtttgtttccttctaatggagcaaagttttctgtttgctacaagaagcacttgagctatcaattgccgctgttctgcacatgtgaaaaacacatttgttgagtcatctcataaattcaggcagcaaacaagagtcattctgacctgacatatgcagactgacacatacaagagataacaatttataattgttgccacgtttatctttacgatctgaatatgaaataatagaagattcagatgcattcttttttgaatttccagaaagtttaaaaaaataactctattctttnttttaataaactgcaagtttgtttgataagtttcatgtatgctatatacaaataatctccaatatgggatctttcatgatatccaaacctaaac

SEQ ID NO: 5717 - DNA, 344 bp, Oryza sativa
tattgtttctgcgcattagtccatgtatgcatgcttgagcagctgagcttaattagcaggtgaaatcggagggacagatcttgccgcagttgttgaggatgaggctgagatcgacggtgatgttgaggttgatgatcccaagaacgttggccttgatggcggtgcagaggcagacggcggcgtcgaggtcggctaggccggacagcatcgggcagcagtcgtcggggccagctccgatcttgacgccgacgagcccgttgagcacgttggcacacaccctcagcttcaaggcgtcgatcgggcagcgcccatggccgtggccgccgtggtgtatttcttttcat

SEQ ID NO: 5718 - DNA, 273 bp, Oryza sativa
  unsure (1)..(273): unsure at all n locations
agcttaatcacatggcatcttctgccttactagcatctatagctagtagtactggcctcgtagctaggtggctgttaaaaatattactacaaaaaatgtcgctactacacattangctaacctatnggtatagctgtttacaacacccaaattttagaatcgcatgtatccaatcgataatagtactgctgccagttatggtggattcctaccagtgatattttccacccttaccaaatttaattcatgggccatttgccagcaccacccacc

SEQ ID NO: 5719 - DNA, 509 bp, Oryza sativa
  unsure (1)..(509): unsure at all n locations
gcaacgaccacaggcgcttgacggcaggcattatttatacaccanagccttcatcttccaggaactcctcatctgggcttgggaaaattaagcaagactgagtacaaccaccgtactcaacaagacacacccacaaatgcagaatatatgcaagggagtacaagggaattataatataaagggttagggttgcagtaaacagcatttatagacatttagttgctcaaagctactttgtaaacgcgatcctagaacgctacaaagttattaatcaaggccgtgaacccacacgaacctgccttaaccctaagcctatgatgattcagaccgaactggcaacccgaccctgngtcccaactcgttctaagccaacccaggccaaccatttcatatgttagttgttaagcagattatatgaattaatacactaacttgggtacattgctcggcttgccataaccgacggcgcggctattctaatagattatactctgatcagatgtgtcatc

SEQ ID NO: 5720 - DNA, 475 bp, Oryza sativa
  unsure (1)..(475): unsure at all n locations
agcttatggcttggtcacaagaganaaaaaaattaatatatgtactgcacacaggagggagtcaattcattccttgagtaatactacctccgtcctaaaatagttgtncgtttgagttttttttttataatttgtggtcattcgtcttattaaaaaaatatgaaattattatttattttatttgtgacttgctttattatcataagtactttgagtgtaacttattattttttatatttgcattaatttttcatacatgaagaatggccaaacattataagaaaaaagtcaaagtgatcactaattagggatggaggtagtagaagacttcaaagaagcactgtattttgactaagtgggacccatcttatttcctcccataggttttaaccattgtggagttngttatagctagttctttttcactgagcccgaccgttatattactacccattgttacatgtacattgagaat

SEQ ID NO: 5721 - DNA, 400 bp, Oryza sativa
  unsure (1)..(400): unsure at all n locations
cgcttcttatgtggctcaaaacttatgaaaatggaaccanttattggtggctaccatgtggngttcagcaatacccaagctagtagtgatcagcgggatgaagttgaaagcattagaagctctatggtagagatggacctgcaaaagctgcctgcatggacttgtgttgctgagactggtagcccttgatttgtatattccatctcttcccaaaacttatgttgaattggtcagaaaatgaccaacagaattgtggaaagtgcttgatgactatattggactgaactgtatcaactgttgatctttcagggtgtgagattgaagtttctatcgatgggcccttgagccagagcacttgtccttggagccgatcaccttgtgacacgccgttgtaatgggg

SEQ ID NO: 5722 - DNA, 445 bp, Oryza sativa
agcttggtaataacataacagaggattttggccttatcatagaattctatatctagggttttcacttgcgatgattgtccaagtgagagttctactatgttaccagaataactaagactggacaggttcggagctttgctctctatcatttgcagacggcacgaggacacatccaggtagctgagttgctccagcgaacatggtatcttcagatacaccatctctctgcaatcgctgagatccaaatgcttcagagcaaaagactctgaaagaaagcaagctagctcatcatccgtgataagaacagaatgcagatgcagcttcgtcaggtttctcgagcaaccaagcccagccacaggacggaaggcgcaattgacaagctcatgatgctgaagcgaccttccagaacaaagtgagcatgggaagctgattcctgaggcagcga

SEQ ID NO: 5723 - DNA, 299 bp, Oryza sativa
  unsure (1)..(299): unsure at all n locations
aagctgcctcagcanngcnctcagagcgcgcccattttgttttgcgcctctgaacttttgtggcattaattattctggttgtcccagagcatctatcaagctagctacttctgccattgatggccatcatcgattctcttctcgaccaagaataatacttatcactttccacaaatttgctttcgcttggccttatgacaaatgcgtctctttcttgtctgtcatgacgtcatgaattgacatgatgccatttgatttgaatgctgaaatgctacatgaatgacctgtttggaggagct

SEQ ID NO: 5724 - DNA, 430 bp, Oryza sativa
agcttgcagggtgcttcgattgcacacaactatggcacttagaacctttgacaatggaaaacttaggaattaaacacatgctggaaagctgagacatcaagccaaaattaatatgacataaacgtgagtgccaaacattagcctcatcatccacactgccacaaatatggttcacagacttattgcagaaatcagaaagggaaaagcggaacaggcctccgcactcataacctttaccaataaaatatccatgtttagacatgactactttattagactcaaaaaccaacttaaatccgtctctagtcagacggaagccactaacaagattcctgtcgatagaagggacatgctgcacgttcttcagctgcatgatccttcccgaagtaaacttcagatctaccgtgccaacaccatgaacagaagcatg

SEQ ID NO: 5725 - DNA, 345 bp, Oryza sativa
gccgggctggcaccgtattctttcggcgggaccaaagctagccgctacggaagagccaacacagagggtcctgagcttcgacggcacccggagctcaactgcaagagtcctcccaggagtagaccgaggtaggcagcaggttcatgagccaaccccgcgcttggcccctgagggtcatggtgaagaagctcgccatgacctggtcatcacccctcgccgcctctatgattgtcgtgcagatctgaagggactcgaaggggttgacgctgccgtcgtacttctcaatgagggtgggccggaactttcgaggccatcggacattccgaagacttgacacaaaaacct

SEQ ID NO: 5726 - DNA, 399 bp, Oryza sativa
  unsure (1)..(399): unsure at all n locations
agctngtagaatattttcaaagttctatgcgaataggtcccgaagcttctcgccacagaaacagaattntgcaagaggaatttggcgatattaaatatgccgaacccggcgaagcaggggagaaacggatgtaactttttttttagatgtccgtggatatattataagcctaatttcgagtccgtatgaaaaagatatgactgctttaaggaaggtcactcgaatcagggctctatttcctttctagtggcggcaggatacaaggcaactcacaaaaactatcggcaacagatcaaacacaaatagaaagtgatttggtgggtgactgctacggtggtgaccgtggtgatgacggcaaaattgatgaaggtggcgatgtgcggtggtggcaagaactcg

SEQ ID NO: 5727 - DNA, 398 bp, Oryza sativa
  unsure (1)..(398): unsure at all n locations
agcttgacggcggaggaaacgagctctagctcttctgctgaccacagggacagggaggagctcgacggtggaggggatgaactcgacgcagctccaccggcacttggaggagacgagctcgagctcgccggcggcgtctggtgctggatcgctgggggagaggcggagatcggcgacggtgggcgctcaatctcccggcggcggcaggcgtgggggataggcggagaccggcggcggcgggcgctcgatctcccgtcggtggcgggcgctggcaggggagaggaggagaccggcggcggcgagcgctggtggnggaggggcggagaccggcggcagcgggtgctctatcttcccggcggcggctgcggccgctataggagatgcggaacgggagcggc

SEQ ID NO: 5728 - DNA, 339 bp, Oryza sativa
  unsure (1)..(339): unsure at all n locations
taatcattaaatgaaccatggtgcactttggttcactatgtatttcatcatgaactataacactctatcccatttgtgcagagnttcatgcaatttatctagcacgaataataaatgcccttatcgttgtcgtccacgtttaacatgggcaactacctggaactatggatggataatattaaagtgagtgaaagtgttcaaacacctaatggtatacctgacctatttgatgtcatgttataaaaacaaaaactggtgctatgtcttacataatctgntctaaaatgattgtgacaatgtggcacgataatcatataagcctatcatataaatatgact

SEQ ID NO: 5729 - DNA, 462 bp, Oryza sativa
  unsure (1)..(462): unsure at all n locations
tcaagctgatacctgcaagcaaaagtgctaatcattctgtattacacacagnttgacataaagcctacgagcactttgtgccgcagtgagcgagagagaaagagagattaatatcgagctaatttaaacaagatatgcgctcaacttgagcacttgacgccaaatcacagcttgtcaagtgtgcgacacgagcggcgtgtttcgtcccttgtcgatcgcatcacgtaaagctaatttagcagcttgcaagcacacacatacacactctgaatatatgtatgtatatctagcgattaaattaatttgttaactacacttggttagcggcgacgcctgtagtttagctgcagattatgcagacatgcacacaggaatgctcatttttgtatgctagccctggcctccatttggttcagatttatatataataattggacgcatgcaggacctgtctcttttgat

SEQ ID NO: 5730 - DNA, 483 bp, Oryza sativa
  unsure (1)..(483): unsure at all n locations
aactataatactcaactttagcagaacattgctccatctgccaacaaatttgattaattctgaagtgtgaggaagcaaaaattacaaactaaaattgagctgcgtgtgaggaagcaatgttgatggataataataatggctacctgtgccaaatatatggcaagaccaacttgacgcacaagagttgatttccacccattattgggccagatgaacaattaagctgggcatttccaggcccacccatcttaatgtcattgggtacaaaagatccactggctaaagaatcacttcgagggtgggtgccctaaattccttgatggagagtaggagatatctggacatatgatctttgatattgacagcagtggtccctcaacactactggcatagcatactaatcgagatcaaccttgatgttaaacaaagtactttaagaccantatatatgatggaagtggcattatagactttacttcatcc

SEQ ID NO: 5731 - DNA, 333 bp, Oryza sativa
agcttccgtggggacgacgacacggctgtggttgcgacactgtctgaggcgctctacatcgtcagcatgggcaccaaagacttcctcgagaactactacgccatggcgcgcgcccaagcggtggagtacttcacggcggtggcgtaccgcgactacctcctcggcatcggcgcatcgccgagtcgtactcgttcgtgcgcgagctgcacgcgcttggtgcctcgcaggttgaacttaacggcctcccgcccatgggctggctcccgctggagcgcgccacagggagcggtgggcgtgttccgatagaaaaacacctgtgcgagcgctttacgc

SEQ ID NO: 5732 - DNA, 359 bp, Oryza sativa
actaagcttcgcccattacggtcgaccgcgacctgttggtttatgggtgcattcgatgaaaggttagaatcttcttccacgcgcaagtgagcattaattaattaaattctaaatatataatatgaactttaaagaaacttttgtataaaatatttcccaaaagtgtaggaatctgaagatgggaacttgtagttcagaacgcactcgaaaaaagattccataagatttaatctatgcatgtttatcggaccatggtgcaaggttagagcttggggcaatttgcttatttgacgctggtcggaagcataacttctgatttgtgctcagcttttcaaatttgcttattcgacccatttctc

SEQ ID NO: 5733 - DNA, 427 bp, Oryza sativa
  unsure (1)..(427): unsure at all n locations
agcttgntagtagagttactgtttactgtactttgtgngaatcctgcactctgtacttaggcaactggattgtctccgctactgtacaaaggatgaacggaactaaaggttgaacatgagggaatgatatgttcatgcttcaaagtaacaaggaatccaattattgtgtatgaagcaggcctaattgctctttagaaaacaatgcactgttattggtttgcttattcatctgtcctatggttaattctaaattcttctgtgactgaaatttccttttatgaagaacttatattgttgccagtgttggcattctatgcagaatagaaggttctgtatcatctgctaactcaaagctgaatctatgtcttatgaacataattactttctattaggtctgaaatggttggttttctgtattgaaacatta

SEQ ID NO: 5734 - DNA, 442 bp, Oryza sativa
agctgggggaattcgatcatttctcatttcctaccagaatgagaggcgcatgatctgaacatgctgaagacaaaggatacaaattggaaccctcaaacattaaatcccagtcagttgtgacaaaagcacggtcgatcttggtttaagttgggtttgcaccttcccctgcccaagtaaaacgacgaccacggagttgaagctccttaacctgaattttgtctagcagaccacgaaagcgctgcatcattcgtctatttaggcgatcgttgtttttgtcagaggctttatagatgagattaaaatcaccgatgatcagccattcagatatcatggagggctgcaggctctctatctctgagagaaaaaccactttgtcagcttctagttgaggcccatacacaactgtgattgagcactgtagcccctcttctctcatggtcac

SEQ ID NO: 5735 - DNA, 487 bp, Oryza sativa
  unsure (1)..(487): unsure at all n locations
acctgcggcatgcaagcttcatgtatcaataaatgaactcaatcttgaacccattctttngggtcatgagactagcgtgggggcctcaatacattcataggtctcatttcacttgactatgatagcattctaaagatcaatatctcacaccatcatgaagattgcaaaggcagttgagtttgataatgccattgacatcatccaagactttcacctgtgttgagcaataatgattgtggcacttggggaatttggaggcgccaccggctatgaagaggtggaattgggcaggaggcagtatggatgggagacattgctaatatgtaatatgaatttgggagaggagccaacatcaacatatacggngttttaattattattattcttttggaggggatgggcggcaaaggaatcgactgatactagttgatatctcacgctnntgtgcgggatatgtcgatgaatgtantgtatatattatagaaat

SEQ ID NO: 5736 - DNA, 506 bp, Oryza sativa
  unsure (1)..(506): unsure at all n locations
tgatcctcacagtcacctgaggcacgcaagcttcagccatcctcctctgagagttcagttatctcatatgataaacggtaagaatccaccaacaggggcaggggttcatcatcgcagaagaatggcctggaaggcagctgcagaccatcaacatcaccttcaagcatttctatgacctcactcatcgttggacgatcaggaggcttcacctgaatgcaatgtagaccaacaacacacaacttcctttccagctcatgcatattcaaggtattggtgatctcacccatctcttgttgaatgagttgattatacaccaatgatggataatacacctgggttgagcttgacatgttctgcttagagttccttcgccctccagccatctctaacaaaagcattccaaagctgtaaacatcagattngctagatatgacaccgaagcttcgagatatcatctcaggagcaatataacctactgttcctcgtgcagcgctaactggcacata

SEQ ID NO: 5737 - DNA, 436 bp, Oryza sativa
tgtcgacttgccactaagatgctgaatggtgacgcaaattgcaaacgggaagagttcatcagcgaggtctccaccattggtaggatccaccatgttaatgtggtgcgactcgtcgggttctgctctgtacaaataagaacagcgctcgtgtacgagtatatgcctcagggttctcttgacaagaacatcttctcgtctagaaagagcttctcctgcgataacctaaatgaaattgcattgtgcattgccagagggatcaactacctgcatcatgggtgtgatatcaaattctacactgtgacatcaaaccgcacaacatccttcttgaaacaactttgtccagaagttgccgttttggccttgcaagcttacccaatgacaagagtttgtccattgagccaccctaagacagtggatacattctcctgaacatctc

SEQ ID NO: 5738 - DNA, 489 bp, Oryza sativa
  unsure (1)..(489): unsure at all n locations
agtcacctgaggcacgcaagctntanacacccattaacatcaaaatatcttgaaggttcttgtttactgnggtggcaggctgctgctgacaccacccaaccctgctttctgccccagttctgagagttgctgaataaactccaccccattaagaatttcagttgctccatatatgacttgcttggtagtctgtgaacgttgcgttagctctgtcaagctcctgtattcaatgtaatttccaccaccaatcatgaaaacaatggcctctctgaagggtcctctgaactgtccagcagttcctgatttaggggcccgtggatcaaatagtaagtagttgtcaacttcaggatttggtttcccctccatcaaagcttctacagcccttgtagcggccagctgctttccatctgataacaaattcctcacacctgtcatggcactaatggagtgcccataaagcttttctgtccaatcaactatgttaacctt

SEQ ID NO: 5739 - DNA, 454 bp, Oryza sativa
  unsure (1)..(454): unsure at all n locations
ttccatataagtgctgctgatntaatgacatgccaattgtattttaacgattcttctacgttgcataaaggtaagaccaattcatctcattattgttacgtacaccttggatgaacagtctattattcgacataatggaaattgatggtttcatgttttaatagaacgaagtgatgcttcccatcttaatatcacacccagacgtctcccatttacaatcatcaacaatgtagctcactatggtccatatgaaagtccaatgagctgcgtaattcaaacaacccaaaacagagacgtcaagtggcgtaatgcaactcttacaccggagcagatcaagctaaagtcgatcgacagagaacaagacgtctagcactaaccaattgaacagagactagagatgaatgatcgccgtaaggttgcgaggcanactctgccagatgtggatatcatgata

SEQ ID NO: 5740 - DNA, 147 bp, Oryza sativa
gaacttatccaggattggtgaacaaaaactattccaataaaccctaaggaatagccagtttaaccgaaacgcccattatggaatattgtgtaaacacgcgaaacgctgtggatcactcaaacatgaaaattttatttgtttggaaac

SEQ ID NO: 5741 - DNA, 465 bp, Oryza sativa
  unsure (1)..(465): unsure at all n locations
agctnttctttttatttctttntcgcatgtttgtttgttttcttcgaaacaatatttgtttgaaataagagcaaaattatataaatttaattggtatgtatagtgtttatcggatcaccttagctgccttaggtacgaagcttcgtcatacgtgcagaaagcaaacatgcacatgtgcgaggtctttagaagtttcattntactcttataaaagatagatatggcatgcttgttaataggtccttaataggtatagttaataggtccatcagtttaagtgaaaaccgatatcaaaatatttttattaaaaatagtataaaatagtgggctcagtaattaatgtaaaatattagttaatatagatcataaattggcaatttactggtagagaatattattgcgtaacatttatattaaacaacatgtttttacnatttgatataaaatatgatttgtataatagat

SEQ ID NO: 5742 - DNA, 460 bp, Oryza sativa
  unsure (1)..(460): unsure at all n locations
ttttaatggtcattctcttagcatgctatatgcttattttgattatggtgagggtcatagcctaggctatatagactcgttaattgccatgattcttatcatatttggtggatcatcttaagagttcttactcggattcttatcaaatatgcttatggaccttttggaagtgttttcactctggtttttttatgtctctttgtaatattaaagctaaagcagtcggctggatgttctattanacgtcacatctgctcggctatgtgaccatttggataggatgatatttgcaccttgactatatgtgtacgtttaaactaatcacatattcggaggctacacctaattaggtgcatctaatcaaagcacctaactatgttggttctccgccctccatagtctatgatcttggactcggagatctatctagaagaattgaagcactcggattttacttatg

SEQ ID NO: 5743 - DNA, 404 bp, Oryza sativa
  unsure (1)..(404): unsure at all n locations
tgcctgcgtatggtggtagcagtttttatcgacgtggatgaagaagacaatgtgggtggtagtgttagagatggatcgagagggcatgtaccttaatcatctgtgaactctcgagctgctgatactagggcgtcattggcgtatctgtggcaccaccggacaggtggcggcaagtggcanagaaggagactggactgtgtttgaatggtactgactactattattaggaaggctacaagccgcgatatggcttgcatggctgcttaaatgcctcagccatgaatcacggagggtggtattgtcggcagcgacgtatggaaacgttggcgttgctgttgctgatccacgatggatgttatactgtacttgctctgtcttggagaactgctctttatgaccaacga

SEQ ID NO: 5744 - DNA, 410 bp, Oryza sativa
  unsure (1)..(410): unsure at all n locations
tctcgggatattgtctctgtccgaagctatgaggcttatcttctattagataccagctatagaacggatgcgctcacccagcaaacttatggatgtgcagtgcgtcactggttgcatggctgccctaaagtcgtttatatcgaggctgggagagaaggcgctaccctaatttaagctcctcaagcgctcggtgccgtttactttgacggaggaagctgaacatgcctctactcaggtaaaggtgtatctcagctctcccccggatctagtcgccccagagcctaatgagcccctgctactntacttagcggcgaccccccatgtagttagtgcattcgtctgatgtggagcgcgatgaggactattctcattctgcgcactctcactctgtgccgacttggcccgggagc

SEQ ID NO: 5745 - DNA, 385 bp, Oryza sativa
agcttattttgcattgccggagtctacgattatgcgggagctcgccgccgatgcaccgtcttgttgccgaccttgacgaagtcgaggaccacggtgtagtacgtgtccacgtccccggcgacgagcggcgtgctcgctgcgccgagctcggtgacgttggcgagggtgccgaagttgaacgccgacgatgtgttgacggagtgcgggacgaggcagtaggagaatctccggccgagcgacgcctcgccgccgagctgcgtcacgagggagaccgcgtcgccgctgagcccgaccagcccgtcggccgggaacgagccggccgtcgtggtggagcagccgaacttgacgctgcacacgccgcctcgtggtcgtgggcctcgtgggt

SEQ ID NO: 5746 - DNA, 454 bp, Oryza sativa
  unsure (1)..(454): unsure at all n locations
accataaaactcaagctgcccanaaatgtgtcgctacacagagaagatgctctcctttacgccaaagcaagtttaattgttgattcaaatctttgaatatgttaatgatggctntgcccctttatcaaacatgtggccaaggcgccaatttgtgtactccccgtaacacgtggtagtgagttgtggttacttcattactgctggaaacatcctctagaatattcggaatgcatgtataaatgctggaaatgacagctgaatcaaatcatggcgataatttggtaattctgcacaacagctaatcttggatgctaaccttacaacatcaattntactgggacngaggaaggatcagatatgttcccccagtaaagatctagtcagatcacatttagaggttgaaagggatatgacgtgctacacgtatacggacaaactacagattatgtggtct

SEQ ID NO: 5747 - DNA, 439 bp, Oryza sativa
  unsure (1)..(439): unsure at all n locations
agctntccagcagagagaaatggagaagcacatgtatgttntccatgagccactacaatgcccttgtggggtggtccttgaaaaggaagatatggtatgtattttgccttcgctacttatattctttgaacattcttcctaacttctgaagttcttttttactcgttgaatcccgccaatgatttgagtacacccagtttaccaagcgtaatattgtctttacttctaaacaaaatgattgcaatacctttttagatgtaataattttatttgcatgatatattnttattgccaatggttagttttacgagtattgttcctcactcaatacaaacagtagagaaactgcctaccagcttttgtttcaaacagttactgtaatttactggtaatgtaatattggaagtcacatgactaatttattctgttcttaaatctc

SEQ ID NO: 5748 - DNA, 363 bp, Oryza sativa
  unsure (1)..(363): unsure at all n locations
taatatattctacgtatatatacctatgtacttactcttcttttgtcagatggctcctaacgaggagtacaagagcgtggagcacacggtggtgatcaagtctagccaagacgccaggtgctncattgctgtcttcttcaacccagccaagcgcgatgcctccgacctgttcgggcccctcccggagcttcttaccgaggagaggccggtacggatcccgcgcttctctggcctgagttcatgcgatctccgacggaatccggccatggcaagtcatcgaacgattcttcatgattgttgcagataacgactgctcagcaggcaacattcatcgtcaaggtgatgctacctgagtaaagatgt

SEQ ID NO: 5749 - DNA, 500 bp, Oryza sativa
  unsure (1)..(500): unsure at all n locations
accgactaaagcgcctgcggctgcagctgaatatncttcatttttgatctagccatgcctttccctccttttctcattaactttgtgccaagaacttttctaggagaagaaagcatagttcacatgtaggagtttatttgaatggatattcttttggaaagccaatttccagcgtagaagcttagcttaattttatatgtggaaatgataatgaccccttgatcatgagagtatgaaagatatctaacacaagtcacacaaatttgaccaagctcaatataatgtcgaggagtcatatgcatgataaggttaatcattaatatactttgcatatggccttggtaggtataagggaaagacaattggaggattgagcgtttaaaacaattttattcttgaaaacaaattcccaagagtcataataagaggtgcaagaaatcctttcatcttaatcatctcacatagagcaattacctagattcataagagtccctacacat

SEQ ID NO: 5750 - DNA, 419 bp, Oryza sativa
  unsure (1)..(419): unsure at all n locations
agcttgtggctgggtagaaaactatcgatttatttttgagatagagntcgatcctcaactatttctcgcgatatcttcttacgaagttttgttagggcatctataacagcctctggtttaggtgggcaacccggcaagtagacgtccacaggaattaacttatcaactccccgaacagtactataggaatccgtactgaacattccaccagtaatagtacaagctcccatagcaatgacgtattttggttcaggcatttgctcatataatctcactaaagagggagccattttcattgttactgtaccggctgttaaaattaggtccgcttgcctaggacttgatcttggtaccaatccataacgatcaaagtcgaatcgtgagcctattaatgaagcaaaatcaatgaaacaacaact

SEQ ID NO: 5751 - DNA, 433 bp, Oryza sativa
  unsure (1)..(433): unsure at all n locations
agctntatggaagtaaacttgttcactatactttctcaacagtacgtggaatggaatggtgttaactatgtggaggccaaggcttgattgtgctctgttacttattaaggattttgagcatatgtcaccaagtgccaataatgcagttgaggctcctttccttgcaatcatttttgtttgtctgttttttttttctaaagaaggcaaggcagctgccttgtatattatgtacaagtgtccttgcaatcatgtttatatatatattcttacatactactaaagccgaacaaacttttgcatgacttaaaaacctcatactagagaagaattaatgtatagatacccctcgatactgaaacctggttgtgtttacagttgcgtattttttggcagaaagtgatcactgcctggaggacggtaaattatcatgata

SEQ ID NO: 5752 - DNA, 410 bp, Oryza sativa
  unsure (1)..(410): unsure at all n locations
ctttaaattgcacgcactacgttcacgacaatttttttacattattggctggcatgcaattagcatggtgtgacacgatgatgttcggtggcgatcgactaaccatatccaaaattacatgtcatgagatcgatatatatacatgcgtccatataaagggcaactagttagttctggtctgatatatatatcctcaaaccaaccaaacacatataatccatgcacatgcatgtgtccaaatntaaccaacatactcctccgtcccagaataaatctcatcctaatcctatagattaatatgtgcatacatactctctacgtttcgagatatatctaatcatagagataaagccgatccaatacatatccatattcatttttagaattggatttatttttaaatggaggga

SEQ ID NO: 5753 - DNA, 118 bp, Oryza sativa
tacccccgcctgcctcatgagactgtgtattattacatttgcgaatggaccatccaaacggatgatgacctgatcgcacggatagcccttgcgctgcgataattgccatgggaaacgg

SEQ ID NO: 5754 - DNA, 475 bp, Oryza sativa
  unsure (1)..(475): unsure at all n locations
agcttaanatgcttcggttntcanaaatgtaatattgcataatactctgagnggcgtttccaaggtgcacttcgacctcagtagcaaaagatatattgtttgccagcgatttaagtgggtcaaccgttggatctacagatagtaaactcggaatctgcggtgcataaaccagtcgccaccgtgcttgaccaaattcacccttgccttcaatccttggcatcaaagtttcgagtgttgcagttgcgagtttcttgaacgcgagctgtccatcaccttccaatagtgactccgcaagctgtgactcaaaaacctttgcagcctagaaacagcaatgaacagaagaatatcatagagttaggcatgataggagaagcacacatattaaccaattgtctaatatctttatgtcagtcttggatagagagctggcaatcaaccagtaaacggttcaccaggcagtcaccttattatacag

SEQ ID NO: 5755 - DNA, 52 bp, Oryza sativa
gcacctgagctgcagctggggcctaatgaggagcaacttatattttgtttgc

SEQ ID NO: 5756 - DNA, 311 bp, Oryza sativa
  unsure (1)..(311): unsure at all n locations
agcttctcgcatgagactaatatagttatgagttagttgtacgatgcattatttctcccanaaattatttttagataatgaaataaaaaattacgtatctatttttgaaaaaaagtcataaaaataaagagcattcatattgtcggtgatatgggcccggcggtatcacgtctatagggaggaggccgccctcaaacccacgtggctcttctcgaggggggtcaagcccggtgtgttgtggctgatgctccctcccagcttggaggcgggcagaccctcaacccacgttgcttatcacgaggggggatcaa

SEQ ID NO: 5757 - DNA, 443 bp, Oryza sativa
  unsure (1)..(443): unsure at all n locations
agatntacaccactataattagagaacttgagcactttgtttcatgatgcatcctcaaaagatgtcgttggataaccatatgaaccaactatttgtagcatttctgcaaacaccgcaaatcgaattaagctacaacagaccataatttggtaaaatcactttcaacacccaaccatttcaattctgcaactgagcttctgtcagcccaaacgagatgaaacaccaaacaaaccgctcgaattaagttnttctttcttttctttnttttttttaaaaaaaaggtattttcccctttgggagaacaagaaatttaaggctctccagttaattccttattcttaatcatcaaacggcaagagctgcgcgcaactcgcacgaattaaccagtggtgcgcattgctgtcgaggtatattccgaaattctccatccgccctcgtcgatg

SEQ ID NO: 5758 - DNA, 450 bp, Oryza sativa
  unsure (1)..(450): unsure at all n locations
agctntaactactcattctcataatatattatttattctaggtggaaagaaaagagaaagataatctattcctatacttctaatatacatagtatacatatatcctagttagctgatatactagctaataccctctttccgatgccctcctggtacttcgagaagccacccctgactgccgagttccttaagacagcccgttatgaccatacaaccggggctagacaccacatcaaaactaccagatactactctaatatcatcgtcatgacatagagtaatggcttaaggaaacattatacctgcaccaaagcatctcccagataagctagccgtatattctgtacaacaagaacataatgtaaagtaggtactcatatactcggaaagtatttcaataccataaatatatttagaagagtattctaataaaagtacaaggcttacaaa

SEQ ID NO: 5759 - DNA, 494 bp, Oryza sativa
  unsure (1)..(494): unsure at all n locations
ntgagtcatcactcttcaccaatcaccaccacctccctactttcaccgtcctctcccacgattgaagggcttgtggtaacacggatgacggatcgtgagcagccctccatggagtttgtgcagtgggctgatgagctctgtggcgccgagggctgctcggctgaaggacgatgttgatggcacatatcagacgataagcttgcagtggtgtgtcacgcttgacagctgtggcacatatatggcaaagagatcggccgataagccttatatcaatgcagatgcaaaaacttgcccagcaatggtgcagatatggtgtcaacgtgagcagctgcgtgtctgaggtaccgatccaacaacgagacatacacctggagatgcttgccctcactgagctcgtcccatgccgtttcctctgcggtgtggagcatcgttntattcctcacaggaatgtgcctcagtgagtgtaccctgacactactacangccactggttc

SEQ ID NO: 5760 - DNA, 163 bp, Oryza sativa
  unsure (1)..(163): unsure at all n locations
tgcgctatgatcnaggacagctcggaatgcaagtaaatggacctgtcgctctcaaccgatctgccgagctctagcccagcgattcgatggccattgatgatgtaccatttgaggcattgtgcctacctgcgcctgctaacatattcctgtgctgaggatacca

SEQ ID NO: 5761 - DNA, 470 bp, Oryza sativa
agctttaataaaatttactggtttactatttatgtactcccttcatcacaaaatatcacagactagataggaggaaattcaatactctataacaggttataacgaatttggataggattgttgccgcgataaaaaaaatactacctgaacttgtatagtgcttctctatatagactaaatagttttagagctcaagggagtaccagctggaaggctcaaggggaggaacgacctgaagaggaagacggcaacaaggctgacgacgtacagtctgaagacgggttggaggaagacgccttgtcaaagggaaagcatatcatgctaaggaacaagaagtatacgggaccggactgggctgtatgagccatctctatgtatcggcccttcttggcccatgtaaaagagagagagtgtgtgtgtctgtgtgcgtgtgttggtggtgagaggaaaatctatgtatactcgaaaca

SEQ ID NO: 5762 - DNA, 439 bp, Oryza sativa
  unsure (1)..(439): unsure at all n locations
tttggaaagaaaggtggaaacccaaatatgttattctaatgatagtacattcccctggaagggaaataagggcaactaaaatatgcccggaagttaaccttaaaattgaggaagttgacttcctagccaaatcgatagtcctagactcgcaaagcttgaacatcatcctatggatggattggntggctaagcacaaaggacagattgattgtgccgaaaggtccatcacttngcaaggacctggaggaaagcaagttcgctttacccctaacacccttaccgcaagtcggtctatcctaacaagtttgcaagccattcccttggaatcagtgcccatagtctgtgaatatcccgacgtatttccagaaaaattaacggttatgccaccagaccgagagattgagttcgccatagaactggtccaggcaccggaccaatg

SEQ ID NO: 5763 - DNA, 444 bp, Oryza sativa
  unsure (1)..(444): unsure at all n locations
agcttatgtatnttaaagtacatcaatagtggtgatcacaagtttatagcttaaaaggataatgtggtctattgtgcacgtgaagagaactgaaagaaatgctcttgatctgttcatgataggtccataacactagctacatagggcaatgaatttgctgtgtgcatgaaaaagatgaacatggatcactagcacttgccaatcgcaagcattcagttgtggccaccggtccacaaagccatggcagatgcaaagtaataagccaagcaaacaagaaaagcaattttcaacagctggatggatagctgggacctcctaactcctatgctgcttgtgccaggtctccaacatactctccaggatgtatagtgcgttcccagtagctaactcttttattttgttgacctaccctaaaaaataattatcataaccctaagaacaagt

SEQ ID NO: 5764 - DNA, 323 bp, Oryza sativa
  unsure (1)..(323): unsure at all n locations
ctaagcntagctctatctcgcgcgctcatctcgtgcatgacantatattttttctatcacgtgacacaccatgagttaccatattactcaattaagtcacgccttgttgtctgcgaactcgtgattgattcgatcgatttccgcgtaggagaccgatgagttcctttctctcggtgcaacggacgccgtctacgccggttgcggtggctgtatcctgaggcgaacagcaaggagcatgccgtgtggtagaggtgctctgtctggaagctactacagcgactgcggcaaggaggatctatggctgtctcttaacctgcgagcgt

SEQ ID NO: 5765 - DNA, 455 bp, Oryza sativa
  unsure (1)..(455): unsure at all n locations
agctntccacagtcatgcagtaatttacaggttaactatggaaaaatttatcacaagagactataactaataactccccagatgatatagctagcaatatgcctcaactgacaaaacagattccaggtgtccaagattcgcggagcacgcaaggacgtcgtggccgcgaaacattgctgcgtcaactagcccaaagatttcagtatatatgtttcaatatntatgtactctgctagatatatatagccaaaacgtgcaccctcgtatacaaagacgagaaatcattatggaatctaactacgaaatgccctgcaattttctattaccacgcggcacacgtgtgacaagctgacagctatatttcaccggcttggaaaataatgttacgagattaagatgtagggatagtcccatatcacaggatgctatgtacagttatacttgaatgcacctac

SEQ ID NO: 5766 - DNA, 448 bp, Oryza sativa
tggacttctctacgtgcacaacctgccgattgttctggattgtagcttcaatatctttgcgctcccggcaatcggctaatctctgcctggccttctccagcttgaattggtgttgctcaaggtagacggctggagtaagggcatcggctatttcatctgggagtagagcttggatatctgtgaaccttgcccggatcgagccacagttggtcaccaatttgtccagtgatgcttctagccgatgagagatatccttaagcgttctcttcacatcatcggacagaggagctatagctttactagtggtgtcttcttctgtatcatcgagataatccttgatgtcgaacgaaaacagatctgctaactcctgccagagataatgttatggatgactaaggattataacatgattagccgatctcagagttgtgtcaataacaaacttact

SEQ ID NO: 5767 - DNA, 471 bp, Oryza sativa
  unsure (1)..(471): unsure at all n locations
agctntagacaatntanaaacatggctgggagaatcagaatttttataacctggtggntgtttgacataaactttctcttgtataaaccatttaaaaaagcacttttcacatccatttgatacaatttaaaaccttttgaagcagcaacagctaacaaaagtctaattgccaaaattctagcaatacgagcaaaagtttcataaaaatccaacccttcacctgagtaaaaccttgagcaacatgtctagctttatttctcacaattaaaccatactcattttgtttatttttaaaaactcacttggttcaattaaagtccaaactttgtttctttcaaaattttcaagttcttcatgcatgacattaatccacgaatcatcagttaaggcatgagtaacatctntgggttcaaaagaataaacaaatacagaatttgcacaaacatcatgagtcattaccttagacctcgt

SEQ ID NO: 5768 - DNA, 515 bp, Oryza sativa
  unsure (1)..(515): unsure at all n locations
gcttgtcttacaatggcactgtgaaggcatattatggcatattacatcatgatgaatggtaaaatgacagtgatctctttccctgtagtggctagtaatggacacttaccagatatgggtgtggaaggagtgtttcatattcaaaagaatatgacgggatattccaaaagatttttgtttggttttttccttctgtaatgtcgctctgaagctagctccagttgcaatgtcattccttcctctaaatatgcatgcttatatagagctggcttaattttctctagttctccgttttcactaaatatgcattgcctgcccattccattatattatgtggtcatcaaccacaaaagagatctattatgaagtatatntttacaatataatccatgatggatgtacagatgtagtataccaacttcatgtangcaatcttgatttcgttcggaaaattactaatggtgaatataatactggctgactgcatatattctangacatatatatctagtgat

SEQ ID NO: 5769 - DNA, 439 bp, Oryza sativa
agcttatagcggtagaattacctgacctcatcatctcattgatatactgcagaagcttatagcggtagaattacctgacaaagatgtcactacggtaatgacgacctcctcctcttggttgcaattgggcgtccctgtgtcttggctggaacagactcagcagcaatagggcgaagagacagattctgaaggtctttggaaagatccaaacccaaaggaggaacaatgtcatcagggcaggatgagagggtcaaggacgagaggagcttcttgctgtgcatgttaaggctgaccatgtacagctctgcatcggcatcgttgagcatgaaactaatgacaccatctttctgatggttcacgacacggctaattggtatggccgtgggcaacctcgccttgtcgaagccctccagctcccacagatctggcaccatgagtt

SEQ ID NO: 5770 - DNA, 521 bp, Oryza sativa
  unsure (1)..(521): unsure at all n locations
tctgctctagactggcattgctggcaaggagatgctgcgtttcttctattaataggaaggtttcgacttcagtcgggttgcatcagatgagctgcccttttttggggggctcccacgagcttcgatttccttcataccgatggtcatattggcggngtgctggcaatgcagcttaggataatcaccggaacatgcaatggataatgaaatgtaactacanttgtggaggttttgatgcttgccgaatgtcgatggnggcatcgtgaagcttgcctggttntgacctgagattggctctgattactgctgaatggtgtgtcagatgttgcgtgcggtttgacgtgatggtgacacgcgtgaattgttgccgagtggagagagaaattgagggcgggagatntgtggcatggtaaccgtgaacgataatttggagcataaatgataagagcacggtggagcggtgcacangtaagacaggaagacataatatctggttggaagatgatcagctgtcatcacaa

SEQ ID NO: 5771 - DNA, 463 bp, Oryza sativa
  unsure (1)..(463): unsure at all n locations
agctntagcatgctcagtactagtaataactntcacagatatgcacatatttacttcccttccaattgaggccacttgacacaaacacgaggcgtacacacttgagcgcttgttcacgcatctcacacttgagcgcttgatttggtaaatcaagttgtaaattttatctcatttcccgttaaaattgattaattgtatgttaatggctttttcatttgtgtacatcggctctatcttgttgacctgaaaaaaccggctttgtctaacagtgtattttcattaaagagagatttacatatagcaagatcttaaagctatggcaaaatttgctacaggacacgtaaaaagtgtaattagctgagggataccgtaaaaacgtgacactacctatggacgctacaaaagttatgtaattggccgtaggacaccgaactcattattttatcattntcgggatgaaagc

SEQ ID NO: 5772 - DNA, 489 bp, Oryza sativa
  unsure (1)..(489): unsure at all n locations
tctcattgataacaaatcagcaatggccctcagcananatcttgtgttccacgagaggagcaagcacatcgctacccgctaccactacattcgagaacgggtgggagatggctccgttcatgtcgagttcgtcaggactgaagggcagattgcagacattttgaccaaggcacttgggcgcacacgttttcaggagcttcgctcccgcattggcgttgccgacgtcaaattcaggtgcaagacttatggggagatngttggatactttgattaagttagcacctgttctaccgctntgttagggtaggttttatctcgtgtcttttacttgcatgttntcagggctcggttattagaatgagcgcgtccataagccccgtgcgtatgttcacggcgtggcagtaatgtatcgagtcgcccgctgcacgatccgatcgtgtgcgatggcgcacgacgcactgggtcgtgtggcgggcaatgcggatcacg

SEQ ID NO: 5773 - DNA, 486 bp, Oryza sativa
  unsure (1)..(486): unsure at all n locations
acctgaggcatgcaagccttaaccaagctcttacaagatcttaccattgcaattgttatggtgacatacaccgactcaaccaagcaccccaatgaaggttggatgtatcgatgcctcggcaaacacttgcggtacagctgtaatcaaatatgtggagctctgggtaggcttaaatatgtagcaaaggaatagcaaatgctcaaatcagataatgcaaagttgaataattggtcaaagacaagtaccgcgctggtcctatgctagaacgtactatagacgcgagcctaaacacaaactataccacaagatagcactatgaacaactcatgcacaactctgatatatgaagttcagctcaaacataacagnaatctctcttttctttctttcttctttcttctttactttcattttttctttccttctcttcactggtagtgttttggggcggcgttgttatcttttttttgcaccttctgctttttt

SEQ ID NO: 5774 - DNA, 513 bp, Oryza sativa
  unsure (1)..(513): unsure at all n locations
tcggccgcatgcgttcggtagatatatatatatatatatattatttttctgattccccgatgtaaccatcaagccatcgaattagtgtttttttgtcggtgtgaattcatgtcgcgttcattctgactgtccaaagaaatcattgtatgtctgtgtcgcttgatcattttcaaatgtggctccaaacgaatctgtagggcacaccgaatttataccgtctggtgtcatttgtgtctaccacatacttttgtatgagtgggatacatacacgcataaatagccaatcaaagcacatgtacaaaaagtgattttggggctaaagtcctatttattntcctccatctatttcctaccaccttcataacaatttatccaaaatcataaaccatgccatttacatatcctttcctttctatctgagtgcttcaatataaactttcaattctctttagtatcctggatacgctatttgaattctttgtcaacatccaaagagtccaaaacaaactccct

SEQ ID NO: 5775 - DNA, 455 bp, Oryza sativa
  unsure (1)..(455): unsure at all n locations
agcttgctcgctntgctacctgctgcatgctctttctccttgctctccgatcacccaaccgctccatgcacaaacctgcaaaacacctctctctctagatgtgtccctgtgtactggaccagccatgttgcttgcaagcaatgctgctgctgacaaattgggatcacaaggaaaagaattagtatattctagctagctagctgctgcatcagatattcagagatggtgagtgaatggtatcaatgccctttcagtgtcttgcatggtgtgctgcctgcagaaaaggatagcttgttgctagcagggcacacaattgtaaaggtatgcaacaacaaggtgctgcacatcatgccatttccctggcatgtggatgctgctaattgcctgacaagaattgggccaaacagcttntagctttcaagggagagagatcggtcgatcgatgaacgtgtcaa

SEQ ID NO: 5776 - DNA, 449 bp, Oryza sativa
taacaactcatagttcatataatgaatgaagtatgtttttattggtttaaattaccaaagctgttccagaacactaatacacagtgcaaattcttcaggttttgatgcaagaatccccgattttggcagccaaagtctgacgtttatccgtatgttcacgatcttaatattctttacaacaaaaaaacacttctaaatgggaaatatgatggttcgttctatagttgcatgcgcttcgacaaatatgccacaaagttattcgtacagactcttcatgtttatgtcccatatctggttacagaagatcaagagaaaataactttggacaaaatgtagaagcacatgcaactatgaagaatatcatcaatattccatttaagatattaagacgctgttcagatgggactaaaacttgtaagtccctatcacttcggatgattggatactaa

SEQ ID NO: 5777 - DNA, 474 bp, Oryza sativa
  unsure (1)..(474): unsure at all n locations
agcttgagactaaatgccacataaacacactgttttatcccttacggcttgnttggtaactcgaggtaaggggattggaagtttacacaacggaattgatgatgagattaagatgggaatttgatttttaatcccaatatcttgtttggtagaggtgatggaaattattatggagtttagttagagattagatcattaataaaaacgaatggctgagattngcttatacaaagtaaaggaggaattccctcccaattacctgcccctattgaggtattgaaaaggagggagttccttcctcaattcctcatccccattccaccaaaattcccatgtcttctaatcaaataaaacacttaatagccttatccctgtaaactcccattccctcctanaaactccctccaaccaaatgggctcgtaggggctatttatgaaacagggacttattccaagtcctcgtcacattcgatg

SEQ ID NO: 5778 - DNA, 428 bp, Oryza sativa
agcttatagcaagcttatagctcactattttatttgctctgagaggcttgaaatctcgggagattgaaggactagtgccaccatcttgtctgttctcccgacgcttccttttcagcaagcggcactattgtctcctctgaagcctctcagggaatgcctccattcctgcatgtgccaacaggagccacaatatcaacgcctgatccaaggctcttggcatgcaagtatcctcgacatctaccagcggagaagaagagcatctccacccacacttcttctataagactccacattttgtcctcgtcatctaggcccatcaaccttagtgcaatcaaccatactgggcacagccataattaagcttcacagccaatgtaatattgcgcttattgataaacaacaacctaagcctgagtatgtgctgaact

SEQ ID NO: 5779 - DNA, 427 bp, Oryza sativa
tacggaccttgaaactcagcttccagaaccctcatgatggtggcagtgcactctatatccttcttcgcaagaccttggatgatatgcagattcctcgctccgagctataaccaagcaatgcgccttttcacggagtaattccaggattatccgcaactccactcggtcagatcacactcccggtcacctgtggcactcgggaaaacgttcgcacagagaatatcagctctgaagtcgccgatttcgagacagcttaccatgccatactcggacgcccggcgttagccaagttcatggtcagcccgcactacacttacatgatgatgaagatgcctggtccccgaggagtgctatccctacggagcgacatcaagcaagccgtcacatgcgacaaggagagttgcgacatggcccatacccgcgagat

SEQ ID NO: 5780 - DNA, 435 bp, Oryza sativa
  unsure (1)..(435): unsure at all n locations
agcttcgtggctgcttcgtcctcagctgttgttattctaccaccaccaccccggcgcacgtgaacgctcaatgagtccatctgtcactcacgcctccgctgcgtcggcctgacaggttagaggaggattagtagtaataatagtactctatacgccaaattgaaggtttgatccatgcacgtatctggattctggacgtggggggtagcggctagccgcacgtagatggcacgaacacggttacgcatctgtcacggagcgtgtgcccgtgtgggatctggacgaggagatcgatcatgcgcccccgtacaacggnggttgcacgggatccggctcagctgggacgacgtacgcacgcaagattactgtcggaattccggacggaaacgggaaaatctcgcgtcgcgtacgtacacggcgacgtgatgatgtgcg

SEQ ID NO: 5781 - DNA, 173 bp, Oryza sativa
ctagcatactatctttcttactcctagctaaggcattatcactatctcagtcgcaaatagcaatattcaaaacccatactatataaatagcctctcaacaataaccttttctgacaaggggacgaggcatactaatatcacccgcagcagcagccatgtggctaccagcagca

SEQ ID NO: 5782 - DNA, 451 bp, Oryza sativa
  unsure (1)..(451): unsure at all n locations
aacttgcgtacccgattgttggagccttagcttttgcgggatcaagtcgccgaagcaacaatccccacctcgctcatgatttaccacaagaaccgagaggaaaaaattttgggtggtggctctgataccagattgttagctacctaacgccaatccaacaatcaaaaggaattcactcaagaacacaagaatntttccgccagatccaaccggatcggcgccgccgccgccttcaccgccaacttctttcctacttgtttctcaaataagaacagtattagtacatataggagtcaattccctcacgctaccgattcggacagctggagctggtgctcatttggcctagtccagtctgattacacgataattggtcttgcgcaccgatgggccttgctagacgagtantgtacttcttccttgcaacttcagtcttctgtagtaaatctgg

SEQ ID NO: 5783 - DNA, 374 bp, Oryza sativa
agcttgccgttcgccttgagaacgacgaccgtgttcgccattcactccggatggataacgtctcggatgaatccggcctccagaagtcgcgccacctcctcgcggatgaaggcttgacgttccggggcctgccgccgcactttctgccggaccggccttgcgcccggccgcacggcgagacggtgctcaatcacctccctagggaccccgggcatgtccgccggtctccaggcgaagacgtcggcgtttgcccgcaggaaggagacaagcgcgtcttcctatttgccgtccagaagaccaccgattcgtgtggtcttggacgggccatcgcccatggcaacctccttgaccgggacctcgtcgcacgtgatcat

SEQ ID NO: 5784 - DNA, 464 bp, Oryza sativa
  unsure (1)..(464): unsure at all n locations
actaagctcgccggtcccttgaaactgcatccgctgcacggtactgatcattatttgcgtgccttccaatgcaaatgggcttagtccatcctgaaaacacaaccatttcatttcagtaagtgtaagaaagattgcataaaaaatagtaataatgtctggtgttttccaatacctggaacaagccgagggatgtttttgcagattattggttctctgaacacagtgcctgaaggtagcaagagcagaaacatgaatatcagaattcagagtgtctgaaccagatggaattacagcagcaccttaccatttatgatatttctaattgtgccgtttgngctcttccacatggantttatgctgaactctntaacccttgcttcatctgtcatagttttgatacaatactcagtaacaaaatcatcgcaaaccattgacattcgtcaacacgcatcaacacaaatata

SEQ ID NO: 5785 - DNA, 374 bp, Oryza sativa
tgtagcagggaggagtattagacttttcgtcttgggctggctgaagacaaagcggagaaagaaagaggaggagctcggatgggccgacttgggctgcacagcacgcgcgcgagggagagagatgttgggctgaaatcagcccaacggcttaagagaggatttaaaaactctttccaattaaaataatcactgaaatgatctttgaattgttaaaaatacttccaatgctcaaatagtttcaagaaaaatcctgaaaatacttggacactcaaagtacttaacaaaattataatcagaccatgtaatgattaagttaatatgtggataattactgaaatgttctttgtatggttaaaattaagaattgagctccg

SEQ ID NO: 5786 - DNA, 313 bp, Oryza sativa
  unsure (1)..(313): unsure at all n locations
caaaaaaacaattgcaccaaaatgaaataaagatgggaatcatcangctgcaaaccccacgatacgtaaacgaccaaaaataaaattctacaaataatgcacaagagtgacgcctcagtgctctctattgacaatagaaacaatcggagcaataatattcaaatctaagggagcagatctattccactacccacttagaaaatgcgagacaaccatgtaaggcgataatcgccgacaaaacaactatataaaaacatcggagaaaaaggcacacaaacactgctcgactcacttcaaacccaaacgccggccc

SEQ ID NO: 5787 - DNA, 195 bp, Oryza sativa
cttgcagagccatcaacagatcaactccctctagccccctggccggcaagatgcgtctgcgccgtctagctccgtacgtacgtctcccgatctttcagccggtgagctactaaaatcatttatgatctgcgtggttggttggcagtattggtgagactgcaacatcgacagagcgatctatcataagctcagctt

SEQ ID NO: 5788 - DNA, 457 bp, Oryza sativa
  unsure (1)..(457): unsure at all n locations
ttgagatgcacttgatgntgcggtggcaagaggtatatggtgttttcttcaatgtctcgtgtttaatctcgcaattcaaatcttgtttaaatagataaaaactctttttatatataaaatgatagatccaagcatgaacctgcagcattnggcgatagatccaagcatgaacctgcagcatttggcgccatgttcatatatagcatggcacacgcatgaataacccgttgactgtatgatattttgtactcctgatggctcaattgacctttgtatgttacaatcatacacaaagtcaaatactgtgatggtatgcagtatgctataaacatacatacagtccctgttcttatcagtctctcttatccagttctattctggctatttgccagacacttataataatacaatttctaaaaatatatattctactgtattgaccttttatactaatcta

SEQ ID NO: 5789 - DNA, 453 bp, Oryza sativa
  unsure (1)..(453): unsure at all n locations
agcttcaacctcttggaataaaaaccctntgtgaatatctcttttctggttctagcattgttctcacgtcattcatatagnttttatgtcttttttttttcaatccatgggatttgaggtgtaagggcactttaattctacattttttcttgtaattcctgttttaagaatcatgcgttccaaaggagctggccgcagcccgtggtactctaagacctccactgtcaatacccaaactaacctaagccgtatgatctctgttctttttagctcatccacgggattattgaactcacgcttcgaaaaatacgttttctcgaaatcctttttttctgctgcactgtttggaccacttattntaaactatctgttaactntattntagaaaatatagtatccctttaatcaggtagataatccacgacaacaatccacttaataatctaaatcaaa

SEQ ID NO: 5790 - DNA, 467 bp, Oryza sativa
  unsure (1)..(467): unsure at all n locations
aaactcagccttagccttcacaagggcacgtctcgagtcgagtcgattattgttatcaattcacatggcgagacctagctcccgtgccgttgcgcctagacacaacacaaccctctgcacgttcaaaaaaacgccctgcttatttatccaaacgaaccacaccatgggcgcacaagggggacaccgacacgccaactggtactaagataaataaccttacgcacgccacgcacccanggagcggaagcgacccgaggcgatgcgaggaataagaggaggggaatacatagggagaggggagaagaagaggccaaaccctagccctaattctcttctaaagatggaaccagacgtgggggcggaagacgcggcggcggatgcctacaccggcggtgggtctcgctgggatccgttcccggcggtccgccgcagaggctcttccgccgagcctcctgtacgccgacgtc

SEQ ID NO: 5791 - DNA, 259 bp, Oryza sativa
  unsure (1)..(259): unsure at all n locations
atagaaaaaaaaagataatctatcaatctttcaatttcagctatctcaaatggggccttactagctagcatcatttcatggaaaaagccatgcaatatttttcacatcatcatcccatcaaaacatgatctgntattttccatttctctgcctgttcgatctaacatacatgtgaatactggtggtcgcccttggttcaaaaaaccacaaaaaaccggattgtattttttctttatcatccccaacaatcatttcacta

SEQ ID NO: 5792 - DNA, 347 bp, Oryza sativa
tacaacgaggagagaacagagaaagagaacctcctcaaagattataattgatgaacgacacctgcaaaagttatcttgccaaaatacaagaggcacccaataaggcactccgcacttcgatgctgctggtcggctagaagatatggaacgaaaggaatcgcataaccttccaacaaaaggagctttcagctacctctcttctagccaagatcaaggaagaggccataacttgggccttagcagaaacgaagaatcttcgcaattaggtttcttttaagtagctcagaccagaggccctaagcttcttttctttgctttcgctttgcaaagctactccttctcaattc

SEQ ID NO: 5793 - DNA, 339 bp, Oryza sativa
agcttgaccgtgccaacgcccttgagctcttctgtcgacggtcacccatgttgaagctcaatgtgccatctaccatgttggtgtttctctccatctcgagtgttgagggtcgcctactcgtcacatgtctcctattatccatagtctcaagctcgtcattgaggatgaccgctgctgatgctctctaattaagagctgcaggtacacgtagactgagctataagtttattcacaacaatacaatctcacgtggaatggagaagacatgaagagagagcatagatctggcgactaatctatagccagcgctagcaagaaaaccaaataatggactgccac

SEQ ID NO: 5794 - DNA, 279 bp, Oryza sativa
gtcttcataccggagggcacagtcgacggtgatgaactgcctcacccgtggaacatagaacaccttacacactactacccctgaggggaggggcggctgctaggtcaacggctctggaccatcccccacctcgttctgcgtgaccggtttgctgaaggctatgacacatgcgcaggaccagaaaacctttgttattgatttatataagacacttgatagttagctaaaggctgcatatgtgcgtgaatttatttatattggaagaatcctgacagaaat

SEQ ID NO: 5795 - DNA, 436 bp, Oryza sativa
agcttataaaagagaaaagaatagctgctatatccatatccgaactcttccgaaggcttgcagactcctaatttctactctattcctattccaccagctagatactactaaattaagcttgagagaaatgagagagctattgcttgaggtgtgtgagtgaagtgacaaggtgaagtccttatataaaggtagttatgacggttgtggaaggggaattgtccaaagtgccctccaaccgtcattgggatgcaatcctagacgtccacgccaaaacctggatccaacggcgccaggattggttcggccgaacctgtggttggcccaatccagcccaatttcggctggtggcctcctctattgctccactccgcagacttgtgaattttggccattcatcgtgtcaattctgagttctttgcccattcatacataagtc

SEQ ID NO: 5796 - DNA, 445 bp, Oryza sativa
  unsure (1)..(445): unsure at all n locations
gaacaaataagatagagaatgaanaaatgttgtcttcctaaaaagggtttggtgaaggggaatgggtgcataaatcaccaccgtaatcaatggtgttgatgagacttcaaaaagtaaaccgcgtttgaacactggattgagacccaatgaaataaaacattaatcttggtggtacggtttgttactaatcatttccacaagcgttggaaaatatttgcatgcacgtaattatggatgaaaatgcactcgccaagcaaaggaaagcacctccaacggatcagacacgagtacacggattgaagggtccacaagctgaccaaatcaccctaaaatgggccaaccactttgtatccacaccagtgcccaaggaacattatcctatacaaaggggaggaagaaaggangcaaaggaggatcataccaaccatattatgtctgagttctc

SEQ ID NO: 5797 - DNA, 432 bp, Oryza sativa
atgcaagcttccaatgcaattctctctgccttgagttcggaggtattcaacaaggttgatggacttgaggaagccaatgagatatgggatactttgcaattggctcatgagggatcacccgccgttcgtgaggccaagattgaattattggaaggaaggcttggaagatttgtgatggatgacaaggagacaccacaagagatgtatgataggatgatgattcttgtcaacaagattaaaggacttgggagtgaggacatgacaaatcactttgtagtcaagagacttctccgtgcatttggtccaagaaatcccactcttgtatcaatgatacgggaaaggaaagacttcaagagactcaccccaaatgacattcttggaagaattgtgtctatgaatgcaagaagatgatgctcgtgagtgaggcaaatg

SEQ ID NO: 5798 - DNA, 454 bp, Oryza sativa
  unsure (1)..(454): unsure at all n locations
actcagcttgctttaacttgtcgacatgaaactgaagcagcattttttcttttgcctcaccanaagagatgccctagatgctttgtgctggagttataacagaaactagaaaaattgtgagaatattttgtcttacctcttcaggagtacttttgctgaacaggatggaagatttgccccaatttggagtctggcctgatctgagacaaaaggaattgattatttcagaggctttcctgacttcctcttgttgggcctgccccacaatgattagatcatctgcaaacatcagaaaatgaatggaaggatcattttgtcctactctattcctgaaatgtggtcctttgaattgcatctgctagctggtcagaaagttcattaattgcaaggacaaaaagataacgcgagtaaagacaaccttgacgaatacctcgatgagcttgaaagtacccgt

SEQ ID NO: 5799 - DNA, 438 bp, Oryza sativa
  unsure (1)..(438): unsure at all n locations
agcttcagctagggaacaatggatatcagctcagcagagaaaccagtcctttaattntgtgtgcataagggttggtgaaagaagcaatgtgtatgtagcaaaaatcccattcagctctaattacatgaatcaccaatagcaacatataatcaagtacaaatcatgtataacaatgccataaatttaataactttgcagcaaatcaaataaatactcagaacaggatataacgtagcttagcgaactatttggattatactataacacatggttgctgaaatacatctccttttctcttcccattatgaggggacaggccccattttttacttccattaaaacagaacaaaccatcttgaaccactcataagaagatcaacatgacagatctcaatgcttcagcaacttaactaaaaggacatactggaactaaatatg

SEQ ID NO: 5800 - DNA, 404 bp, Oryza sativa
  unsure (1)..(404): unsure at all n locations
tataaaactcaactgttaatattgcttgatgccatgccaattgctattttttttactggtctaatcagaaaaagaaaaccaattcggctttctgaacaatgcaatggtcaatgtggaagtantacatttaattagcttgcttcgcaatgcttttctttggcaatatgcagtactaccttcgatacatttgccgtgagaaatctgcacctctaagatcacatcgagagacagcacctgaatttatcaccagaaactctgaatatcaatgcaactagaaccaaacatcangtttgcatttcaaacttacattngggaaaatactacactctgtgataatggacatctaacaattccaagccagatcaaacctgtagattgataaaaactcgcccgacacttcccct

SEQ ID NO: 5801 - DNA, 376 bp, Oryza sativa
gaaagactatgttatatattgcgatgcttcaacgcaaggactatgaggagtattgatgcaggactggaaagttgtggcctatgcgtcacgacaattgcgaccacatgaggaaaactaccctacccatgacctataactcgcaactgtggttcatgcgctaaagatttagagacattatctaattggaaaccattgcgatatctacactgaccacaagagtctaaagtatatcttcacccactcagatctcaacttgtggcaaaggcgatggctagaattaatcaaggactatgatttataggttcactatcacccacgcaatacacgtggtggccgaagctctgagtcgaataaccattgcatcatctgagaatga

SEQ ID NO: 5802 - DNA, 414 bp, Oryza sativa
  unsure (1)..(414): unsure at all n locations
agcttgctatggtgttctaaaagttccaagttgacaatggttctgtaagccctgcaagatgaatacccaggacacagtaagaaaattcaatttcagagtagtttcatttaaggcatttaatanggcatgatgtaaccatgtaggccagaacagccatctttgtgcttgcagattactgtgtgcaagcactatagaatttttcactgattcttttanggctatttgtagaatgaagcttttattgaaatcaagataattacatcaaggtgatacaaccatttatggatacactgctggtatagatgtatggacgctgcactagcatggaaaatacttcagtcaaaattaatcttactaacactaacatcctcattggtagaacattagtaatgattaattgtatatcnggatctc

SEQ ID NO: 5803 - DNA, 379 bp, Oryza sativa
  unsure (1)..(379): unsure at all n locations
aacatctggaggagagcaatatgtaagtgtcaatcaaggtcttccaaaaatttcctgaggaaagaaggtttgctatcatcagtccatgttactgaaggtaattcacatgtaccatctttaatgttcttgattttagcctgctcatatgtttgtgctgaatatgccaccatatatgaaaattctcagagctggctattgcggaagttggatttagccatccagatcacatatcaagagcagaaaaaatgcaaagcctaatagaaagcacactgcagaatgttctcgggtgcaacgtggaggttaagttcaaacttgttccacggccagtgagaaaagatgcanggtcaaagagacagtcattcagtctcctcagctgctc

SEQ ID NO: 5804 - DNA, 433 bp, Oryza sativa
  unsure (1)..(433): unsure at all n locations
ctcatacatttctcaagttagtatagtctctagagtacagttgtgtattatattagaatagaatcttcaatcctcagagtcttctgaagagttcgaatatagctctagntagtttccttcctttgtaagacttaatacttttattagaatattcttctttatactactctggtattgtattactttacgagtatatgaatactaactttactatatatccgagttatattgattatgatgctagctaaactgggaaatgcaatagtgtgggtataatgaacgtgcatacgatgactctatgtcatgacgatgatattagagtagtatttgggaatttaagcgtggtgtttagattactggatatcattatatggggttatatgatgccgaagcgaagtgggccgttgatggtgacagctcagtaccggtattc

SEQ ID NO: 5805 - DNA, 428 bp, Oryza sativa
  unsure (1)..(428): unsure at all n locations
gcttgccaggtcgatatatcacatganatgactngactataccaaaggaagataactattgataatacgtaccttcaccacttgtataaaagtttcaagatctggagttggcttcccattaacttccactatccactgcagagcatagagaccatatctatgtacgggacttccatgacaccatctgcataaaatatttgatactcattcctcgttcccattaggtatctaaaatgtgcttaacaccaatgctatggacctaccgccaagccatgtacacatcttaaattttcaaccaactctagatttaccatcaaggagggagaattctaaatgattacatatatatgtatataagaattggagcgctacactactattatgacattgggagtggatagaggaaacactatcaatatggcttttat

SEQ ID NO: 5806 - DNA, 387 bp, Oryza sativa
ctcagcttcgcaagctaagtgctaattgcttgttcagcgagaaaatgaattactattacgtatactcgagaggatgctgaccaccagcttgactctgtacaacgatcaccactaatttagtgtttcttccctgaatcacaaacctgccaaaaataaatgaacattacttggtatttgcgaattcagtctgtgctacactagctgcttatacactgctgatacttcacaaaagtccttaatccaaaaaacgtcgatagtttccaatttgcattgcaggggtgatatatatgaattctgattatgcgcacatctatttgggatcaacgatgcaagagatgtacaggaggtacttgaggttctcgagatcggagcacgcctgtagccact

SEQ ID NO: 5807 - DNA, 391 bp, Oryza sativa
  unsure (1)..(391): unsure at all n locations
ccccaatgaaggttggatgtatcgatgccttggcaacacttgcggtacggctgtaatcaaatatgtggagctctgggtaggcttaaatatgtagcaaaggaatagcaaatgctcaaatcagataatgcaaagttgaataattgttcaaagtcaagtaccgcgctggtcctaggctagaacgtactatagacgcgagcctagacacaaacgataccacaagatagcactaggaacaactcatgcacaactctaatatatgaagttcagctcaaacataacagnattgtctcttgtctttctatcttcattcttcctttcattacattactttccttttctttactgaatatttttggagcggctgtttatttttagcaccttctgccttttt

SEQ ID NO: 5808 - DNA, 450 bp, Oryza sativa
  unsure (1)..(450): unsure at all n locations
ccctatattattaccccttgtacccccttgcattaatcatgcatctgccggtgtggcttgctgagtactgtggttgtactcattcttgctcaatcttttcccccttcagtaagagaagctttggagaagaagtcttaggttgagtcctggcttataccccagttgagcgcctgtgaagatggagccgtatgcccgctagtccgctgctggttatttttgattgttaggccttaagtgcctttgtaataatgtaaatattatcgatataataaagatgtgtcttttatatcatgtttgtatggtgtaccccggcttttcctgtgacggngattaatacactagcgttcgggaaaaggcaattttcccggtcgcgacatcaagtacctaagattgctagctcccacaagatgaagcagaagcgaagcgtttacagctcagagccacaaaata

SEQ ID NO: 5809 - DNA, 465 bp, Oryza sativa
  unsure (1)..(465): unsure at all n locations
aaatactaagcttgccncatctcctccacttcggcatcgcgacgctatagccttcttatcccaagtggtgatgggacttcttcttggcagcattttctttgtttctttccatcatcggctacccttggtgacctgtcttggaagcaacgaactcgtccaagtgatcccttagcttctggaatacgtcaaagttcggtgtctgccccttcaagatgtatttccggtacagatcttccttgaaggtctggaactgttctgccattatcttaagagtacactggttcactatgttctctgtacccgcagggagcgtgaacgtctcgagcattgtggtccacagcatctctttctctgattcctggacaaagctgtcattaccctcgcgtgccctngttctgtgccagtacaccttgctgacaggcacgttatccctcacaacccaaccgttgtggcgtacgaaatttt

SEQ ID NO: 5810 - DNA, 451 bp, Oryza sativa
  unsure (1)..(451): unsure at all n locations
agctttcagtggttgctgcgtgaaacctgtttgccaagtcagataagttacctttttcttttttctaagataatggatttttcaaaataatacaagagcacttaagactcgtattattagatatgaagtgtaatgacatattacattgttacgttgctatacatatggagtgtattgacatgggacgagagatatgtaaattttatatcgtcggacaaaaaaattttggcaagtatgtttgaaacaagttagtccctccgattatgtttaagataaaattcagtcaaaattttaaaactttgacttttatgtttatattataagattttcaaaatctagtaagtatatagaatgtgcttttcaagagacaaaaatctatgtaatcacttcttctttttttactaactatctgagaagttatcggnggtcaataatattttaatctttttta

SEQ ID NO: 5811 - DNA, 411 bp, Oryza sativa
agcttttaagtcggccttttgactttcatgttttatgaattggcggatctaatatcataagtttaatggtgaaatcatattgtcatctcacataaggataaaaagttttttcaatctagtttttcttaatcgtgtaagaatagcttatggttttaaaaacgccaaatgaaaaagctacctgtgcttaaatttttcatctcacaagttagcttagaagcctaaaaaaaaggaccttattcacgctggtgcctcttgtttaacaaaaggataagtgaaaaggaataaaataaactaagggcttcatattttcaacctctaattcttagaatacaatcgcaagatgcgagcacgtttggattctatgctagtaacttcctctccttacaggcagatgggcatttggtaaactac

SEQ ID NO: 5812 - DNA, 301 bp, Oryza sativa
gcacggcggaggaacctatgacgggagagggcaagacacaacgccatacagagcgaggggccaaaggggtgagaaacactgagacaaagaccacatgacctaacaataagacggtattagacgataacgaaacgcggcgaggatagagcacgaaccgccggtgaaaaggaacaagaagagacacccgaaccgaacatagtcaaggctagaatgaaagtgacggtgacacaggctcgcgactatacatcagaggacttatacaacaaccctaaaaatgggcatactggagggaaaaacggag

SEQ ID NO: 5813 - DNA, 386 bp, Oryza sativa
  unsure (1)..(386): unsure at all n locations
agctntgcatgagaatgttcgtggctggctcaccaccattggagaactgaatgcttccgtggggagattgcacactagagtgggtacattggattctcgagtgcaaatgttggagagctcccaagcattcgtgtatcatggtcgtcgtgatgcttctcatccttcatcttcggcgcgtcctccttctcctccacaagagtgaagaccttttttggtgcttgatgccaaaagggggagaaaagtgtgttttatgttgggttgggactagtagtagtgaggttagtcacctcatatttaataggttaaggaggattgggctatattttgtatgggtatgggctattactctatcttgtgtgttatttgcccgtttgtaaactctctat

SEQ ID NO: 5814 - DNA, 454 bp, Oryza sativa
  unsure (1)..(454): unsure at all n locations
tgcatctgacctttgtaactcattgatcctacgtccgtttgtactgtttctgactcgagtgacacgtaattccaggaaacctgcttgacctgtctttcgtctgaaccgcaactgtcctcactgttgcttctctaagctaagctgttgacctggcctcaccggtgtccctcagaattccatcaagtgacctangaccggcgtaattctgcatgacaccttgcaattggctccttcaactgaaacagcgacgaggtgagccagaactcatctctgcgacctaccccccttacaggagtagtcatacatttcgcctgactgggaacaattgaactgctggcataactgtcccgcttctagcctgacttcggtgtcgtatgcctaaatagattgcatacccactgatcacttaacagatcatactcaaaagtccttctcttgacatgacattacactt

SEQ ID NO: 5815 - DNA, 403 bp, Oryza sativa
  unsure (1)..(403): unsure at all n locations
agcttcggagggcctctggtgttgctggactacacctactaatgggctccatctgagatttttctttccacatgtttggaacaccagatgatgggtgatgatgctgacctgtggatttggagttgttcagcatatgttggcactttttctgatgtttgtgaaatgagttgtgttgcgtgcttggaaattgcgcttggtggcggcgcttgcagcaaggactgaaaatgagatcttttgacattgacgttaaccttgtttntttttcttaaaaaaaaaatcggggcaaccacggtccacgttgccaggctgcaagtgaaagcaagccaacggtgttctatagaaaacagacctgcggtctgcgactttggcgcagccaacgggaacagtgccgcagcggcagata

SEQ ID NO: 5816 - DNA, 371 bp, Oryza sativa
  unsure (1)..(371): unsure at all n locations
aagatagataaacatgacagcctacttgccacgttaagaacatagtactaataattaaaacttgcgttcgagactaaatccggctgatatatagaacctggcaatggcattgaacgaagtaggcgaccgaaccggctcttgaaaagctggcagatttcggcgacatacgacggaagaaacacaggccacatacattgcagggctgattgtaggcgaggaaattaagntggaataagtccacattacgtccctcaccttcccatcgaggcaaatcacattcacctccaacctacaaaggccctgtgtagttccaaaatatttcttccaacattcaaactttccattacagcacaacgttgctacacacatga

SEQ ID NO: 5817 - DNA, 325 bp, Oryza sativa
tctcaactttaagacggattccttaagcccattttgctctgttgcttcattacttcataccacgtgtttgcatttattggattatgtcccattgctaagcaatcgagatttgatgaatactctgctcataatatccacacattttcattttgaaaaatgctaacactgaattctggcattgtctatccagattgtggagaagcttgttgatattgtcgcatttttacataagcaaattcgggattcattcagtgaagctggtaagtgatactcaacttgatggtttgcagtagcttaaaatttgtgcgacgatatgcttacacct

SEQ ID NO: 5818 - DNA, 458 bp, Oryza sativa
  unsure (1)..(458): unsure at all n locations
tggatcatttggatctgccgtataaataagaggtaaaacattactgtatagatgcagaaacataanaagaaatattgttgagagttccatgggtgtcatattaccaacatgctggctgctgccaccaccaataccactggatacaaaaacagaaactattaactatgtgagtatgatatacctatactttaggtgattggagacaaacctgtgaggatcggggaaggcatcatcgcgacctggtggaggtatagcaggaaaatctatgccgtaactgtgtcacacaacagatatcacaagaaagatcacatcatataactatgtttagagcaactaatgaactaatatcatgaaccactctaactactctaatgaactactaactatgttagattaaatgacatacacagcactacaattatcaagtgcatattgcaccctctttttacatatgacta

SEQ ID NO: 5819 - DNA, 469 bp, Oryza sativa
atttccacagtcgacctgatgcatgcaagcttaagccaagctaagctatgcagcagttagaagcagaggcgagaagatgatttgggcgtgaccactgcggcgagctagcgagagccacgccgcccacggcacgcggcgacaataaattcttgtgcttggctcgacttggattttttcgacctaactagtgctactattgcttaggagtatgcatgtactatgcccacttcatccagtggttggggttcttgcgataggtgagaggtcacaggaggatacatgatagtagtagaattgttacggatttcgcaaaagaagggttttaattagtgtcctaatcctagaggggggcttctaatttgtactagcaattaattgtctagaaagagaaaaaaaaagagaggtttgtaatttagaggcgcttttatcacgagatggtgagataggatcaggttgctatggtatagct

SEQ ID NO: 5820 - DNA, 430 bp, Oryza sativa
  unsure (1)..(430): unsure at all n locations
tgaagcaactgtgccattgaattataggccaatcctctatcttttttatgctaaaccataataatagaaatcatacataagtatgtaatgacatagatttctccgaaaccatacctctgaaacggtcctcaggataaacagccacatcgaagtataccattcctctcttgtaaagaccatttataaccttcggatcaaatagaacataggaattatcttcggcctttgatattntatctattgctgatgcctctgcttctgaaagcctctacagtaaagtaatattatcaattaccaaaaaagaacaaggtacttttgaatcttagagagaaataagtttaactaacactgttgtatgccatcatggtaagaagagaaccacaaaanataaanaactcgctatatcattctgttaaaagtacaatattct

SEQ ID NO: 5821 - DNA, 388 bp, Oryza sativa
  unsure (1)..(388): unsure at all n locations
gagaggagcggntnttacttaaacaacaaaaaataaaaccctgctgaggtcattatttaaaaataaaaaccctgctgtggtcctttggttaaaataacaaatgataaaaagaaaaccgcgatgcgattatgaagtaggaccgcatatagataatttggacgggatatgcggcatctgtgatgggattcgcgtatagttcggattagtagcgaacgacatcgatccatctcctcgggaggctttgtttcacggaaaaggaaactgtttggccgtgcagtaatggctccccgaaatggaagtgagcgatcgaacaagaaaagagaggcaaaatatgtgccaaacaaatttacaatataagggatagtgatgagacctaaagtaatggatg

SEQ ID NO: 5822 - DNA, 309 bp, Oryza sativa
  unsure (1)..(309): unsure at all n locations
ttgtcagtcaattctccttttactatgagactatgacaagctaaattattatgtngcatttgcggttcacatgccaagaattgcagtactggttaataatccaaacctttttattcaatgaaataaagaaaaaaacaaagtacctattgcaacttcaagctattttagctaatctgatcttatctatttatcccataaaatcctaagggggcttctaatttctattcgaataaatggtgatgccgtcgtctttgtttatggaagagacttccacatattcactaacactgtgtctgactggactatata

SEQ ID NO: 5823 - DNA, 438 bp, Oryza sativa
agcttgtcgccagtggacaccttcaaaatttagagtatatatttctacttaatttggaagttggtccaaaattttaatttcttaaccaagtcactgatcaaactaacccatcatatgtgattccacatgccaccacattgcatctagatccattgctaacgctcatacttgaccttacagcatgcctaatataaacattgaggttcaatttacaatggtggctagttagacttgacactgaagaagagctgtcaaaccaagtgcatgaatcctagctcgctatcaatggacaccgaaaataatagggtatttctacttaatttataagcaactcgatccaaaatctttatttcttgtagtgactcgcgccatcgaacggcttctaacgaagagctataaaatatattttaaaacatgtttctagatctgctgtttttg

SEQ ID NO: 5824 - DNA, 322 bp, Oryza sativa
taactaaatagatcctattctacaaatagttcttatatggaatcaaaaatcgcgcaccgcatggcttggtatcattgggatataagagacgttcaatctctagatccaaagttcaaaaaccgcattccaaatcgaactatttaatttggaaataatttctcgtcatttgcagtaatcaatgataatgcataccctcgtgtcccaggttgatgccaatcaaaagttcgagctgatgatctctttcatcgattcgatcccatgcagattgatagttgaaatatataggaacgtctgatgaacatcatgaatactagaaaatgaa

SEQ ID NO: 5825 - DNA, 435 bp, Oryza sativa
gcactaccgttcttccacatgtctagtgtgttaagcttagcttgtggctcagtctagtcataaacaaaagtacacggattggagatggatgaagtcgggggtcgatggacattctccagggcaaatgaaggctacacgagctgcggcccggtagtcgaaatgtcatggcagaaggttggtgccctgctgctagggggctcaatcctgcctgcctgtcccgggggttccggccgtaggtggggttgggtcggtactcttgtttatggctaggatgggttgggaactatgtcacgtcttccgtccgtataccgtggtggtatgtggcacgtggttacacgtgaggaagatgtgtcttgtgggtaaagatgtacacctctatagagtataatctattcgaatagccgcgccctcggttatgggcatgccgaacaatgt

SEQ ID NO: 5826 - DNA, 453 bp, Oryza sativa
  unsure (1)..(453): unsure at all n locations
ttgcanagttcggtctgccagtttggacagaaggcatttctatctttcacctatgatggacgcaccatccgctacccggaccctttgattaaggctaacgacacaatcaagattgatcttgagaccaacaagattgttgacttcatcaagtttgatgtgggcaatgtcgttatggtcacaggagggaggaacactggtcgtgttggagtaattaagaacatggagaagcacaagggcagttttgagaccatccatgtggaggacgcattgggccatgccttcgccacccgtctgggcaatgtgttcaccatcggcaagggcaacaagccatgggtgtctctccctaagggcaagggtatcaagctcagcatcatcgaggaacagaggaagcgagatgctgctgctcangctgctgcaaatgcttaaatacatctctatcttcaaaatttgagt

SEQ ID NO: 5827 - DNA, 396 bp, Oryza sativa
  unsure (1)..(396): unsure at all n locations
cagctnttacacggggctagtttgaaataagtttctgaaaatggtcggnttgtctaattttcagccatctatgagctcaagtccaaacacaacaacaacgcaatatatacgcatcaaaagatacatggccagctcgctcgcttgctctagccattntgggatcgggaggcctctggaatacaccacgcttggttgcaacctgcacaggagttggagaccattgtcgcgcgctctcatggaaagcacaactatttcatgaaactagtgcttcgttntgcatttcatgacatggagggcgtccgcttctccatggaaaactacctggtgccccaagtcgttgagctgaacaatgctatgcgcatctggacgaagctctttgcctattccttaccgtcg

SEQ ID NO: 5828 - DNA, 364 bp, Oryza sativa
  unsure (1)..(364): unsure at all n locations
ccagatcttacatggtctttcatctctgaaggatctgacaaggccttatcagttctgggcgtccccagccgaagaacccttgggttcctcggaggccttgttgagacggcgtaaagggacataaggataggtttcaacgctaggcgtcgtcagagtgaggggttgttgggtgaaaacactntggtcattatatgggaccaagaagtagtctttattgatactgtaagggtgcttacaggtacaatggtattgactcatacatagaatttacgtagttggtcaatgttccatgaattcgctaattcgcgaccgtcgccgtctgcgattntgtatgcgcctggccgcaaggcttgtgtgatcgtgt

SEQ ID NO: 5829 - DNA, 405 bp, Oryza sativa
gcttccattctattcaaatactggaacttgttgagtcacttagctgattcctagcaagccaatcccagtagtcctcactgtcagagaactctttcttcaagtcatccatgacctctaccttcagttcgtcagaatgtgctaggtcaacactactcaatatctctaagaatttcttccgcaaggttaagcttgaaggaagagcttttgtagcaccatggtatatggtttgaatgattagcagcccttgctgccagaataggtcttccttcccctccaaagcaactccctgtgagccagactccttgggaccttcatcttgttcattcagtgacatgaacagttctttattttcctctttccaagtgcttgcatcattattcttcttttgcagtgcttacatcctct

SEQ ID NO: 5830 - DNA, 416 bp, Oryza sativa
aaactagcttgtgacctaaacccaataagctattaaactttattctctttattactagtagaaaaatctaatcaagcaatgataaaccacataagcaaattgaattgataaaaaatcacactccattattatgataatatcccccgactgacaacttcaagaagaaaacttgatgttgacaagtcaaatatggaagtacaatgataaacttaagcgtagaatcgacgaagatgttcaatgttccaagaattgtcgacgagagtaccattcttctcgcttgagtcgataggaacctgtccgggtgacttcagaaatgataaatggcccctctatatatgagataacttgtgccgaatccgtgtagtttgaatatttctcaaaaccatgtcgcgactaaaaagcacggaatcaacatt

SEQ ID NO: 5831 - DNA, 404 bp, Oryza sativa
tttatcatattcagttctaagttggtaatatgtgctttcaccatcagtttttatcataaattagcaagtgctaaaaatgaagcatacaagtttaagcagtccaagctcctttcttaactttcactctaacaaacttattaattatacttccaccaaatttcagcagtccaagcaaaagagcaattacatagaaaaatagaacttacgttgttccgtacagcgcaatcttgagaatttttgagacatcacttccactttgattgtcctcaataaatatagtcaggctggaaagaaaaaaaaaaaaggtcatcacaagaaaacaggcaggcttgcacatgcactgtgctcatgtgtcagagaaatgcacaaccgcgaacattctggaactgacatattaagctgat

SEQ ID NO: 5832 - DNA, 447 bp, Oryza sativa
tcgctactgatcggcggcggcggcggcacactggaaggcgatgctagacgcagttcaagaacaagatcaatcttccacgctattgtctcacccatcaccgaagagagctaggcaccacctcgtgtcaccgcaatgccgtcgtctcttcccctaccaccgccatcaatagcttcttggatgggaggacgtcgacaggctaaaagcaaggttaggtttaaaagaggtttttctcaggagagatgattactagaatgcatctccagttttgcagttggagcgtgctcactaaattaggtgaaaacttatatgtgaggttaaccgaagcctatggatatatttttcaaatgtgtaactgtaactgtagttttatcccggtatcccctgcactttaaagcaaactacgtatatttagtcgaaaatacttaccatcagccgtccgacaggaaa

SEQ ID NO: 5833 - DNA, 452 bp, Oryza sativa
agcttaatagacccgagtagatacatttctatctttggaaacactctgttcaaatatatagattccattccttcccataaccatcgaaaaggccatcgagtccatggactttgtgttacaggcatcgataatcagtattgcaggtctagagatgctgacctcttcataacatcatgcgtcctatgatactgtcataggaagattaaaggaaaagtgcccacattaccatgttatcaatgattactcatttttatactatcataaaaaacttgaaggttatttttttctgttcacaattcaaaacctatttgcagcacacgaattccatttggattcagcttcggtaaatatttcacttgctacgaggttgttgaacatcgtctgaaggagaaaacaaagctttacatagctatctacttgtggccacgtttatgatgttgtatttccatatg

SEQ ID NO: 5834 - DNA, 466 bp, Oryza sativa
  unsure (1)..(466): unsure at all n locations
actaagcctgggaattctcccaacatgatagtggaagacgagggagaatttgtttaagatcctattgacttgaatgctgccccaggaacatcaattgttcttccaccaaaagttcatgccgggagtaatgatcacccaagcttcagcgatgtgcggcgaagaaatgcttctatccgagccaaaccaatccatagccagcttaaaaatgacttaattgagcatatttggcaacggtttcaaactacgcaaaataattcaatataatgtaagctctagtgtacaatntcattgtaattttatcttagactgactgtatttatcactttcacttactgtacatgtttttctctctaccaggggcgaacagattcgatgtcttttacttgtttttgtggctgcggtccagctctnggtgatcttgttcaaggaatgggataagcacttctggttgctgtcccagctttgg

SEQ ID NO: 5835 - DNA, 430 bp, Oryza sativa
  unsure (1)..(430): unsure at all n locations
ctgcagcttgaaaaatattggtgtgtattgtgtttggaagcctaattttgagaaaggtagcaaacctaataaggtaagcgatgtcttaatttaaatttctgtcagtttccatgtttaacttatttttctggtacaattataatcatttttcctaatgtatggtaatcatatgttgcattattgtggcgatacagcaggctgaatgaaaatctccccctgttcttcctcanaaggcatcactggataaaataggataaataaattgtattaggtatcatttaagcaatttagtagttctagtattcagttatccatatcactccctgtgtagtaagctatggccttgtgatcatctcagtgatattatctttacagtgtttattgtnttggacgatatcttatccttaagttcccatgatatnttttactt

SEQ ID NO: 5836 - DNA, 445 bp, Oryza sativa
  unsure (1)..(445): unsure at all n locations
gcttggaagagagacaatgttgntntgcttatcttntatttgaagacattttgaaatcactaagtgatttatttctttctaagtttgggccgaaaagagacttgcgtctcgattcgactttaagagatgtttttcaacagctcatttagtaatgtaccgacctctggggtcagatcattacttctcgactcccatagccattccacttgattaatcggctcccagagcctttttcattttctcggactcccagagtccagctgcccagcagcaaagcaatcctcttccactcgggaagcctagtctatgatgcccacagacatcccgaatcacacagattcgtttctgaccactcaggtcatccatctgccacanaggctgattctggtacattcccacaccacaacaacttttcacaaagcacaggcaaacaaatctacgcaac

SEQ ID NO: 5837 - DNA, 404 bp, Oryza sativa
  unsure (1)..(404): unsure at all n locations
aaaactatccgatagaatcttaatactangtgcattgtaccccacgtctccatcctgctaggatacccaccatatccattggtgccaaaaaaaagataaaataaaataaaataaagttgtctccttgatcttccaaccaagtgagacatttttgcttcactcttgtctttgttttttttttctttttgtctccaataaagcatcctatgtacaaagacaagtgtgggggtgatcttgcacatcaacttcataacctaatccagaacaccctataacagatgaaccatggctaacccctacatgggaaattgatgctgcagacctaatgatgaggtaactaaacctccagactcgctgaaccacatcttgcatggatcttgcctcgatgatatagaaggattgtt

SEQ ID NO: 5838 - DNA, 452 bp, Oryza sativa
  unsure (1)..(452): unsure at all n locations
agctntattgaatttcaaatgcagctaagctacggagatctcgtacttaataagaaacatgatccatcccctcacattctttggcatcttgtgtatatatattaactagacgataccccgcacgttgcggcgaactattcatgtgtgcaatgtagttataaaattttactgtatatgtatgagaaatattatggacttgtaaaagtacctcacatatgaaaaatgaaatacttcttgtagtgttttttatagcatactacaatataagtggtcgatgaatatttactcataagcaataaaaataatgataaccgntaatatttaatgtctattggattttttgatgaagcatggaaatgatccaatagttcttggtttatgggtaatggatcaatacatggttagttnttattattacatcaatctgtcactctaacggggtgacttgggag

SEQ ID NO: 5839 - DNA, 411 bp, Oryza sativa
  unsure (1)..(411): unsure at all n locations
agctngcactggagtgatcaatctctntcttataagcttgttgtgctccttggtcttattttctagagtgattttatagtccttgagaaggtactatattttctaatgtaaaatttaggaaaaatttcacaattcttgagagataccgagaggtactaaatttggtacctcctagtaccaaaggtaccaagagatactaaattttacactagaaaatatagtagcctccagtaccgactcaaaaactgtaaaatcactcaaagtttagtacctttcggtactccaggtactaggaggtaacagtttgcactaaaaactttgttaccacttggtatctctcaagaactgtaaaatttctttattntctatgtgtggagcanatagaggtataccctatatatgaaaattcac

SEQ ID NO: 5840 - DNA, 430 bp, Oryza sativa
ctacttgtccgcgtgttcgctttcgcgaaggacctacatcgtttctgctttgtgggggttcgcccggtgaggcaattcaccgttgtcgtgtcaacagctggctatactcgatgaccgacacatcgccgatcatcctgcgggcttcagtttcagcctggtcgagggttaacactgtaaaagtaaaggatgtagctacattaaaggtcgaacaaggcaaaatagaacagccttactattcattccctcaaggagaaccagcttcggcaaactgtcaatctcttcgctctgatcaaccgtaacctgccatgactgggagaggggaaagatgcgaagcatacagaattcctcaaccaagtcacggcagctaaggcgagagcaaacctttcgtagaagaacgaaccgcgcctccatagcgccgtccacggcaatc

SEQ ID NO: 5841 - DNA, 277 bp, Oryza sativa
agctcggcgtggctggcggtctacggatatgatctgcgcagcaccggcggaaggagaggagctgcgctcatccagcggccggcgggggaggttggggaggaagttgatgtcggtgaagatagcgatgactgccgtggcgaggagcatggtgaccgtggtggagagggggaggagctgcgctcatccagcggccggcgggggaggttggggaggattgtgacgtcggtgaataaggcgattacggccgtggcaaggagcatggtgacagtggtggata

SEQ ID NO: 5842 - DNA, 477 bp, Oryza sativa
  unsure (1)..(477): unsure at all n locations
tactcaagcttgatggagcanagaccgattgatacttcatcggtcacttgttattttatttccgntacatctatccctaagaccggaattgttagtgatcttgtccctgttagttctattgatgttggcaaaaagaaagggaaaagtgttattattggggatcctccgcccaagaataggatcaaaaatgcgaaggccgaagatcataaagttgcaaagaatgagtcatctagtttccaaaagaccaaaaagccgaagctcacttttgagatgcttattgctaagtacaagaaaggattagccggtcaacgatttgataatcaaactagtgattcaaaaagaccaagatcatctcgtagggagagaattgatcaaacaccaaagaaatcggagccatcaactataccaacttcatacaaaccttcggttgtgatgccatggtattcacatccaatggtcgcatttggttatactttt

SEQ ID NO: 5843 - DNA, 432 bp, Oryza sativa
  unsure (1)..(432): unsure at all n locations
agcttaatccatatcgtgaggcanaggggttcatacaagtatacactagaggttcagccgatatgatctttatttatacccggtgggtcaatacgttctgctaggggccgctgttgacgcgtggaccgaaaaggagttttcgggttaaagccgagtatatatgaacctacagagttgcacgcttaatgggccggaataaggggattggatggagatccaatatgtgcttaattcggatagggatccgaataggagtcctacgggccttggaggcccgagtgatggatcctatatattcgtgaggggtgtgaccggcggaggcattgcatcacgtgagaaaccctatccgtcactttcctccccgagcaaaaccctatccgccgtagtgctatcacatctgcgcgtggcgttccgtccctgtacgtgtggata

SEQ ID NO: 5844 - DNA, 369 bp, Oryza sativa
atgttttactatagacttaaaccagttaactaatctagacttgagaactaagttgacatgagactaacttatatgattgaactcccagcttcggcaaaaacatcaaatggactctgaaaaaggggttgaagcaagggtgagtacaacgtactcagcaagctattatattcaataatgaatgtatgaaatggtaatatttgagtagagctaggtttaattgcagaaagctgagaataaagagcgagaaagcctgcaatggttttgatgcaacaatatttaataaaatatggaattaagtttctaaacatatgagccttgatactcaaatccgttagcacggctatttgaatactttcataaatactctac

SEQ ID NO: 5845 - DNA, 422 bp, Oryza sativa
  unsure (1)..(422): unsure at all n locations
agcttctggattttccttatagttntctggtctattgaaacactaccctgtttccacaacataagtgaaaacaaccaaggttagcctgcaaagggcagtgattatatagaggtaaatataaagtgttagttctagtaatctctattatgaatcttccccgccaacggcgccagaaaatgcttgttgatatttcttaacgacattacttgaaatataattccaagcaatggcgcanaaatactcctggtatattatggttacagagttcatccgcaagcgcacggatataccattgtagcatttcaccgagtgtattccaagggtgtcgtatntatttaatcccgtggaaagatcatggtagtgagaacctgactaataattaatattatttattataatcggaaccttaacanggggtaata

SEQ ID NO: 5846 - DNA, 291 bp, Oryza sativa
aaaaccaaacaatgcaatgattaaccaagtaagccaactgaatttgataaaatcacactccattattatgatgatagcccccgactgacaacggcaagaagaaaacttgatgttgacagtcaaaatagggaaataccatgattaaggttaatcgtagaaacgacgaatatgtttaatgtgcccagagttgtccacgagagtgccgtcttcgcgcttgagtcgatatgaacctggcctggtaacttcatagataataaatgggccttcccatagaggagataacttgtgccg

SEQ ID NO: 5847 - DNA, 428 bp, Oryza sativa
agcttaactgcatagtagtggacacatgattcttgagggagaaaaggaacccatttatccacccaattagttgctcggtcattctcatcaacctgaacgcaagaacaaacctgtatatatgcaaccacttgaccaatcactcgacaagcaatgccaattcatgttctccaatccaatctcaccaaatcgagaaccaacattttccaacgacaaaataatacactgaacctatgcctgcatttggaattttggatcactcgttcagttcttgcaccgttttattaacctgtagcgatgtactaccaccatctgtttcaaggattcagataaagaactgagagagacagcggagcttactgtcgtcgttgctacgatgaaaagggttgctttcaagtgtcatcctgtggcaggtgaatggcttctttata

SEQ ID NO: 5848 - DNA, 411 bp, Oryza sativa
  unsure (1)..(411): unsure at all n locations
ctaagctaccgctcgaatggctggtcggacaagagttgtacagaacttcttgttctttttaggatctgttgcctgaggggaacaatttacctcagacgacatatgatacgaagcatgtattatgttctttgggcctgaaggtcagaagaatcatgcatgtncgaacgactgcatatagtattacaaggaatacgctgacttggatgtctgccctatctgtgggggatcaagatactaacgatcaaggagtgaaggtgaatgaagtaagtcatagaggggaggcccaccaaaggaggtgtggtatcttccaattgctgagcgcatgaagagattgtttgccaacaacgaacaagctaaacttgtgcgctggcatgcctaagaaccgcaagacgatactatgctgaagctccc

SEQ ID NO: 5849 - DNA, 357 bp, Oryza sativa
atgcatcaatagttagctcagatgtatcacagactgaatggactagcttacaagatgatgttgcttcagaaaatttagagaagtttgatattgcaccaacagtatttccggtcaatgaacctgaagcaacttcttcatctaaggtactttactttctttatttactagcatgcatagttagcttgcttcaatttgaatatggtaaatactagtatgtattaacttggatactttttgcagcctcccataattactcttgagaaagcactctcgtttgagatccgaaattcccactttgatcagcccagccctacatcagttcttgatgcatcatttgaggatgtatgagaagtcacc

SEQ ID NO: 5850 - DNA, 457 bp, Oryza sativa
  unsure (1)..(457): unsure at all n locations
ttccgctaggcttcatagatctccttggctacaaagagatcttatattataagaaggtgctcccctaagcatttctcatagctcaaaagaagtcgagccaatcgtagactggtgagcggngaatgagagctccatactgtctttcctcttgtttttaggttgtttgtttaatttgagtagtacgtatcttatgtagattttggtttggtggtgtagcaaatatagagtgtatttgagtatatatatatagaaagtctgtctatctaggacgcatagttagatcgttattccaatgcatggtaattcctatgggctattctttgccgggtcggccgaaagattcggtcgaccaatttcattaagaaagaaaggtaatgaaacaatacagatagcttacaatgacagtaaactgtcgaattggatgttggctaggccctcatcctgtgagctgaacgaa

SEQ ID NO: 5851 - DNA, 414 bp, Oryza sativa
  unsure (1)..(414): unsure at all n locations
agctntgatataactataccacatgtcgtttatccgatcactattnttcatccttacggtaccatgatgctattgacatatcctatgtaaagctgtaaaccattgagatcggtccacaccatcgtcttctgaaagaaaacagtctatcactcaagggtcagttgtattaatttctttggatcagatgtaccatagattgtgtttntgttctttctttggaagccataaattagttcccaacaactttgagatgctattgaagagcgaaatcatctgttgcatcattacattcatatattcttgatttagattcgtgctaatgagagtacttaataatcagtggacagggtatgaattatggacagcaacactggaactgaagcattggtntgatcaacccacaataaattgatc

SEQ ID NO: 5852 - DNA, 436 bp, Oryza sativa
  unsure (1)..(436): unsure at all n locations
agcttncctagtacctctgctgtctagcgaagctagtatggaaagtaactcctgcaatcaaatatataaaatggtaaagttccaatagaagtcaaactcgagtgaataaataaaaggcataattatctaagcagatttagcaggtcgacaacctgtggtgaatcaataacctcccagtgaccatcttctgatgactcgaagtacaccctacgatgtcctggatcatctgctctacaaggtccaaggaagagccaataattattatacctacggtcggatcctaagagaacaacttgtggttgatgagcaactcctgtagacgtatcattccttccagagtaagcaacataatcacgacttctcaggcttcttgactgctcatgcatagaagaatcaaacatacatgcttgctgatgcattanagcactcatcacta

SEQ ID NO: 5853 - DNA, 442 bp, Oryza sativa
  unsure (1)..(442): unsure at all n locations
taataaactgaagccaaagcttatattttaattcttgaacttaattntgaagttgattttaagatgttcaatgcaatttntttacggtgggtttaagtcggtacgaacacagatataaaaattttacctataaattgatatttatttcctaataaaccgttttaatttattagagaatataggcaaccgatgaggctcttagcttttatagccttttggtattcttgtttattttattatttctcatttacgagacctttcttgtaactattgatactataagagtacacattcatcggtataaatggcctcatcttttcgcttattgttatgattattagtcaattcttttttacaaaaaaatagagtttattctagaattnttttcatcgtagtttattgtttagccgttgcttttagattgttaacaatatgtatatat

SEQ ID NO: 5854 - DNA, 373 bp, Oryza sativa
agctggccgttcgccttgtgaacgacgacctggttcgccagccactcctgatggatgaccacacggatgaatccggcctccataagtcgcgccacctcctcgcggatgaaggcttgacgttccggggcctgccgccgcactttctgctggaccggccttgcgcccggccgcacggcgagatggtgctcaatcacctccctggggaccccgggcatgtccgccggtctccaggcgaagacgtcggcgtttgcccgcatgaaggagacgagcgcgtcttcctatttgccgtccagaagaccaccgattcgtgtggtcttggacgggccgtcgcccatggcaatctccttgaccgggacctcgtcgcacgtgatca

SEQ ID NO: 5855 - DNA, 348 bp, Oryza sativa
  unsure (1)..(348): unsure at all n locations
atgaactagctacacaatgccaatgtcaaaagaggtagcaatttttcatgtatgtgttctgccgngtaccttaaacatgcggctgagctgcttcacgcattccgctacaaggtgctgatggcccacaactttgcggcttttcatgatgcgcacaagagatgcatcaattgcgaacctcctgtccttgttgacatcatcgacaacctttttcttctcatcgatttgaggaagtggtacctgcacacaaaaaaaaaattacgtttagttagctcgaaaaaccacgggggaatgggtaaatagttaaaaatggcaccttaatccttcgcattctaatcggaaatttggaat

SEQ ID NO: 5856 - DNA, 454 bp, Oryza sativa
agcttattacgtacccatcttatatgtacgcttcttgatcgtgtgtagtgtaggcgtatgaaaaagataaaaacccatcaaaataaaaaaaaaactccctactacaagttactttggcttctttttgtcaaatattttaagtttgactaagtttatagcaaaatatagtaatatttttaacacaaaataaacatattatcaaaatatatttgatgttagatttaataacactatgttgatgtggtgcatgttgctagatttttctataaatctgatcaaacttgaaatgatttgactagaaaaaaagtcaaaattacttatggccgagttagattccacccaaaatatttacaccttgtcacatcgaacatttaaacacctgcattaactataatataggctaaaaaataactaattgcacatattgcaactactttgcaagacaatcttttaa

SEQ ID NO: 5857 - DNA, 375 bp, Oryza sativa
cacgacaaggggaaagagagaagatatagagaacagagcaatcgcatcccaaagccaacgataacaccaccgaggaacaaccgcccaacaatcatgggatccaaagaaggaagccaaatcaccgcgcccagaccaaaacccatgagcccataatgccggaaaaagctcaaaaaaacaaacaaaagcttgaaaaaggaggacgcaaaacataacggcatggccaacccacaagacccaaaaccaactggacaagcaaagaaaacaccccaaacgcataccaaactcacgaaagcccgggaaaaaaagaaaggagccacagagacaaagaacctccacgcaaaaactccccaaccacccaaaactgcagaaaaacca

SEQ ID NO: 5858 - DNA, 381 bp, Oryza sativa
agcttggataaaaattactggctataatattatgcagattgacatactcaccctgaggacaagaaccagagctggaactctccattcttttagccccaataagaaagcacatgcatgaggcagtttgtacagggtcctcagtcccagtaaaagtccagtagctctactcgtaggatcattggggacggtagcactgcatgaaacaaataggcgtaaaaagcctgtgtatacacgtaaaatgaatggtaatgcaccaagaaaaatagaaccattagaaagaaaagtgcaagagtaacacttcatgaacaaagtcaagtacataatcatgcatatcccagagactcgtactcccaatcaactcgccagcaacgattccttaac

SEQ ID NO: 5859 - DNA, 456 bp, Oryza sativa
  unsure (1)..(456): unsure at all n locations
ggatttcaaccataccgagatttgctccanatttgctttctttcatcgntgntggttgtgccatcgcgcctggccgccttttcgatcaagatcaagttaatttgaggtctgcctccaccatgaaccattggccaaagcctcgaacaacctaagccgccggccccgagctaggcaagattcgcctcctggagcgagattaattaagtttgaattctgctccaccatcggccgccagcaagagtatctctcaacctctacatccctccctgagctcgacaagatatatccataaaggcggtcactagccaccgcctccaccaacttgtgcctccctccttgatcttggcaagatcctcctcttgagcgagatcgagttggagctctacctctagcgtcagttgctagccgccaccttcagtgacctctacctccctgatcgcgtgggcggagctcgag

SEQ ID NO: 5860 - DNA, 386 bp, Oryza sativa
  unsure (1)..(386): unsure at all n locations
agcttccaggaacaaaggactttncaagccttactaaagcctgaagactacaccatcaatctaaatcacctaaatcaataccctgcgaatggaagctgccatctgactacggcaagacggaagacaaatgtcacatgtttcggttgtggtgagaaaggacattatgccaataaatgcccccaaagaaggttgagagttggaccaagaaagaatntgccttggcgcccaatatgcaatataagaccaggaatattaccaacgccaatgccctgttcatggaatccaaaacttccgtatcaaccatttcctagacaaggaactacacagcattggtggaaaggaggacggaaaagaaaagcgtcatcactaataacatatgctgaact

SEQ ID NO: 5861 - DNA, 457 bp, Oryza sativa
  unsure (1)..(457): unsure at all n locations
cctgataaagctnttaagaaatcaacgacttggctagaattatcttacacagcataaatacaccagtattgtacaagttgagcctccattttctacatttacactcagtcagaatcagtcttttcatcatcagagttattactacttggctgaaggtccgtattgcggaattgatctacaacgtcacctgcaatcttgtcagccgcgttttgagcattgctgataagatcaagggcagcttcttcgcttgtcccgtctgcaaagccatcaatggcgtcaatttcaatccttgggtacaagggattggtcatcgccaatgccatgctagctcccatacttccagctntcttgatattctngaaatatacatccggagcaactctcagcttgtcgaatatttcggntgcgtcgagtgcgctcggaccactgttattgatgaacatggcttggacgagtg

SEQ ID NO: 5862 - DNA, 314 bp, Oryza sativa
agcttaagagctccgagcatataaccttctttattggatatattctggggatgttgtcctgtggataaaaggcccattattaaagctcttacagaaatatacatctaaacatatgcgtggaacatattgttctgaaataaacaatattgctatgaattctggtgtcggtcaaatcaacatttcaaggaaaagttatcgtatcttaaagctgccatatgaaacaacaattataccaaaagatatattttcatgcagttagatatatggaaaatgatcaagtctaaattgtaaggatcaaatgatcaagaaacata

SEQ ID NO: 5863 - DNA, 293 bp, Oryza sativa
ccacctctgcgcaagctccaccgtgaggcatcgggcgagctcgtgtgggagagtgtcacaatggcagcatgctcattgcgctaacgagaaggaagcacaaccggcgagcctgactggccagccaccaccgcactcttgagctaggggagaagagggagagagaacgtggggaatgacgaaactaacatagagagacgtgaaaggggagggaatctgaaaggtgcgcccaccgaatctttttaaaaaagatgtaactacttgctgcctcgaagaccaaaaaaacaacggatgga

SEQ ID NO: 5864 - DNA, 469 bp, Oryza sativa
  unsure (1)..(469): unsure at all n locations
ggatcctctaatcacctgaggcatgcaacttgttctaaacatttataccttaatatctcatatagctgaatgatgaatggaatagatggacactcttgttagggaggagtggtctgttgtaaaaggtgcccggtacaccagcgacgtagtattgaggtggctgtaaacctctgctcgcgcattcttgggctatggactgcttgcactgctccaatgactggaagatgtggttgaaatcattgcttggtaggtcattgagaaatatctggacctccatggtgctattgttcatagcgtttntattgcttattgccatgattacttctgagatcagaagatgtgtgtttgcaccataagagcagcccatgtcagtaactaccatcgattgaggttgaagatctgtgcaactctttaatggcattttcaatcattgccttagttgtaagaatggctcttctctgccatacat

SEQ ID NO: 5865 - DNA, 399 bp, Oryza sativa
agcttaatgctcttaatggctggtcggacattatttctatagcacttcttgatctattaaatgacctggcgctagatgggaacaattctccgcacacgacctatgaatcgaagcgagtattatgtccgttgggcctgcatgtcacaataattcatgcatgtccgaacgactgcatttcttattacaaggaatactctgacttggatgtctgccctgtctgtggggcgtcaagatacataccagcaaacagtgaaagtgaaggatgtaattcaaatacgtgataccccgcagacgcggtgcggcttctccataatgcagagcgcatgaccagaatgtttgcgaataagaacacactaagctattgcgctggcctgccgaagaccgaagtccattgtatgc

SEQ ID NO: 5866 - DNA, 426 bp, Oryza sativa
  unsure (1)..(426): unsure at all n locations
tcgtggtatcaagacgattgatcaagactatatctgtttctttatatgaaaaggagccattcacattcacattctcaggtatggaaaagatggagattctagacttgtcaggtaactctaccatgcaagcttttcctgacctgtccaaggcaacatgtctgaagactgtcactcttgatggctgtgttgggttggattctgtcagtgatagcaaccttccggtatcacttgaggaattcagcttaattgcagcatcagaacagtatccagaggcagcaaatattacaaaaatctcattatctggatgttgccggctaaaaaagctaatcttgagtggactgccanaacttgaggaattggatctttccggcacattattggaaaaacttgacctggatgccatgcacgcagaanaacttaatcgtc

SEQ ID NO: 5867 - DNA, 394 bp, Oryza sativa
agcttgtcccatttctcctgcagaaaatctcagaaggtaatagtgttctagcccctgcttgtatggctatgattcatcagatgtgcattttatagcttatgaattgatgctctgtatttaaaccagatgttgaggctggagtcaagcctgtgcttaatctcaaggtaaatcatttgcaccatgtacctataaaggatcagtgttcaagagattggctctgctaatgaaaaagttcagggctatctggttggcaacccgggtaccggcgaaagcatcgattacgagtcgaaagtgccttatgctcacggagttggaatcatttcagatcaactatatgaggtactacttcaatttatttacaaacagtagcaactaacagtactagatgtggaat

SEQ ID NO: 5868 - DNA, 465 bp, Oryza sativa
aactatgatactcagcttgttgccatcacgtctggggtggtgggttctttttttgcagcgtccattattgtcttaaggccggtgtaattaagaaatgtaaaaagtcagtctgaatgaaattggactgatgacataataaatgggaagcgcgtttagctaattaaaattacctcgtacaattgatctgaaatgattccgacaccatggagatatggcacctttgattcgtagtcgatcctttcgcctgtagttggattgtctactacatagccctgaataacactcaaaatgcaaagtaattagtacgagtacataatctgtcatgcatggatatagagaccggatattggtattggattcgactagttactgaataaaattggcgccagtatttagttcagttgctatctctaacaacagttcctacaattataaatggatatagctagccatatagacgaatgg

SEQ ID NO: 5869 - DNA, 359 bp, Oryza sativa
cgccgcaatacaaataactggatgatgcatgtgattccaccctactatctcaaggaggtgatgccaacatgttcataggcatagagtatatgacaaagaaccatgtcatggagcttgaagaacgtgcgctacctcatataacatgaggaaacacattgtacgcgagctatgaccttctatttccattgttcatattacgcgaggggtcccggattaacactatactcctatgttcctggcatatttcatatcaaaaagactctaaagcaaaactaatgatgctcactgcatatatacatctgtatgcatctagcttacatcacagatctttttaatgattaagtagagaaaatctactc

SEQ ID NO: 5870 - DNA, 383 bp, Oryza sativa
  unsure (1)..(383): unsure at all n locations
cagctntagagaagatggcatcatacatagatggaacaaagagctagtacaaccaaaaagttaagacaaggccgattaaagaaggagatttagtcttgaagaaagtgctcaatgaggtagctgttggaaaactcgagtcaaagtgggaaggaccattcatagtcaaaaagaagacagaaacgggagcattcaagttagcatatcttgatggtgaggagttaaagcatacttggaatgctatttctttaaagaaattttatgcctaaaaaaaagaaaaaaagaaaaaaagaaaaaaaaaagagaaggagagagagaaagagaaaaaggagaacacgggagctcgagtttgtagtatactcactcagatgtaaatacgaatgata

SEQ ID NO: 5871 - DNA, 104 bp, Oryza sativa
tactacgcggaaacctgacctgcccttttcgaacaaacaatgtacggaacgagacgggaattggggacattatagccgatacgaaaaatcatacgattttgaga

SEQ ID NO: 5872 - DNA, 345 bp, Oryza sativa
ctatgttcgggtgggacgttactgccaggtggtattaaccaccgtagctataaatcaccggtatcattaacatccgtgatggcgagggaccttatatcatgatgaaccattgtgcgtctatcaagtctgtatttaagaagaatgatcattctgtgatccaaagcgtgcatacatgcttaaattgagtccctaaatcataaccgaacactgttcatacttggaagtcacatatcagtcacatttcattcatgagaattacatgtgaatctactaaatattggccaatcttttctatgctaatgagcgttgctcatcttcttgcttgcctctcaatctgagtataca

SEQ ID NO: 5873 - DNA, 469 bp, Oryza sativa
  unsure (1)..(469): unsure at all n locations
agcacctgcngcatgcaagcttgagccacactcctcgaggagcgtcctacaatgtcctcctcgaggagtgccttcccgccgccttcagccatgcttgctgctgcccgcctcttcacatcccacagtctctaacgtcctcctcacctatgttcgtcgcccataatgttctccctactgtgccgctgcccgccatctccactgccctactcgcatgtgcagaccgcccatgccgtccttcccacccatgcccgtagtgccctctcggctgctgtcgtgcctgcaacgctatttcattggtgcctgccacccccatgcccgcctcattcccaagcgccaagagccgatagagagaaaaaagagacaggtgaggtatatgacaagtgggggggtatgggtttttattccttttcgatggattgacacgttgacaccatgtgtatgctacgtaagaccaaaatctctctggata

SEQ ID NO: 5874 - DNA, 449 bp, Oryza sativa
taatgaaatctccattatgaaaaataggtatactgaagcagtatctattcaaacaaaaataattttcaatgctgatgattcaccaattcacgaacaaacagagaattaagacagcttatctcagatcagacagctattaaataagactggtagatgtaagactaaaaaaatgccatatttttctagtctactcagttggagctgtgcacaagatttattcactgctataaacattatagcgtgtcatgtcatttgaaatctcgagtataacagggcaaatggataatggccatcagtgacataagcataccgatttaagcctaggtaggcttaccatatgacaaatttttgaagtgattattgcaacattgcagcaaggactagagaatagttatcatagccataggaagctatcattaaactaaataagggttcctttcgaatattta

SEQ ID NO: 5875 - DNA, 384 bp, Oryza sativa
agctgcctcaactactgctactatttacacttacctaattatcagatccttcacactacgaattataagccatggagaagaaagggcaagggttcctttccttccttagaggatggaggaaaccctctgcgatcgcgagataaccagcgtggttacaatcccatcttgatctccaggcacatcatacctgcacaaaattcatagagccattcgttattaaccaccgaaacattcaaccgaaggggagaaattccagagcatgaagagaaacgtaccacacatggttagatgagggggagaagtgacgaaatatctcgcctttgcccaccagtgattgaatcccccacacggaatctacaaaggagaaatcattccggatcgatc

SEQ ID NO: 5876 - DNA, 479 bp, Oryza sativa
  unsure (1)..(479): unsure at all n locations
aaaactcagcttaacgttgtctctgcanggaatgatctcaccaaggggaggaatattattactgctggcttcttcttccacgctgccaggaaggatccccacggaggatacaggaccattgctgatcatcagcaggtgtatatccaccctgccagcgctctttttcagcagcaaccagagtgggttatctatcatgaagtcgtcatgaccacataagagtacatgagggaggtgacagccattgacccaagatggcttgttgaactggcaccgaggttctacagatctgcagacccaacgaagatcagtaagcggaagcgccaagaaaggatngagcctctgtatgacagatacaacgagccaaactcatggcgcctcagcaagcgccgagggtaatattgctggatatagnntttacttccactataaccggtctctatgcaatgtaagctgagtactcgtatgtaagtcgaaatata

SEQ ID NO: 5877 - DNA, 421 bp, Oryza sativa
agcttatagcctgctattatttctactcatttctcacgggatcttatacggtgtattccgcatgttgatgtcacattccttcttttaacaaaattaatgtcgtggtgaaatatagcaactcgaaatattccaatttcctcttaacttgccatgcatattttaagaccaaaaaagtatgtgatatctgagtatcacagcgctattacatgtagttaccaaacacctagttaccatatgcaagtatcatggcatttagctagtgtaccaaaattttagtttaaatcattatacaactggatggtctccaaagcagacagcgaacatttaaaatgatgaatgtattgtccgcatctgaataactgaggtatttggcttatgcataatatttatcagagccccatcgtgtggtggatatatttac

SEQ ID NO: 5878 - DNA, 456 bp, Oryza sativa
  unsure (1)..(456): unsure at all n locations
agctnttttcagaactaaatatgtccatgatggacctatacgtaattacagaaaaccagagggctttttcgtaaaaatacacccgagcactgtacaactatagcaaatcgctgacgcgccccatcgtccgccctttctgcaccccttaattttccccaattgggatgcaccctggacactatgggaaaaaaagaattgggatgcaccctggacggtactcaggaaaaaaaacctctctccaatgaacttgtttctcaggagtcaggacctctaagcacacactntgcgtctcaaagttacatctatcgtgtgccaacttctggatccaaggccaattaactgagtgttgattgctgaccgtcattggcttatttcacaacaagcggatgatagaacgtaggagtaacacagagtagaaacaggtacaacagtggctcagtgcatatagtgaactgg

SEQ ID NO: 5879 - DNA, 449 bp, Oryza sativa
  unsure (1)..(449): unsure at all n locations
agcttggaatgtatttntgatggaaccactcagcttcctggaggtaattgttggataatatttgaaactgcatgtggcaaanaaaacagagtataattaagataaatacatatttttgaagatgtatgtattaattcttaaagttgctagttcagatttttatacgtaggagttgattgaaaaaacaatttcttttttgtccatttctgttatggacgattatctatttatccatttctaaattataagctgtacataactttgttgaaaagttgtatacgacgcttcgtaccgctttaatgttgtaagcattacgatatttctcatgtggttccaactcatcttcaaagtccctaaagttgctcataatactgagaaagaacctttagcccctccggtacaagtgaaacagcattcttatcccatctgcatttgtcaatttgagaaaa

SEQ ID NO: 5880 - DNA, 446 bp, Oryza sativa
  unsure (1)..(446): unsure at all n locations
agcttggacattgntgatgacatgtggaggctctnggatgtgatagctagagagaaagggacgaggaaatgaatggaaagatgaagggtgcatgagagacaagttattaccttgtgttggcatacagtcatgaaatcgattttgtttttacattcaattgaaacacctttgcataacttcgttaagcgttgttgtgttgttgctttgttttgacgtgccatgataacgccatacattctgtctcaatattagtatccaaattaggttataaccaacacaaggctacatggaggaaatttatttatgatatggatgagaataatccaaatccttctatacaacaattgtttttgacttcattggggctntatgaattgccacttcaacatgacaattcaagaattgctaatatatgtctatgacatgtgggactaagggtaaaatat

SEQ ID NO: 5881 - DNA, 446 bp, Oryza sativa
  unsure (1)..(446): unsure at all n locations
agcttcacgtgaacgccatatcctcgatccatattgaaccaataaatcttctactattagatcataatgttcatctattgttttttttggatctgcaacaattaatttccatatgtgtgccatagaatcctagaatgaaatacaaagtgtcagttagctaggaagaaccatttttgaaatagttaagtgatcaaaatcagataatctgagctgtctgatgcactgtagtacttcctgactgccttggattctatatgaacaagaagaccgcattatacttttatatctacacactattggaaaaaacaaaccaataattctctaggtaagattacaaacatgcatacgacctcagctgtggagttgctgaaattttgcaggccatactacaagattcatactcactntggtgcaatgaaggatcataagggtatagcatacaaaca

SEQ ID NO: 5882 - DNA, 465 bp, Oryza sativa
  unsure (1)..(465): unsure at all n locations
tcccacggtatttgcgatgccagtatgcgactatnggcttgttatgtggagatggagtcttccagccagggctgtagtcagtgtttgcatcatacggctaggacttgtcgtttgggaggaagaccgaggaacgtggtggggcaacgatgtattggcaacttgttaaaagctggagtttacttttaggtgttgggatgcgggttcttttaattaagtttcttaaattgcatcaatttctttgtgggataggattcaatagaattgtggaaaatcctagctcatcttgtgtggttatcatggtgtggtctactttggtacagcatagacacatatactacctagttatttgcacaatgaaccngttaggtctcccggcttgtgatctaaaaagaatattgggtttacttcacgtaaagggcatgctactttggcacatagtttatacatgttaccttgtatacttac

SEQ ID NO: 5883 - DNA, 418 bp, Oryza sativa
  unsure (1)..(418): unsure at all n locations
agcttctgctcatttnccactctctctgccactgcctgagtttaagaataaacccttcttaaatatggtatcaagggagcactgcagttatttcttgattactttatgacaaaaaatcttatcagaagatagaaaagggccaaaaggggtgtgctgtggtggggccgtgggggtgactagtaactgcattctttttttgcagcatctctacaatggttgtttagttgcacctcatattatccttttttttgtggtaacacctcataatgtttttgttgtatgctgcaggcacttcaatttgtaaagcatctggggaaaactttgcctttgaccagttcatatttaagtacgcatcaccatttgaagttaatttatgttgtcctgtccacgaatgaaagagctcaacaatcaagagttc

SEQ ID NO: 5884 - DNA, 419 bp, Oryza sativa
  unsure (1)..(419): unsure at all n locations
tcagcttctacccagaaggtgtcaattgcattcttcttatgtttaacaaaaggccaatgaacctgctaattaaaaagttaagccacagtcaagaatctcatcctgtgcaatgctttgaaaataatgtctacagagggccataatagtgaaggatcatgacagttgaagaacaaagggaaaccaaaatctatttaaaaaattcagtggacttttgacatgatcaacactagtagatcacatggtaaatggtctttacagtttaatttggattcaattcaatgtttgcatatctntaaagcaaatccttgtgtatgtacaacattccgttactcaaatatactgcattcgtctgtaagtgaatcatttcggacattaatgtcttcacaattaactttaaccattaatggttacatgcatat

SEQ ID NO: 5885 - DNA, 312 bp, Oryza sativa
  unsure (1)..(312): unsure at all n locations
agcttatatacatataaattggagaatatcccttctatacccctgagatttactcattcccttccatacttctaaatttcagtttggagcccnncgatntacccctcccgtcagttgactgtttaattcataccataaagtcccatttgccctttgctatcaagaatatgtaaatttacgaaggatattgatggagtgtataaattcattggatgcgactattatatgtatgagtgcattctgngagagatcattctacaaatagaatactctagcttcacctcgcgaagggaaaaacaatcgttatctatg

SEQ ID NO: 5886 - DNA, 368 bp, Oryza sativa
  unsure (1)..(368): unsure at all n locations
agcttaacaactcacatccggctatggagtccaccaattggtctattcgaggaagagggaagtgatccttatgacacgcctttttaagatcggtgaaatcgacacacatcctccacttcccgttggccttgcacaccatgactggattggctaaccactttgggtggagaacttctcggatgaaaccagctntgagaagcttgtcgagctcttctcgtatggctggcttccgatctagtgcgaatctccgtagtttttgctttactggcttggcatcgggtcgcaccataagtttgtgctcgatcacctccctggggacccccggcatgtcggacggctaccaagcgaacacgtctgcattgtcgcgg

SEQ ID NO: 5887 - DNA, 269 bp, Oryza sativa
aaaacaggattttctgagctaaattttttttaatcgatcatgcctgagttggaattgacctaacaagattatgatttttatttagcttatgtggagatatcttggcaaaaaggagattaccttagaaaaaaacattgatttttctagtcaaattatagattacatcatggaattggaatattaacaaaaacagattttgcttagcttatttggagttagcttcgcaaaaatatataacttgaaaaaacatatttctagacaaacatgat

SEQ ID NO: 5888 - DNA, 442 bp, Oryza sativa
  unsure (1)..(442): unsure at all n locations
agtgaccgagttcaagattgatgcggcatggcaagttatctattaattaggaatagttgttagtttccttttccctttaggaaagtgtgattagtgtcctacaaggactagtatctctccatgggtataaatatgtacacacggggtcattgtaaaatatctccacgatcaatacaactactctcggcatatcgccacattntaccttttatactttattttattgtttggcgggacttggcacctgacgcggggctgcatcggttctcgatctccaacgaaggggtaagtccaatgttccgccggcccaagcaattgtatcatctacgtcggcgttgttcaaggctgcatttgtacatttgatctcttggattgctccgntgaatgatatatttgtctgcctatttatcatatatcttaattaatttagtcttagtatctc

SEQ ID NO: 5889 - DNA, 466 bp, Oryza sativa
atatcaatatacttgacttattggagaatagcaggttagtaagtattatttgataaatgggttcgagtgtcatacaaaattagtacgtaaggtaagccatatatcggtccagtacgctagatgttatatactttatacaaagattagattaataaggcttaaacttcatagaatgaagaggaaaatactgacctacatgctccatattctgtctaattaagatatatccataaagtcttgaagaaaacatttgatgatttctttttaaaagaagtcactgttattattataatcatatccaaatatctgtcgtgacagatctaattaatattgtttggatatatggatattttagaatgatgggaatatttttattgaaatgctagtcgcaattaaaatatttctattttaacatatcatagatcttctttaatatgaaacatctaatgacgtcaaaatatctttc

SEQ ID NO: 5890 - DNA, 428 bp, Oryza sativa
  unsure (1)..(428): unsure at all n locations
taatctatttctattgcttacagatcactcgcgctccctcggctgctgcggccgttntttaaatcgattggcgacngcacggcatggcggcgtgctaacagatccacccacgtatcaaatcaaagcagagatgatcgcggcgtttcttcatccaagcgcagccgagtagccaatccgttgcactagtcagcgtgcttcgtcccttggtcgtttccaggcgacggtgccagctgctatcggtgccacgccatgctgatggcgatgaagtcgacgatgcactattttctgggatagatactactttttcctcctccttttttcaaacaactatactcctttttccatcaatgataaaagtagtatcataacatctgttttgttttgaatatatatactatctntnnttttgcgggggaatatgtatacta

SEQ ID NO: 5891 - DNA, 479 bp, Oryza sativa
tataaaactaagcttgggcaggcggtttctgcacagtgtatcggtgctacctcattttttatggcctcgccgtcgccataaagagattcaccaaagaattctccaagcaaggcaggaaggaatacaagtcagagatcaaggtcataagccgtctgcgccaccgcaatctcgtgcagctcatcggctggtgccatgggcacgacgagcttcttctttgttacgagctcgttcccaaccgtagcctcgacatccatctccacggcaatggcaccttcctcacatggccaatgaggttattaactcttgctaattttggcttaatctttgtagtgcaacttaattggcgaacatattgtcaaaatttactcaagtttacgaacttgctaagtgcacatcgagatctctaaacttgcgttagagtatcatctcggtccatagccgcgtttgaccgtgctcttgcctatgtgacacgccacata

SEQ ID NO: 5892 - DNA, 413 bp, Oryza sativa
  unsure (1)..(413): unsure at all n locations
ctggcttgtgattctggtgtaaccattcaacttcctggagataaattttgacagctnctggaactgcacataagtgaaggaaattaaccacaaaagtagctatccatggcaatactggaactatatatgatggtgcacctccaatttgtccttgattcaataggacacatggcatcgtcatttctaaaagttgtcactaattaattgaaaaacaatctacttcctttgattgaaattacattctagcattcaaatgtatatgacattgtcacaatccaaagcatttnttgagtggacaatacaatcctaagattgtctagggggcatcaaggaccgcctatgtatgaacatttgaacaagcatccaactatacccaccatctgcagaaatgccacccatttctcaagcagtcg

SEQ ID NO: 5893 - DNA, 450 bp, Oryza sativa
  unsure (1)..(450): unsure at all n locations
agctaatacactatacatattatttatatttaaacaatgtgttgaacatacatgtctgacaaaggtgtattgtccatattgatcctaccagaattggtatgtgcaatgctaataataatcttaaacatactatctaggcttgtacctaattaagtgcttttattttaagtggtggaaagaccttactggatatgtggggctaagttatcttaaggatcgtttggtggagagctacacatggtcccaaatgttgttctacgaggaatgattagcactcacacggatatattttaccaagataattgtattgatggttataatggatgacacatatgnatcccatgccaccatccaagaatgtcggaagctaaatgaagccatacaaagtttttctttgtattagtagtttgtaaactaatttatatatgcttgcccgactaattttgattg

SEQ ID NO: 5894 - DNA, 451 bp, Oryza sativa
  unsure (1)..(451): unsure at all n locations
agcttcanatgagatttggctttgcatcctcttatccttagaccctatttagtttccaaacaaaacttttcaccttatcacattaaatgtttagatatacgcatattaaatattaaaaaactaattacacaaattatgtgtaaattgcgagacgaatcttttaaacctaattgctccatgatttgataatgttgtgctacagtaaacatttgctactgacgaattaattangcttaataaatttgtctcgcagtttacatgcggaatatgtaatttgttttgttattagactatgtttaatacttcaaatgtgtgtccatatatccgatgtgacacgccaacacttttcgtatcgcaaactaaagccatgtttatatcccacctcanattttcaccctgtcatatcgaacagttgaacaccttcataaaatattaaatacatgctaaaaaa

SEQ ID NO: 5895 - DNA, 420 bp, Oryza sativa
tgttgaaccttttaaatgcttgaccaactccttttatgttagtactgcggtataaaggattttaggtattgggcacttgatcacgcgcactttggcctaagcaaaaagtgcctaagtccctaaaagaacgtgacaggccacacctgaaaatatgggctgcagacatattatgcctacgccaaaaaatatgccttcgataccctttaaaggatgacgcatgttacatgctcccgggtgatatagactatgtgatctgagtgattatcccttatgggatactccaaaatagatataaaaattgaatcccgactggcgcaagtattcggctgataacctttacggcgaataataaatagtccagtctttgagcatagaaaatagactcatgactatgaaaccatgtggaatgtattcggaaca

SEQ ID NO: 5896 - DNA, 441 bp, Oryza sativa
  unsure (1)..(441): unsure at all n locations
agcttcgaataacaatatctctcatgtgatgtatgattntttaaaaccgtttgcaccatgatgttagaaaaaaatgcttatcaaaaatagatccgtcatgactatatttcaactaaatttgaatgttgttactgcacgtaagacacagtgttactgcacgatggctgtcgctttactgcactgtttcgcaagacgagagctgagaagaggtgggtggtgggggagttggtaggcagtttgaccgggttttgaccgacgtcgggggtgctttgactgacctttgactgaagtgggaggtgggttnggcccttgggagggagggggggatatagaatagctattctatacccgggtgtagaatagtttgcgtatgtgtgtgtggttatttatatatatataaaatcaaagtgtgggatattatatctcatgtacaatctcata

SEQ ID NO: 5897 - DNA, 438 bp, Oryza sativa
  unsure (1)..(438): unsure at all n locations
gcaactttctgtttcgatcgatctttttataacaagantgtgttggctgattggtattgggagaaggtatttggagttagaacaagaggaattttgtgcttgaggatctgatttgatatggaatatgtgatttttttcccccacagtgggggagttaccggtaaaccctagcattttttttagggacgataaagatcgcacacgggatgcaaaaggcccacaaaacgtgtggtctatggacagtatcggctggtatacaggctccatgtttgctttatgcatcttgttgctcggccgggccgccgattgcatgagcgcccgcttcattctctctcttcctttgtatctcatccagctcagattgtgatgacatgtatgggctaatagaatgctgattagcccttattatacttgccctaatctacagctggctctgga

SEQ ID NO: 5898 - DNA, 404 bp, Oryza sativa
  unsure (1)..(404): unsure at all n locations
agcttggtgatgtattgtcctcagatactatattcttcacgaatgttctgtgtcgntcacctactgatgtctccgtcataaaactgcaagttcatagcaatcccaactgaaaacatccaagcactctagtgaaaacttgttatctaagcagtgtcgtgtgaacatcggagctttcagaggcagcacatctgacagcgaattggttccacgttcacagcgcgtcaaaaagatagtgtcaagggagcaaatacgattttatagatagcaatataaactacaagaatgtatcttgtaaaatgtcttaatcaaaaacaaaggaaataaaaatcatatcttacgatgaatggtangacaagaggagcacgaataaagcgaacagagaattcatcaaagctcacacaatc

SEQ ID NO: 5899 - DNA, 364 bp, Oryza sativa
  unsure (1)..(364): unsure at all n locations
agcttagctcgcagatctggacttatggctttggctagtgtctggactagctggggcccacgggcgaagccggaaacgatgcccatgggggcgggccggctgtggaagtcggggttagcacatcatccttccccccccccaccaattctaatgttatagaccacctcatgggcccccatgggtttagctcgctttgactacgnatttgacgagtcgatccttgataacctaagggcgattatggagggtttgtttacttgtgtgcgacccttgcttattctctctctgtgttattaatattctcatgtcccacctgtgtcatcataaatgatgaagacattacccccgtatatacagcacattc

SEQ ID NO: 5900 - DNA, 277 bp, Oryza sativa
ctacaaaacgagtctcgcgatctacaggcaagcgaagaaatttgtctattcattcgggtcaaaaaccccgggccgacatccggaaagtccttccgacatcccggcgaacgaccgatatgagacctcaaacatcagctttacgcgaactaacggggcgcggagatccaagagcgtaaaggtacggcacgccacagcggggattataaaagggagggcacggggcgtgcggacactaatagaaaaactaatggcgagaactatcagcaaactaccacac

SEQ ID NO: 5901 - DNA, 398 bp, Oryza sativa
  unsure (1)..(398): unsure at all n locations
agctntagaagtgaaagagctggaaacttcaaaagaggttgctactttgacaaaagatttacctgaaactttggatgccgaagacccatcttctgatgtggctaaggatgaatcagtaacttctaaggatatagacccattaccagatgattcaaacacagctccatttactcctatgaagggagaaatggtgcttgcattgttccgctgcgacaattcatggaacagagccatggtaatcttttacttttttttcttacatatatataaaatcatgttgcatccattcatgtaagtatggcattattataacataatatgaacacctactcttttacagattataggtgagtgtcagggagttgaaggacctgagttgagtattntacattgactat

SEQ ID NO: 5902 - DNA, 385 bp, Oryza sativa
  unsure (1)..(385): unsure at all n locations
agctggacgctacccctacctggcgcgcctactgtcgaaactagatttcggcaataataaaaggaggtggctatcaagctggaaaagtgtatgggtttggagacaaaggatttatacaggttcaggccttcttataaaagaagtaataccctactcctgtccggngatgaatccgccgagtgtattattgattgtatgattcgggaaaaatcaacatatgcccctagaggcgcccggaccccccttatatatgggaaggagtccgggtcacaaaagataatctatatccctaacggaatatgaaaatataggtaagatacaaggcgaaccgactatagttcagggtgtttccttgatacacaagttaagaaacaaacccaagata

SEQ ID NO: 5903 - DNA, 442 bp, Oryza sativa
  unsure (1)..(442): unsure at all n locations
atccggtgcccttgagctcgagacggacatattctgcgcccttgtgctcggtgccaccggatccagccccaatgcgacgtantggaggcggcaagagggagagggccgccagatccagtcaagacccgctattttcttctccagccgtcgtggcggcggaagcatgctcgatccccagccccccaggacctgagggtggtggttgggacgccgttgcatgtgacactcgatgaggagtgtncacgcgccgtggacgcattcgaccaccacgcttcacggctgcttcataccatggagcttctcggtcgccacaagagtaagctagctagcatcacttttgtcccatgcattcttcatcgctgcacatatgttataaaaggttgcctttgtatattcatttcctagcgctatgtccaatatcacccttatgcatgaatactat

SEQ ID NO: 5904 - DNA, 409 bp, Oryza sativa
  unsure (1)..(409): unsure at all n locations
gctctatctaccggtaagtgggntagttcttataaatgtcatgattcaatttctttgataacagaattaccatcacccagtcatatagatacttaatacagaagatggcaatagaataattggcaactgctaatgcaacgcctagcattgcatgaatcacttaataccaatgcatgtgcatcaatttcaatacgcatttcagccttgaacaaacgcgtctcatctacaatgtggcattctatattcatcagaaagcactaaacaatccgtgaaataggtctttatgttcctgaccaaacagctctgctacacagaccctgttctagatataatctcaacggtatcacaaatgtcacagtagatgacgctcaatcctagagcacaacatataccacttgcattaaacaat

SEQ ID NO: 5905 - DNA, 324 bp, Oryza sativa
  unsure (1)..(324): unsure at all n locations
cgatctttatgtattggaacnggatatgtaacatcgttaagggaagatcaactacaggcaattcatgcatgataagtaagcgtagagagttcaaatcggtcttcaatgagttgggtttagtataaaacagacatattcttactaccagcatactaattgcgcaatatcttctaccaagcttgaagtggtcgagagagcttatgttctatgtaatgtggtggaccacaactaattaccaaggctatgagttgtacatatagtgtcagatttaccccattctattgtgatatagtcaaatcttctttctatcacagatactctact

SEQ ID NO: 5906 - DNA, 469 bp, Oryza sativa
  unsure (1)..(469): unsure at all n locations
cttgcttctganaagaatatgtgtgataattgtgctaagataactatattagtttttgtggtatatgaacataacaaagaattacttgttttcttttttaccaaaagaagagcatgactaccttanaccagtgagtagttcaacttcaaattggttaggtgtaagcattgtagcaactgggacaacctaaggatgattagatcacaaaatgaatgtattaggataagtaatcatatatgggggcatgtgcaagaattagagcatgcttaagaatcatgagaaataaaataacatatttgaaatgacagactctggcctagagtttttcacttgataactagatcagcaaaagtgaacacaagctaagaagaccaacttctgacacaaggtgcacagcttgtgctgcttggtcctaacttactaaccaatatcctcttgctcagagagggtctaaagtgtaatcacttgg

SEQ ID NO: 5907 - DNA, 438 bp, Oryza sativa
  unsure (1)..(438): unsure at all n locations
gctttcttacgacgagaacgatctttcactttagcttcatccataaaggtcttgatcctgcgtgactggcgacgacccttattatcaactaataaatttgagtcaggaacccaattggcttgtcctggaggaggacgagtgaaatcacacacggcacgccaaccacgcaattcaccacgccaagttgcctcccacgattcctttctaaagtagggagaaacaaaaatgtttccatcaacacccccttttgcggaagcagcaagaacatgggaacatggccgatgtaacaggtaaggcttgttgcaattgcatttgcaagcgtgatactctggccacaacgtgcattccaatgtgatgtcagtagtcccaatgccgacaccactcttgtcacgagtctatctcaaataacaactctctattcccagcangccacactct

SEQ ID NO: 5908 - DNA, 379 bp, Oryza sativa
  unsure (1)..(379): unsure at all n locations
tcgcgccctgtacatgcgcgcgcaagagcagctgcgctctacttcttaccagcaacttctccttctgccgctgtccgtgcaactgctacatcccatccaaatatctgcaggagactagttccagtgcgtcttctcgagctgtagtctgtacatgcggcgtctgcagggcttattgcgtctactcacactctgtgctactcctatcttctaaggtgagggttaaaacccattccttcccgcacaanaaaagaaacaatcaattaacaattaatgtgattaattaagtattaacttaaaataggttaatatggttctataaaatggtttcttttatggttttttttaaaaacacacactaacagttaagaaatatgtatgc

SEQ ID NO: 5909 - DNA, 454 bp, Oryza sativa
  unsure (1)..(454): unsure at all n locations
agcttggaggctgatcacaactcctgagagtctttgcgctcgagttntaaaggcgaaatacttcccaagtggaagtctgctggacacaaccttcccgacagtttctttacctacctggaaaggagtccaatatggtttggatctgatcaaacaaggcataatttggagaagatggtggcacagggtgagcgagtcaatgtcctgtggaaaaatgcaaggaacaggctaatctatgtgaatgaactaatggaaccggngttgaaaagctggaatgaaaacctagttcgtcatgtgatgaagaaagatgatgccgaagaggtcctcaagatcaggttattggaatgccaaccggatgattntccagcctggcatttggagaaatcangactgttaccggaagagtgcatgtagattgtgctggaaactatctaatcatggtatgtcagatgcctcg

SEQ ID NO: 5910 - DNA, 379 bp, Oryza sativa
agcttgttaaatgtaccctctattttcttatctacctctggatcaactggtgacccatcaggcctgtaaagtgggcacttgtccctgatcttgtgcatcggcaagccgagctgtttcgccacaatgcccagcgggttcccgaatgtgccggtaagcacactgccgccaaggtcaccagcagctgagcgtccacctccttccatcttcttggtgtacacacggccaccgcaccgcttgcggccctccaacaccaccactttaaatccgaacgccaccagctgccgtgccgcggcgagcccagcaaggccggcgccgacaacgatgacggtgttgtgcctcgtgggctccttggggatgcgctccttgatggcgggcgcca

SEQ ID NO: 5911 - DNA, 420 bp, Oryza sativa
gtacatatgataccaatttttataacgatttttttttgtatacatatataaagctcgtgtacacgtattttatacgtcgtttatatggacacacaaacgttatatacatgtgaatatttttttacattaaaattatatatatatatatatatatataattatacgcaagtatatatagtatatacatacgtatatgcattggcgtataaaacagagactacgacaggagaagtgactgcgcgcgccgcggtgggcgcgactgctcgctaatcaatgccccgggggctacccgatcggtctgggcgctcgcccagtagcattttcggatgggcccagcgcttccaccgaactttctttcttagatgggctttacatatgacgcggtgcgtatgcctctcgggctcgaatatcgctcgtcgc

SEQ ID NO: 5912 - DNA, 443 bp, Oryza sativa
  unsure (1)..(443): unsure at all n locations
agcttgcattgattaatattatgatttaatatcaactagggtagcccatctcgtagaaatataacgcatggcaaggaaatcaaaacttcatattgctaggcttatctgaagaatttgcacatttccctgacagcatgtttatctttcttttttctcctaccctgcaattctaggtttcagagggaagaggtaaagattcaagcttgggaaaaccaccagaaagcaaaaattgaagctgaaatgaagaggatggaggtagaccatcgatctccctttgattattttgatgatgataccatgtatactcttcaaccaggccaatatatgcagtttcctagttnttatcactggataaaatagcttcagtaacttgtcaaaatcattaaacttcctgcaaaagggctaggagtacatcattagcaccaaaagtgtcttattctgca

SEQ ID NO: 5913 - DNA, 438 bp, Oryza sativa
ctccagctcttcagttttatttctatttatatggcctgttgtttttgttgggtcattaccaacaggtggctctgttattatcatggagtttattgaattcggttgctctagaagtgaccaggtaaagttatgccaaatatagtcggattgctaccttttcctaagatcctttgaggttaacaaaccatttgttttcagtcagctttgggaaggaaactagctgaaatgcataaagctgccaaatctgacaaaggctatggtttctatgttgacaatacaattggaaggtaccatatcccttatgtctgcacactataagtttcgtgaaacatggtatatcaatcaagtttccttgcaatatctatcttgagctcttctaatcatactatttactgtagcactccgcaaagtaacacttggactgccgactggattgag

SEQ ID NO: 5914 - DNA, 440 bp, Oryza sativa
agctatccaacaagtactcatgggctccatttttcttctagatcagctgctaggtccgtttgaagttcatgctgtcaagaggcccgaatccgaatccaatacgtgtagaactttatatcttgtcttctatggaccaaaagagaagtggtgagatggaagtggacctgaagaatgtcttggtttggtccccaatcaacttctttaatgtcacgcccggaagtttcccctctccggtgctttaaaaaaaatatgttaaataaatcgtccggagaaattgttctaattaacctagagatgaatccctaattaataaatgcaattaataattggaaatggcattgtgggaattttcttgggttccacatgtcacaattgattaacggattttagtcggaatttcagagccctatatataatattaacccattataattcataaa

SEQ ID NO: 5915 - DNA, 433 bp, Oryza sativa
  unsure (1)..(433): unsure at all n locations
atcttgcaaacagttttgctnttaatttttcaacaatctaagcgtgtgctttccacaaccagagcgagacaagtctcagctcggtcgggaggtgagaagtaacaaatttatttatcaagatttgcacaactcccagagttggcttcaaatctggagttcccaaaccaaaccaattttccaacttcccgataatagtggtcccccaacgaccaatcacttccagggactcccggacccactgtcccccggatagctaaatgcttcccaagcattagggttccaaaacttaacaccttttcataagacagggtataacaaaaactacggctaggaatcacctcacatccgcccatgaccgtgggcacggctgtttaacagtttgttacctctgcgacggggtcactttacnacacgacgttctaacccgggcacc

SEQ ID NO: 5916 - DNA, 445 bp, Oryza sativa
  unsure (1)..(445): unsure at all n locations
agctnttaaccaagctcttacaagttcttactaaagcaagcggaatggtgatgtacaccgacttaaccaagcaccccaatggaggttggatgtatcgatgccttggcaaacacttgctgtacggctgcaatcagatctgtggagctctgggtaggcttaaatatgtagcaaagggatagcaaatgctcaaatgagagaatgcaaagttgaataatggttcaaagtcaagtaccgtgctggtcctatgctagaacgtactagagacgcgagcctagacacaaacgataccacaaaatagcactatgaacaactcatgcacaactctgatatatgaagttcagctaactcataacagnattttctctnttctttctttcttctttcttttttcttttgttctttcctttctttttctttttttttggcggtttttttcttttttatt

SEQ ID NO: 5917 - DNA, 453 bp, Oryza sativa
  unsure (1)..(453): unsure at all n locations
ctcagcttcttcttgttaaacttattatgtaattcgttctaaattggttggttctcaatctatcatctttttatcctgtctctgcaaggtgcaaaaaggtgattctttgaaagaagattctgggtactgagggaattgcgactgacgagatgcttacagttcatctgctcatgtgatgtgtcacatggcagaaaacatggagaaatgagcgccatacgttgccatgctgcgattctagagatccagtcatccagacagtggaaaggggggtcgtaaaggatggcgcagattatagaataaccatacagagtacaattgaaatggaccaacgatgaaaggaaggaaatctgagaataaattccagtgcagtgccagtgtcagtttcccggtgccatgcctgaccatgtaaatngcgatccgtatgactatccaccagaatggcaatggctgtag

SEQ ID NO: 5918 - DNA, 193 bp, Oryza sativa
cccgaagggacctgcagcaatggcgctgcaatatgatgcacccgacaaacaagaacccatcatccatgacacgcaacccgggaggatacgcctaactcgccaatatcttacatggcgcacaaaccgctaccggccaaagcgcccagtcggccacacgtgcccaggaccgggcacctacccgcatggactaaac

SEQ ID NO: 5919 - DNA, 433 bp, Oryza sativa
  unsure (1)..(433): unsure at all n locations
ngcttctatcctttgaagatgtttataggttatctccctccctccccttgatgttacatatttgcacgtggtgcaccttgataattatagaacttaagagtaccacaacacttctatttgtagtcaaagttcatttcaatttctgctgcaagttcgttcttttttggtgaagatctccatttgggcaattagatgtgaataaaaatattagtagcaattaaaacgttttcattccattataattcagttatgtcaggtaaactctaataaggttattgttcagtaagcatttgactggcctgcaatgcatgaacacctgaagttataatttgcttttcatgctccttttacttggttcttctcctgaggaaacacagtaaagtatgctcatcattctgagaacattaaactattttgttattaccacatgctt

SEQ ID NO: 5920 - DNA, 327 bp, Oryza sativa
ttgaaactaacactattgtacaatttgaaactcctacttgatatatatattataatgcaacgcgcgggtgattaaatgctatatggctcaacgaaagtgatgctatcatatcctgattgatgtgtaaggtaatgaatctgttgctgatattaatccccagtcgtgcaaacaatactgtttgccagattttggtgaagttgttgggcaggtatcttcatatatcttccacaactttataactctttatccaatgatgcttatgtttgtgacatgtgcacatgtacctgatgtgaaactatggtcctgttgtcacctgaacattcatac

SEQ ID NO: 5921 - DNA, 423 bp, Oryza sativa
atgctggcagcaaggcgaatccaacttggaatggttgtcgtcttgaacccgtttacaatgctcaatctccggaggttttttatggaagggaaccacgaatcaaacaagaagcgttttgcagctatatccgaataagaataataaagagacagatctagatattgaaggctatgtctgtccagtgcattaagtgaggagatgaaaatcttctcgtagctcttttcatgctcggcatgggcctcatcagaatctctaacatggtcaggaatccaagataccgctagtactctcagcttggtaagctcacctagctccttcaaaaagcttaccggttgattgaagggcaagagacctgttagctgctccaatgcttgcatctgctacaccttctgcagggaacatgacgtcagaattgacagacag

SEQ ID NO: 5922 - DNA, 364 bp, Oryza sativa
gcttatacatattcccttagtagaactcatctttgtagcatgtaattttgtcaaattcgaaaaatgatccaaaactgaaatagattattgaacacatatcaaacaaaggtttataaacaaaaagttaaaattgcagtttagtgaaagttaacgtcttatagagcagatggcaaggtggaagacatgaaaacaacagcctatgagtaacccatccttctattcatggtggacaattggacatattagaagaatattacttcgatatggactctattgtatatgttagaggagtttatatagagagaggcacggtaggatcttatacactcattgcatttatgatttttcatgcattaatggtgac

SEQ ID NO: 5923 - DNA, 449 bp, Oryza sativa
  unsure (1)..(449): unsure at all n locations
atgatactaagctttacagactcatggtcttnctatagatacattggctatggtttctcttataagtactcttggaagagagcaaagcgaggacatgcgatctgactggacatgtcgcacacgcagcccatcaagtcgatgggcttgtaccctgtcagctccgcgagatcctggctccatggctcatgccccagcacgttcagcctcgccaggaagatcgacgacgccgccacaatggacggcaggtagcggtggaacccgtacgtcagcagcgacccgtcggcgaaccgatgcgccgccttcttcaacagcttctcttcttctgcgtcgccgtagtacctgctgaagtgctccacgaacgtgtacgccgacgggccgccaanggtgaaagccagcgcggcgagcatttcggtctccatgatcgacaccatcttgtgcctcgtctcgct

SEQ ID NO: 5924 - DNA, 433 bp, Oryza sativa
gctttcttctataatctgttcagatagtgttcggcactatctgttagcctggtaccactagccatggatttcgacgagtgattagtgaacgcattacgcatacgacctcatctttttctttttcttttctttttttatgatgtgtgtcatgacccacgaagaaaatccacggtcgaaatcgatggtgaactaaaatgggaactttttttttttttgccgagtttgttttgtcactcgtgctatcgtgacaacatccaaggaatatggctatacggaaaaagatgagtgaatcgcgatgatgtgatcatcgtacgcacccgcacaggttgctgtacaaaggtataatcaagacttgataggtccctttttttttagctttgcagataggagaagtgattgagcttatcagaaccgcgacatattcaatgaagac

SEQ ID NO: 5925 - DNA, 460 bp, Oryza sativa
  unsure (1)..(460): unsure at all n locations
tactaagctaagctgtcagaaaggaaacacacccttttttccctctattgtgtcttngngtaagctctgaaaatgatatgcatataattaatctaggcaaatgatggtgctgtactactgttgaggcatcctatcattatgaattgatttgggaagtctaataatgtgctaattggtcaagaaatcaatcaatctcaacaggagaaggacatgagcaatggcagcttcactccttttggtggtgggcagaggctgtgcccaagcctggatctggccangctggaagcttccatcttccttcaccacttggtcaccagcttcaggtatggatcaccacatctcaatcttggccattcttagtgcagccattgattccaacttcttagctttgtttcatgatcacttggncacaatagcttatttttctttctagataatggaatacaaactacaacttttg

SEQ ID NO: 5926 - DNA, 454 bp, Oryza sativa
agcttaattatggattaataattaacctgttctctaccgtattagttctgcatggggaatccattacagatcactaattatgcacgtttgtatgaatccaaatggatcatgacggcgacatgtgtatagcgcaagagactgtatatcgccatgcgtgtggccatccaagctctgagctatactgttaactatcactatacatataatctgccaaatatgacgtcttatcggtaacgattagataagatttgcactggacggacaaaaactgatactgtgatgaccccgtatcaatgccggttcaagtgaccaaccgacactgatgtattcattatgatttattacatgaactggcatggaacttatatcaatgctggttttataattaaccgcacaaaaacagagataagccggctgtggtttcagtcgatctctgccttgctctctttctcac

SEQ ID NO: 5927 - DNA, 445 bp, Oryza sativa
  unsure (1)..(445): unsure at all n locations
tccctaaacatgcctcagatgcaaagctctacaagccaatttgttctgcaccaaatgctaatgctgccaaccgtacaagtgttaccggtttggacagttaccatttttagcaacttataaaatgtaggttttctattttttttcaacatcatattgtccctgaataagtaaaatgataagtatagtcaattcctgactgactgagaattgtgcccaaagaaacgctaccgntttcgactggtttcacccctatatacactgttgcaatcatgagagcacatatataactctttgcaggcgaccaatggcctctctacaacagaaaatgcagattggcagcacccagtcctatacactgttgcaatgagcattgcaatcaggcgattacagatgtagcaacatcacaacttcttacaggataccataatgacttcttcttcctaca

SEQ ID NO: 5928 - DNA, 452 bp, Oryza sativa
agcttctgattgcaaggagttgcgtggactgacgtgctgtcagctatgtttctcggtctggggcacttgtcggcgaaatgacccattccttgacaattgaagcaacagatatcttcccggactcggcattttcttttctatcatcaggttggttattaactcgagggtggaacatagttcctttgaaatgagaccctatgtctcctttgacagtaaacacataatcccatatcagcatcttccgaaagaatcctcttagaacttgtttttattacaaatttctcccattttacatgaatacaaggcactgtcttaaacaaaaagggaaggtgcttaacatcggtacattgtatcctcaacaggaatcatccataaacatagcaagctcactggttaagtcatgaaatatattatttattacatgattgctgcaactttctattacacaatga

SEQ ID NO: 5929 - DNA, 461 bp, Oryza sativa
  unsure (1)..(461): unsure at all n locations
actaagcttcttatagctgtttactatgtngaatttcaatgatgtactcttctttaggttgctcgcatcaatttttacaaagcagtcggtatatcatgattactcggggattcacaccgcatatgctacatcttaatattaagtcacttggttgactacaattatcaaaaccactcggttggttggattatttactccttgactatatgtttagtttgttcaactaagcacatagtcaggggctacacctattaggtgcatctagtcagtgcacctaagtctaaattcaattatttttcagccctccacggtcttcagatttggtaaaagtacacgggagaccatggcaaagatgattgaagcactcggctttggagtaatctagttcgagagaagattatcttttcgactgtgaaagtctcaggggctactgtagagattatgggtaccccatacccaca

SEQ ID NO: 5930 - DNA, 348 bp, Oryza sativa
  unsure (1)..(348): unsure at all n locations
agctntcatgttattgcattctcaaagccttctcatgtctaccatatgccgacgagaggggtcccataccaacaacaagataggtcccataccatacttgcccaggatacccagaggttctacccgacactaccccggcgaatgcacatgtctctctgcataaatgctcccctgataaactagttactcagccaggggtgtgccattccacccatgtggtcgcacttgacttatgtttggatgaaatcccaaagaaatcggccttaagctctatatcgggaaaccgcacacacggttacgtataccgtccgagtgtttgaaattcatttaattcgcaagcaccgaccc

SEQ ID NO: 5931 - DNA, 471 bp, Oryza sativa
  unsure (1)..(471): unsure at all n locations
atcctcttagtcacctgcggcatgcaagcttggcatccaatcaatttctatcatttgntctaaatgtgncgcnatatgcttaatttgtcataactcaaccagcatcattaaagaaattgagtgctcaagaattgtgagtatagtcctagacggatttgctgtactttcactcaaagactaaaaggaatgtaaattgagcacagcacaatttgaaattctatttctattggttgccaatcatacagcttaaacaatgaaacatgccgtattagtaccccttgtgttcacattgccgtaatcaaatctgagatccagactgcaatatgttcctaactggtggaactagtgaggtatcataaggcccttcttctaaactaaacagcgaccaatacaatgatggcaagcangtagtgtttatacatatatcacgtgtatataccagcacatagtagtttcctgtagtgactttct

SEQ ID NO: 5932 - DNA, 417 bp, Oryza sativa
  unsure (1)..(417): unsure at all n locations
ggatctctaagcacctgagctgcaactgacgttactacttattcgtttttatatttctcatctttctacggatntgttatatatagacttcctgcgacagaaaattggataaataactttcgaattttaggccgttgattcatgcataggactggaatttgaaccatttcccacacgcacttgtttttgtgctcggagacggagacccattcctcccgacaacgaccaatggcgccacaacgtctcagacggaggtgaatcttaatttttttctttaatataaataaaacaataatttaaacaaatggaaaatcagatatgacttgatttgttcatttggatatctagttcttgtgggttttgtatttgagttaaaaataaaagagaagggaatctatctatcttctttatattatg

SEQ ID NO: 5933 - DNA, 444 bp, Oryza sativa
  unsure (1)..(444): unsure at all n locations
tcactgccaattgcacagtcccagcttctatgaaattttatttgtgtttaagaagataatagccatgtcctcccaattgctacaacatggatccatttgcttggcatgacaggagtccatgtcacatcatacactacatcttcagaaacactgcaatatacaatgctgatttgatgatagtatagcaacatcttatcaacaccatcgatttgntgctntatcattccttgaaaatgaaacccttggtaagttggagcatccaccatatattntctccattgataaggcttgctcangaaataattagctgagaatttgaaccgacaccagctcctaacttgctgaattagtaaattttcattctcagattgagctaaattgtagcttggaactagctgtcccaatgactgcataggcagagcagtattcatcatatctccaact

SEQ ID NO: 5934 - DNA, 450 bp, Oryza sativa
  unsure (1)..(450): unsure at all n locations
agcttattagtcaatatgattntntnttcgtcacgcanaaggctngcacaacaataaattataaagagcgaaaacttgttttacacaacgtgcatgagccacaacggttgtcgtgagagatggggaggagaaaaaaatataagaggaaaattagttagtaggatagtaatatactccagttgtgatctaaccctttcagtttctattgaaatagtgctgggtaacggatactccctccttccaaaactaagtgcatttagcagaggatgtaatatattctgcgactatgaatttgataagcactttgtccagattcgtagcattagaatatgtcaaaactaatttcgttttaaaaacataatatgcgataatatcatgctaatatcagattaatatctntntaaatgctacatatctgtattgataacgatactgatttgcaatttttgg

SEQ ID NO: 5935 - DNA, 463 bp, Oryza sativa
  unsure (1)..(463): unsure at all n locations
tcccacggctagcagacaatgaggaggagaagaaacgtttatttgtcagacgctcaaatctntcacggaagcagcaggcagtggctgtcaagtgtcaaccggagacagacacacgagagctagccgtcgcgagtcaacagttttttgtgtcttctctttgaaactaccaaatcaactcatcttttaaaagctatatctaaatttagtgtttaaaagttgtatttttctgaaacgcatgcaacgagaaatgtgtagtgcatggacacactaacagctctcgatcgatcagtcatcaatggcatgaactcacaacgaaatggcggcaagtatgcaaacaggagatgaggagatcgaatcgtataggattggcctggctgcatatgtttgcatggaattacgtagtgggtcggtttggccggtatgggtcatgcgaactatgaatgcgtctgctggcggacgtaca

SEQ ID NO: 5936 - DNA, 378 bp, Oryza sativa
  unsure (1)..(378): unsure at all n locations
agcttgacagtanaattggttcatggtattactgcttgttctctaatataggggtatcacaacaccagtatagtataaccgtctaagataatgcatggagttgataaaagtagcttaccaaatgccataagctggttcgatctttcttctgcaaaggagtactttgttatcatgttccacaagacagccaacaacctatcaatatgacatacgttaatggcaaaatggaagacgaaagccaagtcatactattaaacatatatacgccttcaacaaagatatatgtgtgtagttaaaaatacagagcagatatgcacagaagaactccgaacgagctggaactctatttgaatcaagcaagntacaggggctaaattc

SEQ ID NO: 5937 - DNA, 449 bp, Oryza sativa
  unsure (1)..(449): unsure at all n locations
tctcgtctcatccgcttntaactcagctagaacatgacttgtttatcaattgagcggcgaacaatggcgacctcccactagccatcctttcagctaactccatcagggtagctcctctctcggcttgccccgtactatcctgcctccatctttcattcctagcaacttcaccaccttttgcaccatccaaaactggataccgacaccctctggcccataattttactcgcctgtagaaacacgaatctctcggttttgggctaagtacaaaaaaaattcaatcaaatcgtcagttctgataaaatctattcaaaatgtatatattgtatcgattcatcaacggactctgtgaaatccaatgatacctctctcagcatatttcgatcccgtattgagagtatgaaccctgagcttggctcgtatcttgagtcgtacctaacaactcatac

SEQ ID NO: 5938 - DNA, 439 bp, Oryza sativa
  unsure (1)..(439): unsure at all n locations
agcttgaaagttttctgttctcagcaatccatgctgcatactatggtccggatgttcggtctgtggatctccttcctgattgctttgaagctgaggagaggtctgtatatgagacccctgagctattgcaccttgtatcgggtcgtgatctgtttggtattgttagtctagctgatagagttcaacagctgccagatgctcttcaggagaagcagacgctacctgggtttaaaacttacgggattagtcagcatgtttcaacaaacttggagaaaggcacagtacacgccagtcctgtatatattcacaagagagagattgactagaatgatggtcctcattcagatgcctacaaggatattgaattgtggatctgtggaattacgagctactgcaacgaggagccctangtggcaatgtattgatacatcagatgtgg

SEQ ID NO: 5939 - DNA, 326 bp, Oryza sativa
  unsure (1)..(326): unsure at all n locations
acacatanaaactcaagctgacgcgacaacgngccggtggacatcgccagctgatgttgcagcctccgccgccgccggaggaggcgacctgagagaagccggaggcagcaacggcatagcaggtcgtaaaaccacccttatctacctcctaaagtacggcggcggggcgacggccctngacgacgaactctacgcgctcgcgagcaacctcgacgccggcgaggtgctaccgctcccggcggcattctgaaatcgaaaacagcgacccgcgtcaataaaaatcaaaacttccatacaaaaaacagggttaaccaaaccgggatagg

SEQ ID NO: 5940 - DNA, 438 bp, Oryza sativa
  unsure (1)..(438): unsure at all n locations
agcttcaaatatgtcaatgctgggctggtgaattgtgcagacaacagttcttcctgtgtctactgtgtttctaactgttctcatcacaattgcagctgcccttgcatctagtcctgaagttggttcatccatgaatatgatggatgggttggcaacaagctcaacggcaatagtgagcctcttcctctgttcggtggataaaccattcactcctggcagtcccaccagtgctcccctcagtgatgtcagctcaacaagttccatgacttcttccacaaacatctgcatccgtgaagtgagtcagcatcacaatgcanaatgtgtaatgagctagcagagtaaaggctgttngactaacctttcttgcttctgagtctactcagaggtaaccggagccatgctgagtacagaaaggactcgtaaacagtgacatgtgga

SEQ ID NO: 5941 - DNA, 402 bp, Oryza sativa
tgacctctataatcatcacaagacgatgattggtgacaaacatttgcggcgctaaattaaatcttgggacaaatatgtgtactaccaccgtcctaaaattattgtcgtttgtttggcaaaatgtgagttttacaagaaaatatctgagtacccctattaaatagtgcatggatgggagtgacgatgtacctggtggtaagatggggaaaattttgaattggaaacgattgatgtaaaacaaaaaaaagctcctaagtgacaagaattttgagataaaattctaaacctagctagagcgaccacttatatatttaggatggagggagtaattatatttatgacattatacttttcttaaaaaaatcatgttgcctttctacattataaacttaatttaaaact

SEQ ID NO: 5942 - DNA, 280 bp, Oryza sativa
agcttacttgcttcggactcacgttactatcatgaaactgaactcccactgagattaaaagaagaagataatcttagttaatatttagagaatgtattctgcaaaagaggacaacatgaacatcctactgctgtctttccccaaggaacaaaagagtcacagtccacgaatctttcacgatgtacacgagcttccttgataggacaggcagccatggaggatcattatacgacacattcttaaaccgaacagttaaacatctaatgacgatcaaggcggg

SEQ ID NO: 5943 - DNA, 341 bp, Oryza sativa
  unsure (1)..(341): unsure at all n locations
tgctccagcaagcnatcatttttatggctgactttttctatccaatgcatacagacgcccacaccaaaatgacagatctccccatgatgacagatgacacggaccaaggcttggtcaagatggatggtcataaaccagatttatgcttaaattacaatgcaattttactgcatcttaatagacacctcaagtatccgaatagcttgttatgaacatgcatggaaattagggatgacttccataagattcatgtcattaatgtgtgataaaattaaaatattatgccttgactatgactcaaagaacatttaacatagaactaaatgcaggggaccatggca

SEQ ID NO: 5944 - DNA, 460 bp, Oryza sativa
ttgctgcgtagccctcttgttagactataagccacttatatttataaagctaaaccaaacaacaagcagccttctatttgcgctttttaagccataagccactctaacactaataaggccttctttggtgaggcttataacccaacttctaagtcgaaaagtctaagtctaaacaaacaagcagctcttacggttggctttattgaagccataagccactctaacactattaagccaaaagctaggttgaagaacatttattggcaatgtgaggtagatgtatgactcaactactaaacttacgacattaaatccaccggcctataaatcatttaaaccagtagctgactaaaagactacccaatagcctaacctaaacaagagggccataccacaactagtaggagaagcttttagctcaaaggatagcgtatgactcccactaaacatagacataaat

SEQ ID NO: 5945 - DNA, 258 bp, Oryza sativa
  unsure (1)..(258): unsure at all n locations
ctcgagctcnatatgaactctatttttgctcgagccaaaccttgtactacgctcgtacgtgcaggcaagctcgggctcggttcggacgagcctcgaacctatatcgatctcgttttatcatcatcaacgagcatgtgtacaatatgtcatataagacgagaaactgtcagaaagctgcagctgggcatgtatgggtaagatacggccatacgggagcactagtgtactgtgctactagtacttacccaggaggagtct

SEQ ID NO: 5946 - DNA, 486 bp, Oryza sativa
  unsure (1)..(486): unsure at all n locations
tgtcatgttgatatntcaatgtggtgacatctgctgttgccttctcttgaagaacaccataccagtccagagtctcagtatggttctcgcctctgctgaagaatgaactttgcagacagttagcatctgataaatgttgtctagatctggaaaacgcctttggcacacaaaatgtccttgattttcaactacttcactgcaattattttgacccttacagccatttctctgttgcatttcaatatgtgataaagaaaatttagtgcatcagttcctgcatacataccacataatcactaatagagaaatgtcaactgtgtgacacatgcacccaagatacatggcgaaatatcttgtgcacaacaccaccttctatttcaaagattgactacgaaacaatcttacaatactacatggataccaacatcgtatacatgtagagtgtagctcgtaacaatcttaataaaaaatcactactgatctaaa

SEQ ID NO: 5947 - DNA, 398 bp, Oryza sativa
  unsure (1)..(398): unsure at all n locations
agctntggattntngtntaaatttaggcgtaatgattagcaaatgttgggagtcactagtactatnttaagtattattccaatgttattgtctgtgacctgcacaatggtgctgcagaaagacaggaagtataggtagttctcgatggatgcaactttggataattaagtgcaccaattatgctctagacctctangtttgtagtttgtgcccaaggctttgagagagtttgtatgttcttaacgaatgaactatgtgttgcatcagagtagggaggtcagaactattgtccaaaagcgccttaancttgaagttgtaattttctctgtgtaagtgggtggtggaacactgattgtttttatgtcatgtgactgcgattcngtaattcattatctctg

SEQ ID NO: 5948 - DNA, 394 bp, Oryza sativa
tgtttgtaggaatgggtaaaccaaactgaagatcctatggttaaggaatttaatgaggctttcacgaatttatcattggcttccatatcatgatggtgagttaaaagggcccacttgccggtgtatacatgtgttgcgcgtcaagagtggagatgtatgtctgcatgtgattgcaaaagacctatatgtcatgcaacacatacaaattctcacaccacttacatgaatcatttgctctttctctttaccgcactattaatgggcctactatctactcttcttttttcacttgtaccaacactactgtaactgggccatccctgtgtttgaagtgatgtgtttacaacacgccacgcacatatgctcgtttgcttacatcttaaacttaatatct

SEQ ID NO: 5949 - DNA, 346 bp, Oryza sativa
ttggagaagaagacatacgtggagtcctggctatacccctttttatctcctgtgaagatggagccgtatgcccgctattccgctgctatctattattgaatgtcaggccttaagtgcctttgtaataatgtaaatattatctatatataaagatgtggcttttatatcatgttcgtatggtgtaccccggcttttcctgtgacggcgattaatacactaacggctcccgtagtatctttaatggcggcggcggttggatgcaccgtgcgggagccatggatagcatcggagagttcagcgaaatggggtaaaagagagagagggtggcggtgtgaactaaatatgt

SEQ ID NO: 5950 - DNA, 457 bp, Oryza sativa
  unsure (1)..(457): unsure at all n locations
tgcacagttgcactgtccggggtaagtgcgtaaatgtcttatttatgctagcaatacactggattggttggatggcatccatctgagaccagtgatactactgtacatatgcccctgcctgtttccaacaatggtttccatagcaactccaaaagcgcactgacattgtataattatattttaactgaattactgaaatgacaaaatagtgcctggtttcacaaaaaatcgtgaaagtagataagcctgttggcatgtggtttaagatagaagagcttgctactaagttgttcagaatagcaagcatatcctttaatagtcgtagacatgcaacaatggtctatatagggtgaaacataatgacaganaanaaatgtactaaccacaaatgaagatggcatacattaatcattgtatatagcactttaattggcagccacacttttttgccatgaaa

SEQ ID NO: 5951 - DNA, 371 bp, Oryza sativa
tcagaatattacggggatgagatagctctatatcatctactattggactacgctgcattattgagaaggtccaacccagggagctgttattttcgtacttgtcaaatggacgatccaatacactatatgtatcattagatgcttgcaagaaaggattcataaccggttgcacgccactaatttgcttagatggttgcacatcaagacaataattgcgggacatttgctcacaactgttagaattgatcctagtaattgcattttccctattgcactgctgttgtggaagtggatcaatgagcacatggacattgttccgcagaccctaaacgatgatatacatatatttacacaactccatatacaataat

SEQ ID NO: 5952 - DNA, 468 bp, Oryza sativa
  unsure (1)..(468): unsure at all n locations
ttttactgcactgaatattatgtgtagtgatcagtcatcatcatgccacaagattactcgcatcaatcagcaacatattacctgatgtaattctgatcaatactactgtaaaacatattatgtttcccttagaatatcttataaattcgatatatgctgcatatgctatcacggtagctgagtttcagtggtactaaaatttcagaataatgcagatgctacttcagtcacaatacttgtttgcaggatacagactaaccatactccaaattggcctaacagatttcttattggngttttcaattcctcagtttgatcacatggacgagaattatataaagcaagttcgatcgagatggttaatggccgaccaggttacattatntttccgcagtaactgcttcagtttcagatacagttgctaaaggagacaggctgcataactgacactacctttctatgcagtgc

SEQ ID NO: 5953 - DNA, 420 bp, Oryza sativa
agcttagctggttccttgttcgcaaacattctctttatgcgctccgcaattgggagataccacaccacctttgctgggcctcccctctatgacttacttccttcaccttcactctttgctcgtttgtatcttgatgccccacagatagggcagacatccaagtcagcgtattccttgtaatacaaaatgcagtcgttcggacatgcatgaattcttctgacctccaggcccaacggacataatacttgcttcgcttcatatgtcgtctgaggtaaattgttcccctctggcaacagatcctttaacagctcaaggagttctgtataactcttgtccgaccagccattactagccttaagcttcatgatgtccaacacgcatgacaacttgctgtgcttcgacttgcatccatcatacaac

SEQ ID NO: 5954 - DNA, 438 bp, Oryza sativa
agcttgcattcaagttatggttaactacaaagtgtcgtcaataaattatagggtacaagtttgtagcatgattagcttaaccgcggtaactcataagtgtgattatgaaataaatatggataaaacaaactatgggatgccagaattgtgacatgataaagtttgatggtgaaccaaacaacccttggcatagtagaagtgtgtggtacatgcatgatggttagagattggcaactcttctaatcttcttatctatatgatccccggccggggaagtgaatcaagttgacttctctgtggatcgcgtaaagcaatttgccttctaccttcttgagtgaaatatagcaagtaccgaaattatctccaccatatgggaactacaacatcacttgtagaacacatgaccaaacatagaacagtgtcggtaagtgaacatat

SEQ ID NO: 5955 - DNA, 454 bp, Oryza sativa
  unsure (1)..(454): unsure at all n locations
tacggaccttnaaactcagctgcaaaaggtgctggtggaagccaggatgctatcatactatggcagattatgcttgatcaaatcaacaatgatggccctccctgtacacacaatgtcagtgattcagctgcctaaatgggcgataaaagaaattgaacgcaaatgcaggggattcctttggaaagggcaagaggaagtgagcggtggacactgcttggtcgcgtggaaaaacgtctgtatgccagtggaaaatggggggctggggatcaagaatttggaatactatggtcatgcattgcggctaanatggcaggtcaccaagctacagcacaagaacagaccatggtctatggtggactttcaacttggaggggaagtggagaaaattttccaatcaatggctgagttcatcgtcgggaatggacaaaacacaaaattatggacttcaaattgg

SEQ ID NO: 5956 - DNA, 436 bp, Oryza sativa
  unsure (1)..(436): unsure at all n locations
agcttcattattgtgccgatctgagttgaaaaacanctctgaatcatgcatnggtaggttgctcctgcgttctttattccaaagggcatggtgatgtatcagtatgccccaaaaggcgtaataaatgaggtcttcatgcagtcggattcttttagtcggatctgatgatatcccgagtagcagtccaaataactgagtagctcgcaaccggccgttgagtcaactacctgctcaatgcgaggtaacccaaaaggatctttgggacaagacttgttgaggtcggtataatcgacacacatgcgccattgtcccgtctttttccgaaccaggactgtgttagccagccagtcgggatgaagaactatcttaatgaagcccgctgctaacagcgttggtaattcctacttgatcgcatacttcctgtcctgtgcaaaat

SEQ ID NO: 5957 - DNA, 370 bp, Oryza sativa
agcttatcatcataatgggcagattataagcgatttgttgtttatccgaactcttggagtggagctgatggtgcatatacatggatgggaggatcatgcacctcttttctgttgctttacacaagcagctagctagctcagtgcacatgtgccttgctgtccacttattactatagcctcctgtctaatcagatcagctcatgatcttggacatacatgaatacctctgccgttaattttctaacttgatcaacatggagatacagtattggtttaacctctggagctaagctttcattgatttgatggctactcagtttgtaacactagcttgtggaaataccataccataaccataaccatacattac

SEQ ID NO: 5958 - DNA, 431 bp, Oryza sativa
  unsure (1)..(431): unsure at all n locations
ccttagttgccataaagaaaacccattttatctaganaaatctttatcaataaccaacacataccactttccttcaacagattgcactctagctggaccaacagtgtccatatgtaatagctgtcccagtgcaaccgtcatcacagaaacaatatgagcatgtgaagtagaaaccatcttatcatgatgacacggcgtacgaaccaaatcaagatctttcttaagtttatgcataccacgaacaagatccaaaccactttaccttgngagatgatcaaaaccaacatgttcaagtctacgatgctaaaacatcacatctttatcatacttagcaacccaacatgttatcacaggtgaaacacgattctcaatattgcttttacactcttcctagcgagaatttcacacatatcccacggaatcaaacttac

SEQ ID NO: 5959 - DNA, 418 bp, Oryza sativa
  unsure (1)..(418): unsure at all n locations
tagaactcaattgtgcaattgttgatttataagagtgtgccaggctaagtttggccaaatgaactagtaatgaacggtgaactgtgaagtgcatataagtgggccaacagtgtagcaatacaacaaacgttgtgccttgtacaccatgcaaatattcaagtcagatttcaggagtatcaagtccatgaccaagcaccagttaaagaaatagagtaggcactatgtgaactaatgtagcaagctatctaattaagagctgactacaatggcatatgttgcatttggtaataagcgttgcacattgattctattggagtattatagtaactgtacaatntacaatgtatagactgtgacataatactatgtggcagcaggaccaaaaacattggagctactagataatcatttaatgact

SEQ ID NO: 5960 - DNA, 445 bp, Oryza sativa
  unsure (1)..(445): unsure at all n locations
atatcccaaccatgaacaatccatcccctatattatcttntctcacggagaaagggctcacacttcaaaggatactccaccggacataaccacatgaggctacacaaacctatatgaattgcccacatatcatcttgtttatgacttgataatactcaccacacctggctagacaagcccaccaaatacacctacatgcatatgaactaaaatgggcgcagaacatccacatgctcgcttcatagacccctcttaataggacgacgtctatctaacatatcccgtctacacacaacaccaagaccgggaagagactaagacaacattctgagctccactatacctatgcctcgcgccatccaacttgtggtcaatgcttaagccaaaatcaacacttgtgaccatactggttgaaccatgtatatgccgacgtctttaccactct

SEQ ID NO: 5961 - DNA, 496 bp, Oryza sativa
  unsure (1)..(496): unsure at all n locations
gctatcatcagggcttcgcaaggggttatattcgttctttgttcatttttataagatcggatagattcgaaccgcaattgcaaaggtaatcactactatgccagcccaaatcatgatcttcaccaacttggatttggttctctcgcgaaaatcgcgagttgcagagatgagaaccatgaagagcaagatcccgaataagacaacagaaaccgaggaaaccacaagagtgaagactagtagagtctcgtcttttgtcattctttgctcctttntcactcaatgattcattcgaatttcccgaccaaaaattctatatgtctattcatagggcctcgttgctaagtgctacaagatctagtgcactggaactcgtggttatggacccgaatcctttagtatggaacattgtcatttccaagtaaaacccccagtatatgaaagaatgaacaggtgctttcgttcttttcttgtgaataagaagccctcgaccttaatg

SEQ ID NO: 5962 - DNA, 409 bp, Oryza sativa
  unsure (1)..(409): unsure at all n locations
atccttaagtcacgcngctgcagcttacctgttaacatgtcgtatgtttgactctcccttcgtacccatggctgtgattattttttactaacttagcatgaatcttatggcaaatcgatggttagaaatttgaaagttttgattgaagaaaaatgtcgcactttatgtagcaattccattctggtaaaggatgcgcttggacatctctacgcaaaaattaaatgtcgttcagtcctacagccttaccattaccattgagttctgcaaactatgtggcttanaacttanggtgtgtttagttccacgtcaaaattggaangttgactaaaattgaaagtttgaagaataaagtcggaagtttatgtgtgtagaaaagtctcggtgtgatagaaaagttggaagtttaaag

SEQ ID NO: 5963 - DNA, 350 bp, Oryza sativa
  unsure (1)..(350): unsure at all n locations
ttgctcggngaggtggaaagatggcgaccgcggatggttttgttgtgaatggtggtgccgggcggatttcatggccgaccgtaataggccagatgtggggaggaggtcgcccacgccttcggcttccgcttctgggtcggtgccggcctccccttctacgttggcagccaccatcgtcgccgtctctccgacaccgcgcttgcccgccgacgccgactcaccctgccgccgacctacccttctaccgtgtctccgccgccgcgtcaccttcgccgcatcgtcggtcggccatcggacctcctcgtcctggcaacgtccctcacaccgagagaagagtgatagagagagaa

SEQ ID NO: 5964 - DNA, 347 bp, Oryza sativa
  unsure (1)..(347): unsure at all n locations
agctntntcgcgaanattataccatgtcaacgcctgtcgcanacccgccctccccaacacctgcgaggatccaggaagaagcaaacccagccacggagacagttgccgaatgtcatcccgcgacaatggcggtccaacaacccgaaattcatggtaatttataggataaatnttcaccacatgaccacataaattttagctagcaccccttagcaaatattgccttctgtttgtgctgcagaattgccgcaggaacaacatacgtcgatgtcgggcgggacaagtgcaagtaggtctagtacaaatccncggtcacaaaatatatggccgaccacagtgcaagttat

SEQ ID NO: 5965 - DNA, 285 bp, Oryza sativa
ctaagcttgcaatgaagctgctacagtaacaatgaacacaaattatttttcttgctaaagtaacttttcattatatgttcatccgtgcaatgttctgccaccgaatgcatgccaaataggcataattataccatttcgtcggtaacatgcaaactgttaaagcacatggatcatacagatttacataaactttcgtgataatttaaggagcataattaggatgagttacattgttcttatgactacttcaatacaatgtgccaacatcttaacgagcaacatact

SEQ ID NO: 5966 - DNA, 381 bp, Oryza sativa
  unsure (1)..(381): unsure at all n locations
agctttcagttntccaagtatctataatgtagcatatatgggtcatggntgggtagtgttggggataggtggcactggggagagataatttgcttaggaattaagtctaatatcatggaaatctctgacaagaccaatttgaatcttggcaactgccgcagtccccatatacacttcatatagctntgcaatccagctagaagaatgtacactcaattgcctatgtactgtagtttgactccctaattaagtgtggaagaatcggagacaaactagaataagagctcanaaggtngttagaattgtaccgaaagaatagctaattgatttaattaagcgttcattggaatatatcatgtgtgatggattgcacatgcatgt

SEQ ID NO: 5967 - DNA, 456 bp, Oryza sativa
  unsure (1)..(456): unsure at all n locations
aactcagcttctttgcatgtaacgacngaatgtctcggggaaatgttttttatcttaacaaagaaaacaaacggtggcggacgaatggcggcctgcaggctaagaataagcttcctttggtgcgaaaataaaaggaaagcatgaaaacatttccccaaggtgaactttacagatctaacagcagtacggatttcaaagggccctgataatattgcagaatgcatattactactctatcttatgacagtgagtgtatcatatatactatgaagtgggtaaccagtggatcctttgctgactatgaaatacttctttaagggatccagtttcaatcaatcatatatcttcagatacttaacaatgaattaaggagctgtatttgatttaaggacttcacttgacatacaaggaagtgaacatntagttgtagtagagatcaagagaacgctattgacc

SEQ ID NO: 5968 - DNA, 341 bp, Oryza sativa
  unsure (1)..(341): unsure at all n locations
agctntgcgattaaatngatataaaacctgtagttttgtgataactantgtactaaatctgtagttgtgcgatagtccaccttatatttgtacttctgtgataaatttagtgttaaatctgtagttctgcgatacatcataattaggtcatctatcaaatggtgttcagtacaggattatattaagatcttttcactatgaccatgcaattggtcacaggaaaatggaacacatgaatcagagaagatccaagtaatcaagtttccaacaagccagaaagctagaaggcataacataaattggcacatattacacagttcagaataagttctgatgtacct

SEQ ID NO: 5969 - DNA, 339 bp, Oryza sativa
  unsure (1)..(339): unsure at all n locations
tcaaagatgcagaaaatagcttgcctggatcgataactttgttgcgactttggtttgacctgaacatacaattccaaataaatctcatggaggaactcaatcagatatccgntcatattntaagaatttctagctacaaaatccaaaaaacctgaactagcagcttggaatcggaatttcttagcttttggcgttcaccagcggaatgctcatcaacgacttctcaccatctccggacttttctcccaaacaaacaggttcacagtgcttccctgcggcccgcccacggcagcggagtacactccgaagtccgaatgggccaaacgatgagatttaagt

SEQ ID NO: 5970 - DNA, 223 bp, Oryza sativa
agcttggagttgcgcctgcatagccgaagccccttccaccattgtttgtggcgcttggccgggtggttgatggtgtacttgggcagcgactgcggccgattgctacccggcgaagtacattggcgcttgtgcgacttgaggtggaaagggctgggtcgtcacttgcggatggacttgaggcgggacataacctgccgaatactgaaggattggagccgacgtg

SEQ ID NO: 5971 - DNA, 294 bp, Oryza sativa
tcagaggctatatgggctcatcggatatctaagcatggtgcgactcaagtaacaccgtatgagctagtctatgggcagaatgccgtgttacttgtggaggttaatttacaagctcttagaatagccagacaaaatgcgttgtcggctgtagattataggaatataatgatggacaagatagatgacgtcccaaaggaaagattgatggccttgagacatattgagaaagaaaaattaagagtagcttgggcttataatacgaaggtgagagaacaatcatttcagataggtgag

SEQ ID NO: 5972 - DNA, 422 bp, Oryza sativa
  unsure (1)..(422): unsure at all n locations
agcttcacaaagcaagggtgagtcctggccgatgtggcgcgaagatgacatcctcacanaggcgctcggaaccaaagaacatcctggccggactcggggaattggtagcgatgtgccctataagcatggactcccttagtacagctcccaatacaggaaacggaaagtctccaaggaagagagggacgcttgtttgaaggccgaacttaaggttaaggtcattcaagaactataagctagcatgaatgcaagggtggaagaaagggttaataaggtcctcgccgacatgaatataccccgagtcacaacacctgctgtgcatccaactcctcgtgcacaacacgacgcgagtccgtcacagcatatgagtatgtgtgcattcacaaaggtgccggccccttgtctcccgatcgcaccactag

SEQ ID NO: 5973 - DNA, 349 bp, Oryza sativa
cgatcagcttcagtcttcatacaacagagagggtggttcacatattttcagtaagtaaagcattcattcagatcatgaagaggtttgcattcgaggacagcgatatggcgcgcgcgctgatgctcatgtcgtcgcaccggcagcatgagcatgcgctggctctgccggtgccggagcatctgccgctcgccgccgcgcgcggagaccgcgccccggagcgcgcgttcgtctgcaagacgtgcaaccgcgtgttcccgtcgttccacgcgctcggcggccaccgtgccatccacaagaagccgaggctcgacagcgacggcgacctactcctgtccaagcccaagctcca

SEQ ID NO: 5974 - DNA, 419 bp, Oryza sativa
  unsure (1)..(419): unsure at all n locations
tgggcacacagaccatttngagtggagggttctacttatttagtccctatctatttaactntccatggatcaaagttgctccaaattagccattggattatcatctgggtttctgataccaacggatgttttgaggatgatgcggcgaatgtccgtgcgttgttctgctttcatagatcgtgctcaggcttgtccaggatgctgctgtcactgtccgccatgcggctcgagccacggccaagctttgagaaggagcccatggccgaaggtagccctttgaagctgctgctgccctcactgaggttgtgagatcgacgcgaccgcttccgggtgagctgcagggatgacggcttgtcatgatcacaagcagaccttgtttgggccaccaccagccgtgagatgctgccaccgcagaatgg

SEQ ID NO: 5975 - DNA, 402 bp, Oryza sativa
  unsure (1)..(402): unsure at all n locations
gaaatactcatactnttgcttttatatattgtgacatacacgcttcaatattcctctttaactgctacgggcttaattgcatcttatacagctggaactagctctccgggacacgcggagtgaggcctagcggtttgtggcctgtctagttcgcgaaatgaaaattttngagggtcatatcggacgtttgaccggatgtcggaaggagttttggacataaataaaaaaactaatttcataactcgcctggaaaccgcgagatgaatcttttgagcctaatatatccgtcattagcacatgtgggttactgtagcatctatggctaatcatagactaattaggctcanaagattcgtctcgcaatttcnccctaactggtgcaataggtnntcttttaatcta

SEQ ID NO: 5976 - DNA, 453 bp, Oryza sativa
  unsure (1)..(453): unsure at all n locations
acttattatgagactcatggcaatagcttatgttaatgacattattaaacagcaattagcctggtgatgactgcaagattccttttccatgctcctgtggtgacactggtgattccttttctatatgtnttaattgtgtgtggtcacccctggctgatggattaaaagtacaaaagttactccattaacagctcactttggctagaatagcagggggggtttagtgtaatgtaatctgggccgtatcaactntggtgaacacatacctcacacaatcccttagtttattagccataaactggcgcaatgatctccttgctgagaaaagtttgggcaaggcctcanggattaaagctgtaacgcgtaagtgcttatgcaatgttgacaaaatttgtatcccaagcaatcttgttctgctcaactcttggagttgtataatcccgacaccgttga

SEQ ID NO: 5977 - DNA, 325 bp, Oryza sativa
  unsure (1)..(325): unsure at all n locations
gctntctttctcttccgccattgattctacccgattgcgctgatttgattcgagggatggcttgggagaggggaggaattgaggcggtggatcgcgggatagattttgatgaactcttcgaacgcggatttgagtggaatggtgaaccctagtttgccggcgcatctctttactgtagcaaggagtggggaaaatggcgagagttccggcggngaagacgaagcgtcgctcggatctcgggttttcttgttagggtatcggaggtgcanatgggcctatgcctgaacagtacctcattccaatatgtttaacagcgtggcccatt

SEQ ID NO: 5978 - DNA, 431 bp, Oryza sativa
  unsure (1)..(431): unsure at all n locations
ctaagcttgtatttgctagagagtgaaccattcatcatttgtgttcttatttccagcatttcgggtctttctctttgccagcttgaagaggtttggtgctatgtcctttgagcaaaacccatagagccagttgtccttccaaaagaatgttttntttttccatttctgacttgaatttcagtacatgcttggaagagccgaatgtctttttcattgcatggcaagtccattctctggcaaatctcctgaaccatttcctgacggttgttcctaattgacattgcttccagaacgggtagtcctcgttgtcaccaattgaagtagaagacgggaggagaaatatggaaggagaaaaacagttactaaggaacctctttactcttgcttttattaatcaactggaattgttctgctcttgcgttaaacacact

SEQ ID NO: 5979 - DNA, 362 bp, Oryza sativa
  unsure (1)..(362): unsure at all n locations
agctnggtattgatcctccaagggggtcctttgctatggccctcctggaactggcaaaacacttcttgctagagcagtggccaatcgtacagatgcttgttntatccgtgtaattggcagtgagttagttcaaaaatatgttggtgaaggggcacggatggtccgggaattatttcaggtatgtgcaacattgtgaaaactcacaagaacttatcaattttctgcacttaaagtgcttctgtttgacaagcatgtttctgaaaaaaaaaatgttgacttggtttagatggcccgctcgaagaaagcatgcattgtcttctttgatgagggtgatgctattggaggtgctcgcttcgatgatg

SEQ ID NO: 5980 - DNA, 419 bp, Oryza sativa
  unsure (1)..(419): unsure at all n locations
cctaccaatattcggtaggagccttctaaataactccttgctaatgcgaaggaaatcaattcaattgtcctttctttttattcattcattccactaacagaatgaagttgttcagttgtcctttatttattcattcattcccctaacagaatgaagntgttggatgctgctcacgtcgttcatataatttaatcttgatccaaccttcttctcactaattatatataattacctaatattatccgtctactacatatatttttttgccttgattattaaaaatgtggatgttgtgccattaggataaaatttcaatatccgggaaggacatcatgttcacgctcattgctagacgctcaaggcatcttgctggaaccagtgttgtacatgtgctcattaagcaattattttccttacta

SEQ ID NO: 5981 - DNA, 362 bp, Oryza sativa
  unsure (1)..(362): unsure at all n locations
tccttgacggcagcgacgaaaccaactttgacaatacagctcctactagagaagatcttcagctctggtgtgggggaaaagagagcacgactgagtactacccactgtactcaccaagtcataccggaagaggaggtatgatgcaggatataaccaaaggaggctagaggttctcttgcataaagctagcatttataagcagtagttggtagcaccaaaacagctgtagtaattaaacaatattaaccaaacactgtncaacgctacaccacgttgcaacatgcccaatcaaccctctgaactacaccagttcattaagctatactaggggtgagactaatcacngtgaatctggttgatcg

SEQ ID NO: 5982 - DNA, 365 bp, Oryza sativa
  unsure (1)..(365): unsure at all n locations
aacaaatgttacgtatcacacagagataacaaactgcgtttggggccagcaagatggttccaaaatgcttgaagctttgaagccatttatactatcacaagaggnttctgtttgtgcgacttgtcttgtactgttccttgcagcacaaaagtacaatcagcattctcatctgcaagatatctcaaatgtgattaaaaataactagctgaatttcgaaaagacatacaaccactgagaaatacaagagatcagatgccatcatattacatggagctatgaataaatcaaagtatccaactcatgtatgacagtactgacacaacacacaacatgtgtatataccccataaaaacattgatattaac

SEQ ID NO: 5983 - DNA, 425 bp, Oryza sativa
  unsure (1)..(425): unsure at all n locations
agcttggctcanggattctcactccgatcccactttctcgctatgcatggtcctncttttatactctaaggggataccacatgtgatgcgagtgctacctatggagaagggaaaatattttctatattaattacatgtcttgtgccttagcccagaagctatctgcacgtcggttgctgcgcggngcccatcaaatcatgcagggcgcccttgtcattcgccatttaatagatgaggacttccgggttctcattcacaccaggaaacgggaacccgggtcagttcagagtgtgtggaccagctctgaccggggtaagaggctttgaagcccctcatcattatgatgagatgggacagagcacaccgctcgccgcctgacacactgacagagcggnggtacacaagtcgcgtcccatcggtcattc

SEQ ID NO: 5984 - DNA, 417 bp, Oryza sativa
gaaacgctcttattgcaccaattctttctctactctcgaagtagagagatagagtccttgttcacatatgtgtacatttgctttgaacagagcactacatgtaaataggggccaacaataattacttgaaccaaccgttcaaaacccaatttggaacgatatgctgatcctgcgtaaagatatgaaagagcttgccaagcatgacacaagttatgcaaaactttgttccaagattaattatggcttgactgctcttctgacagcaaagttgatgcagatttaccaagtactacatcacccatagaacatacaaagtgttaactgtaatatgttagtacctcctgatactttctcagagaccagtaattttctctgacaatatatactacttctccaaaatggaatgttaacatcacc

SEQ ID NO: 5985 - DNA, 305 bp, Oryza sativa
  unsure (1)..(305): unsure at all n locations
agcttctcctgtgaatgatagcattatgcagncctatcacatcttcacagaaccaatcaaggatgcagtcactggaacaatgccagctatatctctctagaatcaanatgagcagccatgtttgtgggtttcagtccgctacttatcatggtgtaatcgaaagtttgcagcaatcatgtaatacagaaatatattcatgtctatanacagtgagctngctatgcttatggatgaattcacgtgagaatacaatgtaccgatgttaagcacccgccctttttgtttaaggcagcgcctcgtattcg

SEQ ID NO: 5986 - DNA, 435 bp, Oryza sativa
  unsure (1)..(435): unsure at all n locations
tgtatgtngtgaataaataaattcccaaagtattgggcatactccatgcgcacactgctttaacagacgtgctttattccctaaaagacacatggtttcaccacacctggaaatatatggcatatgtgtgtgtaaatccgagtaaataaactcataaagggattaccaaccgcctagaaaatgaccacaatatataatcagcctaagccataatattggtcaataaaaaggcacacttacgtggcgagaagcaatgatattgtatccaatcaattgcttaaaaacccaaacagcaccttgacttatataaaaaagtcagcgggacagctatataaagctttactgtttgacaccttttaagatgcattgtaccaactcctaaagagttaagtaactgcggtataaaagggatttaatgtattgggcactcgatca

SEQ ID NO: 5987 - DNA, 452 bp, Oryza sativa
  unsure (1)..(452): unsure at all n locations
acaatttataatatataacggcaaaatttctatcttggtcatanaatggtactgatcgatagaatantttttagcataacaaattcggacagtgagtaatattntatgacgaagaatatactgacacaagtcaaaattcaactgccatcccacctacccagccaccaacaaaccctttttttgctattttaccatggtagtatcacctaagagcaggtacaatagtaggctataagccagctattaacatattntanaaagatnaaaaaagagagagaagagcagcgggctacagatctgcagctggctgcagtacggactccaagacataatgtgtgtatgacagatgggaccaggtactaatagtatagtaagcaattatttgagtaattagctattacattgactatagatatttggagctatagtggctatacagctcctatgagctt

SEQ ID NO: 5988 - DNA, 443 bp, Oryza sativa
  unsure (1)..(443): unsure at all n locations
agcttcaataaaacgatagaaacccatctagctctgttagcatctttagtccctgcanatgaaactgggaggattccaaggcagaccgactccttcgttgaaaatgttaaggcgatcacgacgaggggaggtaaatccactcgtgatccgccgtatcctaaccctgcaggaactaatgggatatcaaaagaagcgccatctaatgactcgactgacaaagaggttcagcgagaaaagacagtgcctcangagtactgcgacacacggttgctgccattccctcaacggagtagaaaaccgtcagtggacgagcaattcgcttcgtttgttgaagtaatccagaagatccacatcaacgtgccattgttggacgctatgcangtgccaacatatgcccgttatctcaaagacatactcaacaacgagagaccacttccaacaac

SEQ ID NO: 5989 - DNA, 359 bp, Oryza sativa
  unsure (1)..(359): unsure at all n locations
atttagtgacaccatcagagcatttgcctagtaacaccttatagcactcaaacaattagcattatttcgtgatacaggacacattggttgtaaaaagatacagatgaaatctacctgattactcttaactnttccatatcagtcacctaataatcaattatgaaactacataacaaattcaatcatatcaaccaaaactacgagttagagagtacattaagagaagattgctcccatgaacatctncatacagaaccaccaaaaaaccctaaactcatgtctgattgctatggaatgaatcaacaactatcacccgtttcacaccgatatcctgatgccactatacagtatataacaca

SEQ ID NO: 5990 - DNA, 452 bp, Oryza sativa
gcttcatcttgcttaccactgggcaccagctgtatgtatggatcacctcatctcattcttggcccatcttagagcgggcattgatgcccactgcgtagctctgcttcatgatcacttggcgacaattgcgctttattctttctagatgatggtatacaaactacagctattgcataattttacatgaacgctcggcaccgatagcgttattgttcttagaaaagaataaaagtcacgacctctacatcatataatgaatggaataaaaatcacggcctttgcatcatataatgcacgcaaccgggcaccaatggcatgcatctgatgtagacatgtgcctatcatttgtgcatgcactcttcacatgcacacttcatgttcctagtaataaactaatctcttgtgaacaatagaagagcgcgacactagatgaattatgcgttgatcgacag

SEQ ID NO: 5991 - DNA, 331 bp, Oryza sativa
tatatatatgcatgtacatatatgaccagattccgtcacctcagatgtgtcatatccgtattacgtggtatttttatggactgagggagtagataacacctgcagcttggacggtatggttggtcatactccggaggagccgaacacaccaaggggagatagacttgatcgccggctggacatgtcacctgctgctgtaatcggagtaaggttttactcttatagccggcaagaatattatataataattattattacgattagttattttttagaaattgataatattatttaaagcactttttataggaaattaaaaaacttctattta

SEQ ID NO: 5992 - DNA, 432 bp, Oryza sativa
  unsure (1)..(432): unsure at all n locations
gcttgttcttacgctctgtcatctatgaactacgtatgtctgtgagaatttcctgngagatatgctgcctcctagctcattagctccattcatggatgaaatcaagaagcgagagaaacagatgaaacgaactgccaagaaggctagaactgctttgtatagtttattcaacatttcgccatcagtagtcatatcatgactagtcgacttttgaaaatctggtagtcagaactgtagtgtgttgtctgttcaaaatttctttagtttgtattttgcaagtggacactattctcagatttgccagcaactaatccctgtggatataataatgctggcaaatagtattttatagaggcgcttttcaaggagtcacctatcaacattagatgttactattngctggatgggccattcgttcttatgatatacgca

SEQ ID NO: 5993 - DNA, 470 bp, Oryza sativa
tgtttcaccttgtctccctactatgaggccgagtgccacttcttttctgctcaactaatcaccagattcccaaggaacatgtttctttcctttgcttccagcaagtttacacctagtattcatgtgctctatgttctccttagtggtctcatgcagttttaacatcagttcatcacattgttttgcatcaaagttcaccctctctgaagttgggaggggcaaaagatcaataggagcacggcgtagaaggccataaataatctcaaaatggcacttcttagtagtagaatgttgcgaacgattataagcaaactcaacatgagacaaacattcttcccacattttaatattctttttcaaaatagctctaagcatcgtagaataaattctattcacaaccttagtttgttcatcagtttggggatgacatgtagtagaaaataaaagtttcgtccccaacttactccaca

SEQ ID NO: 5994 - DNA, 403 bp, Oryza sativa
  unsure (1)..(403): unsure at all n locations
gcttgactccttcgaagaggtcaaccgcctcaatgaggttctatcccactcatcagcatattccacgtagcaaggatgagttgcttgtcagcattgagaggatgcgcaaggaggctgaggtgaagctctccatatttgaggatgcaaaatcagcgtttgatacgacagagatggcggtggaggccggatcggaggtggagaggacgaggatggccactcttgctgctggcaaccaattcatagatgctaaaaggattctcanagaccttgagcaggcgggcgaggttgcactatccctgatagagtccctcaagcacaaagctacatctgtgggtggtgccaccactaagtcaatgttcatgggatgtggttcggtgccaggtaacgctaggagtcagaatct

SEQ ID NO: 5995 - DNA, 495 bp, Oryza sativa
  unsure (1)..(495): unsure at all n locations
ttaagaaatcaaagactnggctagaattatcaagcacagcataaatacaccagtattgtacaagttatgcctccatttgctacatttatgctcagtcagaatcagtcctttcatcatcagagttattactactcggctgaaggtcggtgttgcggaattgatctacgacgtcacttgcaatcttgtcagccgcattttgagcattgctgataagatcaagagcagcctctacgcttgtcccgtctgcaaagccatcaatggcgtcaatttcaatcctcgggtacaaggatttggtcatcaccaatgccgtgctagctcccatacttccagctttcttgatattcttgaaatatacatcggagcaactctcagcttgtcgaagatttcggttgcgtcgagtacactcggaccactgttattgatgaacatagcttggacgagtggtatagcgacattagcgacttcatctcttgctccttcaagcctcttgatctt

SEQ ID NO: 5996 - DNA, 196 bp, Oryza sativa
ggggtgaaccaataaagtttgggtagagccgggtctaagtgttggctaagtaaacgccccgtattaagaggggtagttatgaactctgtggaccacccccatgggggcggtgaagggaaagccctcattggtagaataaaacccacaacccctttgggtatcctgcgcttggagaagaactatgaaaggaaaaata

SEQ ID NO: 5997 - DNA, 452 bp, Oryza sativa
  unsure (1)..(452): unsure at all n locations
agcttnctgcattgagtaatgggggaggagaaatattgttcttgttctccatgaaaacacgctaaaatctggtaaaaaaaattcattcggaagggtgtgattttgggttgtttaaggcacggtgacgcttgagatcttatcacattgaaaaaccccagaaaaaaaatggtactcctttttcaggatcttatacctgataggtatataaacaaaggttttcggtacacagggaaaacttttggagaactgatgactgcacatggttgactgcacaatgttcacttctagtttatatcctctttggattcgattgagtttggatcttcttctacatgcgctgtccattccaaacttatctcatttatatcctctttggattncgattatacctaatttattggcaaacctaangtcggatttcctcctgtctattatgtnctgttatatggcat

SEQ ID NO: 5998 - DNA, 479 bp, Oryza sativa
  unsure (1)..(479): unsure at all n locations
agttgtatggcaccaaactgttcacttgagcaaatggtccaataatgaatatatgatatgattttttttgctttgtcatggtacgttgctaaccttctggtgcagttttctcattaaaatattttgtgcagtgaagaaatgcatgtttgtgttgtaagatgcttttaaatttattttacaaatggaatgtatgaactatgaacacgtcaataatagtgtactgttaagtattggttatattttttattttaaaagttcagcgtgttaaatgaggtttcaaagatgctttgaaatttattgtgttatatgaaatatgttgccgcaacaatcataagatatcaatatacgtgtcatctaggtgcacttggctgatcagctgttggagttgtccatatcctccgggaaaatgtgttaatgggttatgcggngtcgggtacatttagacatgcgggaagtctgatagtaaatatatggagaga

SEQ ID NO: 5999 - DNA, 441 bp, Oryza sativa
  unsure (1)..(441): unsure at all n locations
agcttgctactatgtatctatgtatatttggatagacaaagaanaacactnttagcacttgtgttaacttgtgaccatgcatagtatcttttagcaaagatactatgtatggacaaagatacatatatacaaagatacatagtagcaaacttaatacaagtaaacttttaggattctatatattaaacaataatatctctcacatcatatattgttntttagaaccgttttcaccataatactttataacgacgttacagcgagacaatagtcctggtactatatgatgatcgagacaaaaattcttttataatgttattactgtggaaagtagtcgtgttaccgcacattgattgtcccattactacgccgttctagatagacgagaacttaanaaaaagtagatctcaatctttagagggcaatatctctcacattata

SEQ ID NO: 6000 - DNA, 412 bp, Oryza sativa
  unsure (1)..(412): unsure at all n locations
aatcttgggtatacatctgaatatccttgaatcactagtgggcccaccccttgctatatgtagaatgagatctgttttattcaaatagcaatgtttcatagaaaattggtttaacgagttcgtaagcttttggaaataattatttttggatggtacgctttaagcacagtttctgcaatccagtcctcaagaataactttagactgtaactaatattgaatctcatcacagcttactttggaagggatntgttnttgaagaactttgaaaacaaaacttgaaagaaatcttttagtttgtaatctgtataacgaaattccagtaaaactattngaggtgggtgtttgtatagtctctaaagctcacttctgtaaatagttctctttntacaagcagcacaaagatataaacc

SEQ ID NO: 6001 - DNA, 364 bp, Oryza sativa
  unsure (1)..(364): unsure at all n locations
agctcgtcaagtcacatgtgatgttgagcaaattgtctaaagatganctctaattggttgtggtgtgtacaagtattacctatgcatcgaccaacaataacccaggttttagatatgttcgagagaggtttggatgaactggaaatgccaccataacaaaatttcagtgaattactgtaagacactttctctacacatttttatgtggactggtnatattttcagtgaagttcatctatgctatttctgtttttcagagaccattcagttcatgagctgaatacagaaagtaagagttctactggaaataccatagctgcacaagcttagtggagtgtaaaggttgaggagacaagcctcgtga

SEQ ID NO: 6002 - DNA, 421 bp, Oryza sativa
agcttaccgagggagtgggtgtcttccaacgattttcgatcacggaggagaatttcctccccctttttggaacgtagccgccactcgttgtggcagcagcggcagcaacatcggacgcctccttggcgatgtcctccttcagcgatgccgccacctgatgatccacgagcggcccgatgatgtcagtcagagggagagcctacgctttatgaagtcacaatgcgatcttggaataaaagtgcagaagggctgccgagtacacttacattgatggcagcttcgcgttcggctgcccccttctcgctaaggggaacaaggacgtggcttgccgttgtcgggccgctgataatcaactagcccacacggcgctcaacggcttcgctgctcagacctgtgaatcgagaaccaaaattcgataagt

SEQ ID NO: 6003 - DNA, 442 bp, Oryza sativa
tccactctgaactgccaggatgctccaatttcccctgtagactcaaacatgcaagcgatggcagatctcaactcatggtaatttctaaaccctgtaacatcgatagatcttccaactgatccttgcttttgaacctatgtattacaaaaaaaaacataatagatagttgttaagttatatttactatcaagagcatttgacaaatggtaacatataaacagtcaagtagtataaacctttgtatatgtccgcactggtggtttcatcggcttcgcacttcggtcaaggctgtactcggttgcatccatactgcaagctgatgttcccatggaattggtatgaatctctggcaaagacaagaattgggattcttttaaacgtggcaactttgagtacatccctgcatcaaagcccccagtagacattggttgagagcatgaag

SEQ ID NO: 6004 - DNA, 433 bp, Oryza sativa
  unsure (1)..(433): unsure at all n locations
agcttagattaattntcataaccgaatatagcatgtatatgactatgggcgacttgataattcccatcggccgattccaggcctttgaaaccaatactgactctatgccgatgataactttggggcttaccaaatttcactgttaatagtaccgaggagagtatggagcctgagattgagttcctcctcgttgccagagacatttaccctcttgatccccggtcgcaaatagttgagccaccgcaactgatggaggtgggcacgaggaggacggcgatgcagatggagacagcatcggctagctcgtagccttggcgatgggatcagatagcgatgggcgacgggatttagcggccatctagatgggtacaaggaggacagcgacgtgttagaggaggagaaggaggagacggcggcgccatgaaaaatggat

SEQ ID NO: 6005 - DNA, 445 bp, Oryza sativa
  unsure (1)..(445): unsure at all n locations
agctntgtattcaaatctatggggacccccggtttaaacaccggtnatcccatgtgtcatatagtactattccctggataagtaagtagtacacacatagcacaatataatatcacaactgacatcgtttacaggtatttctacattaataatacatgggtatcccaaacgggtcccaaaatagaccaagcatgctcacatacattacaaaatgccaagtaaaataaatgaaacagcggaagcaaagcggcggcggtccatcgaactccacaggcaacgtctcgtgaacctatggtccctaatccatcgtcttcgacacgtacttgacagcatgcgtggatgaatataaccgactccaactcctttctaaaagaattaattaagcaagggtgagtacatacatacccagcaaaccaccacttcataatgaatctaatgcacaccg

SEQ ID NO: 6006 - DNA, 403 bp, Oryza sativa
tctcagagcactcatgagacttccatctattatcctactaaacttctggctggttcgttagttctaagcgaatctggaattggtttgtgaacactaacatccatcgatattctgaaattatcaggcttctatacatctacaggcttctgtaattgatacgctaagggcccctttgaatacacggcagaaaaaacattggaataagaaaaacacaggattctgacacgaattatagtgtaaaacaaaggaatgcataacacacgaaaaacacaggaatggtctgttgattggagcgcacgtaaaacgcacgaattggatgatagagatagactcaaaggaaaatttccaagagggtggagctcttgctaaattcctccaaaaccacatgtaatgtgccttccat

SEQ ID NO: 6007 - DNA, 458 bp, Oryza sativa
  unsure (1)..(458): unsure at all n locations
gcaagcttcactagacagaaaaaatgtatctcctatattcattgtacagaacatgcgagcccacacgctgagatcagactgtcaataccaatatactcacttcattccatatggatgattatatgagttcttcatcgagataaagggtgacttaactaccatatatttcattttatacgagtatgtggaggttggatttctatttaatgggagtatgtggtggagaacaataaagaaacatgcatactttaactttccacatgcacaagatacgaacctttaactatccctaaatgcctgcatgcatgaatgcacactcaatttacatgcatagatgcaataatgctacatatcaaatgaaggggtcatggntatgatcaatatggaagttttatcttggtatatgataaataattcggaatgaacggataccaaatactataaactacctcgttaaa

SEQ ID NO: 6008 - DNA, 412 bp, Oryza sativa
  unsure (1)..(412): unsure at all n locations
ttaatcgttttatctttcccatggttttttctgacggcacgttacatcggcttaatactgaacgatacgtcatcggcaacccagccgatcggctgttgtttatagaattaactttgtttcatctttggtttcttgttggttgcaggatcaaaccaaatagcacgctcaaaactcgaaagcaattctttggacctgcactggagctaagcagaactcccagtgcttgtttttttccatcgacactaggataattaggtactactatgtcctananatagacaaaccctacctatatatccgatggattagggttttttatttacattacatgtgcatacttcacagcatatcatgtatgagtattttctaaatatattccttaggtacatgcctagaaactccagtctatata

SEQ ID NO: 6009 - DNA, 357 bp, Oryza sativa
  unsure (1)..(357): unsure at all n locations
acttntccctcaccttccaccatcctctttctttcctcnccctgtttctgacccaattcatcttaggaccatcagtgaagtctgtttctggtccctcacccctccctgcacagaaaaagtctagtttcccttctccctctcttcttttctctccctttctttccccctcttttgaggctggcttggaagccctatctcagccgagccgagccgacaccacaagaggacggggctcgatccccttctcgcgcacgccttgccaccggtacacatggcgcacgctcccagcccacattccttccgacgctaccacgcccattcgccgggggctcgcccttgccttcccaactctcttgg

SEQ ID NO: 6010 - DNA, 460 bp, Oryza sativa
ctccatgcactaatcctactctatcttcaattcttttattttgacctacgctataggttttaagtcacaatattataggacaaatagatatatttgctaggttccttcatgctcacatgtttggtcaggccattgacattgggcatatgccaaactacttgcagatggatcaatttatatgcacaggaccaagctaaattttttgccgactacaaggatgcatacatcaagcttgtaaatactggagcctcatggagatcaacttaattttactcgcacacagctctctctcgtgtacgctattatgcacgattcaaacgtacgaacctcagagaatttttgtggaaaacaaagcaatggaggtctggatatcttaatatttactccaaagacaagctgtcaccgtaaatttcttactgttacgaaatcatagtcattaaataggagtgtctacatgaat

SEQ ID NO: 6011 - DNA, 462 bp, Oryza sativa
  unsure (1)..(462): unsure at all n locations
gatcttaagtcacctgcggcatgcaagctgtanaatcctcatacgagaatttctccctgattggagcanacataccctgaanagccaaatcggctaactgggcattagttaaactcaagctaaagcacttattcctcatctctctgaacctctgaatatattcatgcaccggttcgtcatgtttctgcctgattgcttgtaagtcagacaatttcatctcatgtaccccactatagaaatagctatgatactgcttctctagatcggaccagctgttaatcgatccatacggcaaagcagataaccatgtaaaagccgatccagccaaagacaaccaaaacaacctaaccctcaaggcatctacagctgatgcttcaccacactgagctataaatcggctaatatgctcataagttgatgtactatcctgccctgagaactttgaanaatctggaactttga

SEQ ID NO: 6012 - DNA, 391 bp, Oryza sativa
tgaagagatctactcacagatcttctaataatgtgaacgagatatgctagtagctacttataataattctagttgatcaatgtcgactgatattgtataaatgaaggaccaatccatatgcttcacatgcagatgatatatacgtttctgcaatgtagcttcaagaggtattttacgcaatcttatgttatatgtttgttctgattaataacagagtttgtattttctagctaatgccatagtgaaaacttattatttatatgtttgaaataataaacaatataaaaatgacgtacatgcatgtcaacccactgtgttttatatgcatgactctggatatgttctagaattgctttcatcctctgcactgaccagcgtgtacaaaaccata

SEQ ID NO: 6013 - DNA, 444 bp, Oryza sativa
  unsure (1)..(444): unsure at all n locations
agcttgtgcaanagtctgtcgcanagacttatgttatcttanagtttgttagagataagagttgtgtccgacaaggacatactttgtaatctcgggtataaatagaccccgagccccatgtaataaaaaaaacagacgttcaaatacaatctcggcgcatcaccaccctttttactttcgttgtgtttcgacgagttcttactttcgggttgagctgcatcggtttcgatcttcaactagaggtacgactcgttatggcggcttgcgttctcgggattagtgcttccatcattatgatactctaatgttgtctacgtaagttggcgagttatcatatattctacataatctctagcaatatccgtatctaacctacagtcggctaacatctatcactaggaggcagccgaataggataaataccgatgttgattagattatata

SEQ ID NO: 6014 - DNA, 393 bp, Oryza sativa
gaacgaatatacgtttcaaggctttggtattcatgctagtctatctatgtatcaattattccactttctgtttattaagccctattcgtatcaaaaagtcttctttctcactttcagttttactactgacactgaaatgattttttttaacgaatatcatggtttagattattagctctttgtgatgatattataagaagttactgtactcatttgaattttgaaatttgcatagagaaattctggcatatcatgatttgtactttacaacttgaatatgatagttgatatatctcgatttaaataacaccatatatctgaactgtgtggctaactactgtctttgttgagataaacaagctggggcatcattgcaaagtgtggtattgtgac

SEQ ID NO: 6015 - DNA, 387 bp, Oryza sativa
  unsure (1)..(387): unsure at all n locations
atgctctagaagctcttanaatagaatatatgcaaagaataagaatcaattcattcttgaatggataagcgcaatagccatagccgtccatagataccgatattgantataatctacttggaggcgagacaagacccgctagggattgattcacggatgagggaccatatgcgtgttcaactgatattaacacgcccggngtcagttcagtaaagtaataccttttttcctggtcggagactcgcaaaacaagttatcaaaaagatgcgagaaatccaaaccaatcttctcctacggctgtagaaccacaggaataagatgcttcacggcatcgatccggaccaggatgctatgaatacttggtgtgggatggaccatacccagcgt

SEQ ID NO: 6016 - DNA, 282 bp, Oryza sativa
tacccaccggttggctccaaaaagctaggtctgacgacaaactacttctctatatgaattatacaattaccaagagaagacttgttccctatgcaaatgcaagaaacacaggctagagaatgaatcctatggtataaccgtcccaacacttgattgctgtttttaaaaaacatataatcaggaccgttctcattatgcccaaaagtttaaatcactcctattgaccgacatatggcaatcactttaattttcacgtcgaatcaagaactaaatgcttataaa

SEQ ID NO: 6017 - DNA, 400 bp, Oryza sativa
  unsure (1)..(400): unsure at all n locations
agctntagcangcacatgcttctgaactcttgcctgagcaatatcacatggtntgacctttgaataataacacaccagcaggactggtggctatgaccaattaataaatgaatatgtgatgccggccatttggactcctcaccgtgcagcagttatataaaaggtagagcaaggttaatagtataaccaactactagctccaattcatttagtcaaagttaaactactctcagtttaacttcagtgacgtttcgactttagtcaaagttaaattactctcagtttgactaattatatagaaaaaattactagtatttataacaccagcatagtttcattaaatctataattgatgtaaatttcataatatattttcttacggtaaaaaatacttttctat

SEQ ID NO: 6018 - DNA, 468 bp, Oryza sativa
tgcccgcaggtacaccaaacacacacttatcggggttattgttttgttggcggagcggaggatctcaaaagctttctcttgatctgacagtaagtctcttggttgcgcgtttatacgaccaagtcattaacatactcctcaacattacgtcctatttggcttcccaaacgaaatcgagtaggacacttgaaaggaggacctgcattctttaaccccaatggcattgatgtataacaataggttcctacgggggtaatgaacgcagattattcctcatcctccctagccatgcgaatctgatgataaccagagtatgcatctataaaacacaaaatgtcgcaccctcgagtggaggtgacaatcttatcattcgaggcatggggtaatggtgcttatgacatgccttgataatgctggtgagtctatgcacatctatgattgcgttcgcttgggaccaccaccggttct

SEQ ID NO: 6019 - DNA, 397 bp, Oryza sativa
  unsure (1)..(397): unsure at all n locations
agcttggagaaagtggctttggcgccgtgtacaatgtataaatccataacacatagttccttcgttaacttttaaacatatatttgatcgtttgtctaattaaaagaactagtacaaatatgtaaaaatataggccatgtttaaggtactagtaatgataaaacaaattacaagaaataaataataattacataatatattttgtataagatgaatggacgaacatgttcataanagtcaacagcgtcaaaggagtatgtgattataagtaatgggaaacctttctagnttaacctcagtagacaatatacaataaacatgcaactattatntaaaacngggttcaatttggcttgatgataatatcaggaattgaactttcngtctaaagttttat

SEQ ID NO: 6020 - DNA, 387 bp, Oryza sativa
ctcagcttagcgtgtaagaaaaacgaatgtccgacctcccattatgatctgtgatcggcttagacatggctggtgaagtcaccatggcttacgttgtaaaatgggggaacttcaagtagctgtttgctggacagcgtttctactgtagaattggggctgaagatttagtatatattcaatacagctgccttgctgcatatcgcgtatttttggttcccaatctgatgataaaaggataggcatggtagctcaacgcttataaaaaaatctgaatattgactatactactagtttgtctatcaaagaaatcacgggttggtctagtccacaacgcgtatttgccgcgattcacactggacacaaaaggttctctctacattggagcag

SEQ ID NO: 6021 - DNA, 344 bp, Oryza sativa
agctttagcttatttccttgctgagtggaccgagttccaagaagacatgccagaggaaaagatggaatattggactattgccttttgatgggtcgaagaggcttacaggcactggagctggggtcgtcttaatttccccgactggagaaagattgaacgacgtattgtggatacattattctgcgtcccataacgtggcggaatacgaggcgctactccatggattaaggattgcaatctctttatgcatccgccgattaatccgccgtggagactctcagttggttgtaatcaagtcatgatagagtggtcttgtctagatgataatatgaccgcttatcgac

SEQ ID NO: 6022 - DNA, 423 bp, Oryza sativa
  unsure (1)..(423): unsure at all n locations
agcttggacctgtacaagaacaacatttctgggtctatacctccaacactcgggaaattaacgtcccttgtattcttgtgagcttgtgttattcaaatgatctcattgtaatatagttctaagttctcacatgttagctactgatttcatgccgtatatgcacattctgcatacttcctccatttcaaactacaatgcctgtgttttacattcttacttcaaaataaatacgtgtatatcatataagtttatngatccatactctcttctatctttgctgcctcttcatcatttgcgagcaaacacctacacaaactatttctatcatggctatnttctgattaacttcgttagccctgtcatgcttataagtataagcggatgctattgatgtttaaacttacttcacttgttgatttctgg

SEQ ID NO: 6023 - DNA, 436 bp, Oryza sativa
  unsure (1)..(436): unsure at all n locations
agctntctgcatnttatttctgtttcaatagcctttttgttgtgttagaggtaatactagcttgcttctatgatatcagaaacaccaactttggaatctggttgtaagaaggtactaactatgtgctattcatgttcgatagacataaatcagatagtctttgacattatagagtgccaactaatctgttagttccacaacattagtatccttntaaatgaagattgagatgttagtagcacagcagcatcatgtcgatttatgtactgcttgatttacaatgtctatcaatatgatctattgatttctacgatagataatttggtatcacatataaaactcttgcgatctatgccttgttattatggatggttttctactctgttggataacataaatcaagttcaactttgtgaatgaagttttgaactccact

SEQ ID NO: 6024 - DNA, 453 bp, Oryza sativa
  unsure (1)..(453): unsure at all n locations
tattcacattaaaaatctgaacggtatggggttatgagccttatattctgtgaaggtgtcatgcgcggcacagtggttacatgatgatngtgagtgtcaatatcctattctcttttccccctctaatatataggtgtacataaccagttcaagcttacaaatattacataagacatgccacaaccgatcttaaaccatgaccaagaagaaacctgatctcctaacgcaagccaacagcctaagctccttatctccggctgtgctccacatggcagcctcctctgatatagtcctaataatagtactgacactaggggactctccatcagaaacacacccattgcggttcttcctgatcagttagaggcccttcgtttgttgcttgtcaacacaacttcaatgaatgtcgccaccaggtagggaacccactggtaccgtaatgacctctcttta

SEQ ID NO: 6025 - DNA, 349 bp, Oryza sativa
  unsure (1)..(349): unsure at all n locations
cttgctctggctntctgtttcatcatccatggcgcgcgttcttgcagtgaccgagctggtggaaggcgactcgtcgaggaatgtggtggagatcatctgcaaggccgggtgggcgaatacagagaacgcgctgggccgcatcgagcgggtggggaaggtgcacaacgcggagaggtccgtggcgcggttccatgagttcaaggatgctgtgaaggggaatgcggcgaggctgtccaagaaacacccgcgctgtctcgccgacggcaacgagcttctccggttccacgccacgacgctcgccttgctcctcggcgctggcgactactccaccctctgcacgtcgggcagc

SEQ ID NO: 6026 - DNA, 451 bp, Oryza sativa
actaagctagggtaactttttatagccgtacgtgttattacgaaatatctattttcgatcgatcacgcacggagatcagtcctctcccaccacgttacttccttattttattcaccgcattactttcctcgtttagtaagcttatacacctaaagttggtacacatcaagtttatacatttaaagtttgtatacccaaagtttatagttaaaagtttatattaccggtttaaattcgaaatcgaatatggattcaaatatattcttatatacaatatctctatacataaagtcaagattacacatctaaagttgtgatacccgaagtttatatgttaaaaatttatatacccacttcaaattcgaatttaaatctggattcacatatattgttatatagaatatttctatacataaagtctatatgtacgagaatctttatatatatttat

SEQ ID NO: 6027 - DNA, 377 bp, Oryza sativa
  unsure (1)..(377): unsure at all n locations
gtttatcnnaagaatactattccttatggcaaattgagctcttgtgtaattaaagcacgatttgcaatatttggcttgtattcgcatgcttacattcacatccaactctatatncatcacatatctatctatgaactcttatcatattcttgggtctagacgaattctcaggtatggaccttactaacaactaanaatgggctctgacaaaatcttagagaaatggtagctacattagcctgatgacacacgttcgtgtagaggatagtttcaatgtcattgatggcgcatgatatgataaataatcatcatgtgctaacttgccccattaatatcacgtggtccaagatacttatatattgatggaatttaaaata

SEQ ID NO: 6028 - DNA, 379 bp, Oryza sativa
ctagagggatgatcgtgtgaggcggctgcatgcgtcacacttgtcttctttcttttggtcgagaatgagcggcggatcggtattaaatgcataaaatgtaattatgacacctactttagggaggttgtagtgcttgaagcaccgtcatcgtcctcattcatgggatcctacatatggattagtacgacccgatagtcctgcatctatacatcgatcttttcactcacattgtagatgttgccacacacataaaaccaatctccaaataaatgaaattctcttggaaacatagacacgttcgtatttaaccttggactaccaatacatcggttcgatcgcatttaaattatagtcaataatataatacgcctatattaaa

SEQ ID NO: 6029 - DNA, 186 bp, Oryza sativa
agcaacaccaggccacggtccagactcagcccatccacggaggagaaggtgaacgtgaaaaggtcgtcttatcttctctgttcccgcagctgcagccgccgatcatcctgcaggcgccgctcgagctggcgcggccaagacgatatggtgcggacgcaaggtggtgcagatgccgtcacggcggag

SEQ ID NO: 6030 - DNA, 451 bp, Oryza sativa
  unsure (1)..(451): unsure at all n locations
ctaagcttgcttaaatatcactacaatgtatgcagcttctattatatttatntctgctctttaatcaatgagctgatttctaattatctggcagtgattngtcacataacatgcttaatggaactattccatcgaacttnttacggcttccttatcttcagctattggaagttgtaacatttagctttgttaatcttgctccagatagctttgtgttcgatcagaattttttttttgcacctacttcttcttattccaaataaaaatcacagacctgtgtgttctctctctcaaatagaaaagaatgtattttagttttttctttaatggagaggcagcagctctgtcagttatacttagatgaggggggggggtgttatattgatacatattcaagtaatttagcaatttatatctactcatctaattatctcatttcgaaatttaatac

SEQ ID NO: 6031 - DNA, 404 bp, Oryza sativa
  unsure (1)..(404): unsure at all n locations
agctntataattgtgctntgagagcctcatctcatccnctntataatctctctctccatgggaagcaaagtaaggtgtgaaggcacctgagaggagagagcttgacaaagagcatcatgcatgatgcccaactaggcccacagtatggatggtgagggcgtgtagcanaaaagaaggcataacctttttgggtgaaaaagaagaataggtcanggagtttgagacaccaatgaaaggaagagaaaggattagtcacttttgaaggcagaaagattgcactactaaaagtcatggngagaaggagaaaagagctcctgtcttttaagatgggctaattgcgaagtgggatgcactctgcagcaaagatgcccctctttgcataaagggagcaccccttctttctg

SEQ ID NO: 6032 - DNA, 460 bp, Oryza sativa
  unsure (1)..(460): unsure at all n locations
ngactacaccccgtgaatcaacacgtatattccctgtctattatctanacacagaatgcagcaatataacatcttcataaacaactatatcgagaatatctgtgtgagatatccatgcatggctcaacagccatacatatgaaaccagctgtggtgcaaaatgtatatttaccttcacatcacgatgtatatgcccatgatgatgaaggtactccaaacctttcaggacttcacgaagtacacgtgcaatgacagcttcttcaaaaccatctggatagactgacttcattatgtgaaggcaagaccctccagccatgtatggcatgaccacccacaacgagtggttatatgtaaatgaacaatgtgccttcatgacgttaggctgatctatgagaatcatcgtctgagcttcacgcatgatgttgttctgcgtcaagcatatccgtgttactatatttta

SEQ ID NO: 6033 - DNA, 424 bp, Oryza sativa
  unsure (1)..(424): unsure at all n locations
tgttattacgttgtggtttagatgaatgtgtaaaagcttaagaattganggttttacgtgggctaaacaaagaaattcaggacatgcttgattgtcaaagatatacatctctttctcatttgttacaacttgcttgcaatgctgaaagttaaatagaggagagagacataaaagagccgccaatcccattgttcacactcaaagtcgaggcacctncatcatctgaagaggacatcataggtaaagtaaatggtactaaaattaatcatggtgagtgcattgttaacgaagtaaatntgtccacttttcatactaaagtagagcaaccgttagtggaatcaaatgctggaattcctttgtcacaagttgatttactcgctgttccttgtgataaagaagagttgtgtgataatgcttcacttat

SEQ ID NO: 6034 - DNA, 408 bp, Oryza sativa
  unsure (1)..(408): unsure at all n locations
tgtnntgggctccccataccaccgtatcaactctagcttttttatttcaccagcgcacatggcacaaggctccagggttacatacaatgttgtattctgaaatgaatttgatcagaaattttctaatgaagatgattcaaacaaaaagtaaattcatcataaagtacatgaaaacctttcatttgaaaaggatctgaggaatcctcacaaaaaggatggcttacacttaaaattttgtgaactggaaagcaataaccttactactctaaaaaaagaacatgtgcacaatntatcaaccaaaacataagggcaagggcaagtctgaaaataaaagataattagtgcatagaagtatttatgcataatcaatcatccatcttcaataccaagcgtctaacttgtgatcat

SEQ ID NO: 6035 - DNA, 283 bp, Oryza sativa
agcttcgagccctagcaatgtgggagtggtacgatgatgcggtgtggctgctgcggcggccggcggtggcggagattgcggtggacatgctgctgtgcgcggtgcccatctgggcggtcgtcattatcgggctcgtcatctgctgggcgtggcggccgcgatggacagagctgttctacctggggttccgaagccagctccgccttctgtacgttcccccgggcctcggcgcgcgccgcctctggctcgcctgtcccgcgctctccgccttattcgtcgcgcc

SEQ ID NO: 6036 - DNA, 432 bp, Oryza sativa
  unsure (1)..(432): unsure at all n locations
tatgtttctgacattagagaggttacattctatgtcctccttttctatgtataaatactggtgtcatcattaattcattgctgtcattgtttgcaagatatttctccttacattggctatgatactttttctggatcacgtatactatagtgaaaatatagttaaagtgcctgtggatatgatagagggagaatgtgatgtcaaaaagaagatcgacatctcaaactcagatgttccagtgatggttgaacatgaatttttctgtgaacatttctatgatcctgccactggagcattaaagcaggttagtcaatagctaatgtaccattnttattcagcaatgttagtttccatagttaactgaatgtgtgctgtatatatggaccagatgcctccaaatgttaagctcatgtctgtgcacaaaacgcaact

SEQ ID NO: 6037 - DNA, 369 bp, Oryza sativa
  unsure (1)..(369): unsure at all n locations
tcaaatattcggagcagggtcgtgcgcttaaccttggcctccagcgcatctcttctgcgccggggttctctagcttcggaacctcgccagccggacgacgacaattcgaaaaaaattctccctgacaattccggttaattaaatatatggtaattagagttttcttctggttaaccaaagtgatttctatagaccatntattagtgaattggatctaagggaagggaaactccgggtgtgacaaacttaccctcctatacggaatctcgtccccgagattcgaacgaactggcgaagagatggggatgggcggcttcaactcatcttctctctnccaagtgcnttcatcttcgatgatgctctactaac

SEQ ID NO: 6038 - DNA, 393 bp, Oryza sativa
  unsure (1)..(393): unsure at all n locations
ctggggggcgcatccgctctatagctcttatcttctcgagggtgggctcgatgcctcgggcagagaccaagaacccgacaagcttgcccgcaggcacgccgaacacgcacttatcggtgttcagctttatgcgggcggagcggagaanttcgaaaggttccgctagatccgagagtaaggtcttttgtgtgcgcgtcttcacaaccaagtcatcaacatatgcctcaacattgcgtcttatcttgctatccaaagaaattcgagtagtacgttgtaaagtacgatctgcattctctaacccgaaaggcattggcgtataacaataagttcctatggcggaatgaattgcagtttttctcatcctcctaccatgcaatctgtgataccaagttg

SEQ ID NO: 6039 - DNA, 415 bp, Oryza sativa
  unsure (1)..(415): unsure at all n locations
ccatctacacgacttgatgaagctcatattctttatataatttagcaccacttattgatgcttgtagctttacattatctgaaaatcttttgcgactgcattgtaccttctttgggtggcaccccatgaggtacgttgtttctctccttttgtaatgaaattggcagagctcctgcctttcctctctaaaataaaatatatcggctaacatcccttttcttttcccttataataacatgctttaatagagctatatagaaaacaagatgatcctatgcacatctgacctatgccctttgttttcagtaaaggcgctctttgtttcagcaaaatcatcattgaagataattgacatggatgaagaggaacgtgaagttatgttatgattaattaactnttaattattacaaacttg

SEQ ID NO: 6040 - DNA, 372 bp, Oryza sativa
  unsure (1)..(372): unsure at all n locations
atgagattgagcgacacgctcttgtatttgctgtcttctgtaattgcgatctctggctcgctggttatnttccctttaccacttgaatgctgtatattacaatgcttgtgtgcaagagtgcgactgcagctttgtggtgagatgaaagggatgtcgtgcgtcgtttttttactgtgtcctgttcatatnntattaatcaatctgctattaactttactggaaggaccggtaaattgattcggtgcatacaattgttgagctcttgaacttttacccaaaattgtanaactctcccaattttaaacattcacttaaaattgaagcttcaacttaatttaaaaattatttaaacactctccttgagtttaaatt

SEQ ID NO: 6041 - DNA, 492 bp, Oryza sativa
  unsure (1)..(492): unsure at all n locations
gctttgttgggttgatagtgaagtttttttccaaaaattttttctnttaagttactacaccgcaattctttgccatgttcgtttgctgaagaaatggtttatcggcgaaatctagcacgtttattcgatgctacggatcagctaacaaatgtcactggaaataaaataaatatacatgcgcatgtatttctagtcatgcatttcaagttcaattcattatacgtaaagagcagataaaaaaaagactgtaacgaatttatattcttaagtttatatcggcatctcgcgcctctagcccgccacgcacctatatcacgcgccttagcctccaatacctaacaccaccaccgaacgtagctactcatccactctgnggcaagcacgagctttcctggtaatggaagttgtgacgagcctgagatcctcttacgcgcaaccaatgacaacctgaagctcgtctctgcccactccaccgcaccgggctcatgagct

SEQ ID NO: 6042 - DNA, 430 bp, Oryza sativa
tgctcaatccagcacgtgtttggacgcggcgtacgacgagtgtctctacgcacagtgatcgggcccggacgtgacgctgatggtagcgccgcatgctctgctggtagcgcgcggctctgagggccgcgcgccgccttcgctcttccaagtagtcgaggtcatctctgcgaagctgatcttgatcagcctcgcagtacatggtggcccgaggagacctcatggtgagctcggatgggagaaccgcttccgcgccgtatacaaggaagaaaggcgtattcctggttgctctgcatggtgtagattggtttgcccagagcaccgctggcaactcctcgatccatgaatcaccgtgcttcatgagtatgttgaacgtcttgtgtttaaggccattgaggatttacgcattggcgcgctccacttgtgcattgct

SEQ ID NO: 6043 - DNA, 504 bp, Oryza sativa
tactcaacttaggcggagacgtatctctcccactgaggtgactatggatcacattatcatatactaactctgctatcaacatctacatagtatatccttttctagcttgcatgtttaatttttgcattgcatttatataacttaaaacaacacaaatactggcaatatcaaaaagatacgttatatgctatatgctaggtgagacacgcttagctcttcatgttgaaatgatgaataactgctctgtattatatatctcatatatgggctcatggataagaactctctcaaaagttgagtaataaaagctcaacattatcttggaacctgagggaagtgagctgcacttgctaattaagactaagtgttgcgaagaatgagatagtaaataagagttgctattatcctgttctaagtctgacttgaattccagatgttttatttctcacaaatgatatactcgaagttcctcatttatatgaatcctacatagtcaaaaatttt

SEQ ID NO: 6044 - DNA, 326 bp, Oryza sativa
tggagacaactcctcctctctctgatgaccagaaataaacaggagcgtgccactgctcatggagcccccacatcactccgaaatcaagtcatgcgccgccagaccgactactacccttcgagaacatcgtgccgacgccaatatttcgcaagctcgaggcgacgcctcctgtggccatcggactacaccaacacgcaggtgacgcacgcagcaacctactttaaggcgacgccgacgagcgctcctcctcccttcgccagaaccgaacgctgcacggcagctaccaccagatcggaaggcagcgtggagctccgattgaatagaca

SEQ ID NO: 6045 - DNA, 76 bp, Oryza sativa
taccccaccccaggggaatgatctcaaccccaaaaccacacggcgagaccctaaacccgttttttaacacaaccca

SEQ ID NO: 6046 - DNA, 371 bp, Oryza sativa
  unsure (1)..(371): unsure at all n locations
agactatatagcaatggattatgcaccttngatgttataaatggtatagaacagtgattgcaacagtggttttctttataacatcagatgctagttntctgaacctatgctgatgtttgatacagccaataattcagtatgcctgtcttgttggcacaacactctctaattgtgcaatggtgttctgctattctttcacagtgatatcatccatcattattgctggtgtaatttcaacaaataactacatggtccatgccatttatgttgcagcatggttcagtgattgcttttaatatagtacaatacctgtagtacaaaagatcccttttatagcaagataatggtatgctaatattttcccccaactt

SEQ ID NO: 6047 - DNA, 373 bp, Oryza sativa
  unsure (1)..(373): unsure at all n locations
taaccttctgctcgagctgcttctccaggctactcagcttctcatcctgtttcttcagctccttggtcagctgcagagacatacacagtacaccgtagtggtgtcagtacagtgagtaagctagtgaccggggcatggcttgcccaatgatgcatcggtgttgattgttggagtggaaaagtgggggtttatcttggaaacaactcaagcaaaatggtagttaattacattagttagctcgtgaagcaaattacctcagcaatggccttgtccttcagggcttccgtcacctttagggcctttaattcgctatatgcatgtcctaactctctgtccttctctgcaggtntaagcacgagctatgcgtgagcat

SEQ ID NO: 6048 - DNA, 339 bp, Oryza sativa
  unsure (1)..(339): unsure at all n locations
tactgcgggtgttgtaatagctctgctttttatcccataagggagggagctcatggctgtcacccactcttctcttctgacactctcttcaaattcaacttcatgagatctcagacaagaaaaaaaaggcatagctgaaaagagaaaggcaaaagggggtggctgtccgaccaccttgatctacttatccttttgtgctttcgcccaccagttaaatcaatgtttcctactcacaaaaagcgaaactagaggtcatatgggggttggccgaacccncaatttcccctaaaagttttcaaatctttatgaagactcgtctcaagttgaaatgcanaaagc

SEQ ID NO: 6049 - DNA, 379 bp, Oryza sativa
gacgaaacaaccctagcacattgtgcttacatggcattctacacaatgccttgacaatacggctgtcatattaaatctacataacggtctaaactcagtggtcacacgtcaaatcgactatattcttcctctgtctagttcgtgatggctatctaataccacctatgttttctaatacttcacccgacccaaatataaatatttttaaccatgacacggtcattgagatgctattgtgaccaacaatattcataaaagtaagaagtcttatataaaaagagttgcctactatgataatttggttaattataaatctagtaaacttcaatattacatgagtgagtattctatatcttctcgtattaatggcaacgtaaac

SEQ ID NO: 6050 - DNA, 336 bp, Oryza sativa
  unsure (1)..(336): unsure at all n locations
agctttgtgtgcttacaagccatggtctatcgctcctgccgcccacatataaatagaacagccccacataacatctctcccgtcctcttgttggtgtgatatatggagtaccaccttnttcttggcaggttatattttgtccaaatttgattggacaattattcattgagttagattcggctatgtcattcgggcctaacaagaatttcctctttggaataagtctattatgcctgctcaactcatgctcctagatgaatcgcanacctcaaccgcaaaactaggtataacccatcccctaactctcataaccattgcaaattgactacccggaca

SEQ ID NO: 6051 - DNA, 197 bp, Oryza sativa
taaaaacttgcccaaccatatacccaacaccttctctccttctatcaatcctcttttcaactccccaattatcacccacctctactatttaaacatcatattacatccctcccttctcttcttcttctcatacaccccctactttaatccatttatcaactcccctaccaaaaacctttatcaaaaaactccacaac

SEQ ID NO: 6052 - DNA, 418 bp, Oryza sativa
ttaataatgagtcaacaatgcatcaggcaacaatattataactattgagcatattgattctgaacatgatttatactctcgaggacaataatcagtccgctatcaagagacaagagtcggagaggcatcgcttgctgctgtctaccatcgtgttgtatgccatcaccaaccgtggtggaaatcacattatcatgaggctatatgctgagtcggagaggagattacgatggacggaaggggcgtctattgccgctcgttacatccctgcattgcgttggtgagtggtggcggctacataggtgtgaggcgttaagcgtgagctgccatatagagtctacgtatctgataattgagcatggccaacttatatctatggacagatgagtgatacatggttaaaaacaatggagtggatcat

SEQ ID NO: 6053 - DNA, 393 bp, Oryza sativa
  unsure (1)..(393): unsure at all n locations
ctccaactaaattttgcgacccttctctattatcatgagctactcatacagggattgcggctctagctagccgccacagctgcgcttcacccgtcataacccttgcaacttccgcccaagttctgctcttctggttgattacctgcttctcttcttcttatgataatgcactctggccttgtttgatttagattgttaagcggattatcgatcgattggattatggggataagttaaatgctttaagatataaacttaacaaataacttataacaagtggtaacgtatttttcgaagagtggagcaaataacccngtttcaatagttcgatgaatgagatgaaaagaacatggccgccctcagctaataagctagtgctagtagtactatgta

SEQ ID NO: 6054 - DNA, 481 bp, Oryza sativa
  unsure (1)..(481): unsure at all n locations
tacattctagattcatcacttggtggtcgatgtccgggtagcttctgacgcagtggtcaacgcgcatgcagcggttgattatgttgccggtgtagaagcagatggcgccaaatataggggagatcgaccgccaggctaagccacatgctctacgacagcacgtactgcacggagagcattcccatgccggctgccatcacgttgctcagattgaagcagctctttctagaggaagcgccagtgatccaccagtatggtggaggggcggcggctgctccacgtcgtaaaccacctcatcgtgtcgtagatatatntgctaatattatttagtaccattgatcttcttattactatctataatcttgctcgcaccgtttagatgatagtattaaattcagtggtatgatttgctgcttctaattatggctacctggtttactccactatctcataccaacaaatcaccgtaaaatggaacacg

SEQ ID NO: 6055 - DNA, 437 bp, Oryza sativa
gtacacggtttatgatggaactgaactttgcatcgcagtgccatgatgcaacatgtgagtggaccacgagagaccgatggccaccatggatcaacctactctgcccatccttaaatggttacatcttcctcacatgcctgtcagataggagtccatataatcatgcaatgcgtggagtatatatctatgatcatgcaatgcatatgtatatacagagtacttagtacttacatgaaccatggtaaaattcttctatataacactgttcagcttgtgtgtgtggattggacctggatgcatcactgctgttactgtcggacgggatagccggatggttctcaaatgagcgaaagataagtactacttcctccgttccacgatgtgagaatgatttacatcgtggaacggagggagtagcagtgatgcatctgaacata

SEQ ID NO: 6056 - DNA, 442 bp, Oryza sativa
  unsure (1)..(442): unsure at all n locations
tcggacctatgatactaagctgccattcatacaagacatgtggtttcatctgccgattctttacatgaatataanatatatctgcgttcggtaatctgcagaatcacgatagaacaatacacatattgctatctctcgatttcataagtacatgttataacggactacgatgagactcaacttagacttcttggtttacattgggcttaatgcctatatgctgctcgtcatctttcatatgatcattcaaatgctctctctattgggactatctatagaactgttcgaagattttcaatgagaaaacgttcgaatctactattatatattgcaatataatctcctattactattaagaactcgtattaagatctaaaaatatatgtacatatatctaattatatacaatgaaatgtattacagtgactacaaataattacaa

SEQ ID NO: 6057 - DNA, 390 bp, Oryza sativa
  unsure (1)..(390): unsure at all n locations
acctgcggcatgcaagcttgggcgcggtaggagccacttctgttgatagtgcttcgactgcggagaacgtggccacatggcgaggaactgtccgcggaagaagaaagaacaggcgctgctctgtaacgttgacgaggagacgacgctgctgtgataacgaagtgcgccatgtcgcgtttagggggagattgttggaaataaacacgtcatggtgtgttcctggcgtggttgagtcaatgtgtgtgtgtgtgtcgcgctgtgcacagtccatcnagtctatggtcatgtgcaaggtgtgcgcaaggttgttgcatggccgttgctgttcgatcgagtcgtccgagtgcgtggtgtgcgtggcatctattcttgcggaggaagctaccatga

SEQ ID NO: 6058 - DNA, 338 bp, Oryza sativa
taggattacttagaggttggcctctttaattctaccgagctgcggatctgcaacagccacgtatttatcagtccgaattgatcggtttgggcctgaatcgatcggggcttacccaaggggtggcgtctaggaaacctagacgtcctaatatattatcagagccgcatcgttaagtggatttgttagattatttgcaaacagtttcccgtagattggttggaacccaaattagtgctatcattcatggaattggtgcatcatctgtctgctggtcttcatccataaggatagctttcgggagcaaccggttggatgttatactaagaacgtggctggat

SEQ ID NO: 6059 - DNA, 233 bp, Oryza sativa
  unsure (1)..(233): unsure at all n locations
ctctaaatgagtaataggacattcttcatctcttctgtttgcctcaagattgatcactcgaccatgccgatgaaactttcctctccagcttctgtcacgagcattctccatttcagttntctccttcaagccaccatcatatgtacagtatgataaagctaccatatcctaaacaatacagtgtgacacaatacgctagttgcatgaatgaaaacatgcaattggttacttac

SEQ ID NO: 6060 - DNA, 434 bp, Oryza sativa
  unsure (1)..(434): unsure at all n locations
ctggtgtaataactcattatatgtgctcaccacattatgcatatctggatcaactttataacgactgatctgtanggctcaggctttatngtttttaaaagttcttttaatttaaaactaattcccattccctacaaaaaaaatctattacttcatatctttagcttcaactcattgttcttactatgcattcgttgctgaatacatttttaactttgctggaagctgaacctttccttgattgaactaatttattcacgtggttgtaaattcagtacttaactcttgttaaaatttaacttctccacttcacttccactgatgcccatcttcagatgatatgaacaatctagactgataatttaaagggtagttcctactgaatacaaccgccacaacatttcaagatgttgaccttncttgtaatatacttg

SEQ ID NO: 6061 - DNA, 255 bp, Oryza sativa
  unsure (1)..(255): unsure at all n locations
gtccgagcgtnccaagtgtgggtgcagagatcgctggaacgtggctacatcctttgctgaacaaacattgtgaaagagatattttggctgccccaatgtagacaacgatctcgttgtatgtctaaccatttacaaaatccgctatgtattgcacataattactacccaaactatataacattactattttcacagggcaatccaatgatgggtggattaactcgatggatcgacaatgtcactccatcatatcat

SEQ ID NO: 6062 - DNA, 360 bp, Oryza sativa
aaaactcacttctatgaaaagatggctgcaacaccgcagatttattttctcaaatctatttgtctgctgtgatcgtcaatgacataccaaacttcgtgaacatgacgaaggatcttgacgagtcattatgtcatgagaggttacaggactaacctgttcaatggacatttgcgttaacttcagatccttgataaacgtgtggaaattctgctgcaaaaaactgaaagaataaggctgcaatatgggattcattctagaacacaagctcctctattaccaagtcgaggaaagaaactctgaggactctgctcaacatgctagcatatttctcaaccagccactttcgctcctgaacgctat

SEQ ID NO: 6063 - DNA, 370 bp, Oryza sativa
  unsure (1)..(370): unsure at all n locations
tttggtgtgcatttgatgtcaagttctttctaaacatagaaggaaataaaagatccttgtatttggaattgaaggtgtactccctccttncaaaaaagccaatctagtaggaccccttctaatctatccagattcataatagtacgagtcttacgttagtatttttgttgggatggagagggtaatgtacttgtaacttcgagcctactgtttggttcgatcggctatcatcggtgggaagaatgaatcataaactcgatgcatttaagttaaactgagcacggttatatagcatgaagaacaatctccaaccagcatgattaacagtctttccatggcaatcaaacgtgtgtacatgtgcaacaaatgt

SEQ ID NO: 6064 - DNA, 444 bp, Oryza sativa
cacaatcgttcgtgctgcagcgtggttcccgttatgccgaatgtatgcttgaacaattgccttccttcttccacagaaacacaacattgcaaaattcctgacggacttctcttgtacaaatcatcctcaatcatgaaataaagcctattgtgtcgagagatccgctcggcttcatatttgtcttgaggaaacttttgtttagacaaaaatatgatgaagggctctctccaatcggcgtcaatcatgcttacttcttgggtacttgtcatctcgattacatctttccttggtactgtcggctcataaaggtgctcaacaaaaacatctgaaggagctgcttctcgcttataaccaaagttggccactctgtcggccgcttcgttgtcgtgccgaagcacatgagttaactctaggccgtcgaacttgtcttccagcttacgtact

SEQ ID NO: 6065 - DNA, 407 bp, Oryza sativa
  unsure (1)..(407): unsure at all n locations
agtctggatcaaggtgaagaaggcgagcttgtttctccctcaccgatcaacttagctcgcccaagaatccaccacagtatccaaagagatcatcctaccgacaacatcttaggagacatcaacaagggagtatccactcgttctcgtattgcaaatttttgtgagcattactcgtttgtgtcttctcttgaacctctaagggtggaagaagctcttaatgatccggattgggtgatagcgatgcaagaggagttgaacaanttcacccggaatgaagtgtggactttggtggagcgacctctgcaaaatgtgattggcacaaagtggatcttctgcaacaagcaagacgaggccggtgtcgtaataaggaacaaggcgagtgtagtggcgcaagggttcacccaaat

SEQ ID NO: 6066 - DNA, 412 bp, Oryza sativa
  unsure (1)..(412): unsure at all n locations
gctgaataanaggggaaggaccatacctcatcaagcgcaagttctattacgggatcttttcgcctagcgacactcgaaggcgaggagatcgaccattcctggaacgccgcctccctcaagcgcttctatgtctagaatgggtggcacccaaatcgccaacttgtaaaaatgtacatactatcatgtaagcccttcggcactatggtagcctttccgccaagaaaaagaaagaaaaagaagaaagagagaaaaagacaaaaaactggatgtagggctattatccaccatggaggcccgaaccagtataaaatctctgtgtcctccgccttcttcttactttacgggtgattgataatttgtggaaaaaccccaacgcaaacgcctgatcagcgataaatgccaagggggcgaa

SEQ ID NO: 6067 - DNA, 408 bp, Oryza sativa
  unsure (1)..(408): unsure at all n locations
agcttagagcanggccttagtattagtccttctaaaaagaaccagtgtaatggttcatgaggcgaagtagtatcttcaagtgagaactgagaaacatcgtggtttttcttttttgcaccatttaagattctagtgaactatatgaacctctgttttttgagaatctacgttgcatgatttggcttgataacgataatttgttttggttgtgtagcattgaacattttagttgataagaatttttatcttcttacgagtgaaatattgccttctgttcaggcagacaagcttctctctcctgagttccagccttccgtggaacagctgattcgttaccttccagcgagccggcaaattttgatgttctcggcaacgttccctgtgactgtgaaggagttcaaggacaaa

SEQ ID NO: 6068 - DNA, 379 bp, Oryza sativa
  unsure (1)..(379): unsure at all n locations
aactaagctctgacgcaggtgacttgtcgaaacttcctnttatattaaagggcctttgtgcttaagctgtagaccttctggcagccactcgttgtgattgggatgtttgaagagaatggaaagttggaaactttttatactcggttactgaaactgcatctgctatactccactgcgctcaatagtccatatggcctgaaatctctagttccattgatctgttgtctgacttaaatgagttcttcaggacggatctttgagtccattgcggaccgctcactcgtacggatgaaccatgaggcgttgctattttgcaacacggatctctggccttatgaagaagcagcatcttcttgcgcagtacaatcgggtgatggac

SEQ ID NO: 6069 - DNA, 393 bp, Oryza sativa
cgacgaggcagatctttctggcggggtgatccggggtagtaatgtcgtgtgggtaaagtgtaccccctctgcagaggttaacaaactgttcgaacagccgtgcccacgggcatgggcggatgtgaggcgattcctaccgcagtttcgctagactactgcttgtgaaattgctggcgtgaaaaggggattcgatgtttgaaaaatcagcagctgacgggatcagctaggcccgggtggccgttgaaaaattcgtggcccgggtggccgcctgaaaagctgttggccggatgccaatcttggttcaattctaaagattgatgcattgcacatactccgaccggacgatacgcactggctcatccgcgtcgtttgacaagcactcacttagacttt

SEQ ID NO: 6070 - DNA, 450 bp, Oryza sativa
taatccgtctgtcacatataactctgacaatcctccaccatctgtatgatatgtcatattcacggatgatgtgagcttcgaagtcttcatggatcacctgcagcggctggcagttcactataacacggtcatgaagcaattttgtatgaatcttcaatagtctcgtccagtgtacagcaaagaacgacttctccgtgtaatttatgcatgttaccacattggaaactcggataatgccattcgaggctctacatctgtatattaccatgagtatacgctgctaggattctgcctccactataaattcaggaaggaacatacatgattgtggaaaatacgtctcatatctccctctacccacactgacggtaactcttttcttctgacactactgaacagtatcatagtatacacgtatccttcaaaaccgatcaggccctaacccatgca

SEQ ID NO: 6071 - DNA, 411 bp, Oryza sativa
agcttctaaaataagttagatgtacgatttctctggcagagatgtaccaaggctaatgttacagtttttaagagcaacttatcaaatacagagatgacctgagatgtgctcagaaacatgtaacacgtaggaaagagatgcatgaaggccaaaaggagaggtgtaaacctgtgagacatgatctgctatggaatgcatgatatttttccaccctgatatataggccgatgtccatccagtgctcttgggctgactaccatctgatacaaaagatcacacaaggtctggatcactaaacatatcttgattcttgatgcatcagaggactgggcaaccttctaaccataattgtaataaagcttacatcaagtcagtacaagcatacataagcaaaacaggaaaacaacaagc

SEQ ID NO: 6072 - DNA, 458 bp, Oryza sativa
  unsure (1)..(458): unsure at all n locations
actcagcttaaataaattataaatgaccctaagaaaataccggtgcttattatgataaaaccctaagaaagtaatacaaataatacccgcgccggtcaccactcccgaaaccgctgccgccgcgccccacctaccccgcattccccgcgcccacgccgcgtcgcctgcgcccactccacatcgccgccccctctccccgcgtctcccggccgcgcctgcgcacgagaggggcgggattcaattntgaatcccctcccatcttctctctctccttccccacgtcgccggcgaaatcggagtatgacttgctgagtacagtggatagtactcagtcttgctctatttntcccccaaccccagagtacgagtatgtgtccgatggtgggttcttcgaggagtacgcctcattcgtgcagtcgaggatgcctatggagtgatgttcccgctgcaggttaagt

SEQ ID NO: 6073 - DNA, 408 bp, Oryza sativa
agcttctctgctggcacggagagtcactgtataagtctccgactgcatcatcaggagaggaggccggttggccggagcaagaatcgtaaggatccttgagaagatggagaatgactccagagggcacattttcggacgaagaacagtggtcgcgatggacggtggtctatatgagaagtaccctcagtacaggaggtacatgaaggaggctgtggctgagctactgggacccgagcgatcgaatcgtatcgccatcgagcacacgaaagacggatcagggatcggcgctgcgctgttggcagctgcaaactcaaagtatgctgctgctcaaatctctacaaggtgatcgcaattgttataattgttgagttactgggccgaattaattctctacaaggtgatctcaat

SEQ ID NO: 6074 - DNA, 450 bp, Oryza sativa
tgcttcatagtactccagagctcgtcggatatgtggacttgttgtgtatgtatggtgaagccgcataacgtgcttcccattggcttccggtatgtactactgattactccactcaccaaaattaattattcacttctgactgattttaattccttttttagtttccgatccaagcgtcacgtgagacagcaaagccacccccaagcatcaactattgccaagctctatcttgagatgaagagatggtacagtacaattatgctactatcttgagagtaatcttgcttttgaagaaaaaaaaatcaaatcttagtgatgctccattgttctgcctttgcttttctttaccctcttgtgacattcacaaacacttgcatatgttgctttttgcagtctgccttcttcaggccagcctcaggggttaagtctgggtgggataatttccaactg

SEQ ID NO: 6075 - DNA, 404 bp, Oryza sativa
agcttttttttttccaactgtaacatgtttgtttaagtctttggagtggataagaatggttaaaataaacaatggtctcagtccacgatgaagtcacagtgattattttttgcagcatgcacacctaatgaatacttacaatgatgaagcaatataatgtttatctgatttttcttttaatcccgtaacaagagtacgtgcattctgatagttttagttaagtttacttcaagtctctgatcatgattgtttttccatatacaattcatatgtatgcttcattgctctattatatagtttttatatatttcaatagaaaaccatcttgttgttcactacatattctttatacatgtatttgcatgtattgataaagttcccttcacttgtgaagaccactgtgc

SEQ ID NO: 6076 - DNA, 436 bp, Oryza sativa
  unsure (1)..(436): unsure at all n locations
ataatacgtgttgtttaccaactattctattggatttgtttatctctnttgaaatagaggatttctacagctacatatgaacattctcctatactcttgcagattgatttcaaccgtttctagaaacaaattgccgcaatcgaaccattttaggtcaatttggtttcctcaaagtcaaaacaaaaaggcaccttagttaaacagcgtgttagcctatgggctactccataccataactatacatgtaaatatcacttgcaagatagtcaagattatgttaatattttacagttagttgtcaatccatcacaatcgagtgcacgcgaaagtaacagaagttccatttcggtggtggtctttggttaagaaactttcagcctcatctatggatggtttttagaagaccaatttgtcgcaaaatagctttgtttggtta

SEQ ID NO: 6077 - DNA, 404 bp, Oryza sativa
  unsure (1)..(404): unsure at all n locations
agctttgtactcttattatnaaactcttctatatacttttatggtatagaaatacttggcgagtatatgagtacctactttacattatgttcatgttatactgaatatatggctagcttatcttggagatgcttggtgcgggtataatgtttccatatgcaattactctatgtcatgacgatgatattagagtagtatctggtagtttagacgtgatgtctagattacgaagtatcattatttgaggttatatattgcggatgagaggtgggccgctcatggtaaaagctcagtacgggtattcctccgtgccggtatataatcctaagttaatttcttgagaagggtattcctccgtatttagccctagttgtatggtcatgacgggctgtcgtaaggaactc

SEQ ID NO: 6078 - DNA, 385 bp, Oryza sativa
agcttgctgaactctgaagaagtgtttgtttatgctaacatgcgaaagtagtgtggaccacgatcaacaaaagattatatttgtttttatttgccgggcaagattatatttgtcggagcaaacgttttcaaatccaccataccagaccaccacaacattagtaagaaatactccacttcatcaattttagcagatacggcgtactccttacatcttgaaccagcgccatctgaaagcaccacctgaggggcaatgcacgccatgactccaacctcaaaaaccaatgctagctgaataaaattgcggaagagcgcttacttacgttcatcgttgggaaggggggggggggttgataccctttctcaattgtgtatattgcttcttt

SEQ ID NO: 6079 - DNA, 408 bp, Oryza sativa
  unsure (1)..(408): unsure at all n locations
agctntctctctcctctgccatggatgtgagatagatgatgagatttgaagtgggaatggcaaaggaatagatgggagattgatgcagcggttgcgcggaagatcttcgcggagctacaaagcctcgtcaaggtggattgatgtggatttgtgaaccctaattttcgctggagtggttgttgtactgtagcgaagaatggggatagtggcggatgtttcggcggggaagacgaaacgactcttgttctgtgtcttttgttagggtatcgggaggtactaacgggcccgggcctacacagtactttcagcccaacttcattattggcgtggttggtcgtgatccttagggatttaagcatatatttttgccttggtaaaaattgctcacaacagaatagcccaatgccg

SEQ ID NO: 6080 - DNA, 247 bp, Oryza sativa
tgaagatctctttgtgaccagtgatactggagctagattaaacattacaagtggcaatgttttctgcagtcgtgacatgggcatcttcttgcatttcttcccgattttgtgcagatttttgcccccagctcggctgcataaattgcgctaacgtcgggagtgtataagttgggcgagggaaagattcatctccctctgaccaggggacaaatcttgctggcatgcgtcgaccactcgggtcatgcca

SEQ ID NO: 6081 - DNA, 408 bp, Oryza sativa
agcttacaaaaacagcataacacctttctgtcgggcaccttttaatttgcactgcaataattccaaagaattatatgaccgcgtaaaaaggattttatcagcattgggcaacactattgtgcgcataaattgccaaagcaaaaaatgcctaagtccctaaagagcacaatgggccacgctgtcaaaagtactgggctgaggtactgttcaggcctaagcccatttgcacctccgatacccttaacaagaaatcccgagatccaagcgacacttcatcttccccgccggaactctcgccattttccccactccctgctacagtacaaagctgcgccggcaaactagggttcaccattccactcaaatccaccttcaaaaagttcatcaaaatccttcccgcgatccacc

SEQ ID NO: 6082 - DNA, 452 bp, Oryza sativa
  unsure (1)..(452): unsure at all n locations
tctcttactgaangggggaaagattgagcaagaatgatactttttcattacttagcaagccacaccggcagatgcatgattaatgcaagggggtacaaagggtaataatatacgggtttagtttagcagaaaacagcatttaaaagtcacttatttgcccaaagccattttataaagacgatcctaaagttacactgtattattaatcgatgccgtggacccacacgaacctgccttaacccaaggcctacgatgattcacaccgaactggctaccccaccctgtgatccagctcgttccaaaccatcccaggccacccatttcacattttagttgttaagcacggtttaagaattaaacactaacttgggtacattgctangcttgcccataaccgacggcgccgctattcgaatagatattctccgatcagagtgtacatctttacccac

SEQ ID NO: 6083 - DNA, 400 bp, Oryza sativa
agcttaaactccagcataatctagcatttattaattgcaactgaatttggttcataactcaacatatcaaatggcgaggttgtgtggtaaatctgccaccaccgcaacaaccaatttcataatgtttgtgtaaaaaaaacaaaatttgctacggaacactcaaagattaaggtctttgctcctgggcatccgaaaaacgtgacaaggttcgtggacactctaaaaacctggtaatttattaggggacaccatcatcattattttattattattcggttaaatggagaaaaaagcatttataaaagacaagcttaccctttgggttcgtaacttgggtctgttttcaaactttcaacttttttgtcacaccaaatgttttaacacatatatggagcattaa

SEQ ID NO: 6084 - DNA, 443 bp, Oryza sativa
ggcagcctagtgtgcaaagcagagagcccaatgtttatttattcattgaatcccgggaattgctgtcctcctagcctttcgtaccacgtggggtcacgtactaagcaagccaaaggcaagaagagtaagaatcataagagaaaagcaccgatgcgaactgaagaagaagtacgtaagatgactattaccagcaccgaatggtctccagcagggataactattcctagacgtcaaagaggaaataccttccgaggtgcacgacagttgacccagcacctcctaagccatggtggcagagtatctgatagtgaaaggtcagatcaagtctcctcggatgaagaagatgagtctccccaacatctcggcgaggaagagatggaatcaaaggcatgcacctattgtggagaaattggacacgttgctagcatgtgtctcacactctg

SEQ ID NO: 6085 - DNA, 400 bp, Oryza sativa
  unsure (1)..(400): unsure at all n locations
agcttctttatttgtactgtgttgctttttaacacaaataaggacgaaaagttctatttccatatgattactgagatatcgctgggtgacgatatatatcacggagggtgagcatatcagcttttttactgctcataacatgtttgacagaaccctcatattcggtcaccttttgacaactagcgttgttatggagattngtatgtgaacaataaccttattctccctccctccgtctttccaaacgacctgctaggtctaaatggcattcaattaaaatcagggagatttcttatagattagaatcacttgatctgtttgaagatatcatgctcaaaactcctctatctccagcgactaacaatagcatgacgagttaaagttttgaaatcagggttac

SEQ ID NO: 6086 - DNA, 458 bp, Oryza sativa
acacatagaatactaagcttgttttgaaacgaaatcaccgcgccgaattttctgtttcagaaacgaattcagaaatattttatcagagacggaatcgaatatgataaaagcagtttccgctggaactcagaatcggtcgaaaacttttcaaatactttttcggaagtttcaaagttacaggcgcataaaatacaaataatccataatacctccccaggccagcctattcagtatgatacctcccatagtctataatacctcacgtaacctagagacttagagagtagagagtgagggactgagaaagacatcgaagattctagagccgggcggcgtctacatcaaagattctagagccgggcggcgaagcgacacatctagatctcatgtcggctcgtccctgccgctatttgaaagttttgtccatcgaagattggagctcgctttgagggtttttg

SEQ ID NO: 6087 - DNA, 408 bp, Oryza sativa
  unsure (1)..(408): unsure at all n locations
agcttgttactatagagcttttggctntttgtggtctcgatctagttgaacagagctgttctaagagcatcttaatattattcccttgcttagcagtaaccaagtattacaaatgaatagcgataagtgtatgacatgaaaaatttgcccctttatatctttgtagtttgtaataagcctgctaaattctcaatgttcatgtgttctgttcaaaatttatatgattcagaaactatccaagccacttgtgctagcgttattcataaattaagatgtcatggctgatatgatctgtgtatgtttgaatttcgacagtaatctcaaatttatacaactcaaaacttgtataaaccaccggtgctatctgttagagcttgcattttcagaaatagctgtaattggacatat

SEQ ID NO: 6088 - DNA, 445 bp, Oryza sativa
  unsure (1)..(445): unsure at all n locations
ctaagccttcgtattctattattatttggccggtcggccggtgtatcttcatttattatgagcccataatcgctttcatcttatttgtgttcgctatgtataaccatgcttgagatgaaagtgtgaatctagtgcacatcctgcgaactagattcacatgagtataagttaagaatattttagatgttgtagatctttaaccattttgtcaagtctccctattgtgtaacacatctggtcgctgccttcgagtggtttggcgggcacatctcaagctgaagttgactagcaggctaaaggctcagcaatgtcttcaatattcctctctcgaggcgtctgataattcattttgcttgctgaatgacttgaattatctatttcatctctcaattttaatggaagggctggagagcctacgacacccacatatttnggaaaccctcta

SEQ ID NO: 6089 - DNA, 410 bp, Oryza sativa
agcttcactttcatcctcttctcatcccacattgaaagatcattcagcttgctcaattccatgatctattcgctaggcccgcaagaaacaataatctggataaatggtcaatgcaaaatttaattttccatcaaaatcaaattgtaagcatgaatgcaagaccagtcagacactggtgtgtgaatctcctgctgcacagccactttttccgtgaaagaaaagcatgaccaatgtttatttgaaccacatccagtgtcgcagtgtaggctaataaaagtaataatgccttgcctgtacggacgatgaatgtcatatacatcatgaccattgttgagaccaaaagatctgctaataccatcatgtttttagcctcatagttgtcaaatgcaagccatgattaattaatacca

SEQ ID NO: 6090 - DNA, 410 bp, Oryza sativa
  unsure (1)..(410): unsure at all n locations
agcttatgaaattatagcaagtagtcattattcctcagtgagtcagtgtacatacttgtagtgcataaccaaattctttttcatatactagaaagattcaaagctgcaaatgtgcatgtgaggttgatgaatggaatacacaataatacatgacaataaacacatattaaagaatttagtgcaaaaaaattgtattgtcatggtacacattntaacaattttctttactttttatacattgtaaatattaattaatatctaaaacaaaatataaagtacgggaataaaatttaattggctaatgtggaaatggcatggagctaaatgttctatatatggtcctaacgtttaaagataaaatacatatgtgcttgtgttactaataatatctaaaagactaagtagtatgt

SEQ ID NO: 6091 - DNA, 409 bp, Oryza sativa
tccccttaatatattaattccttaaccgaatcctccaagaattctactgctatcgacttgataactcccattggccgattccagaactctgaagccgatactgattttaggtcgataatgtcttcagggcttaccaaatttcactgttaacaccaccgcagccctctttcccaggatcgacctcatgaggcaatgcaggcttctgcgaggtagggcctcagacgccaccaacgcccctcttcttcggcaccgacgagctgagcactggcacatggtcctcgcagagtgcatgctacctccatggttccaggtgacagagctcaaggttgtgaagaggcggcgaccaaaagaggagcttgtgcggaggcggcggtgagctcctggccaacgagcgtcgcttgcgccctct

SEQ ID NO: 6092 - DNA, 349 bp, Oryza sativa
  unsure (1)..(349): unsure at all n locations
agcaagcttctctataattagctatgcgtgtgtgatactttcagagatgtctgtcacactttagagttgtacgccatcatattattgcgcaagcagctcggtatatcagcttggatcatatctattcggagattcacagccgcatatgctatatatgtggtatcaagtcancttggttgactataattatcaaaaaccactcggttaattggataatttattccttgactatatgtttagtttgatcagctaatcacatagtcaggggttactcttattatgttttttctatgacttgatttgatcttagtgagaggtcatgcgcaggtttcatagctattgatctgct

SEQ ID NO: 6093 - DNA, 407 bp, Oryza sativa
agcttcttttttttaattgcagaacactctctattagtaataaattaatttggtaacatcatgacaaaatgagaaaagaagacatactgaaacttcttccacaactgcaagcacttaagtaggatgttagaaggaataaaagacccccttgtactgaggttatacatgcccacaacatctcctctgaagtcaatgactggccccccgttgtagtactacaattaaattgacaatgttcaaattagtaacatgtaaaaaatgaataaaaatgaataaatatgaattatacgagatataacctaaataggaaatgcaatctatttgtacctcagaagctgcatcgacaccatgaatgtacatatagtgatggcgttcattcacatgtgcatttaaatactgcaccctac

SEQ ID NO: 6094 - DNA, 405 bp, Oryza sativa
  unsure (1)..(405): unsure at all n locations
agctntgccgtgacgcgtctcatgtgttgtgacgaggctcatgtgttgggcagtcgcggagtgcgggtaaagtgtacatccactgcagtgtgagtaaaccaaacctattcgaatagccgtgctcgcggttattgagcaccgggacatgtattacacttggctagactctaaattcttaacttgtgtgggatgggatattgcatgatgaattttatgctgttggagccacttcctgagaggcgagaaggtggacgtcctcagaaaaccatgacgaatcaatggcgggaagctatccttgggatcacaatggatggtggacagaaccgtcgttgtttaaatacaaactctggtactaaaaatttgatcagtcaatgctaggtcttaagcttgtgaaaagaattacaa

SEQ ID NO: 6095 - DNA, 443 bp, Oryza sativa
  unsure (1)..(443): unsure at all n locations
tgaatccttntctttcaaatcgggacagtatctcagatatctgtataaagaggaggaaaaagcggatatgaacaacatccatcatacagtattcccgtaggaaattattagcaggcatatggagacaataaacagtagagtacaatttagtgtttggttgcatgattgaaattggttacatgtcggcctgccactagccaagatgttagtagtagtactggggaccattgatttgacaaacctgagagaagaggagatgagaggagaggaccccaagtgtgcagtgcagagttgaggagcccaattggagaaaagaaatgaaaagagagcagaatgacagatctgccatcacatctcanagtttgtctcatgtgaatgtgattactactcagtattattagtcatatgtagaactgagatgagatggtactatgcattatata

SEQ ID NO: 6096 - DNA, 400 bp, Oryza sativa
agcttagcggcggcggcgcggcggttattatgcacgggataggacgggagttggggctgacgaaagataaggactagggcgtcctatttatagccttggattgaagagatcggactcctcccgcaagaaatcgacttgggaaatcaaaaactcggttttggagataaactcgaaaacgagttcgattctgataaaatactcaacgatttgctccgatttttggggggatagatagaggagaatgagaggataaaaacccctcaaaaatccggaagaatcagggccggtttggggtgggattggatgtggcacggctatgctcgtgctcggctcgggctcagcttgcacagacggccggctggaggtgggagacaccaccgacaggtgggtcccacctgtc

SEQ ID NO: 6097 - DNA, 409 bp, Oryza sativa
agctagcaactcaaaggtcgaactctgtcatgctcagctccccaccatagctcctttatatacacctatagagaagagatactgtagatattcaaggatatttactgtatcataaaaatgatatatcaaaggcagcaaaaaaagccagctaccacgatcgttagggcatcaccaatgtatatggcaaaagtagtctatatagatgagacccacataaataaactttaactatagcaatcctcacaatatgtatgtgtcggtgaaatgggcccgggggtacgcacagtataggaaagtatccttcccatctagtcgcgtggctacacggcctcgcctccccccgccccttgggtagcgctgaggtggccaggggacctcggggtgccatgtcgcacccctcgggctttca

SEQ ID NO: 6098 - DNA, 269 bp, Oryza sativa
gaaaagagacctacgggctgaccgagggccataagacggactgaccaacgacgttagccggactgaccggcgaggataggccggacagaccgtccccactggactggagcaccggcctgggttcaacagggtatacagaaccaccagagacgcaaccggacagaccgagccgacggtggccagaccgaaccatggaccgactgaccggccacaacactacagtcagaccagccaggtagagcgggctcaatgagcgccccgaaacggct

SEQ ID NO: 6099 - DNA, 401 bp, Oryza sativa
  unsure (1)..(401): unsure at all n locations
agcttaattagtcaattctctccgtcagttgattttgtttggccaacggaacatggtaatttctccctgtttgttcattaacttgtgtgtatttatctgcatgtatgaatgattgcgtgcgtgctggcaaaaagaaggaatggaaataaaaaagatggttctttgatgtagagttctctgggaaacgaacatttatatgggagtatgtntagtgtcttcatgaaacttgttcgtagtttgtcctgctagtttattatatctttgaagtaaactttcagtttccaggttacactttcagaatttcagtagcttgcttggttataagatcaaaatgacatactgacatcaaatatctatcctgcaaaaggtagaaactgaaccaagcttatcttttgttggtc

SEQ ID NO: 6100 - DNA, 356 bp, Oryza sativa
  unsure (1)..(356): unsure at all n locations
tttgtataaccaaacacaccacgtggcatgcacatatgcatgcgttacaaggtttatggtacacgccgtaaccgcgcggataccgtggataccggacttaccgcgggtacgataatagaaaaaccatggctaccttcttaaatttaaataagtgtaaaaataatttgaactttagataaaatctgcacgggatcgaacagaatttccacagttaccgcggataccgcgcggtaaccccggcctcatgggtatgcgaaaccatgatgtgcgctanaatatttaaacgtacgaagcatcaggtcgatattttccatatcaacatcatcatgcttacatgagcctatgcgtatactaaa

SEQ ID NO: 6101 - DNA, 399 bp, Oryza sativa
  unsure (1)..(399): unsure at all n locations
agcttgaccaattatgtgaaggcccaatcaagtctaacattgatcggcttgaggctcgcaagattgaactcttagcacaacttgaagaatgtaacgctgagctagatatggagcacaaaaagctagccgatctcccaaagtctattgaagaacagaaagcaagactcaaatcggccatcaagcatgttgctgatctaaccaagtctctgaaagttatccctggaaccgatgctcaggatgcccaagccatagaagaagtagagcagattatgcagaaggctatatcggccatccagtgatacttatctcaataatctttatgtaataggacttagaattttgtaatcggctgagacattctgatactttagaaattttgctcanatttcgcactatatt

SEQ ID NO: 6102 - DNA, 393 bp, Oryza sativa
taacatgactatcaagaataagatctttatgtggttcttgcttaaaggggtagtgttaactaaagataatttggcaaggaggaactggaatggaagtttgagatgttgtttctgtatgaagaatgaaactattcagcatctttttatggaatgccattttgcaaagtttatttggagagctgtacagttctcttttggtctttaccctcctaatagcatatctcatatttttgatgattggcttctaggggtggataagaaaaataggaaacttattctcataggagcttcttctatatgttgggctctatggttgagtaggaatgatatgagttttgacaaatcaccatctgtttcatatatgcaggtaattttcgaggaacacactggctc

SEQ ID NO: 6103 - DNA, 448 bp, Oryza sativa
  unsure (1)..(448): unsure at all n locations
tcagggagtattaatagggcccaaagaagctgtcttattatcttatactgaactacaaatgacagtttcagcaaacattaagcacttgcattttcagactaccgcagacttccttgtcccttcaccaagagttcaaaagcaccaaaccagattctacaaggtacaagtaacttttgcttgttgcattacttgatctgttagtgcagatgcagcagatcgaaatttaaatactacatgtttttctctttttttgttgacatgatagtttcagtactgtataatgtatatcttggngttcctgatgagaattagcaccatgttatggcagtaaagtggatagaagcaatctaccattgatctcaagtatcaggtagactggaaatctggtacttctgttngaatatagccatcaagcttcacaagttcacagcaacattaagcgagaaat

SEQ ID NO: 6104 - DNA, 408 bp, Oryza sativa
agcttaagctatagactagctacagtgcttgtcggccggtcggcgtccatcccaactagtacgtgatataataattatatatgttaatcaaacgatatgttagacaggttcttgttcttcagaaaagagaaaaggaaagttggtggtataatagtcactcactatagtcatatgtgcatgcagggccctgtctttttggccttccaaaaggagagaattgaaaccgggcgataaattcgtggcaaaatccaaaagaaagccgtgtatctaggacctttctctactatccaaaagggagatctcacaaagaatgtactagtccagtatatagttgtatatgggttgggttgcagtagtggtggtggccggccggccttgacgacgaacgatgatggccaccgcgtgcac

SEQ ID NO: 6105 - DNA, 412 bp, Oryza sativa
gcagcctctgacgtttgtgaactgaactgctgtggtttctatataaccaggatttgatcattggaacttgcttatacaaatgacgataggatcaagaaatgaaaattttggttctgctttgtagaatatcttgtatgctaaccagaagtttaggctatgacgctagtgtggtggtggagctttggtgcgtcagccgtggattcttaagtggtgagcggcgggtgaaaacctagtccggcctcggccggaccgacaacgatgatcaccctcctgagggcattgtcgtgctgtctcaccttctgagggcgtttgcctggtgaaagctcagtcttggctccttttgagtccaacggacggcggcggcggtcttccgtcgcttctcttcttgaagacgtcgttctggcatcccctt

SEQ ID NO: 6106 - DNA, 408 bp, Oryza sativa
  unsure (1)..(408): unsure at all n locations
agcttgccgganaggaatgggctcccctagcttcctgagtcactggctggtgtgctcttcgctaacatgttaatttatctctcatggtttaatcgttatcatgttttaaattttggaatttaataatatttccttattatgttttacaggttcaatattatgggacaggtatgaatatgtttctcacgggttcacaccaagtctaaatcatatatctctactattttaaaagcgaaattgttctacttacatgctctcatccgaatatgcataacgttttacaggttcaatattgtgggacaagtatgaatatgtttctcactggtccacactaagtctaaatcgtatatctctactattttaaaagcgaaattattctactttcatgctctcatccgaatatgcata

SEQ ID NO: 6107 - DNA, 437 bp, Oryza sativa
  unsure (1)..(437): unsure at all n locations
catcgactcttagcgtttataaaaggtaattttgttgcatgaggatagataaaagaaaagaaaagaaagataacaaaaaaactgttttggtgcattaatgtcagaaccttttgtcgtcttatctattgtaagagatagtatctgaatagagcctgtagcagactctagctggtgattggtactattatttggggcatgccatttgtcaagtaatccctgtgaaatttcctccctcgcccaactctagtaccatatcccctacaatttgtcctgttatagcattactcaccagttcataacaactactagcttcttaggggagccaggttctgaaggctcacccttccaaaagaacaactttagggtattcctgtcagatgctgatatgcattctaatatctgagttgtggagatgatttangaaacaaatctcaaat

SEQ ID NO: 6108 - DNA, 408 bp, Oryza sativa
  unsure (1)..(408): unsure at all n locations
agctttctcagtatgtactaggcttcatatcttttgcatgctgtcttctgcttatgaattatatagtgttcgttaatatcttcaattctgattgggttatgtacttatgttgttgcttatatcttttcaatatagtttatactgctgtgcccatttttatccactcttgttcaatttcctttgtcaggtggactgtaatgtgtttagctgactttntgtgtctgtgtatgcatgcaggcaaacgctatgcctttgacacttcacagaaaaattgcttgttcgttcaaggaccagtttcttctacagatcttccaaatttctttaacctcattacaccaactgaagagtgaaggtaaagttcaaggaccacattttgtaaaaagtagagtgtatcggaatgcccacact

SEQ ID NO: 6109 - DNA, 420 bp, Oryza sativa
aactggcggcacctcaatttctttgttcttattatgggttaagaccacctaataatcctgtcgcattcttgctcttggaaaagtttcttccaacattgcagtccagtcagagaatggcctgtaataattagtgacaaaattatagcagtagatagaatctgttcattcaagttcttcaaattactgggccaagcttcaatgtcattttttgcttaactcgtgctcgtgctgttatagtttacaactatcttctttacctgcccataaccaatgtgaccatcgaatcaaacgtatgtggcggtgaatcccgatgcttgtgcgttgctagatttttgaggtcgccttctgttccatattccaatcatttgaattcgaagggattacctgtcgactgcgcatacgatcttttattgagaatat

SEQ ID NO: 6110 - DNA, 414 bp, Oryza sativa
  unsure (1)..(414): unsure at all n locations
agcttcaatgcttaaacataaatattctaattgttcatgtgcataagtaaacaactttacatgtatgccaatgtgacgtcaatgcacttagaactatcaacctacatggttgattgaggcttantggataataagaatacattcaccaaaaatacttcaaataacaggcaagataaatatttacattcaatgttagacatacaattcacaattttattccacaaaaggttaaagaattactacaggtaaaagaaaggcaatataggtaaggtgagatgacctatataaaaaaaaattcggtaatctaatgaagaagcttctatgcctaaagcaaaagataaagatgctctacatgagcttaaccatgttcttcatattgaacttaatctaaactataatataactcgtgtattg

SEQ ID NO: 6111 - DNA, 436 bp, Oryza sativa
ggaagttttgtatgatgagtcaaattttgtgacagtgagttcacaacactacggtcagttcttgaacttatgaggctaaaggcgagacatggatggtctgataccagtttcgacagtcttagaacttctgcagaaaatgctcctgaggcctaactcacttccatccagcacatatcaagcaaagaaactcatatgccccctttcacttggtgtggaaaagattcatgcgtgcgtaaatcactgcatactgtacaggacagagtacgcttctttagatgaatgtccaacatgcggtgctagccagtacaagtcgaatagcaatactggcctataaccatctgacacaaccgagggacgacagagaaaaatcccacagcttgtgatgtggtaccttcctgccaaagaccgcatttaacgaatatactccaacccgcga

SEQ ID NO: 6112 - DNA, 413 bp, Oryza sativa
  unsure (1)..(413): unsure at all n locations
agctntacctctagttgaagattgaaatttatgcagctcaacccgaaagtaagaacaactcgtcgaaataaacgaaagtaaaaagggtgacgatgcaccgagattgtattgaacgactgttaattgattacatgggttcgggttctatttatatccgagatgcaagatatgtcattgccggacatgatatttatctctaacaaactctaagataccataaatcttcgtggcagactttttcccaaacatatctctaaggaaatataatgaaatatcctaatttaatagatacaattgcctatccaagagatttatctctatcgcggcaatccacgtgaagcacctttatcgattctaaaagcatttttgaaatcatcatcatcggaatcggctgcatcacctctattggctgt

SEQ ID NO: 6113 - DNA, 351 bp, Oryza sativa
atgcacaatatggactatgtagttctcccttacttcttgtgtagagctctgaaatgaaaaatttgaatgttctatgccttaactggcattatgtttatttggtttcaaactccaactttggtcccccattgatatatgctgcaatgggcaacttataggatattgcaatcggtcccgttgcagtggtttcgcttttaatacgctcacttttacagaatgaagtcgaccctgtcaaaaacaaggaagaatatctgcgccttgctttcacggctaccctttttgctggtatcactcaagccagcctatgattcttaaggtatacacaaacatctaccgggagctctcagaaac

SEQ ID NO: 6114 - DNA, 408 bp, Oryza sativa
agcttctttttggtttcttcaacaccgttggcaagtacatagagtcactgatgacagcaaccaagaggacagatgctgagggtaagatcactggcgccctttgctttcttcatgtggccagcccagagcttcaacatgctctgcaggtgcagaagatgtctgaacaagctgctatgaacagctttaaggaactgacatacatacgtcaagaattaaggaacccactcaatggcatgcaatttactcgaaatttgttggaaccttctgacttgactgaggagcagaggaaacttctagcatcaaatgtcctctgtcaagaacagctgaaaaagattttacatgacactgatctagaaagcattgaacagtggtgagtgccgtttgttccactgtagtctgacatataga

SEQ ID NO: 6115 - DNA, 402 bp, Oryza sativa
  unsure (1)..(402): unsure at all n locations
cgctctgncacctcccaagtcccgttagcgataatggaatccatttcactacggacagcctccttccagtagtctgcatcatgagatgcatatgcttctaaaattgacttaggagtgtcatccacgaggtacacagtgaaatcatcaccaaaagacttagccgtcctttgtctcttactccttcgaggagcttcactgacatcctcctcagagacaagttcatgtgtatgttcagtttgttctggtggtgtgattgaactgggacattattcagagggttggttcgaaccactatgtgtatccttcattgggaaaaagctctcaaagaaggtagcatcacgagactccataattgtaccaacatgcatgtncggtacctcggatttaactattaaaaatcta

SEQ ID NO: 6116 - DNA, 382 bp, Oryza sativa
  unsure (1)..(382): unsure at all n locations
agctngcattaaacacctaagttcccgtgacttgctgagtgcgaaagtactcacccttgctctatataaatatatacatagttcctccgccctgaagagaagataaagtgaagtgaagattagggtttcgtcctggttcccagccgtcgcctgtggtgttgggtgttagttcgttggttccgctgctgctgctgttgttggtgtttcctcgtccgtgtcgtcggttgcattctcgggttgttctgagctgcaacctaagttaaggtaaataagtcctctatctattttaaagatttgctatgattcatattngtcaccgtgggtaccagcactatgtcctgagactggtaccgagatcgcggtttcttaagaagcggttcgc

SEQ ID NO: 6117 - DNA, 463 bp, Oryza sativa
  unsure (1)..(463): unsure at all n locations
tataaaactcagcttagtggacccgaccgcttccgttcaaggcaattacttgtttctctccggcgacccaagcagnctagatatgtggttccatggacagtctgatacctactggagcctttctgccttcagcagccgaaggcaacaaagcggagcatgctgagaacagttgtcagcatatcggaggccgtccggtttcgggagcttctgacgcggatcgtcatgggttttgcagctggactctatggtcccactctgcagccatgggtgatgctctggccatccctggtgcccaatacgcccacgcctcgcatcttcaccactgccttcgacgacgaccacttcaagaactgggacgtgtactgcaagcttgctcgggcaggggcacaaggcttcgctccagggacgagaggattcgccacctacgagagcctcattgcctttctgggggcgtgccttcatt

SEQ ID NO: 6118 - DNA, 411 bp, Oryza sativa
  unsure (1)..(411): unsure at all n locations
agcttgtgctatatgcactaganttttattcttacatcttcaacggttggagggaaaacatatactttctccaggtattcaactgcaacatactccccttgtgacaacttgaatatatttttctttcggtcaattaccttcaggattccatctgagttcatctctccaatgtcacctgagaaaaagaatgtgccaggatgttaaacctatctcaatcctctatttttgacaaaaaaaaaagactctcacctgtgtgaaaccatccatcagccatgacctcattcgtgagctcaggatttttatagtatccggtgaagaagtttcctcggacgcatatttcaccacgggaaggagtaccaagtggattgtaacccatctcaggcacttcttccaatcgcaattccgtatagg

SEQ ID NO: 6119 - DNA, 402 bp, Oryza sativa
agcttgaagaaatttgaccttgtgcttattcaaaacgttttataatatgcaacgaatgggaagcaaatagtatggcttgtcgtgaataaaaaccaatttaaagaattttgctatcatgattttagctacaacttgcagtacctatttattatatataatcatgaatttgaaagaatctacatataatttttggacgaaattaaactaaatcaaatttagccaccatgtgaaagcaaataatagctttgagaaagtggtttacctgaatttcatggtctttgaacagcgggtgtttaaaggttggctgttgattgacgtcaacacaatcgtatatatcaccatcttctgtctaattttatgttacctatgcttgttagacatcaaacgatgcagaatacaccc

SEQ ID NO: 6120 - DNA, 388 bp, Oryza sativa
gggctatgagtagaactaagtaaaaaccctgcaccttatgccctagctctgtttttaacggatcaacctgtgaccttgtcataagaatgtatgaagtaattgcagtaaatcagttgtttcacttgcgtcaatcatgttgattttgttctagtggcaatcagttgtttcacttacgtcaatcgtgcattataaaaagtttcatcctgcagttctgttatgtccatttggcatttggcatttgccatgttaactttcttgctaaattaatgcctacatgctgcataattattcaatttgttaagtatatgtccttatgtatgttcctctatatgttctgattttcccaggtaacagaaaatgggaagcaagataagcatcttgttgcgac

SEQ ID NO: 6121 - DNA, 408 bp, Oryza sativa
agcttgcaaacaaagtggcaggttgttaatctccaagttgttgtcccctgatggccggctctgcttgattaaatccgttctcatggccctcccagttcacttcatgtctgtattgcaacttccaaagtgggcaatcaaggacatcgagcggaaatgtcggggatttctttggaagggacagcatgaggtgagtggtgaacattgaacattgccttgtagcctggaaagatgtctgtacaccagtggaaaatggcggcttgggcattcgaaacctagagctcttctgcaaagcgatgcgcctgaaatggccagccaatcgcttacatcagaaggataggccctggacccttgttgacttcagactgagcgcagatgacgagaaaatcttccaatctgcatctaaattct

SEQ ID NO: 6122 - DNA, 449 bp, Oryza sativa
tgcagtaaattaggctatagtttgaggctttgaaaacttgttatcggaaaaagaattcatagcattgcttgcacaaagtatcacatcatcactaactgaccatgttatgaagacatttgcttctgtacgttttggcccgatttgtcgactaaccggatactagacagagcagtgccgtaccaatgagactgaatgagtaccaatattgtgtcgaaagcaaatgagattgtttctgaagtgtcaatctgatttgtttcagaatcgcctgtctgttcatgattgttgtcaatttgacagtgatctctgattctctgaattctgaaggaaaatgaaaattcattatagcacggcattgccatatgcttagcatgaattaccctatatggaaatgataacagcattggtagactgtatcactattatggcaattaatcatgtagatctgacca

SEQ ID NO: 6123 - DNA, 392 bp, Oryza sativa
agcttcagatcccccttcctaatttctatctgtaatcctgcctccctgactgatgtttttggatcgaaggctacggcccgctttttatttcaatccctgtctgatgtgtctcacccagcacgaattttttggtgtccctatctggtaaaactgttcgattcaatacaaactgactgcgggcagtttggcaccgagcaatctttccaacagtcggttaaaatttggacctttcttattttccaaactaataatcacataaaattcaagctgaactttgcattgccaaatccatgcggcaagatctgctaagttttggccatttcaaatagagaaacaagccaaatttggtctcgtttggacatcaaaccaaatagctattttgttttagcagt

SEQ ID NO: 6124 - DNA, 339 bp, Oryza sativa
  unsure (1)..(339): unsure at all n locations
atgttcttgaacatatcactcanttttcgcactgcattcctgttagagagagccacacactatacataatcccgcacaatttcttgtgattcatccacatccaacgagacaaatggcttccctcaggcgtatgtcacctgcccgcaagatgnaaccaaacgccgattgtgtagagcatgtttgacaccacactggcggtcactgacctaaatccatgcacagccgtgcaacctttgctgatccctaatacgtacctcaggaggcagccggatctcatgctgtgtacgctcacgctggccgactccatggcccttcataatggatatcctgccctgatct

SEQ ID NO: 6125 - DNA, 366 bp, Oryza sativa
cctgtgacttttggcacggcgcagtcgctatgcaagttgggatgtcctctggctagaccaaccacaccttgtgccggacaccaacggtatccagcttttcagccaggttcttcagatgtgtctctcctttcacctccagagttacctatacacatataaagctctcaccacagctattgatgccacctataacagaatgtaaacgatgcctgataaaagtagtgggtactagtgcacgtgtgttttcactcgggatacatcttgtagccggaacaaaaatcaattgtcaacaatacactattccacaagcatgagttgaatccggcttcgccagaaactactgagacagggtacaggatcaatacc

SEQ ID NO: 6126 - DNA, 444 bp, Oryza sativa
  unsure (1)..(444): unsure at all n locations
ntccncgtcccggtccctagcagagaagagctattttttccctcatgcggcatctgcctctgcccccagcagcagcagcagcagccgccgcgccgcgcgaagcatattctacttcttctgctcctcccgccgcgcgagcgctgagccctactgctgacgcctttgcccagatcccgtccgtggccatggcggcgagggcgcatgcgtggctgttcgcggccgcgctggtcatcttccacggctccgagtacgttctcgccgcggcctttcacggccgccgcaacgtcaccgccacatgtgagtgagacgcccncccgctaaccctgttttcctcgctgctttgggttgggatcgtcagatatagagaaaagtttactgaagggatgtgtcttgtagttgtgtggattccgccgctctattccgaattgaagcgaatgtattcgt

SEQ ID NO: 6127 - DNA, 376 bp, Oryza sativa
  unsure (1)..(376): unsure at all n locations
aacatatcacaatcaantgatactacttcaactgttccttcattctctagagcatgggttgctgctgagatcctttgcacttggaaatggataggggagagtgtatttggcagccttaccttctctgattcagcactcaaacatggaatcattttgtggagcttaaaattataattatcaaaccgttttcaggaaaattaaaattgaatgaagcttcttgttacgctgattttggcgaaaagcattttgagttggcttgatgtagccatcttttgcctatcatccagcccaagggaagtagtacaacaaggtaatctgcaccataactattttcaatcgtactagtacaacgctacattcatataatctggtattt

SEQ ID NO: 6128 - DNA, 417 bp, Oryza sativa
actcagcttcagttaggggctgggataacagcccaatttgctcactctgtttatagagcctgaaacaagtgtgcacctcttcatggagtgcttttatgcgagacatgtatggaacaacatctggctgaagctaggccttcagattccatcactgtctccctttaatggtgacatgcttgagtgggggaaagcttctatgaagcaaatgatcaaagaacaaaggaggtatttcaacggtttaatcatctacacaacatggggaatttggctccaaagaaatgatcaagtctttaatgatgcatatggctcggtgcaacaagtggtgaattccatcatcaccatgtgcaaagcctacgatgaagcgatcagttgtctttgcaacatttgatgctgtttgttgccttgcattctctcaaa

SEQ ID NO: 6129 - DNA, 420 bp, Oryza sativa
aagcaccgcggctgcagctctcctcatatcttcccatttcttctctactagagagtagtccaaatatcaaagtgagttgtactgcacttgagttgtgtgctttgagagtgaagtgaactccttttatagccatcctatggtggttgtgatagttatccaggccgggaacccgagttgtgtgctttgagagtgaagtgaactccttttatagccatcctatggtggttgtgatagttatctaggccgggaaccccgcataaccgccattgggcaatcatcaggagtgtacacgtggaagtagatagtaagaggagccaatgtctgttcggtcgacgttgtggttcggctgacccctttggagttctttggacattggcttctagaaaagaagttgcaacttgttaatacaagtattctatt

SEQ ID NO: 6130 - DNA, 360 bp, Oryza sativa
ctaagctgggccggagcgcgctcacctgtgtcgcggactttttatccggagcggcgggccccccggattgtacgacgttagccgattggagccggggacgacgtggtaccgtggccgtcgcgtagctacctcgcgcccggcgggcgacgctgtcgtcgaatcagctgaccggcggggggctggtggggcttaactccgcgccgtcgtgcctgcagccggggggcgcagggacgactgtacagtgccaccttaatcaactatcctgtctagttagcgcctgacgcttgatatcctcgctttacaaatataatcatcgttttattaattgaatccggcccaatttccattcggttataaatc

SEQ ID NO: 6131 - DNA, 412 bp, Oryza sativa
agcttcacaaagcgaggttgagtccgcgcctaataggcgcgaagatgacatcctcacaaaggcgctcggaaccaaagaacatcctggccgaactcggggaattggtagcgatgtgccctggaagcatggactccctcagtacagctcccaatacaggaaacggaaagtctccaaagaagagagggacgctcgtttgaaggccgaacttaaagttgaggtcattcaagaactataagctagcatgaatgcaagggtggaagaaagggttaacaaggtgctcgccgacatgaatataccccgagtcacaacacctgctgtgcaaccaagtcctcgtatacaacacgacgcgagtccgtcacagcataagagtagttgtgcatccacagaggtgccggcccctggtctcccgatc

SEQ ID NO: 6132 - DNA, 455 bp, Oryza sativa
tcctgggatagtgatcaggaagaagcggttacatgttcaatttctgcatagaagtgggatgacttgatttcacgtgttgtgagttcaggatcaggtttgcttctgaccacatatgagcagttaaggatcctaggggagaagttgcttgatatagaatggggatatgctgtattggatgagggtcaccgcattaggaatcctaatgctgagattactcttgtgtgcaagcaattgcagaccgtgcacaggataattatgacaggtgcacctattcaaaacaaactttcggagctttggtctctctttgattttgtgttccctggaaaactaggtgtcctgcctgtgtttgaggctgagttttctgttccaattactgttggtgggtacgctaatgcaacaccattgcaagtgtccacggcgtatcgatgtgctgttgtcctacgtgacctggtcat

SEQ ID NO: 6133 - DNA, 401 bp, Oryza sativa
agcttgaagatgaacagtgccagagaggtctactagactttcggctgggcttctacttccaaggactgattaaaggagggacacaaagcagacttcgggaaagagaggaaaagggctgcaggctgagaggagactgggccgagagtgagaggacttttcctaattcggcccgaaaaggaaaaggtgaactttaattacttttccaattaaattaatcactgaaatgatctttgaattgttaaaaatacttctaatgctcaaataatttcaagaaaaaaaacctgaaaatacttggacactcaaagtacttaaaaaaattacaatcagaccatttaatgattaatttaatatttaaataattgctgaacttctctttgtatgattaaaattaggaattgagc

SEQ ID NO: 6134 - DNA, 409 bp, Oryza sativa
  unsure (1)..(409): unsure at all n locations
agcttctgcttggtcagtcctgaattgatatgcacttcaattgttaagttctgttgctcttttggataattcaagatgttacatattcttccagctaagaatntcagtgtggacatgtgcaatggttgtgcttagattttgtgacctgaacacatccttctttttcctttttggacatagaaggtgggtaccatttgctttgtttatttgaatgtagtcaaatttgtgcttagataatttggtagcttatgcatcaactcattactaactaaatacagtgatcttctgagattgtgttttgttgaaataagtgggagacttgaaggttcaaagcagaactgcagcaatgaaacaccaactgacttaacctgaactcattttctgttgatatgacttaacctgaactcat

SEQ ID NO: 6135 - DNA, 380 bp, Oryza sativa
  unsure (1)..(380): unsure at all n locations
cacaaaatgcaccaccacagaagcacaacatacgcacgcacttgtaggtgcgagtctttaacacacgctcaaagagacggagaccatcaagtagtctaaacattgcagaaaatagattttcagaagatataactggaacgaaaaattgcgccacccaattgataccgctttgctgcagtactaattcagctgaaatccacaaccttttgcttgaagatgaagacattcctcccagtttagtgatgccttcaaagcaggaacagttntgccgctgtgattntcatggcattgactatctagaggactattaccggtatggcaagacatgcttcgaaacaggtaagagtataaaagtggagaaatggacagctaactaacta

SEQ ID NO: 6136 - DNA, 423 bp, Oryza sativa
ccagcagcagcatagcaacttcgcagtaacaaagagtcttgtttttcttgaatagtattactacataaagtaggaattgaaacaaaaatatatgggttaaagcctcacatgctaaccatatatttgttactacacataagtagaagtgttactacataataggtgcatgttaccacttctaagtagctatgttactgcatgataaatgcagtgttactatgtcatttttacgagatgaagatcgaataggtgagccataggtaaagtttgtaggtggctttgagcaaagtctgattgatgtacgagtgttttgaacaattttatacatttggtaaaaccatgttactgcatgtatatacccttgttactataaattacacattctgttactgcatgtggagggctaaagatcaaaatgtcaat

SEQ ID NO: 6137 - DNA, 447 bp, Oryza sativa
  unsure (1)..(447): unsure at all n locations
acactaaaaactcagctacnctgcccctgaattggagtcccataaccttttttttattggctactatctgcgtacattctggcccattgcacgggaataatttgtgccattgttattccattgaatagtccatgcttttacgtgtcaaatatatttttcacaatcaatggtatcaaaacattttatataagaaaaacacgtatcacgtgtttcgagcgattccatgcgcgcatcctaaacattcttttgtgtctaacatctcgttttttttttcaatcagttataccaaaccattcccatattccaataacaattatgagaggtcttatcaattttatacacgcaccacggacttttccacgggtctacacgctcattaaaaaaatcttcctgtaaccaacggtgccaaaatattctcatatgctgtaaaacacttataagcggttt

SEQ ID NO: 6138 - DNA, 406 bp, Oryza sativa
cgtgcactatatagtattggtatttatcatatggagaaacaacaaaggttgaacacataggatatttggtagaacaacaaaattatgcaaatatatctctacgttctcttggtcaacaaacagatcgaatagagacaatccttatggaaggctacaaaacaggaagacctgaggtaaagataaatattcgctctaattctcagtcttctagttctcagtctgttagtcctatgtttgtcccaacaattgatcctaacatcaaacttggaaaataaaaggcttttggacccacaatttctgaagaactagtcagtgagctagccttaaaactaaataatttaaaagtaaataaaaatatcaatgagatttctgataatgaaaaatatgatatggtcaacaagatttt

SEQ ID NO: 6139 - DNA, 450 bp, Oryza sativa
  unsure (1)..(450): unsure at all n locations
ntaagacttgaaatgctatgttttttttttgcctccattcttttttgtctacacatattctacagagtgcaactagatcaaatcagacttaattatctccaaactccaatagaactgaacaatatgtctatcatgtgatatattgttgatctttgcaacattctgtttaactaatgtgaaattgttaactactttcctcagttgatggcgtataactcttgtccacatctcttccaggtaaaacgcattattcttccccttggtcttggaggtgatgatcaatatgattattattggaattaccttgtgtacattgtttctacttgtgcagaactttttttacattgatatctttaaactttgacactttttttacagtataaaagcaaatactttggttctttaactaaagaaggaacttctatggcctagacaattcgcaccgtgttg

SEQ ID NO: 6140 - DNA, 408 bp, Oryza sativa
agcttcaaccactttctttcttctggactctattctgtcagcatgagcagtagaacttggtgcatacagatcagatggctattcttctgttgacgagaactcactgcactgaagcttcaactacacttttgacagtgtgcagaaaatacgagcaacagagtgagctttcaagctcagacaaagtggacgaagggatcaaactagtcacatggtgagaagaatactttgcatttttcctttcaaattatataaaggtttgcagcgagctagtcacaattattgtttcttctgctcctacagaaagaaaattaacttgcctataaaaagtcaggtatcgattctttcgctgttattgcttttataagaaacatgctgttgttgttggtgatgttatgctttgtgttttga

SEQ ID NO: 6141 - DNA, 397 bp, Oryza sativa
acaatggcgaatgtggcgttgctgctgattgttttggtgcagatcatgatgagcgctctctgcggcggctgatcagcggcgatgccgctgctggaggtatcagcaaacggcggcgccgtccgcatggtgacggagatgatgctcggcggcgtgaaatctaacggcaacccatgcacgcacttcccctatagggagggagcagagatcaaaatcaataattccgacgaactgtaaattcctgaacattgttggttcagatttgggatcgagcagccttgattccttgaagcatcggcagagatcgaggactcgatcgccactgcacctagttccggagcataattcgctcttggatcaatctagtagtttacttcgtactttaggggaaaaaggacat

SEQ ID NO: 6142 - DNA, 435 bp, Oryza sativa
  unsure (1)..(435): unsure at all n locations
ggatccttaagtcacctgcggcatgcaagctntttcatgttcccaggagtttgtatggcaccaaactgttcacctgagcaaatggtccaataatgaatatatgatatgatttttttgctttgtcatggtacgttgctaaccttctggtgcagttttctcattaagatattttgtgcagtgaagaaatgcatgtttgtgttgtaagatgcttttaaatttatttacaaatggaatgtatgaactacgaacaagtcaataatagtgtactgttaagtattgattatattttttattttaaaagctcagcgtgttaaatgaggtttcaaagatgctatgaaatttattgtgttatatgaaatatgttgccgcaacaatcctaagatatcaatatgcgtgtcatctatgtgcacttggctgataagctgctggagttgt

SEQ ID NO: 6143 - DNA, 406 bp, Oryza sativa
tgcagcttgtccactaaatagtatttctattttacatatggagaaacagcaaaggtggagcacgtaggatatttggtagaacaacagaagtatgcatacttactgctacagaacattgagcaacaccagtgggcagcatcaccgcctaccaggtcaggtgtcaccgtagattcaattttctccaatggaaaatcacatcaattttgttaagtatttacatacagccaaatctaaatctaggataaatcagcactgaatgcctcagacactgaatgacgcttgaatattgtacagaggtaaacagatcgacaactacatctatattttttttaaagaaaaactcttcatgtactcaagagtgatatgaaataataccttggagctactattaccatgtgcaagctag

SEQ ID NO: 6144 - DNA, 441 bp, Oryza sativa
  unsure (1)..(441): unsure at all n locations
tatctttgagaaggtccaatcttatacatcaactctgtcttttggcaatctgacttggaggatgatctaaaaaagatcgaatccactttgataaaaatccaattggtgctgggtgctgctgaaaggtcgcaaatgctagattgcaaccaagaagctctactttgccaaaatgaaagattctgcctatgatgccgacgacgtcatggatgaatttgattacctgattctgaaggcaaatgctcagcacaagagcaagctaagnagcttggcctccagatctcttgccataggaaagcgtttggttggccaagacaagttcagatccaagttaaggagggtcctcaatagcctgattagagtaaaagaatgtgctgacatgctcatcaaagtgattgtggctgaanactctaattcatatatgcctcctcagccacttcaatg

SEQ ID NO: 6145 - DNA, 402 bp, Oryza sativa
agcttgatctgacatctatgatagcttactgcaaggagtttgatctgaactactacaccaaagttcaggactacactgaaatcagtttcattggaggtgatgttgatgaacatcctgcgagtgagtgtaaacctgacatcaggaggacaacagctcaagcaaatgactgcagggtgacaaccaaatgggttggctttgatcggatattgaagtcaaacaaccagaaatccgacagcattaaccttgatcatctacctccatactcctttgaaactcaagccgtttgggtacagattcctgtgtcagtaaggacgactatggagcagatggaatatcagctctgtggtggtgtacacgctgcttctcatgcgcttctaagtataatacctctgcacatgatgt

SEQ ID NO: 6146 - DNA, 451 bp, Oryza sativa
  unsure (1)..(451): unsure at all n locations
tcatgtntcctttnttaccctctttctttgtcccaatgtatctactgaatgcataattctgaaaataacgttggaaccgcgatgtaactaaagttccactcatgtacactgcaaatgaaaaatcaaatacatggaggggaaatgtttcaaaggcctgtctgctgttaatcatcccatgcatgcaattttcttatattaaaagagaataatgtgacattttctgggacttacacgcacaaatagctgttcaatccgcacgcttcttgactagcgtcacatgcacaaaaagcaaatcactttttccccccaaaaaaaaagtgctgatcaatgttgagatgcataattttcatcatcagaaattaaaaggagtggtccttatatttgccctgcccgttgcaaacaccgtgtccttctcctactcgcaagttcagatataatttaaagggatatg

SEQ ID NO: 6147 - DNA, 394 bp, Oryza sativa
cagcttgaatcatggcattactcacatgttgttttcacaagccaatctatcggagttcttttccaatggtggggggcccaacttcttattctaaccacttcaaaatatatttatgtgcagcataaagaacctcaatgttagattgggttcatttgcaaacacctccagaaaatcaagttctgccttggccatacagaataagtttgagtttggctgcatccataagaagataagccttcccctgaaacatgatcgatggtgtcgagtactcgtgttactagttcaagctatattattagtgcttggtaaaattttgttgtgactggcagactttactcaatgtgtctgagcaaaattaaacccacaaaaaaaaaactgggggaatgcacctttc

SEQ ID NO: 6148 - DNA, 432 bp, Oryza sativa
actaagcttcctccgttcccaccggggtcagctcttatatactccctcctgttttaaaatgtttgacaccattgactttgtagtatgtgtttgaccattcgtcttattaaaaaaaaattaagtaattattcattcttttcatatcatttgattcattgttaaatatactttcatgtgcacatatatttttacatatttcataaatttttttgaataagacgaacggtcaaacatgtacttaaaaagtcaacggtgtcaaacagtttgaaacggagggagtacaagctcatactgtagtacagtatgatggtagcgagagtgtgaatgtgggagactgtgggagtagcttcaacgtacttctagtagtatacgaattgaacggtaggtctagattacatactggcagtagaaataatggcctgtgtgtgtttt

SEQ ID NO: 6149 - DNA, 411 bp, Oryza sativa
ccttcttagattcgtctcgtcaactatttactatatgagcagacagttatctgtatagtcaacatgtaatacttcatgcacgcgctcaaccgtttgatatgataaggtgaaaaattataaggtggaatctaaacagagccaaaatcacatcccaagaaaaacagcagagaaataaacaacacgaaacaagaagagactgaggccctgattagttcccacgcaaaaacttttcaccctgtcacactgaatgtttggacacatacatatagtattaaatataggaaaaaaactaattacaaccgattgcgtgtaaattgcgagacgaatcttttaagcctaattgctccataatttgacaatatggtgctacagtatacaattgctaatgacggatcaattagggcttaataa

SEQ ID NO: 6150 - DNA, 458 bp, Oryza sativa
  unsure (1)..(458): unsure at all n locations
tactaagctggatgtttcttcctgatggatgccgaccggaagaatgcatgttctgnatgcagccgagaagatttccctggacgattggtatatctcatgattgatgtcctcaaatctaaagtccgatgggagctcaaggtctgctgaatcttcatagagaaaccaagttcgagcatctttttgaaagccctcatagaagctgcagaaccagtctttgagcagttcggctgataactttgctccagcatcggctgatgtggatgcatactccccatatgacctacatcagcgatgagtgcgttcttctccatcatcttctgtggtcggttctagtcttgggaactcggcttcagttacggatggccgattgacaactttcatgactaccagatttagccaagtttgcaatagccaccatggtccacctaccccgactattgagccgacagctaacttag

SEQ ID NO: 6151 - DNA, 412 bp, Oryza sativa
agcttgtggaggcatacattactgatacttgtatggaataatgacagtcttgttgaaattgagatcatatcctgttctatcctgaaatttgacgattacagactacagaccatgcagacactaatttcctatatatgcaacacactgcggttacaaggataggataaggatgatctggttgatatttaacgagaagatctaccggatgctcatattacagttatataccttgggcttaccatagagcaacccctttttatatttcagaatgaagcttcatcttacatttggtttcactgatatataattattatcatttaaattttcaacatgtgattgaatttgttgtactgaatcatgcagattttaatgtctatatgtttacgagaacatctctaacaccttaaaggat

SEQ ID NO: 6152 - DNA, 338 bp, Oryza sativa
actaagctggatggctcactacccaccttgcaagcatgattttgtctctccccctgcacgcttatacatgtcactccctcgtcgtgcacctatgcgactctagagcatactctggtatcatacaatccctggctggagcgatgggaaagacagcttcatacccgctaacaacttatgtttcccaaacgccattagagtaaagaacgctgttctcttccaacgactacgtaattattggcgaaacaatcctacgcatgacgaagcttgttgatgacatctagtaatacccacgcaaagccttctcttaattccccgaaacttccaagtttccttccccc

SEQ ID NO: 6153 - DNA, 408 bp, Oryza sativa
  unsure (1)..(408): unsure at all n locations
agcntttgcgttagttatgccatggctttctctaacccgaacgagattaaagtcctaaagccaagcaaaggtcagactaaacaatgctctatctctctctgggcgtcgtcaaagctttgggccattctcgtggcctttttttctcacctttgctgcctcgcacacaggtgaactcagatgagaaggtactgaaagtgatgggaggggcggtaactagcagtagtgtggttgcacagtaaactggtagtggtaaaacgggaggaacagcagcggcagagcagcaaaagaagagggggaaggggaaaaagaagaggaaagagaaaggctgcagcgagttgccgtggaacggcagtgcgtgctggggataaacaaagccgaaagaaatgggctctcgcggcgcggctcgag

SEQ ID NO: 6154 - DNA, 442 bp, Oryza sativa
  unsure (1)..(442): unsure at all n locations
tagcggcctanatccgagatcaaggcggaagaaacaaactgtatgtgatgtcccaacgcgacctaatcgtatgcaatgaanatgatgccacacatgtggtttttggccttcgaatctgtgcttgtcaagcattggaacatgcttacccggcatgtcagtatgtatatatgtaatccagtatgtgctatttccaactaaaactattccaagtcaacagtcaacaatgtgttcttcgtgtacgaatttgaattttcaattccacaaagtcacatgtcgtaacttgaaatgctcgtagtagttgcttaatagggtctggttggtaggaaattagtctctctttttttttcgaacggcgttggtaggaaactagtcgaggcatttcctattactgagctcgagattaacctttgtttacacacaactgcattgcagcttttgaaaa

SEQ ID NO: 6155 - DNA, 409 bp, Oryza sativa
agcttgaatgaacttgagagcaaactttgtttatggaatgaaaatgtgttgaaatggggtgaagtcccctctcccagccggttggcttaagtagcgcacccacaacggtcacaactgacccatggggcccactagccgttgcctcaaaggaagaggcagccgaccgttggcctggccggttcggtcgaaccaaggtgttcggccgaacccctggtgggcccaatcgcccccactttcggccgttggaatccaacggtcagtgtggtcgtagcacagcgaattttcactgaaaattttattttggtttgttctctaacaaaaaaaattcatttgaagaatttcctcataattcaaaaatcctaaatgcaaatttgaaattcaaacatgcggtgatgcaaaaattcaaatt

SEQ ID NO: 6156 - DNA, 334 bp, Oryza sativa
aaaaaaatctctgaaaaactaaataacaataaaaaaaaagttgtggctctctccctcacactagagagagccagccaaaaaaaaagaggaaccagcgagcacaccccacccttccccccttggcaccaccctccaccaccggttcttggtttccacgctggacgggtatgagatttgcggcgtaccttgtggataagctcgccgctctacttcgactacccatgaccaccactgtacactaatcccttgaacgattatatcaattgctttggctaaccgggattctaagtttctcttgagcaatgctttcagcccaccaacagcttcaccacaa

SEQ ID NO: 6157 - DNA, 362 bp, Oryza sativa
  unsure (1)..(362): unsure at all n locations
atctatcaggtgtttctctctcaagtgcggccatgtcacaagtaaatattctcaagcacttcaaaatatatttatgtgcagcataaagaacctcaatgttagattgggttcatttgcaaacacctccagaaaatcaagttctgccttggccatacagaagaagtttgagttnggctgcatccagaagaagataggccttcccctgaaacatgatcgatggtgtcgtgtactcgtgttactagttcaagctatattattaatgcttggtaaaaattttgtgtgactggcagactttagtcaatgtgtctgagcaaaattaaaccccaaaaaaaaaaactggtggaatgcacctttcagattat

SEQ ID NO: 6158 - DNA, 448 bp, Oryza sativa
  unsure (1)..(448): unsure at all n locations
acactataaaactcagcttgacagggctcatnctttccagaaagcatgctattctgtttatatcgtgattgaaaaatatgcttaaaatatgaataattggcgcaagtctgggcgtcagttcgttgtaaagaaattaaagtgcagaaaatgccttggttatcctctctccatcccaatataagtgcacttaatatccttatagggagggtgcatgtcatatgtacttatatttagggtgcgtttagttcacgctaaaattaaatggttgaccgaaattagaacgatttgatgaaaaagttgaaagcttgatagtgcaggaaagctttaatgtgatgaaaaaattagaagtttgaaaaaaaaattcggaactacactcggcctcagatggagggagtatcttagttttcacaactctatcgtagacagaatgagtgcccacatcccccac

SEQ ID NO: 6159 - DNA, 414 bp, Oryza sativa
cctgccagctttgctacaacccatcagctctttgtgacaaaacatgactcttttctgtatctccaacaagtcccttcacttttccaccccaagatttctttgattttgcttgaggcgtggatttcttttggcccttcaacctccacacatggatggcagcctctattctgttagctacttcaagtgtgtggtgttctgatgacagatccaagcaatcgaggaggcactccggtgagaattgttcagctgttatatatcggtaaattatctcacccaagcaagatttaccactctgcagaaaaaaaaaagaagaggttactatgtgtggaactcagagagatatcattaccagttaagaacaactcttttatgaaggtactcattaagcacataaacacacagtaaaggatatca

SEQ ID NO: 6160 - DNA, 455 bp, Oryza sativa
actcagcttatacgagctggattattataactgtagtacgtggtttatttatcttgtttttttataaactgacatattgaatagatattagtatgtacctacacgataaattagcatatatttatcttaatactttttctcttctttttattagggtgattaactagaaaataaattattttatcaaaaaattattcttacatataactaactactcactactctttctgtttcagattattagtcattttgactctgatcaaagtcaaactacttcaagtttaacaaagtttatagataaatatagtaatatttacaacaccaaattaattctattaaatcaattatcgaatatgttttataatatattcgttttgggttgaaaatgttaatacctttcctataaatttgatcaaacttagagtatttgacttttactaaagtcaaaactactt

SEQ ID NO: 6161 - DNA, 358 bp, Oryza sativa
  unsure (1)..(358): unsure at all n locations
accttccttacgacatgagaggatatgattattctgangattaccaccgccatgacggatgcgacggctaccatcagtccgatcactgatgacctcgcccatatgcaccttgcgtagtgatgatcgatctggttgcttgaacaaacttcgctattgaattccatgcccaccaaccataacagacgattctactgcaagtgcaaaacagatgaccactaaatacaagaacaacctaataatgactgtttgattggactacctgaaaaacatacgaatcgggtgacaaacaaatactccaacgaaaatcttcaagaggcggaagctctcactatatttcctacgaaaccgctataagatt

SEQ ID NO: 6162 - DNA, 407 bp, Oryza sativa
  unsure (1)..(407): unsure at all n locations
agcttgaggtaaaaaaaactcacatcttgcactgttgcattttcgacacattggcctacatggcaatttccttctcataacaccaagtttgtatgtacccttttggaaatgtcaagagtatgttcccgagtaccaagtctgcttggtttgggacgatcagatgccgcacagcttctcgcctgacctggagaccaggatcacctcatcctgaactctcggctctggccctattcttacccaagcttctaaccggtggacgacagatccttcttgtctgcctaagccgaatatgatcctggaggaagtttgttnttctcagccagggagaaatatcatccattagccgaaacgatttaaccaaaggcggcccctagctcgggtctgccgaattgttgttttggcaaaat

SEQ ID NO: 6163 - DNA, 460 bp, Oryza sativa
tatccatggctgatgccaaatagttgtcacagtaaccatgttgtttatagataaagcaagagatcacgtctcgcagtgtcacgacaccaacaacctcgaagtcaccgtccacgacgtatatccggtgggttattcttgatgcaatgctgtcaatcacgctgccaagagaagcgtcaggcgaacaggtgagaggtggcttcaccaggccgttccctgaatcagaaacggtggaacctatggtcttcatgaactccatgacagtaagttgcctgtatggaagatttatcattatgaacatggaaatgcaaaattttgaaaatgactcacgcggtaacaaatagccggatggtttgatacctgaaattcgaaaacaagtcaggcctaagtaacacaaagcgaatatcccttatgctcacactgtcaacaagtttttgttgggaccttctactacaggcacacc

SEQ ID NO: 6164 - DNA, 382 bp, Oryza sativa
agcttatctactctcttggaaggtaaatgtatcaaggtaatgatgtcgcaacagctgcaaggttttattacatggtaggagctagagctcaccgtcgctgccgtcgccgtcaacgctgccgtaccaggtggccgtggccgggtgccactccgggtcgaccaccctgtgcgccgcaccagcctcgccggagtcgaagacgaacgcggcggacaggagagacacgaagagcacggagcgtatcaacatgggagcagacgacctcgatgagaaggctgccataccgaagagctagctgatcgaagcagctatcctgtcgctactgccgtcttgtttgtgcaggagcagctcactctcactcctctcactccccctgtgcgtgggt

SEQ ID NO: 6165 - DNA, 361 bp, Oryza sativa
ctgtacgctacagcgttgtacaatgttcatgtccacgtccatacagtcgcaacttggacgacggagacctgtacacagtcttgtgcatgaccacatgataacgattttttaagaggccaaagaccaaatgtttttttttctttttcctgcacatctccagcagtagcccccatcatccagtgtccaccgaatcgacaccgagcttttggttcgaaaacgatcgatctccttgcgcgatacctccacgaatccgtccgtttctgttgctgctgctgctgccgccgccgcgaaattccgagatctcccttgttctgcagccaatcgatatatgtctctgtgcctggacatttgggttctttac

SEQ ID NO: 6166 - DNA, 421 bp, Oryza sativa
  unsure (1)..(421): unsure at all n locations
ggaccttgagtgactgggctgcagcttagtggattgttgtttttcagtctctccggcgccggntgggagtttggaccgatgcgatgcgatgcgattctgttgcgacagcgacgcggcggaacacaagccttcgaggagtgggttacttcatcacttgttgggtagtataacgtggctcgggtgggataataacataacaactcctgtttgtctgccgattcgttgaaatttatcgaattcgctcaaatctttaacaacgcctaaattttccatttaaaatcctctgtgttatctgtctaccatgtgctacgtacatcaataccacgtgtctgtattacaaaagataatagggttatggcttgtttggcaactcgagagaaggggattgtgagtttacacgagagaattgacggtgaaatta

SEQ ID NO: 6167 - DNA, 403 bp, Oryza sativa
  unsure (1)..(403): unsure at all n locations
agcttgcataggagacacatcacaatgaatatattctgcatatgtcggaatggaaaacgaaagcctacaaacctgtggtacctgtggtctatcagaatcgtgtagctactaattatagtaaggaagctgatgtgcgcgagtgggccaacccatcttctctagcatatgatgactcaccataccgttgtaggtatcttcatcatagatcacactttctcgacctttgttgatgacgaacaaaatgtgagacacattatggcggtgcaacactgtcatgatgctgtacctgcgcgctgagcacctgctatacaatgatggttctgtgaggccgctgtgttatcatgaacaanaaaaaaactaccctcattctgaagttcttattactacttttgcccatgatatt

SEQ ID NO: 6168 - DNA, 390 bp, Oryza sativa
tgccgaggtgtgctacgcttgacagctgtagcacatatatgttattgagatcagccgacaagccttatatcagtgcggatgctactacttgcctactactggtgcagatatggtggatacgtgagcatatgtgtgtgtgcggtaccgttccaccaacaagacacacacctggagatgctagacctctctgatctcttcccaggccgagtactatgcagtgtggagcatcggtatattctccaaaagaatgtgcctaaaagagcgtaccctgaccctaccacaagcccatgcttccacctccgctctccttcatgagatgatgccatctacgtggacttgtgaggccgttctgcgacatactgcactgtaaagggatatatatagtttgag

SEQ ID NO: 6169 - DNA, 409 bp, Oryza sativa
agcttattctcactaatatgtagaaccatctgtggtttccccatccaggaggtttatttgaagcatcttcgcttgacttgatttgtacaccaagaaacagagaaaaataagtttttttttgtgtgaggaatgattcttagattatgaaattcagggggacagacgaagcagctgagtgaaaattcatggtacggtaattttttcccttcacaatttcattgaaatttaataactatattgtacataattgcaaaaaccaagattaatagcaatgtatattacctgtgagatagaaggggaatgcccaggggtataggctaaccaaagaacaaaaaagacaagaagggataaactgaagaatctgtgtatgaaaaccaaagcctgaatatagatgataaaactagctgat

SEQ ID NO: 6170 - DNA, 463 bp, Oryza sativa
  unsure (1)..(463): unsure at all n locations
tactaagcttagccttactcaatacgtgaaattngaggttggcaatgttcttgttttacaaaccggggcagnatgagttcagaatcttgtaaacgactagttcacatgctagcctacagcaatgcggaaaattgaactcaggaagtagcataaatgtgtgcacacgaataagcactcgtgtgtgtgttgggggtgggggatgtaacatgcctttgccatctccccacactttaaaattacatacaagttatatagtataattacactacgattatactataattatatctgtcaaatttttaaagacaatttgttgacaaatgtataggtagtcctttcaatcaatatgtaacaagatgggtataattgatatcttttgcccatctctagatctacagggagtgttggtgaaaatatgcgatgtacctagggcctatgtgtagaatatttatctatctattat

SEQ ID NO: 6171 - DNA, 407 bp, Oryza sativa
agctagtacttctggtccagatgatgtgctgatataaaccatcttgaggagctctaatgcattggcaacagccaaggacttgcatacatctcttttagtaatttcatctttgttaggtataatgacttcttcatgatatctaaagaaattttccatgtttttacttgcatggattgcagttggatgtctatacggttttacatgttcatggagtccgctttctggaacttcagtgcttgagctggttacatattgcataatctgatcattccaaggaaaaatcagtattgaataaaatatatgttggttgaggataaagagataattacttactgtctgttcctgcccagttggagcttcgtcagcattagaatcattgctcacttcattcttagaactgatttgct

SEQ ID NO: 6172 - DNA, 456 bp, Oryza sativa
tctgacttgtggattacactcgctgcacttctccctttcctatttattttcttaaacagttttcggatcaccatctttgtccgaatcattgagttcttttttaagttaaaaaaagttaaatcactgggttgatgtaagtaaatgagaggcccctgttctaagcaggtttcagagagcacggcactcgtacatttggcgaccatggataagttccaggtcctgaagcaacgcaagtgttcctttcgctgcactgtctgtgaacaaagcatacctggcctatgtgtgcatgcaaacaaagttatttagagatcgtgtcacgcataagaatcgattgtttctggaaatttgtcctctccgaatacaaaagaacacattacttcgatgtttgaacagacgccatgtttagaacaaggcttgttgattatagtagctactactaatctgccgttctgcttt

SEQ ID NO: 6173 - DNA, 410 bp, Oryza sativa
agcttgttgctattagacaaccctcaccgataactagactctaaaataaataacttttgatatgtttcctattggcacctttgttagggaggccaaattccttctttgctgtaactttatcgagtttgctgtaactaactgttcttatgggtgtaacttaagccttgtttgtttcagcttaagattattgaaatctagattattaaatcagatttctctaaactagattatattaagctgacataaaataagctacgagttgtttgtttctctggattattagaggcatctaaaggtagtgggtctttagacactcaataatctggaaaaagctcctctagaggagattattggattatagtaatctggcttatagattgtaataatctagcataataatctacttgttt

SEQ ID NO: 6174 - DNA, 441 bp, Oryza sativa
tctgtcggtcgtgtgacgccgacatgtggggcccccatcctctgtgttgtagtagattctccgtggaaggacaaagacattccgctgctgctaagcacgttgacgtttgcgtcgaattaggttactaattaggttttagtcgtcgcctgcagcggcgttgggttggctaattacttacttattagcttcagctcgtagcacgagaaccgatgcgtgtacttagcttaaccaccacatttccgtcacgttgttgctgcctgcgaaaccgtgtgattacaacgatgcaaaacatgatgattattaaagcgaaacgaatattagttggatgcttagttaaattattgctagtgattatatacgctgacatgttctttttctctttgatggaaatagctgttcgagttcgcggacacgtacagggggaagtatgacagtatcata

SEQ ID NO: 6175 - DNA, 349 bp, Oryza sativa
agcttgctaatgtctgccggaagaaaaataacatacgcatgtacataaaaaacgacagagaaaaacatacatccataaaaatcgacagtctcttaaaatttgataatctacaatgtaaagttaaaatatattacttcacaaatataaatatatttagttaaataaatatttataataaatatccaatcaatgttccttaaaccatcttctaaatctatctattatataccaatagtcctttaaatttggtcaacggcttttacacccgctgcctacgtgtttctctaataaataagataaatgctaaaaatctattttattaaaaaggcataaaatatcgtacatatgt

SEQ ID NO: 6176 - DNA, 465 bp, Oryza sativa
  unsure (1)..(465): unsure at all n locations
cttgatatggctgggtacttaatatcttcatgcacgcggctacttctatgcattgacgcacataaacatgaagtaaaatnagttaattataacttgatgtcattataaatcatcatagtataatggcatcaggcatcaacttcgcgcttaaaatttcaaaagtagtgtgtacatacattaagaatgttatattgtaagattcaagaggtagattgaatttaccaaaacatttcacaaagtggtgactgaagtgatgtagcagtaagcaaggatcacttcacacagtagcaaatttcttaagcctaaattcatgcactgtttactataatattcatcaacgatacatatgcagggataacgagtcaacaacatggcccattagatagctatcctgctaggattaatcaatattcattcaacagttactgacgactcattctggacagcgaattgggaccacccaat

SEQ ID NO: 6177 - DNA, 408 bp, Oryza sativa
tgcaagcttgtaaagatactattaggcttatatgtttgtacactgagctttgtggagttacgtcttgcattaatatcttttgtgatagtcaaagtgcaatatgccttacaaaggatcaaatgttccatgagagaacaaagcacattgatgtgagatatcactttattcgaagtgtgattactgaaggtgatgtcaaggtatgcaagataagtactcatgataacccagctgatatgatgacaaagccagttcctgctactaagtttgagctttgctcaagcttggttggtgttacagtatagtcctagagactatttggcgcgcggtgattttacctacatgaggtatttttttggtgattgatgttttcatgctacaagaggaaattcttctcaaggtggagattgt

SEQ ID NO: 6178 - DNA, 347 bp, Oryza sativa
  unsure (1)..(347): unsure at all n locations
aaatatanaaagcgctcaagacctgttcgctgagggcttctcttagtttattgattagggttattctagccatgttgacactatcaagttgctcaatgcactgcttaaggactgtttcctgccctagaaggtcaaaaatcaaccatgatccttgccgaatacctacgaaatagaaaaggagcaagagtgcgcattagattatttggatccaacaatcgaagcgaaaggatgaaagcattatagcgtcaaacgatgatcatctcttcatatccaactttgtaaatataaaaagccaggggacaggtctccgattagagtgaaaagcatggtcaggccttaaacttgag

SEQ ID NO: 6179 - DNA, 402 bp, Oryza sativa
  unsure (1)..(402): unsure at all n locations
agcttganacgacggttatgcaactttttgcctattatggctggagattcaccaatagactagaataatgttctccttgtcttgtttggttttcttctattttggtttagtgtgtttcgctttatcttggactacacttttttagagtgctagattgtaataattggttatagctcttttaagcaaaggccgatatgtttcattccattatctataaaatgagtgattttatggtccttaagaagttatccagaggtaccgtattttctagtgtaaaattttgtactggaaggtacaaaatttgtagtaaaaattttgatgcttaaagacagtaaaatttcttttggtatatatataacaatgaaatgaaaaaaaaataacagtacagaatgagcgagcgac

SEQ ID NO: 6180 - DNA, 448 bp, Oryza sativa
  unsure (1)..(448): unsure at all n locations
tctcttaatatgttntatccttttccaagccttctttttatattattatgggtcgntcctgtcctgtagttcaagacactattctaaggccagttgcctatacaggatctaaagtctctagtacagtcagctttggttatcgctacaccctctctagacaaacgatttgattcaagccactctactactggtacagtagcaccctgccttaataatcgcataggcacccgggaaccttactcagtaaagaaggagactccctaaacaagactgctagctggtatggagggacgtagcttgcttgcttcctagtcaaatatgccctatccgtcttactttaatatgaatggtatatagaataataaatatgaatggtatatataataaagaaaaaaataaacttcctgcagatagctcaaaccacgtaacctaatcaatgcgcctattc

SEQ ID NO: 6181 - DNA, 412 bp, Oryza sativa
  unsure (1)..(412): unsure at all n locations
agcttccttaaagcagatgaactcaatttctcaccctctgctcctccggatagaagatcaacaacctcaacctgcaattgagctcatcaatatttggatcactatgaagcatatcttgtacttgtaccaggttttttttaaaaaaaaataattctagggagtatgaacaccacaccttcagcaaaggtagtcctttctcttctcttttcctatttacggcaaatccaccatttaatgtctccttactgaacataagcagcatcactaggttaaatgaggaaaaacaaaaaggagaaaatttaaagtaagcacgaacaactctacattatttaagcatggcatatttcatacatttttaatatagttccgtagctgtttgatgaatgaatttcaattntggtcagaacacatg

SEQ ID NO: 6182 - DNA, 211 bp, Oryza sativa
agctagccgttaaatgacagcagtcttattctgtgcatcataaactttatctaaatctaaattttcgtttgatcagctcgagttatatatatatactctctctgtttcaaaatgtttgacaccgttgactttttagtacgtgtttgaacattcgccctattcaaaaaatttaagtaattatttattcttttcatatcatgggagggggtgg

SEQ ID NO: 6183 - DNA, 442 bp, Oryza sativa
  unsure (1)..(442): unsure at all n locations
ctcaaatttcttcacaaaagaagggaggtcatgccaaatattttagtgaatctactttggcgattacatacaaatcggaggtgtctaaaaggatggcaactaaatcctccaatgatttgttgacatattacatttgcagctatgttatgcacacttttttgtctccaaaatttagttgtaagttgatgagagagaaaatttatgtggggaagaacgaatatatagaaatttagttgatttgctaaagaaggttctataacatagtcgagaaggaaaactattangaaagttaatcttgaatactagagaacaaactaaaatgaaaattaatagaagtaaaacacattaaaactagtttaaaactctagaaatagtaaataagaattatttggtgaatattctatgatctttgaatgaataaagatatatcattattgtatga

SEQ ID NO: 6184 - DNA, 408 bp, Oryza sativa
agcttttctggaagcacacaagatatggtcaatgcaatactaagagtgcttacaaggaattttacaaaagagagaaccaaacaattcaacaggtagattctcaatccattgcactaatcaaatctgtttggaaaactagaaatatgcctccaaaagttaaggtttttgcttggagattggttaggggtgctcttccttcggctctcagacttcaccaaagagtaaatgacatctctgttgcctgttgtagatgtggtatgcctgaaagtgattttcatcttttcttctcttgtcctttcagtagaataacatggatgatttcgtgttgcagatttaatattgataacttctctgataattctctcttatctctgatcatatcctgcatcacttctaatgctgctaaca

SEQ ID NO: 6185 - DNA, 424 bp, Oryza sativa
  unsure (1)..(424): unsure at all n locations
ctcagcttgatgtctccacgcttgttggctcctctcttgagatttttgtttgccgctncagattgatgtgcaggatggcaaacgggtttgttgctaaaatcggaccgagccacgagtcttgtactattttcaggaagcctggtattttgaaccagaacgcttcaaatctgaagctgggagctttatctttccattcatttcctattaggaacaatgcaccatggtctgaggttgaggaggaaagaggctgcatggaggcatttgaaaacaaaatgtcctactcaggtgatgcaaaagcgcgatcgatntntgtttgcgttgggttttggccattacccgcccaagtgtaacgtcggcctggaagataaagttccttgacctcaattntgtcaattaaccctttgaaacgctgcatcattctcct

SEQ ID NO: 6186 - DNA, 397 bp, Oryza sativa
agctaggatgttgtacgtactatgttcatatttacagtactagaatatgtcacatttaatactaggttggttttttatgagatagagagagtagttgtttggttgcttccctgatgcatatcctccctcgcctggcccgatatcttccggcatgggattagcttgagtcaagccaccaaagatagtcgcctgagccctaggcatagcagcgtgctttagttattatcctaatctcgctcttagaggtcgcaaccaatcgagtaaagccgtcgtcaccaccatcgaatgaagccaccattgcgatggtgtctctctcgttgtcgagtgaagtagcagccgccgctgccgctcccgtcgtcaagcgaaaccgtttttggaaatatggtcacaattcgat

SEQ ID NO: 6187 - DNA, 442 bp, Oryza sativa
  unsure (1)..(442): unsure at all n locations
tctcatggtcgagctgctcagcgcgcgccgcgttaatgctgtatggtacgcacgtcatgagcaggtgagtgtaacaaaaccggttgtgaaattcgatntcatccattactgttgtatggttttatctagaggatggtttcttagtaaagttatcttttatatatgtcacgtaagtttgatatgtattaagaaattaatatgaggtatcagtacttcacggtaccaaatcaattntgatcgttggatctaataatgtccatcctgtttaggtagatctaacgattagaaacgatttagtactgttaggtactagtacctcgagatgcctttttgctagaccagagcaaatctcacgtattttactacttcataattaggtggagaaactcttaagcactctacgccgcgcggatggaaagccggtggcgtttgaccagcacat

SEQ ID NO: 6188 - DNA, 397 bp, Oryza sativa
agcttcatctgccgcttctgattaattttatatttgcaaaggtgagtaccaaccgtactcagcaagccaccacagcatcaatgcatatgagaggggtattccaaaagatggctatggctcttttgcgctaaaccagttctgtaattcttttcacaaacctaagacctagcatagactgatcaagttttaataccagcgttcacattaaacaacgacagttctgtccaccatccattgtgatttcaaggatagcttcccgccattgagtcgtcatggttttctgaggatgtccaccttccctcctctcaggaagtggctccagcaacataaaaatcatcatgcaatatcccatcccacacaggttaaaaatttagagtctagccaagtgcaatacatg

SEQ ID NO: 6189 - DNA, 444 bp, Oryza sativa
  unsure (1)..(444): unsure at all n locations
cagaatatggcggcatgatatcaaggatccatgtgttattttttaacccgacgcatgcccgttgacaatttctcatgccgttctctgcacgtgcttcattgtacttttggatttcttgtattcacatatttcctgcacaacacaaactttaatttcctttctgttgcatcctgtattgctttgcctgaatatgtacataacgggataagttatggtgtgcancaacaacaaaaacttactgttctgtttcacaatgatngtccattaagaaaaccaagatagtggttattacaatgttttcactcattaaatgctatgaaatgggtaaaatggtcgcattctgctatgcatgtttctttcctcgtaaattcctcttaaaatttgtacttccttgtgttgagcccatggagtgttgtggaaaaacattgttatactgagggagta

SEQ ID NO: 6190 - DNA, 407 bp, Oryza sativa
agcttctatggaaatcaggggggagggtcacttcctaaggatacatcagttgctgtatgtaccatagagaaagccaattctttggtaaacaagttgttggaggaaggccgtctttctgaacttggcataatagtaatagatgagcttcatatggtaagttaaaccaatttggtcctcaaaatttctccattttctttactttcaagatgttgcattggcttcttgcttatgtttacttttgtgagtcatgggcatgggtcccattcatggcggatactcaaacacagtatcttccgctgacataacctattcccatgacaaatttctaacgtgtattgggatttaacttttatttcacctaataggcatctgtacacttaagagatacatacatagtgacattaagt

SEQ ID NO: 6191 - DNA, 429 bp, Oryza sativa
  unsure (1)..(429): unsure at all n locations
tatggagtctactttcatatggatttggtcccacgtcaaaatttctacttagctgtcgagaatttgcaaaacaagccacgtatctcatccagtccgaatctgatttgggttttgggccttgtaattatgtcgtgggcttagcccaagcgggtgtgcgccctatgccaaccctaggacgtccctaatcacatttattcagtagccgtcatcgtttatagtcaggttttgcttatattattcagtcaagaacagttttgccgctagatcggtttgtggaaccccaaattcgagcgcttaatcattcatatgcaattgtngtgcaatctatcttgttattgattgtgttcttcgattccatgcaaggattatccttctcggcgaggtcaaccgggtttcggcatggttgataactataggagacctggtgct

SEQ ID NO: 6192 - DNA, 409 bp, Oryza sativa
  unsure (1)..(409): unsure at all n locations
agccttggcttcgtctgctgacataaaaacattcctttccatgtcttcggatacaacccanaaaggcttgcctgttcttagtgcataaacccttgtgatcatttcgcgaactttgtgtaactcttccacttctagtaaaaattctggtgttcttgcccgataataagcactagcaggttggtgaagcataatcctcgcgtgggggaatgctatacgcttggtgggttctcctccaagcagaatgaaggacgccatggacgcggctattccgaggcatattgtatatatatctggtgtcaccgtttgcatcgtatcaaaaatcgccattcctgagattaaccacccgccgggggagtttataaacaaaaaaatatcgctaattccatcttctatactgagatataccatg

SEQ ID NO: 6193 - DNA, 465 bp, Oryza sativa
  unsure (1)..(465): unsure at all n locations
aatactaagctntgcaaattattatgaagctacgcgactagaaattgatccctatgatcgaagttatatactctataacataggccttatacacacaagcaatggagagcatacaaaggctttggaatattatttccgggcactagaacgaaaccccttcttaccacaagcttttaataatatggccgtgatctgtcattacgtgcgactatctccactatagaaagaaaaataagaaaggatcaaattttctagtatttactagaaaagggggctttctacatagggatcgtcaaaacaacgattttgccctatcagctgtaggaagaaaggacacttcacgagaatcaaaataggaagaaagaaagtatggcctatactactctatggatagagttctcaaattgatagagaaagcaccgtaaagatcaattagtgaccgactgggtcgatacaactaaaaaa

SEQ ID NO: 6194 - DNA, 411 bp, Oryza sativa
agcttaggctaaagttctttgtaattattctccggattattgaaatgaattatctactctgtgcttgaaaaaaaatttctcacaagatttttttctactgcgttgtttattttttttaattttatttataaaaatatttaatttgtccctataatcaagtaaataatccatagcaataataatctgcttgataatctgttataaaagacttgaacctattctttttacattaagattcagattttacctcgattttcgtttgcatgcttttcaactaaacagtgtgtttcatataagaactcaaactactaaacagtgtgtttcatataagaactttctttatagaagttgctttaaaatatcaatatatctatttgtcaggtttgtaataattaaaacttaattgattac

SEQ ID NO: 6195 - DNA, 460 bp, Oryza sativa
  unsure (1)..(460): unsure at all n locations
ngaggacggctcactacaaacttggtcagattntaaataggtatttgaaataaactccaattaaatttctttgagtcaggctttgggccatggcccaggtggcctaaggcctagctagttccaccttcttgtcgcacatgacttataaagagtaaatttcacaaaactacatgtattttacacaatttatcaaaaaaaactacatgtttaagagcttgtttcacaaaactacagatttagtgttttcttgtatcacaaaactacaggtattttatacaatctatcacaaaactaaagatttaacaacttgtttcacataactatatatttagtgtattcgtttatcatagaactacacatttagtgtcttcatttatcacaaaactatagatttagtgtctccattatcacaaaactacaggttataaaaatgctaaaacctatagttntgtgataatga

SEQ ID NO: 6196 - DNA, 410 bp, Oryza sativa
  unsure (1)..(410): unsure at all n locations
agctagttcccatctctgaattctgatctgaatgatttctgtttctgaactttgggtccttcaaaaaagataaggtaaatgtaagtatgaactttgggtcctttaacaagggtataagacaggaggagcagatcatcgggagacagcaganaaaggataaaggtaaatgtgagtatggcattaataagtggcatgacagcaatttcagcagttcgtatacatggtaaattgttgacagaaaacagtaaactctaatcatccaaaaagacatgtcgcagtatatatatacctcactctccataagaacatatctcacaagctaaatgttcagggtaaccacctgaacagcgttatccttgtcaacaacaaacgatctggttacctttcctgaaggcgttgctacttctacc

SEQ ID NO: 6197 - DNA, 397 bp, Oryza sativa
  unsure (1)..(397): unsure at all n locations
agcttacatttacaatgcgggttgcctgaccattcgcctttttcagtagacataactcttcgtcttctttntgcttatttattacgattccttgaggctgcatgttgtcatcccaccacttgaccagaatgggagggcgtgaatccttagctgctcgtatctggaggatctcttcttcatcaccaatcattggccctagtgtatccatgaataaagatgaagcaatcaaataaagtctgttggatcgaaatgatttcagatagcgtgtttacctgtgatgattcccggtcggggacgagtggactcttgtgtcttcacaggagatctggtttctgagtcattgccagcatcctttccgggaggactgtttgtttgagcttcaacctcgggaatcttt

SEQ ID NO: 6198 - DNA, 382 bp, Oryza sativa
agcagattccacgtagcaaggatgagttgcttgtcagcattgagaggatgcgcaaggaggctgaggtgaagctctccatatttgaagatgcaaaatcagcgtttgataccacagagatggcgggggaagcccgatcggatgtggagaggacgaggatggccactcttgctgctggcaaccaattcatagatgctaaaaggattctaaagaccttgagcaggcgggcgagggtgcactatccctgatagagtccctcaagcacaaagctacatctgtggttggtgccaccactaagtcaatgttcatgggatgtggttcggtgccaggtaacgctaggagtcagaatcttgatgatgtgacttgttatagagtctcttttgat

SEQ ID NO: 6199 - DNA, 284 bp, Oryza sativa
tttctaatacagccagaatctgacaactgacgacttacaactcttatcggctaatctaacgacttcgaagccgatgctgactctaagccgatgactacctcaggcttaccaaatttctaggaccagcaggatcttcctgagacaaaatccactccggctttatacagttgaaatatacccgtgaccatataggccacgtatacgacaccttgttcacacaaatcgtgcgccgcaacttcgcgcccagaaaaaagcgctcataccccgccgctctataccccgct

SEQ ID NO: 6200 - DNA, 449 bp, Oryza sativa
  unsure (1)..(449): unsure at all n locations
tacactatctacacagatttctctcgcagaaactagcttatcttgtaccaacaacgcgcccttggttagaagagaatgagaggtctcaacctagcactggcggtgctggttctcgtcgtcgtcctcttggcctccttttccgacgaggttctcgccgtcagaaccccggccgtgttcgccgcgagtcgccggagcgcctcgccaccaacagagcggccgcgagagctcgtggagggcggcaatgccgtcgccgccaccgncacctttgacgcctccgtgaaggccgcggcggcgacggcgacggcgaccggctcctctccttcgaaggtgttcgaccctgacaggatgagcaagcgtcgagtccggcgagggtccgacccgatacacaacaaatgctgagttgctgatgactcgcctgggtcagtaccatggtcgatggtcgggatata

SEQ ID NO: 6201 - DNA, 403 bp, Oryza sativa
agcttcaatgttttcaggcagctgatagagggataactgttccttatgactatgtgcttaagcctcctaagaaagctgaatccagcacttgtaatccccctccaaggaaaactgaatccggcacttgtaatctcatcatcgaacaggcgagcgaaatcttctgcattagtgaaattgcgtaacatcgtcgcacaaagagataaaactgttgccagtaaattgctgctcggatatccctcaccaagtgctatcgaaagcacctgcaacaaataaaattaattttgtttctcattagtatatatgactattatctaaacaaatcagtatggcaattgacaagtgtaatgattcaagcgaggactatattatttatctattccgttatttatttacattacttacc

SEQ ID NO: 6202 - DNA, 449 bp, Oryza sativa
tccgcttgaatccgtcatatgtgcagtaggggaaatttaactattgtataacacttgaaggtttcatagcacccatctgcatatagcacaaactgaacctcacaacagtagctacgtatatcatttttgtctctgcaataacacaactgaatccattatctaaaaaaaaataacacaagctgaattcctcaaccaaaattgattccctccatgataaaactcagatttaatcacatcttcttgaggcggtggccagcatggcaattcctttagaaactgctcaactccattcacgtacagtaatagtgtgctctccaatcggaacaagtaccacactttgcatcgattacacgcaaacgatgaccatggttctggccatagctcacatatgctacccgttagcttgttcgaaggaggaggtggccatggattcctctcagcatactcca

SEQ ID NO: 6203 - DNA, 403 bp, Oryza sativa
agcttgtcaagctggcttgtgatgtgatctgttgcaccagtatctacataccagtttgtgtctatgccataggcatgagttgctgcacctccaatcttttcatcaaggacatacgtttcatcgaaacgatgccaacaatctgaagccacatggcctcttttgttgcagacttggcaggtagggcgattatcgcctcgacccccgccattgttgccgcgtcctccgttgccgccgcggccaccgccgccacgaccgccgcgttcgcgcggcatgccaccacggccaccacgggtgacattgttgcgatttgcagcgttggtggaggcagtcaagaacgcttgacgaagacggatcttgttctcaaagttcagcagatgagaatacatctcttgcactgtgatgg

SEQ ID NO: 6204 - DNA, 62 bp, Oryza sativa
  unsure (1)..(62): unsure at all n locations
cccatcacttctgtggcgacccgcacccccccagagggtttacctgacccnaccaaccagag

SEQ ID NO: 6205 - DNA, 360 bp, Oryza sativa
  unsure (1)..(360): unsure at all n locations
agcttactccggggagtttgttgaangttcttattcggtctggtgggggtgacgcgacccctgcggagggagatcaagtcagagcattgtgtctcttgttttccgttgctaggctgtggctgtgcgattgccaattgtgcttacaagttgcaaacctaacaaggattgtttcatctcacaaaattaagatcgttcatcagtgaataaacggaggcagtatatgttgtgcacatgatgctatggtattgcctggcattggacatatagtatgtaattggaaacaagaaaaactaagcaaattcaattaaagagcgagcatctagtatgcgattttgtagtaatcaacaaatcgtacaatga

SEQ ID NO: 6206 - DNA, 462 bp, Oryza sativa
  unsure (1)..(462): unsure at all n locations
cacaagaaactcagcttagaagcctccttcatatggtattgctcagtcttatttgtgctaagatgtttggaatagtcaaaacaagccatatgcccatatacttcatcgagtcctagntaattttgggtcttggagaatgcatttgtgtcatgagctaaaccatatggagtgtgtgagtgtaaagagcacactccccatggcttagttcacacacacacacatagccatcatcatatagagttggcttttgtttagattattccgccacttgtaattttgctgttattttggattggttgtagtatatttagatttcttctcctacttccttgtttgtattcttagtattcgcttatactaggagcctttagaatatcaacgtctagttcaccacaatcggtttatcaatatctttcagaagatcgggatcatggctaatcacatttcctcgaggaatcaaaa

SEQ ID NO: 6207 - DNA, 397 bp, Oryza sativa
  unsure (1)..(397): unsure at all n locations
agctntgtgatcatgttcatctttttggtacggtcttaagtaatcaaggcggatgccctcttatatatacgtacctttatatctccagcttgccacaaatagttttttttagaaacaaaatagttatatattttaaaaaatatataaatacggagtatactggcatctgataaaaataaatctaaactctatctacaaagtaagaggcagagaaggcaaataccgtagtaaatagttcatgtaacaatctgtagattttttttatctgaatgtgtaggcttaatttaaacttcagaatttttttaggaaatttaagccttgaatcttagtagatagaacatatacttcctccgtttcacaatggaagtcattctaacatttnccacattcatattga

SEQ ID NO: 6208 - DNA, 430 bp, Oryza sativa
tctcagccgggacttgtggcgctcaatgcagagactattgtgaggaaatctgtggacaatcggcggcagagaccactcagaccaatatgcaggcttagcaaaaacttcaagatcctcgacttcccaagcatccaatgccttggtgatcaatcggttcataagatcggtgtagtgagtcgcaaagaactccacccgcagcacacgggccctccgtcgagcttggccagcacattcatcactgccatccgcgtctaacaagctattgatggaggccgctatgtttcgcatggcaaggcgctcgtgtcgcttgatacttgcaacgagaaccttgacatcaacgggatacgcagcaaaaccagccgcttggtggagttggatgcacctaccgtagcgcggcgggagtatttcaccgaccatgaaatcgagggtg

SEQ ID NO: 6209 - DNA, 345 bp, Oryza sativa
ttcatctcgggcaccggtcttcaagattaatctttttttctttttcaacatcaagccttgaaagagccaatagcaaggaaattactacttcagatttcagagacatgatcaaaaacttcagatgctaaaaaattcaaggagagttattcagtttattatatcactcaccatgagaagaatggcttcttgctttcgcactgcagccagcagccatagtactaatgaagattatgtccataccggtgccttgggtcaatctgttcatcacaatttaagcaccattaccacatgcttcacacaacatatatatatatatacatatatatatatatatatatatatata

SEQ ID NO: 6210 - DNA, 408 bp, Oryza sativa
agcttgcagaagacccacctttattaattatattattacatagatatactagtaattcaaacctctaaaatttttcaaaattttcaacattaagatttggacttccaatacacattcgcccttcacaacattcgactgatggttgctataatcgactacagttcacaaacacagaaacacttgcgcacaatgcacaaagggtcgggcttgatcaggatcagagcttgctggagacggcgatgggcctggtcctgggccgggccggcgcgggctccttgggcacgacgacggtgagcacgccgttgtcgacgctggccctgatctgctccaccctcacctccgccggcagcgccacctccctcgcgaactccggccgcccgcgctccgccacgtgccacaccacatcct

SEQ ID NO: 6211 - DNA, 455 bp, Oryza sativa
  unsure (1)..(455): unsure at all n locations
tacaagatgcattctttatacggtgtccttcatcgataattatgttatgccactgtattntgcttagttntggcctatcatgcttgttcattaagtactcgtacgttgtcaaaagaacattgaatttctgatgtacaatcatctctctggaatgaaaaaaaaaactaaagtgaataaatattaacataaagcaaatcatggatcagatggaagaatttaaaacctacttgaatagtttgcgcctttcttctggagggccagcataggcaattttatttatactaggtgcccagaagttgagctccgattcccatccaggaagaacagaagatggtacaaccacaaggaatggcccccggtcattttttgtttccatgaggtagcataacaaagagattacctgccaaagtagaaaagcaggcaacacaagttgaattaaggtaattgttttcacc

SEQ ID NO: 6212 - DNA, 401 bp, Oryza sativa
  unsure (1)..(401): unsure at all n locations
agcttgatgtgccgattatacagganacatattcttttgttcccgcagctcctgaaacttgattcgagaaagcggcttcgtcaggatatctgcaagttgcccttctgtgccgatgtaactcggtgtgatttccccattctccacgggttcacgaatgaaatgaaattttgtttgaatgtgcttacttcgatcgtgaaaaatagggttcttcatcagggccagagcggattggttgtccaccctgagatcgacgacttcagttgctgcattcctgaggtcaccgaggagccgggcaagccaaatgccctggcatgcagctgttgcagctgcaatatactcagattcacaggaggagagtgctacaactctctgtttttgagactggcagctaacaggatttt

SEQ ID NO: 6213 - DNA, 455 bp, Oryza sativa
tgtgcatggttcttatctgtgccgaggagataaattggcaatatttatacatatgatatatttatggggcccaccgtcattagctagctatttaatctcgtgattgcttctgcatgcaggcgctttgttgagcatcaccaagagatatccaataaacccattctctagatgatgttttagagatttctaatcatgatttgagcttgtaaaatatactctcctctaacagattatgtaaacatgacttccttaataaaaagcggagacttgcttaaaagatgtcgacatctttttgggctgatctcagtcggctttaacgtccgtccgattgctcgtacgagactacatgtctttggctgtgcctgttcggaccgttcgatttcctcctgatcatctcctgtaaagtaagtgctgcatatgcttttgttttataacttttccaatgtaaaatttaa

SEQ ID NO: 6214 - DNA, 412 bp, Oryza sativa
agcttaatttgtttttatatgaagaaactttatagtttatgtagtatataaatttattatgtggaacttttatatttattattttgttatagtatattatttatgataaaaataatatttattttagaattattacaattgtatatgtgtagcgtataaataataattcaacacatatttatccatatattctacaataaagtgtggggtgtcatctagttgtgctcatattagttcaaaatatggttcttcgagagctccaagtacggtttcttatcaatcggtattaaagatagaaatgtgatgttgggcattttaaccggtattaaagatcttttgtaccggtttgtaagagatccgagagatttgtaattttggccaaccgagaaaaatcagttctctccactagtgg

SEQ ID NO: 6215 - DNA, 456 bp, Oryza sativa
  unsure (1)..(456): unsure at all n locations
tcgtggtgcctaactacaattggcatccactacattgatccttctgtggagcgcttacctgtaggtgtgtaacacactgtgaagcttcgtggtgcctactacaatttgacatccactacactgatccatctgtggagcgcttacctgtgcatctcccactttcatctgtggaacatccactacactgatccatctgtggagcgcttaatccatctgtggagcgcttacctgtgcatctcccactttcatctgtggaacatgatccatctgtggagcgcttaatccatctgtggagcagccactacactgatccatctgtggagcgcttaatccatctgtggagcgcttacctgtacatctcccactttcatctgtggagcagccaagcatgtgcgcacccgggaagaaatcccggtcggcacccatcccanaattgtacaggccaagcacgcttaa

SEQ ID NO: 6216 - DNA, 409 bp, Oryza sativa
  unsure (1)..(409): unsure at all n locations
agctnttcggatgaatgtatttgagatgaaagttntcagataaaagtgtacgctatgaatgaacgtgtgctaaataacattggctgacacatggaaccatgcaggacgttggttcgtcttggagggtagtgagaagtaagggcaagacatcctcttttaccgtaccgattgaataaccaagcagatcaaaggagagagaagcagtgtatgtgatcagcgttgaccatgcgccacaccgtcaaaatagtgtgaggatgaggagacgccgagcgctagagctggatgtctataacgttgctctcgaggtgtttactttggccacatcgagccataggtatcagctgtaatggatctggcttgatgctctcagctccattgctaatcgaaagagtgatatagccgaaccaaa

SEQ ID NO: 6217 - DNA, 459 bp, Oryza sativa
taccaatcactagtgggttcgccttcttccttagaacaagatgactcaggcatcagctccgcgagttgaacttttttgttgtaagttgccgaagtgcttgtggcgtatttgtgcatgtgctcgagcgcttcgactcttactccttccaagagttcgagcgatactccgcgtccctcttcgcccccagagaacatcacccttggtgagttagcccctagctctgctggggtcattgcctcatcaccataaagaagcataaacgggctaaacttggttggtcttgtgggggtcgtccgaagggcccagagaaccaatagcaattcctctggccatttgactttcgctgccccctcgagacttttctttagtgcttctaggatcttgccatttgtatgttcggccgccccatttgactgcgggtgtgcgaccgacgcgaactgatttccaggttaagccctt

SEQ ID NO: 6218 - DNA, 398 bp, Oryza sativa
  unsure (1)..(398): unsure at all n locations
agctattcngatgaatgtatttgagattatagttttcagataaaagtgtacgctatgaatgaacgtgtgctaaataacattggctgacacatggaaccatgcaagacgttggttcgtcttggagggtattgagaagtaaaggcaagacatcctcttttaccgtaccgattgaataaccaagcagatcatatgagagagaagcagtgtatgtgatcagcgtagaccatgcgccacaccgtcaaaatagtgtgaggatgaggagacgccgagcgctagagctggatgtctataacgttgctctcgaggagtttactttggccacatcgagccatatgtatcagctgtaatggatctggcttgatgctctcagcttcattgctaatcgaaagagtgatata

SEQ ID NO: 6219 - DNA, 437 bp, Oryza sativa
  unsure (1)..(437): unsure at all n locations
taccaatcactagtggggtcgccttcttccttagaaatgtataccaggcatcagctccgcgagttgaacatttttgttgtaagttgccgaagagctagcggcgtattagtgcatgtgctcgagcgcttcgactcttactccttccaagagttcgagcgatactccgcgttcctcttcgcccccagagaacatcacccttggtgagttagcccctagctctgctggggtcattgcctcatcaccataaagaagcataaacgggctaaacttggttggtcttgagggggtcgctcgaagggcccatagaaccaatagcaattcctttggccatttgactttcgctgccccctccagacttntctttagtgcttctatgatcttgccatttgtatgttccgccgccacatttgactgctggtgtgcgaccgacgcgaact

SEQ ID NO: 6220 - DNA, 407 bp, Oryza sativa
agcttccggtacctaagtcgctgtctctctactccaacagcacctgaggtgaccaaaatcacttcgtatcctaaagagttcagttccttaacctgcattgccacttttctttggttaggcacctgccaacatatccaacactacatagccattgcagaacagctcacaagatcaaaaaaatggatttcttttacctgctcgcacagagctccaaccctgcccaaagccaatcttccatcttgtctggagacaactgcagtgcccacctgtcatgcaaaaaaggaattagccgcacagagataaaaacattattattatattattattatgtactggtacagtggtacatcttgtgttgaaggtattgcgttgaggttccacaaaactgctaggcttttctaaagcct

SEQ ID NO: 6221 - DNA, 439 bp, Oryza sativa
gtcttatacagaggataaggggacaactctcgtcattgtttctcacaagtcaagtattcgggtgttcccttattgccttctattaggatatgtagaatgtttatgctctgaaagaagatacaaatagcaacgaacaaaatagttcttactgaaataagattctcgtagacaccaagatgatacggatgatgataaaagatttccacccttttctgctaaccacattgctctcacaccttcatgatactgcaaattatattaacgacagccactgttaaaagcaatcctccatctttaaatagaggttgagattgattttgcacaattaacttctcaaactttgacaactaatatatgtataaaaatcatataggttaacttcacagaaataatcgttgaatttgccttgcacaatacttccatgatatgcaatatttat

SEQ ID NO: 6222 - DNA, 404 bp, Oryza sativa
  unsure (1)..(404): unsure at all n locations
agctntcttcaatataaaccaaaagaatattgatcgttaagaggaaaagtaaatggcaaatatatcaatagtcatttcttctttcatgttcttctaaatggctataaaagcatctcctttgttgatcaaacaatgttagagatggagttcaggttcgagttcccttaataacaacggaaaatacttgttttacaaattagacttgacttatcgagccaggaaattcctatgcatatgcaacatcttgtgatgtctcacgtctctctttgcttgccaaggtctaagtgagtgaagatcaagcacacccttaataacaaaagagagaagttatgtttcaactaaatatataaaacatagctcgcccaaagtttagcatctctaaagcagattatttccgacttcca

SEQ ID NO: 6223 - DNA, 448 bp, Oryza sativa
  unsure (1)..(448): unsure at all n locations
ntacctataccaaggtttcgaccctgcatatgccgaagttattaacaagctatcatgggaaggcccaaaggctgcagtcaaccaaagagatgcagatcttcttttcctctggagaagggtatttcctagtctattcttttgcagacttttagtttgttgtttgttatgttccttccaaaaatacttaccagtactagctattatctaatcccctttctatacaaccatatggttggagtgcacttgcatttgttttgatgtcacaaattattccagcctacagagatttttctaaactgaagttcattatgacgtgttgaaattacttggtagtgtacatcagctaaatatctttgtttctagtaaactgtgctgctgtctgctgctcgcaagtctcttttcattggagtattatcttatagagattttctttatacaagatcttctg

SEQ ID NO: 6224 - DNA, 406 bp, Oryza sativa
agcttcagacagtgtagtgtcaggactcttctcttcctcttgacgttggacgacggcgccctcggcttcgacgaggatgacatcctccgtgacttttccattctcgtcgtcgccgccgagccgctccctctcgcctccaccggcctcctcggcgtgttcgtcacctctgcatcggcggcgctcgcttctccgagctccctctcgatcgcctcggcccgcattgcgatctcctcgctggttcgccgcgcttccgtccacgcctccgccgccgccgccttcatctcggccaccgcgtggaccacctcggcgcgccccgtcaggtactcgtactcgaacctgaggatcgtgaattcgtgacgttcctggacgacgagctccgcgacgtcgcggtcgcggcggtggccag

SEQ ID NO: 6225 - DNA, 394 bp, Oryza sativa
  unsure (1)..(394): unsure at all n locations
tgcagcatgcaagnttggtctggatggcgagagattctatataatatttatgcgagaacaatccaattcagccctaatttcatacgaaactggcaatgattaacagttatcagggagaaggaatctctatatgaaggagctcgaaaccatcaatctttcttaaaaggttagctatgcatattcatattccctagtgcatcctaagtaaaaaagaaacattgttttgaagatgaattaaacaagtactcttcaaattcttcctcatagcgaaagggtatgtaacctagtggttacaagagcctcagtagcatctgaggtcctgagttcgactccccataagatcgaattttcctaggtctaacgacgttgtgctttcaatggtaagcgacgtacc

SEQ ID NO: 6226 - DNA, 400 bp, Oryza sativa
agcttctttggcgcttatggcaccttctctatttctctccccgttccagcagcttttctgcgtgtgtcaagcttgggaggagaagattttgccctcttgctccttttggcaggaggggggaggtgcagcatgctgtcgacctccataccatcgtgccctaaatctgtatcatactgtaattggagatcttcatctctttcttcaatggcaggaaggagagatacaactgttggatggggatgcgtcggcggcagacgagaacttggcgctggccttggagttatattgatctcaatgctgtgcttgggccattgaataaatgtcccacgtgtagccccaagggtcataatctcatcattaagtgggtgcgggatattgtagccaactcaatcgggcttca

SEQ ID NO: 6227 - DNA, 406 bp, Oryza sativa
  unsure (1)..(406): unsure at all n locations
tcaccgagtttgtcttatcttccaacaatcatacgccggtcgatgaataccctcaaataaccgaagcggtgtgggaagaattctgctctttctagaacacccaaaagtttaaggaatcaagcgaggcacattgcctactggaacagcggaatgagcacccgcattggctgggcaccgcagggtacattggcaaggaggcaatatgggccccagaagatgtatccgctgcagcaacgaatgtccctgccccgttttcagacatccctgaacaaagagctcgcaacttggcgcgggcaangggtaaggtcaacccggacggctctgtcacatttgagaacaaaagtgatgccgtcgtctatcacgaactggtgagtttactacttaacctaactaatattccgtcgta

SEQ ID NO: 6228 - DNA, 400 bp, Oryza sativa
agcttctattacatattgatgaaaggatgacttgcatttgcactggagtaggcattacatatcccgcagcctcaagattgagcacaagcttctcagggagaccagaggaagaaaaacacatgattggatctggaacatcctcacccttgacacaaatatcaagtttgcttctcagtgaagcaatctgaccatcgtgcatacttggtattttaggaaaattttcgtccctaatacagaagctctcgtcgccaacaggaagatttacacgctttgctgcttttactactggccttgtttcagcagaaaagttggaaagaagaattgtcttgcattcaacactacatatgtcatcgtcagtctgatcacatatgtattcaccatatcggccacaaataacaca

SEQ ID NO: 6229 - DNA, 436 bp, Oryza sativa
tcccaatactgcaatgcagatgggttgagcaacggccaaagcttgtacatgcattcatggattcctacttcccagcagaatcaggggaaccatctccatacgaaaccaaacctttcttcccttcagaactggcagagggtgaccgggactttgcattactctctcgctttggggacagggaagcaagtggggagcgattgtgtattggtggtggagaccttgatcttgacccagacaggctcctgctccttgacattgaacgcgagcgatcaccatgcgaccttagtttcccaccagcaggagagcggctgcgcacaggactcctgctgcgtccacctccccttcctctgtctcgataaacaggacttcgtgagatgcttcggctcctcctcctgtacctgttaggcctcaagggacaaacaaaacagaatcatgg

SEQ ID NO: 6230 - DNA, 404 bp, Oryza sativa
  unsure (1)..(404): unsure at all n locations
agcttganagcgcgctcacaaacacacaacaaattgtatgtctggcctagaagtagttagatacaacaaagatccagtcatacttctatattccttttgatcaacggcttcaccatcttcatcaggatccaacacagctgtagaaccaattggtgttgaaattggcttgcaattctccatcttgaaccgtctcaaaagatccttcatatacttcgtttgatgcacaaaagtaccttgaggtgtttgcttaatttgcaatcccaaaaagtacgataactcacccatcatgctcatctcanattccctgcgcatagtctcagcaaaatctacaaccaaagcgtgagttgaacaaccaaagatgatatcatccacataaatctgaacgaacagttgattatcaccat

SEQ ID NO: 6231 - DNA, 388 bp, Oryza sativa
  unsure (1)..(388): unsure at all n locations
ntggatgggttggggtcacatgggcagntacagtttatcagttacagacagcccctgcctcctctggaataggtctcaccacctccttgtttcaggaaacaaaagccatcatgggtctcagtgagtgagagagagcaaaggagaaggcatcttcttctcctttggacatgcaatgcctctgcatttttcactgcattttgcattgcattntggccttttttttttttggggggggggggggcctttgttccaacgtaccccaatactttctataatcggtctacaggataaccctgggatacatgttatctcaatcgggcctaaaatccccttgcacaaaaggtcatctggaccgcgccacttttgcgcattagatattgatgcattt

SEQ ID NO: 6232 - DNA, 357 bp, Oryza sativa
  unsure (1)..(357): unsure at all n locations
ctgcagcttgcttgggcatagcttctctacttatccatcttgtggcccatctacaggccggagcttaatttcatagatctttggccacaattttccggtcactgcaagccattgaatatgattagccactgccccatgatcaaaaaaaaccttanatggcttcactaggaagagaacccgcgcctttaatgcttttaactctcaccaataatctttgaattttctcattccaagctatatcatttaaaacatcgatttcctggaacatggaatagattcattaatgtcataatgctatgtcttcctgctaagctacaatatgaatttgaacatcatgaagctcactggacccaacca

SEQ ID NO: 6233 - DNA, 259 bp, Oryza sativa
  unsure (1)..(259): unsure at all n locations
tatatgtgttctttcaaactntatatttttttgggtttattcagctntaactttagataattgaattctntttccgcttcgctaattcattngaattatactgaaatgtcaattcatttggttatgaagggaggaaattgagaactggaggccatatatcaaataaaagaggacttccatctcataacanatgggcattgaacagcattacattgaccaatattacaccacatcaatcgcatgcaatttgatattctta

SEQ ID NO: 6234 - DNA, 450 bp, Oryza sativa
  unsure (1)..(450): unsure at all n locations
aacatggtctttctatagagtacgtaatcttaagaacgaccatatccttgtgagtactacacgagggaggggcaatatggaaggtaattccatgggcctagcttctacaccttccgttcaagaaaaaccccaaatttaatcctagctacgaaacttaacacacatgtactcacattcatagntaggattgattttttttaatgggatgggtggaataccttcttatcttgagaaaaaaaactaatggttaacttataacctctttgtcttgaaaaagaataatataactgttaacttacgatcatgagagtaaatataaaatagatcaaaataaaaatttaaggacatgtaaggatatgattaaggaggtaaagagaaactctaggaggcgcacaaagaactttggcttatttttattttggctcactatttactatacaactacttcta

SEQ ID NO: 6235 - DNA, 262 bp, Oryza sativa
actcagcttccaactataaacgattgtttttgtgaaaacagagaaagcgcctttaatcatttatctcacttttcccgtgttatatgtgatactctataaatatctcgtattcttattccgctgtccagtggagaggagggggttctcaaccctcttaaaaacaccgccttagtgcaacacatcttcaccccaaatagataatcttcaaccgctaatactgagtactatttatgtgacttgcgtgctaacattatactttttt

SEQ ID NO: 6236 - DNA, 439 bp, Oryza sativa
  unsure (1)..(439): unsure at all n locations
agctngtgtgacgcgtggccgcggcggccatgattctacggcggccagagatgaggtagaaggtatgagacgggaacagggtattgctattggttgagtgggcggtgatttgcggcaccttaactttatttagtccaatcataccccttctaaattaacggttatattagattggtacctcatggtacctcgtacttcatggtacctcatggtactctctcaaggataggaaagatgcttgagagttaaagtgaacttaacagaagtgaaaagagctaagtagttcagcagctacccagcattggacgaacaaacagtgcatgtttggtgttgggattngaggagtggcaaaccatcaattattgggagaatggtaaatactagtaaatagtaatgtatgaacactgaaactgaaagaagtgccacagtcatcacctat

SEQ ID NO: 6237 - DNA, 138 bp, Oryza sativa
agaaccagccatatatgaatttgagggaaaggtccatggcgcaaccaataaccattggtcacatcgccagaacctttaatgctattccaggaaatacacccggcttgagatggactattgtgaagcccacacgggaac

SEQ ID NO: 6238 - DNA, 481 bp, Oryza sativa
  unsure (1)..(481): unsure at all n locations
agcttntgtacaaatgccggcaaatatactagattcaaacaaccagttataattaattcatgtagcaatgacagactgaccacaccatttgatagtttcgtcatgctatcgcagccatctatccgcagtgatcggagtgtcgtcaggtacccaatgctctttggcaattcgtaaaaccaacagtgtgtaagttccaacacctgaagatcangaaggaactgaagcagtttccagtcattgtgcagcaggcggcagcttctaatatgcattttcgatagtaccaaagacgatgacgagcctgtgtgatagaaatctgctataatttgatcgcttgcttctattctccattcaagagctctaggaaggcatggatttaaccttaaaataggacactgagaaatttccagcttgtgaagactggggaacatgaattcaccattagccgatacttnggtgatccactcattttaagtatccatct

SEQ ID NO: 6239 - DNA, 274 bp, Oryza sativa
  unsure (1)..(274): unsure at all n locations
atgcacggcagtcactttctttctgttgttgaggtacgcgtactcaaaagcatactnggcgatcctttcagagcagaactctgtgatcacctagtaaatccatttagtaacacgtccatatagaanaaaattccttttgatgatgaaatgaaaagtgacaaaaacatttacatacgttctatttcagaaaatcggactcacgccaatttgcaaaataggagtataaaagaatatgtgcactaaaggactgcctgccaagacctaatcagctaga

SEQ ID NO: 6240 - DNA, 417 bp, Oryza sativa
  unsure (1)..(417): unsure at all n locations
agctngacaattgacaaaactatgtttaattctggtcgcctcctgctgtcatctttgcctgtcttcagccgccaacactgcagcaatatcagctaagntcttctctttgtttggttccattttttcccctcgctttgattgatggtgtaaaattgaaggtgctagcaacaaattttggtacctcacaccccatcagcaactaagntgcttgaccatttctttgttgctgctgctctttgctcgaccttcctggccaaagaaaagctattttcttttgcaaccattcttagttaaatccttgtcacattgacatttttacatcatcctgatgacttctcttggctcttgcagcttcagatgatagacgtgcttgctngncaccaaaaaggagaaatgcatgcatatgtttcatgaaac

SEQ ID NO: 6241 - DNA, 469 bp, Oryza sativa
  unsure (1)..(469): unsure at all n locations
cctatgaaactcaagctggatgaaacctggttcataaccaggaacaactgcagtacgttctggatctcttgcaganatccagatacatctagtagaggtagagatcagataaatctcaagcaccatcatgccagctcatcagctgctgctgttcagcaaagcacctctgggccacggagatcagaagcttcattctggatgcccctcataaataaccttctgaagaaatacctcgcgcctgcatgtgagaatgataaaattatggcatttatcctgagcaatgatttcaaacaatttgttctttgagcataaattatatcaaatttattatcactctcattggcattctgaagacgaacaattgcaagaacaatggcacagcatattggcattgatactgtcccatcatcatgcangcatttacatttacaagagcttttgaatttatatgttcttgacaggtggaatt

SEQ ID NO: 6242 - DNA, 334 bp, Oryza sativa
  unsure (1)..(334): unsure at all n locations
agcttgcagctcgcgggcgagctgcttcctaatgaggagggaaaggggactacgatgacatgggtgatcggcacccctcaacctttatgcatggcttccaccgcagctcgaggacgagctgtctcgaaggagggatggagatgttatgggcagaactcancccctctcattattagataaggttgtaagaagtttgttaggccttttgttaggatgttttgtaagagctggctctatgtaaggagaggcaccacagtcatgtggaattaattaagaaagaagttaaacctatctctagtctcccctcttctctgtttgaccttacccaagctct

SEQ ID NO: 6243 - DNA, 254 bp, Oryza sativa
ttcttcattatcatcatcagattcatcaacatcagaacttgcattacgagttataaaagctagatcaacaacatgcttacctttgctctcatctttatcttctggttcatcaaaaacttttatgagttcttggattaaccattgcatacaatgcttcttcttctccttctccttcatgttcttcttcttgttcacgtcatcatctttgactcttccatcatcttccttctttcctccccaagcttatgacaatg

SEQ ID NO: 6244 - DNA, 133 bp, Oryza sativa
gattcaggataacaccgtaggaaatggaagaagtgctactcttctgtcttgagaagcttcaacatgtatcagttatgctaccagagtgttaccactctctactgtgccatagctcattgtcattgaggatgtt

SEQ ID NO: 6245 - DNA, 383 bp, Oryza sativa
agctattgtctttactagactcttatagtatacgtgtgatagaactgtagtaacgtacagtagtaacaagtaatgctattgtattactacttgtggagagtcaaattccaaacagaaaagcttttaagaacaatatctctgatgtcatgtatggttttttaaaaattgtttgcaccatgatgctagaaaaaaaatgcttatcaaaagtagatccatcgtgactatatttcaactatatttgagcgttgttactgcacgtaaaacatagtttactacacggtgaccgtcgcgttactgcacagtttcgcgagacgagagctgagaagaggtgggtggtgaggggagttagtacgtggttctgactgagctttgaccggcgggag

SEQ ID NO: 6246 - DNA, 246 bp, Oryza sativa
  unsure (1)..(246): unsure at all n locations
acactatacaaactcaagcttcttcgtcggggcggntaccttcacgtgtgcgacacacccaaatgtgcgctagtgatgtacagccggcgtgactccattccagagctcatactgcgtcttgccatcaatgctcttggacgagcacctgttgagcagataaacagcagtattcactgcctccccccagaacatacctgggagccccttagctttcagcatgcttcgcgccgtgctcaccaccgactg

SEQ ID NO: 6247 - DNA, 394 bp, Oryza sativa
  unsure (1)..(394): unsure at all n locations
agcttaagaactatagcatatctgtactttttgttgtcttgngcaaaagatatttcttcattttctgatgagttgcttcctatcctggagaggctagagcattttacggaggtatagtggtcataaataaattgtggattgctctagtcttttcatttgctcacttagctagcgagttctcatatttgtgcatatctgcattttttttttgttaggcctactaatattttaattaattgtatgcaaatgcaattataaagatatacccctgctaaatgtgatgtattaccatattttctgcctaaagatgtttaccaacaaatttctcatatacttgaaactctcatgcttctatgtaatgtgctccgaaaatgattttttttaaattggctgg

SEQ ID NO: 6248 - DNA, 468 bp, Oryza sativa
  unsure (1)..(468): unsure at all n locations
atctctaaacacctgcagctgcagcttatcttcttttaaccacatggccttgtcacagaccatctgttatgaacaccacgttcatcaagaaaccaactataatattatgcaaaatatgcanactcacctcattccatccttttccttgtgagagacgagggaagactggagctttctggttggcgaaagagatcttgttcgaaactgcaacgagtttacgctgctaaagaatcatacaatcagctacattatcctagctcctagctgctgttgttcagcacagaagatcatatcctaatcatagttccaatgttctaaagtcatgcagtgtaaatctgactcacattgtccttgccccggagaacagcccgaagcataatcgtagcgctggttaacacgacaaagctggtgtcgccgctgccggagctcatgaaactcggcgagatgttagcaaactttgactgatga

SEQ ID NO: 6249 - DNA, 312 bp, Oryza sativa
ttctgtggcatatgaggagtcaggaaaagtcaaacaaccctgtaaacagctttgaaagccacatgtgttacagcgaaaaagttgtcaactgggatgaggtgtgtgctctccagacaatggtcatacttatggagactgatggacaaagcattaatgttggaaagataatcattttactgaactcgaatggtttgaaccacgtaagctggctgaaccagtgggcctgctctcgtcttttggctaggactccattccatggatgacagttcttgtagatctcttctgattcaccctcacatggatatacacaat

SEQ ID NO: 6250 - DNA, 396 bp, Oryza sativa
  unsure (1)..(396): unsure at all n locations
actggtgaaagaagggacatgtattataactatcaagatgcagtagctatatgccgtgtgtatggtgcgcctgatgtattcacaacatttacctgcaatccaaagtggtcggagattgaagaggcccgactatgcgaggggttggaggtaagaataagcgtggagcgtactttgcgaggggttggaggtgggaggtcggtccagccgcagtcgaggaggaagcaaaagccatcgacggcgagtatgtagcagaggggtccctcaccgtacgccccactcaacggagtcacctgcaccgacgttcccatccgatcgatccccttcgccggcggcggtggcgagcaagaagagntccgctcagagtggaatgagagagaaagagtccaagtgtagtag

SEQ ID NO: 6251 - DNA, 334 bp, Oryza sativa
  unsure (1)..(334): unsure at all n locations
actcaagcttcatcgctcgtacaacggacgttctctcaacaaagataaactaaacaattttcttatattaatggagggcaaaagctcagactaatatatctaananatatatttatctaagtatattataaatcttcatctgaaatgggtgaatatatgtataactatatatggactccaaattttagcatgcaacatgtaatagttccttgttaattaattaacgtctatgatcacgagccagaataggactagacgatcaattaattagctcggatgcatcatgcgtgagatatttcaaacacgggtgttattttaatggcgtactatgatc

SEQ ID NO: 6252 - DNA, 219 bp, Oryza sativa
ctctatatgattaaatatggaaataggtcattgaggactgcataattgccatgcaaatcctgtatgagctattttgcaccagagttttcatttcatcgaagagcattacacatacttgcacactgatgaattactaataagcatagcatctatggacaagtcttatctattatctgcactatgaaacataactggtttatctcaaggtctcaacttctc

SEQ ID NO: 6253 - DNA, 473 bp, Oryza sativa
  unsure (1)..(473): unsure at all n locations
agctttgggcctgtcctcgaattacttcatcggtatgattccagatagcatctactcatgcggtactttaactaggtggaggttatctcgcataagcttcaaagtcagttgacggagacattagaaaatttgaaatcccttaccttcgtatctctttcctacaacaattttacaaatatcacaggttcacttcacatactcaagagcttaagaaacctcactaccttgctaattgggagtaatttcatacatgaagctatgccagaggacgaaacaattgatggttttgagaatcttcatgttcttgccatanataactgcgcactgactggaaaaatacctaattggctctcaaagctaanaaagatggaacttctacttttacacaacaatcaactcagtggaccaataccaaccttgatcaatagcctatacttccttaagtatatatacttatccaataatagccttat

SEQ ID NO: 6254 - DNA, 484 bp, Oryza sativa
  unsure (1)..(484): unsure at all n locations
atcttaagtcacctgaggctgcagctatatagactggctactcgggatattttatacttgacgtaaagcatacacgaaaaagatgtgctgcattagcatggtattatgagtgatggcacatcaaactatctgattatgatgcctatctaanaaaatgatcacctcattatgatgtctggcacgtttgaaatcagggtattcagaatatgttagctgtctttgctgattggttgtttcattgcttaagagaggttcttgcgttgtcagaaagtcaggtttcctacgtaattttcaagcagagtcagtctctacagtaccagtagtatcagaaattcagaatcgaactaccgcacgaattactttgcttgaggtgaaactcaacctgaatttatgccagtaccaaaatgaatcctttcgagttacaaaattccgggaatcggaggcaagtacacctcatcactctctcgtagtacacaccaaacat

SEQ ID NO: 6255 - DNA, 323 bp, Oryza sativa
  unsure (1)..(323): unsure at all n locations
ctctctttttctcatttcattcttccaacatgcaaaaagaagcctgtgaatcgcataatattntctgatgtgatgcttatattgtaataaattcaataaacatcacttaatctcagatgtactcgaaaggagttattagaggaagcaaaagaacttaacatgtttatttcatgtactggtaagaccaagctggcataatttggtcaaattctgctgcttgaatcggttgcctgtacgctagtccaaataatataactagaacatgcttacccgatcattttgagttcacgatacaagcttctatgttggtctaaaattcttac

SEQ ID NO: 6256 - DNA, 417 bp, Oryza sativa
  unsure (1)..(417): unsure at all n locations
agcttatgttcctgtgtgtacagaacggctcaatatcagaggcgatccacactnggaaaagcaantttgacaaggagtttgagggggtggaggaatgcccaatctgttacagcattctgcacacgagcaaccacagccttccccggctggcttgcaagacgtgcaggcataaatttcatggtgcttgcctctacaagtggttctcaacatccaacaaatcaacgtgtcccttgtgccaaactcctttctagtccggctgtgctgcgctatgcctattttttttttgcaccgtagaaatttaaatttatactccgtagttattatgttttgtcttacaaatttaatgaaggttagataaaaatatgtagttcatgtgtctccgctgtcccgtaattcaaaatgcgataattatcacct

SEQ ID NO: 6257 - DNA, 294 bp, Oryza sativa
  unsure (1)..(294): unsure at all n locations
gcttncactgaagtagtcacggtggtccatgatgtccggcttggtgttatgccaatcattattaccgcagcgttgngaatgggcttggccctgcagctccttgatggaggaggcgccgcacgagatgagcttcatcagcatcgccgacgtccgcatccgccctgtcggtgtcgtcgccgcttgttgctggggcgtgcagccatcctcctnctgttgcttctgcttcacggtaacaagctgggtggtggtgtcgtcngggctgcttgaaaacagtggaggtgatatctcatcaat

SEQ ID NO: 6258 - DNA, 466 bp, Oryza sativa
  unsure (1)..(466): unsure at all n locations
atgcagcttntgttgctaaaaaatgttgtcttctgtataatcacgactaaccactcgcatcattctaatcacccatcactctaatcattcgtggatgaaatttaccattgtggaatttaatttctgaatttaaaattttcttcatacaaaatattttagttccagtctatcaagatatggctacttctaaagatttgattcccatttgctcctataattttcggatatagaataattctagttatatatgattgtcagggttatggataccacatacctaatagtaattgactaaatatcggcaggacccaccacatatcatgtcttatacggaaacaaccttccgatataggaggagttccgcataaggaaggatgaatagagttctacatactatgcaaatatatcctagtaccaacgatcctcattctatgcatataccggaatcgcgacatcanacatcgac

SEQ ID NO: 6259 - DNA, 458 bp, Oryza sativa
  unsure (1)..(458): unsure at all n locations
agcttcaagaagagatgggttctaagctgtactttagtactgcttatcatccgcagacagacggacaaaccgaaagggtgaatcagattttggaagacatgttgagagcttgtactttagacttcggtggaagttgggataagaatctaccttatgcggaattcttgtacaacaacagttatcaagctagtcttcagatggctccttacgaagcactgtatggtcggaagtgccgcactccgctnttgtgggatcaaacgggagagcgtcaggttttcgggacggatatcctaagggaagcagaagaaaaggtgaaaatcattcaagaaagattgcgtgtggcccagtctcgtcataagagttatgccgacaatcgtcgtagagatctaagttntgaagaaggagaatatgtgtatcttcgtgtcacgcctcttcgaggagttcatcgnttccacact

SEQ ID NO: 6260 - DNA, 150 bp, Oryza sativa
  unsure (1)..(150): unsure at all n locations
ggaatgtgtgtgagtgaagagagaatgggagctctatntacatgcacgttatggtggttataactatgcgaattgtcggaattgccccgcaaccgccatcangagatcatctgaagcgtgcataccaaaacctatatccaacagcgatcc

SEQ ID NO: 6261 - DNA, 401 bp, Oryza sativa
agcttactgtaataaaggttatattattcatgataaattagtaaatataacaaaagtatacctgtgtgtagagctggacagaatcacttgtctttggggttgaaaagagaactttagtacttttgtcattaggagcaaaaggatctggaccataaatctgcaatattggtctacatcctccttttccatcaaaatttggcacccctctgatgattacacaattcaaatttatcattctatcagctggaggccattgttctggtgacatgtgccgtcttgacacatacttcaagtatctcatctgagaaggagccgggttcagtggtgagaagtgctctactagcccaggtggtgcctgtttgtagaccatttccaatgctttcctctcattattatatctt

SEQ ID NO: 6262 - DNA, 125 bp, Oryza sativa
  unsure (1)..(125): unsure at all n locations
tatntagctntggtcatgcattaaattaaagcatttggagacaggagatgatcaaacataggcgcaacaacaaagggtagtggttgattaattggtgatgagatgaagatgtatatactccctcc

SEQ ID NO: 6263 - DNA, 471 bp, Oryza sativa
agcttgaacccaagtcctacagtgatggttattagcgcaattgaaattcctggggagttatacatttgtgtattgataagaccgctcacaatttcttgaagctcgatctcccccccagatgaaccatatagccaagagaaaccatgaaccagaatagaagagcttgccccacccatgagtaaatatttcatagtagcctcattagaccgtagatctctcttggtatatccagacaatatgtaggaacataaactgaaacattctggagctacaaagatagttattaaatcgttagcaccacataaaaacattccccctagagtagctgttaatacgaataacagaaactctgttatagccatttctgtacattcaatgtactctacggatagaggaatacataaagttgaacataatataataagaaattgaaagatttcgttgaaattggtcgtttggaaaattccgaaa

SEQ ID NO: 6264 - DNA, 296 bp, Oryza sativa
  unsure (1)..(296): unsure at all n locations
ctggatcatgttgttgatgttggcaaaatgagcatcaacagtctgttgccactcttgcgtctgggctatgtgttctgtgaggttatattggatctcctccgtctgcacatcaagggtattcattctcctggtgatttcaccctattcccaaccagaggaacttgagcccattcacttggagatgggagcataccacttgatctggtggggtggntgtccccccaatctatgtcatgaggcgcatgccaccgttccttactggcacttgcccagagggttctaacctgcctcataca

SEQ ID NO: 6265 - DNA, 229 bp, Oryza sativa
agcttgacttctgtttctggcgactccacttcactaggcaaacctgacggcagcaacgaaaccaacctctctgagacggcttcaactgagaagaacttcaactctggtgtgggggaaatgagagagagagctccagtgagggtttttatgggccagggaggggcggaaaccgctggggatggcccttatttggccggcgacttgaacaggtggacgagagagagagggt

SEQ ID NO: 6266 - DNA, 357 bp, Oryza sativa
  unsure (1)..(357): unsure at all n locations
tatgacctatcgtcttaacctagccgangctatcatgtatattcacaaaatattattaacaaaccctaagtatgtcgtatcggctcgtaaggccaacaatcatataatctcttaaacaatcttaactcaattatagacaaactgtatagatcggacctcaccgagacagtatggacttagagagtagatatgtttatatctgttggcgaaaaacaactgcgtcacgtcgaaaggcgtggttctttcaacagtgggtggaagtaagaacaaatgtattacttaatgaaaaattttattgatcccccccatacattgtcttaaggggctatttataatcctattacaggctcccctttt

SEQ ID NO: 6267 - DNA, 379 bp, Oryza sativa
  unsure (1)..(379): unsure at all n locations
agctttatattagctcggattgaagagatttaactccaaacgagaggaatcggctcggaaaagataaaactcggctttagggataaaatcaaaacgaactcgattcggatcaaatcctcaacgattctctttgattcttggggaaaaagaaagaggagaacgagaggaacaaaacccctcataaacccgaaggaatcggagtcggattgaggcgaatttggaggtggaaggcggcggctcgggctcggtcggcggctggaggtangagatggatccgacaggtgggccccacctgtcggaatccacgagagaggggagcgggcggcgtcngcttgggccggcattggccggttcggccgcgcgagagagagaggatgtt

SEQ ID NO: 6268 - DNA, 487 bp, Oryza sativa
gcacagcaactattgatgtcaaatatgtgcgctacaagagatataacattttgttcttttctttcgcttaatatgtctaacaacagtaatgattaaggaacactcctacaacatactgctatcataggcaatgctagatttcaacacatcatgggatctgatatgtgactattacatgccatgtaaagaacgctccatacataggagatgttaatcccacacgggtaatggaccatttgcataatactctattatttttcccattgaactcttgtcaaaaactgaattgatagaactacttgtaataaaatcaaatgtcctatcctacatataaatagtataaattagaacagtacaatgacacggaatgttatagaaagaaaaaactctttgcttaataaagctaattgaatggactacaaattatttaaaatgatggcaaatgtgtcttgctaccaaattacagaatcagatcgcatttacatta

SEQ ID NO: 6269 - DNA, 443 bp, Oryza sativa
  unsure (1)..(443): unsure at all n locations
gcttangggtcaagggatggctctccttgtttgtggtggatcacgtattattcatttcaccctttgtgtcagtttcatggactggagattgattttggaatttgaaactgcaatactgttctgatctatggagtaaatactagaatatattattggtcatactataattaggagctatggttctgatgttctgtaaaacttttacgatgcattgaggatatatactatctagtgctaaaggaacataatatggtgccacagtttatgctggcatgattttaatgttgtcaacattggcaatacctgcggcactattcaattcactatatatttacatattctggcataagttagatagcgaagtatgaaatctccgatttgtttcaaattatcatggaaccttttgaactcactatcgttttgttttgacataagcaagttat

SEQ ID NO: 6270 - DNA, 466 bp, Oryza sativa
  unsure (1)..(466): unsure at all n locations
agcttagcgccacatgatatggcgtngagtcttattggtcagatttgaaataatgttctcgcagcggttcatttgtaaaaataatttttgcaaagagtcaaattgtcaaaatttgtgtaagaaaacgacaggagacttgtggggtagggtgccctggcatggatatccactctttttacttccaactagcatagtgccccgtgttagttgtcacatgggtgacccaaataattatacaatatgatgaaaataaaaatacataataaataattattccgaaattgaaaaaagtatactacctctttccaaaatatagaaatctagaattcgatgagacatatcttatccagactcgtagtattatgatatatctcacatgattttatattgttatatcttacgaccgattgagtatatgatggctcctataattagtttgcacatattaatgcctcatataaagaat

SEQ ID NO: 6271 - DNA, 463 bp, Oryza sativa
  unsure (1)..(463): unsure at all n locations
taattgcgtcttcagtatttgctttgctctaactgatgatctgtgcacttgttttatgtctttgttactctgcanacaggctcagagctgcttctttcagctcaactatttattgctctgttctactggtatgcactctgtactacatacacagtatacgtgtgcaagaattattacagacatggctcatgagggtgaattcactgaattgtaatcattgagagtattgtggagcaggtttcagataatggaaagctaatgtctgttgatggcaaattgcactgatttaggtacaaaagcacttttaactaaagaaatgattcctgcagaaagccccttcaatcttaagaggcccaatactccaaataaagcaccaatggagcttctcttttcccctttaaccacgttgctcaggcaggccactcaatatcatgcttcatatgaatcacagacttttactatg

SEQ ID NO: 6272 - DNA, 482 bp, Oryza sativa
  unsure (1)..(482): unsure at all n locations
catgcaagcttatntcacctttgtagtataatctattgcgatttgtattctaaaattctattcttagatataatttcaggggagtttttttaaaaaaaatttatcttctcaacaatcatgataagagagccaagcaatggaaatgacgaagaaattaaaaataaccctcgaataaagttctaaattaaatattcaagaagccacagtacgtttcgattattggctaagcctaatcatgctgaagccgttgcagccgttcgtgtgagggcacatgtatctctgaaaatgctgtgcatggattcttccatcaaccgggagatgcctatacaaaaatttcgctgtcatcacagcgactcttgacagatcatacatactgttgcaaacttttctatagaatttgcgtgctgttctgttgtcttctaatatgtgctagtgatactgactaatatatatgtgcctcaccgattaataataaataaata

SEQ ID NO: 6273 - DNA, 273 bp, Oryza sativa
  unsure (1)..(273): unsure at all n locations
cttaatttagtttaacttaaaaaaaaggccacatgatataatatgttatggaaggatccgagtaatatccaagagtaatttgttgtttattacctgggtaaccatggcgtataaccgcagcgtgctgtatctgcacaacacctggaccatgattctgtccaaagtcatgacagaaacatcacatttctgttcagttcaattcaattcagngcagaaatatgtacttaaatttttttttatgagaaggtaatacagaaatattttgaatttttt

SEQ ID NO: 6274 - DNA, 211 bp, Oryza sativa
aacccctcttccacatggcacaccaaccaagaacattccaattttgggccggccttatgaaaggtaaagaacaattttttcaatatggatcctttaaacccgggaatggaatggaaataagaatttgggaagacacatgggtgggcttgccaccactcaaatattaatatccttctttgtacaatgggggtccaaagaaacattctacttt

SEQ ID NO: 6275 - DNA, 356 bp, Oryza sativa
  unsure (1)..(356): unsure at all n locations
ctcagcttgctgggttagttcctctcggagtagtattatagtatgaggctatgagctcttccatttcgncgcgagagctcagctttgacgtcacgtcacggcggggtcgccggtgatgagatgaccaaacggatatgcatgcgaaggccgcgtcggcatttgaccgcgtcgcgcgcgcgggggatccggggacaccgagtcgccgtcaaagaaggagacgggaaaagaanaatcgtcgccttctgccgcttcagacaaagcaaccgagctatgatccaccaatggttggcagcgcgtgaccgaagcagtgatgaaagcggttaccgaaattcacaaccgatcgagcatagttttcg

SEQ ID NO: 6276 - DNA, 467 bp, Oryza sativa
  unsure (1)..(467): unsure at all n locations
tctctgtccctttttttccttggttatttatctatctgtcaactctcatccccctttcggaaagatgattttcacatgaacacgagtttgtgtgttcaacgctatagatggataatatatataccattgtggttttattcgtggtcgtgtgtgttttatcgtgtactgatcgaagcacggtaatatagcgtacgtgtaaagtgtaatgtaaagtgtaatgtgtgtgttagctttcgctntactgtatgaagaagtattctatgccattgtatgttttttcacacgcagaaatattttcttccaagtggaggggttctttcagtttttattatattattttgtgaatgaaaattttgactccaacaaaatccttctatttatataaatctggggcgaagttgactcctgtttattcagagagagagatagaacggatcataaggttagtcttgaatcatgtttctgca

SEQ ID NO: 6277 - DNA, 322 bp, Oryza sativa
  unsure (1)..(322): unsure at all n locations
tcactttgaactacctaactntgtctttgntgcaattngaaccacctcacaacacttatttagcacatcaatgacatcaagtatattggctccagcaagccgatgaagntatcacctatacgtacttttgctaanagaagaggatgaatatggctacaaaacgagctgagaatataccgacacatagttattnttccatgtcggaatttgaaatattttagattacttcaaaaatcactgtggtggcccgactaaattcgagcccaaaaggaatttaagtgtatttgcacgtaattagtacgtcaaaaatttctatatcata

SEQ ID NO: 6278 - DNA, 461 bp, Oryza sativa
  unsure (1)..(461): unsure at all n locations
agcttgaagaatagtataagacgtatatgtcatgacatttatgttgcacaccaaacgtgtggaaatctcaactctaaatntagaagtcagaaatccattcagtatattccactagataatgtgaccaaatctggtgagtgttaactccacatagattttgcgagtaccttatcttctcccctaattgattgtgtgtaaagtgtatattcttttagactatgaaagaggcagcagtactgatatttatatattttttatttgcggatccaaacataaaactgcactcactacaagaaaatctactttagttttttttttttgaatggacaaaaaaaatctactccatcggttaaaaaaaacataggaatgtatatgtgacatatcctagcacaagaatctaaacaagagtctgttcaaattcgttgtagtaagatatatttcattgactaagatatgtcata

SEQ ID NO: 6279 - DNA, 457 bp, Oryza sativa
  unsure (1)..(457): unsure at all n locations
agctntcctaaagataaaaggaaatcatattgttcttataggatactaaacacactaaactaataaactattcctaattaatagataacttaccataccgcatcctacttgaactcggtcacttctggataagcttcctttaatagattaatttccttaaccgaatatagcaggaatccgactattggtgatgtgataattctcttaggggaataccaaatttcactgttaacatcagcgcaaaagatactaagggcccatttgaatcgtaagaatgaaaaaaactggcgaatagaataaacatatgattctaataggaatgtaagtgtaaagcagatgattgcgaaacacagaanaaacataagaatagtcgtttgattggaccacaggaaaaatacaggaatctgatgagagagatagactcaaaggagtcttactaagaggttgaacctcatgc

SEQ ID NO: 6280 - DNA, 380 bp, Oryza sativa
  unsure (1)..(380): unsure at all n locations
tgtgctccttnccacctgcatctnctactactcctcttcaagggaggcggctatgttgtgctccttcccacctgccaccttcttcatctcctacctcgtcctactcctatcacatcataccacacagcaatggggaggtctccttgctgcgacgagaacggcctcaagaagggcccctggaccacggaggaagatgagaagctcatggagtacatccacaagaacggccatggcagctggagagcgctgcctaagcttgcaggtatgtgtacatgcacaacggatggcgtacgtagctttgatcttgtagctagcatcgatccaaatgcagctatagctcgatggccatggccgtgagttttcttttttttacatgttgc

SEQ ID NO: 6281 - DNA, 365 bp, Oryza sativa
gatcttcattctgcttcaaaactaggcaaatttcattttcatattccagctgctatggataaagcttaactaataaacccaattaacaaaactttacccgtggaagaaccacctctccctgatgatgtaagtatggagacggatttaacctgactagcttccttatttcgagcatatgatgacaccattatatttttggtcctgcagaacacaaataaaggtcccaaaattaaatctcataaagatcataaagtggcaagcattctattcctaaagaagcaaagaatacctgcagaaggcgcctcataacatctaatactgttgcttgcgtatcatgtaaacctgcattgagcatatcattatat

SEQ ID NO: 6282 - DNA, 506 bp, Oryza sativa
  unsure (1)..(506): unsure at all n locations
tagctatgcatgtacgagtangacgtgggccggcggttggccttttgcaatcctaccaccgctggagctcaccaaagaaaattaaccggnggggaccatggggttttccgttgcggngagacgtgtctcgcgaggcangcaactatcggcggtggatggctggatagcctggatgcacgtggtgggggccggggaagcctggactggaaagcccgttccgttgggcggggggaactggactgatgatgaggggctttgcacatgccggcacatggtggacttggcctttccgaacggctgcctgctagtgccagactgatcgtctaccgtaacgtacgcttgtgtaatggcggccgcctggcacctctcctgcttgagctacctgctgctggtccaacactcangccaaggttttcaatatcccngatcgtataatagnattttacgctactacgatcataccaagcttaaacgatactgagtccatctagtatctttaattttat

SEQ ID NO: 6283 - DNA, 438 bp, Oryza sativa
  unsure (1)..(438): unsure at all n locations
agcttgtcgccttcaatatatcgttgaaccagctcaccggaccgattcctcgggagctggcgcggtgtacaaagctccagaggcttgatctgagtaagaactccctcactggagtcattcctcaggagcttggcacactggtgaacctggagcaactgaagctatctgacaatagtctgaatggaaccgtaccaagcagtttcggaggcctttcccggctcaccgagctgcagatgggaggcaaccgcttgtccggccaattgccggtcgagcttggccagctcactgcgctccagattgcgctgaatgtcagntacaacatgctatctggtgagatcccgactcaactatgaaacttgcacatgctggagttcctttacttgaacaacaatgagctagaaagtgaagtcccttcctcattcggagagctctcgagtc

SEQ ID NO: 6284 - DNA, 396 bp, Oryza sativa
  unsure (1)..(396): unsure at all n locations
tagaagcacagcttananagctattagtatgttttaattccctccgatcggttattattngaaatgccctccgatccttatgtttaagcaggtggacgatctgcctatactaaatgccaagtgggcccatatgtgaaaattcattntcatatatggatggcttaagagaacacatgctccgtgttaatggtgctattacacacaataatcagtaagtaatgtaaattgatctcgtccatgagcaacatctaattaatcttcaagatcttgatcaaaatttcagtcccggccggcgacctaattaatttgtgacgtcgcagagatcgatccatcagattaattgatcattgagacatggctagcagcagctactacctaacatggcacatgcatttg

SEQ ID NO: 6285 - DNA, 445 bp, Oryza sativa
agctttcaccactgtctacttggctaacatcgcgtacaaggatgaaccattcgttctcgccaaacaagttgttcaagtgttctacatagttgacccgtgtaacaagaaactacatgttgttcgtgaagggaataggagaattgttggattggacaatattgcagacgaggatgattacaaccagcacgtccatggcataggtcaagaaatacctctagaagaggaggaggaagaagatgaagttcaatatgcacgtgtcgaccatgaggaaggattatttttgtaatttatgtacgtagtttatgtctacatgtctgttatctgtataataatgaagtgcaattactactgttagtgaaataaaataattaagtataaaaaaatatgtagtgtatgtgaaaatatgttaaggaaaataaaagaactaagtgaaatagaataaaat

SEQ ID NO: 6286 - DNA, 465 bp, Oryza sativa
  unsure (1)..(465): unsure at all n locations
agnctgactacccaatccttaagcacaccgactaggggnttaccccattaagttcaagtcctagaagaagcaatcgatcacccgcatcactcatagactaaatctaaaacatgcaagcaaaagttaattcaacagcaagagtcagtacattattaaaaataatgtactggcaagtgccaagacaagcctaacaccctacttgcaaggcatataatcaaggaaggcatagtatggttctttntagcataaagcaagttttatttgcataaaacatttctaaatcagatttgctttcaaataaatttcagcaagctagtacttagcatatgggcatcaaataagcattaatcatgtataaatatacacctcattgccttccatggcagcaaggagatcattctcaaatctcatcacaatttgaagggtaaatttagcatctatgtgaataaatacaagtctatactc

SEQ ID NO: 6287 - DNA, 307 bp, Oryza sativa
  unsure (1)..(307): unsure at all n locations
tgccctgtttgcanagcactacaatacaagattatacgagactatctatgttaagttgaccggcagctaacaaagaagagaattcctgcttatgtgatgtggtatttccctataataccacggctaacgcatttgttcaagaacaaagggaatgctataatgatgccatggcacgctgaatagcgtcaacaagacagaatgctgagacaccctgccgatgggtccagtggcgaaacatctacagaaaatttaagaacttggaaggacacacnaaacatacggtttggtttgagacggatggatgaat

SEQ ID NO: 6288 - DNA, 410 bp, Oryza sativa
  unsure (1)..(410): unsure at all n locations
agctntntggctcctttgaaacaaagtcatgatatattatagaaaatttgcatatatagttctttggattaaaggaatagttaaaaaaatcatacgaaattcctttgtgttgggtcaaaacaggaatatttaaccatttgccacatttagatgtggcaattaactttttgccactggacccatatgtcattaagataggggtgacaaatatttatttaccaaatttaaaagtgacaaatagttaaaacccctgtcaaaacatagtgatcttggaagaattttattcatggaaaaaaaattgtctgtgtttatctttcctctaattgctacgcttccctgcattccatcgaaacagttatttctatctttttagggggggttttaatcaataggacactctaaaccatgta

SEQ ID NO: 6289 - DNA, 178 bp, Oryza sativa
ctgtcttatagtagcagatgaatctggcgatatattgatcataaataatggaacaactgcagaaatttcaatataatacagtttatgcatcaagtgacataaccaagtaaaacaatcccaattaggtattcatctcaaacctgttgtttcacttgatttacgccactcagtaaatgca

SEQ ID NO: 6290 - DNA, 469 bp, Oryza sativa
  unsure (1)..(469): unsure at all n locations
gcttgaacattttataggctcggctcgagcttgtattgagctcgagcctatgcagacgagctcgctcgagctcaactcgtcgacagccctaatgacacgtgaggtcacatgggtccaccatattttattatttcgtgtgtaaaactgacatgtgaacctcacaggttntattattttttcggatcgaattactacgtaagcgccacgtgggacgaagacctagtcaaaggagccacgtaggcgccacatcagccaaaaactgagttaaatactgccaagggattttgtttgcatggttttgcaagttaggggatgtgttgtatctggtntttgcggtgaagggatgatattcgaactcggtgacaaatgagggacctaaagtgaactttctccgtcctcaggctccagaggccgagtcggcccacataggcccattaagctcccaacaagtgtagcccaagcatgtaac

SEQ ID NO: 6291 - DNA, 417 bp, Oryza sativa
cttacacagtataatcgaaaggatgcatgagcaagcttaaaagcatcccaagtatggctcaccgaactacatatacaagaaaattattagttgttattgccatatgatgatgatggtagagagggaaaaggatgctggtacctttgaaccactgacattaatgcatggcgaaaatgggatgctgcatatgatgaaaatgaatttctccagtatattacgtatggaatcccctgagatgaaacatcaccactgctaaattccaaatagtgtcatgtggtaaatagtactgcatacttgggtgttcaacatttcagtgcttggttatagataaaagaatctatagaggcaaaatattcgtcctacagaggctatacatttgttgaaaaactactagcactgtactcctactatgtcgta

SEQ ID NO: 6292 - DNA, 476 bp, Oryza sativa
  unsure (1)..(476): unsure at all n locations
gcttgaactatggaattagtgatgagttggattcatcttgggctgccttatcaaattgaaacttgaaacctcacgtgacatactcatagttcactatagcaaaagcactagtccagtttatttcagtcataagaaactaactgcattatttgtttgtaccttgagaaaatttataaatagccaacaagactcaggatcaccgatcacaggcggtacacactaagttagtattacagaagcaaaatgtagaatagcaagtatactagtctggaactgccattcatgttttattttcgtcctgaaatcttagtcatgcttctttataataccatgtcaaggagactaaattagacaccccaactaagttttcctggggaattgtgtattcactcagggagggttatgttgattaatataaacgtcaagaatcacagacaactaanagtatcttctatttcgatgattctaatctctaa

SEQ ID NO: 6293 - DNA, 246 bp, Oryza sativa
tcgagacgcgcgagatcgtgccgaattgccgatgtcacgagatcacgactcattgactcactacgagtgcccatctcacgagatggggatgtggcctagtaaagacccaaacgggcccatgtcacgggagcccattaccttacgaagcaaaggcaaagaagcccactgcaccttcttttgggtcgggccacgtctgacttcaacgttggtggggcactccttccattccattttctataccaacgt

SEQ ID NO: 6294 - DNA, 392 bp, Oryza sativa
  unsure (1)..(392): unsure at all n locations
gaagatggacgtcctattgccccggccgaagccaccaagaactatgtacgtcacagcggntgggttgtgcgggataacgtgcctgtcantacagtgtactggcgataaacaatggcacgcggagatcatgagagtgttgtcccagaatcagagaaagagatgctgtggaccacaatgctcgagacattcacccttcctgcgggtacagaggactaattgaaaatgtggactctgtagaaaatggcagaacagtttcagagctttaagggagatctgttccagaagtatatactgatagggcatacaccgtactttgacacattcccaaagcttatggatcactgtgacgagttcgttgcttattagacaggtgaacaatggcacgcgatgat

SEQ ID NO: 6295 - DNA, 423 bp, Oryza sativa
  unsure (1)..(423): unsure at all n locations
ctcaagctgtactcatggagagtgatctcatagaccggtggtgtcacccacaagtttctgtctatgttgtgaattgacccgggcaagattgtgaaagtattcctcacctccacaaggaacgaggtaagtgagtaaaaaaagttgtgctgaggtctcaaaggtagccctagtagagcaatcctcacttttagttatctctagaaaggtctgttggatcttggtggtcactctacttatatagaaagacctangagtgttagattgaaggttgtggtcctcttctttgatctttgcacaagtgaggcaaggtgtaatctcaacggcgagtatgatccgtgtgattctaacttggggaaaaanaattctgtctcttttgtgaatgctctgtgcttgcccctatgttctatatactcctctagtcta

SEQ ID NO: 6296 - DNA, 418 bp, Oryza sativa
  unsure (1)..(418): unsure at all n locations
agcttagaatgtgtgcatgcctatatgtgtcattgtctaatcgtaagaggcaccggctgttcaaaccgagtagtgtattattatgggtgtttggcaggagactgtacagggtgataaggtatttggacctaaatctaccagatagtcttgatttgttgcgtccaacatgatcacatagaatattggtgaatccatgattgtatctgcataacgtatggttgtagttagatatagaacataaacagatcagtaaggaagatttagcgagtccttggaataatngtcaaaaaagatatggttctgaaagatctgaaatgatcttcagtattcgattctaggcatgcagattcagtacatgctatggtagagtaagttgagctatctatataaactaataatgtatatatgtgggagagga

SEQ ID NO: 6297 - DNA, 253 bp, Oryza sativa
ttaagtcacctgcggcatgcaagcttgacatttatacgacggtttttcttgtttgagcttatcctaggagagagctagtcggctcagtattcacgacctaatgaccgtgagcacatgggacaccatatttatttttcgtggtaaactggctgtgacctacatggttattatttatcggacgaatacacgtagcgcctctgggacgaaactatcagagacctcgttgccccatcagccgaactgggtaaaactg

SEQ ID NO: 6298 - DNA, 283 bp, Oryza sativa
  unsure (1)..(283): unsure at all n locations
taacactgtgtacatggngcgctattgcacagtatagtctacttgtatttattatcgagcttaatagcatacgctggatcgctcaccgaactgcatatacattacaattattagttgtaattgccatatgacgatgatggtacagagggaaaatgatgccggtacctttgaaccactgacagtgaatgcatggctagaaatgggacgactgatatgacggaaaagaagttcaccatgatattacgtatggtatcccctgatatggacatcatcaccgctaaaa

SEQ ID NO: 6299 - DNA, 476 bp, Oryza sativa
  unsure (1)..(476): unsure at all n locations
agcctattgcattagtatgtaggatgttttgtactattgtcaatggtggactccattgggtctgtctcaactcaatcatatgtatgtccctcctatagttgtgttaactggctaactgctcgatgcccttcatgaaagaaagagaagatagatgtgaagaaaataattctttccataaaaatatttcttttacgttttgagtagagacaattcgtttgtattgttaatcagtgctgcttaagtttttatggcatagagaaaatattctcttttgaaatgagtgaggttgattattaagaaatgtatcgctaaatatacatacgaccgtgacaatcttttaaggaagcccgcgcggatgcgcgggcatcttatttattgttctatgaaatagngctaaaagaagccatatctcacatttctacgtcgtgagatagatcatagactctagtatacttcaatgataataatctctctcc

SEQ ID NO: 6300 - DNA, 370 bp, Oryza sativa
ggtcgcagtcgcaggcaggtcgcgagggatgcatctgttatcggagccccaactgtggccgagtcgtcgtctcgactcgactcgtcgtcggtgaagcgagccagctgaccaccaccgggtacaaggttgctacaagccgcacgcacgcacgcacgcgagagagggacggagactgacacgagcatcacgtactggtcaatgttttggactctgacgagtctgactaatccgtgcactcctctgcttgtgctttcacacggttaattaaccaccaccattatatcgtgttagaccgtatctaaatatcttgtgacaattgcatttctgcccctactatctacttaatgacgttaatcctgcctctactatt

SEQ ID NO: 6301 - DNA, 433 bp, Oryza sativa
  unsure (1)..(433): unsure at all n locations
atgatcaattagaatatgctgtttactaatttgctaagaaacttcaaacatgttctatagcgcttgatgagaaggaacatactattgagattctaaatgctgaaattgctagattgaaatctntgattcctaatgatgataattgtccatcttgtgaagttttatattctgaaattaatgctttgcgagatgtcaattctattaattgcaagatattggaatttgagattgaaaaatctaaaaggttggaatcttcttttgctcttggatttgctttacatgctcgtgttgttgatgtgttgattctgacaaagaacgctttgaaaaaaatacacagttgctctttgtgcaagttctttggtcaatgcttcatgtgtaaataaggaaatacaaaacaatggtgttttgattctcaagctgctcaagtgtgttt

SEQ ID NO: 6302 - DNA, 485 bp, Oryza sativa
  unsure (1)..(485): unsure at all n locations
tggaggtggcgacaccgatttcttcgtagatgagctatatcgccttcggatcgtgtcctgtcatcgctgatgtgtttctatctcaccaatattttctgttgcattactggaccatttagaccaagtttctatggagaaaaaaaagggaggattttatataaaccgcagaccatagttacggttctggtgcttaatgatgcttgtggaaccccaaatccttacaaaaattaagtttgaagactatcatgattatcgatgtaacatgtaatgctgttatntttttcgatggaccattgaatttgtttntgtccttagttaccgtatttttcatcaaccgcgcacaaacatggatggtctagctattagaaagaaacaaaagaagaggttgaacgaagcattgcttgccgtctctttgtttggaccatagaattgattaatgtagattgagtgatgctcgtcaaacagaaacaatgatactactatat

SEQ ID NO: 6303 - DNA, 462 bp, Oryza sativa
  unsure (1)..(462): unsure at all n locations
agcttctaatataattctttcctacagacatggatgtatcttgcagcgcccgtttgtttgtatgtaggggagaggacactgaggttcttcaagtctggcagttattctgtccgtctgttgaaggtggcacacatgcatcacaaaattgtattacactatttacatactgattttgtgtacggtcttctgacacactatttatttgcaggtggccatctatcctggtaatgttttaacactgcagatgtctaagcctcccacattccgntataagagtgggcagtatatgtttgttcaatgtccagctgtttcaccctttgaatggtatatgctcttatttcctaatatgcttcgcctggagtttctatttataagattgcaaatgtcatgtctatgaacaccttatctgtagagtaggtagatcagtatagctgcttagatgtgtaatgattctttcccctt

SEQ ID NO: 6304 - DNA, 456 bp, Oryza sativa
  unsure (1)..(456): unsure at all n locations
tgtggaactggatgaacatgtangtaccaagcaacaatgcaaccaaccaccaagagcgacgtctatangcttggtggtgtcttattggagatgatcacagggaagccgtctattctacgtgaaccacggcccattagcatcatccagtgggcacggcaacgtttggcacgaggtaacatcgaaggtgtggtggatgcacacatgcattgtgaccatgatgtgaatggtgtgtggaaagccgcagacattgcccttaaatgcaccgcacagacatcgacacaacgacccactatgaccgatgtggtagctcagctgcaggagtgcctaaagctcgacgatatgcgatgtggcatggagatacatataacaacttctatgccggcaacaacaatgatcccaactcaagttataacatgtacaacacggaccagtccactgatgtgagtcaaaacaaca

SEQ ID NO: 6305 - DNA, 452 bp, Oryza sativa
agcttatgacaatgcgaatgaagatgatcttatgaaccacattcaaagcaacgatttggaccacctcttttcctgttcctggcattattcatagctcgagcaattctgttagcaaccaaagccaaatcctcctcctcgatctgttcgagttgatcatcgaatgtggcattcaaatagcaagaaagaaacttagatgaagaagcatcaacatccaaagaagaagaagaagaaaccaaagcactcgacttagaatcaactttacgagaaagaacgttcatctcatgtgttttcaattttgtgtaaagcgaatccaaagtcaaagtagacatgttaacagacttctgagtagatgtaactctcatctcccagatagacatatcaagaccattcataaagtggcgagaaatctcagattgtggataattagcatcataagaagaatcaacagatct

SEQ ID NO: 6306 - DNA, 362 bp, Oryza sativa
  unsure (1)..(362): unsure at all n locations
agcttagatgtgatatgtcacccncagtgtttacgtggcgctccctcccgaaggggtggggcccgtggatgaatggcatccatctctttatagcatctcaacctctcctcgtggcaaccatgggtatggggttaattagaatatagactaattgaatattgaatgtagaataaatatagttccaaaaatggactttgattttaaaatctcattttttatatttatgttttaaataacaatatctattatcaaaatatacttaattatatttacttgatttctaattgtaataattattgattatatatatattatatttagtaacttataactgtcattagatttatgtatattatttctat

SEQ ID NO: 6307 - DNA, 310 bp, Oryza sativa
  unsure (1)..(310): unsure at all n locations
tatttatgttntgctcctgcaatataattagttagtgggtgcctctgcattttttttgctgagaattggtcatcaatattatcactttcaagtacaaaggcgaggaccaatttgtgcctttgcaaaccttcgatgtgtttttcttccaagagctccatcggttggactaataagccaaaacaaaaacttataaaaaatataatgtaattaattttgaagttaattgtaagatattttcaacgtagtacttttttgatattggctcttaagtcgctaagaatacctatacaaaagtttacctgataaataa

SEQ ID NO: 6308 - DNA, 469 bp, Oryza sativa
  unsure (1)..(469): unsure at all n locations
agctttcgccaagcagcgagctctcccgatccgttgggcgtcgaattctatggcggtcaacgccggcaacaagatccgcaacgctcaactggtgatggatttcccccaatctcgtgcgctagatcgatatcggntgttgatttcgcccgcggatcgaaatcttgtcgcgaatttctctcctcttttttctttcgcaatcgcgtgggattgtatccgatcatatatcaagttgtcctctttatgatggttgaatcgaacagattgtgacgaggcgaatacatggggggtctctctcttatgttggataataatagcattgcatatttattggtaattattcattaaatgtgtctggtgttattatggctaaagtctctgttattatattctctgttagaatagacgcacggtagttctgttttggcctgatcagaagatgttgtgntagatgatgcttctaattttcatg

SEQ ID NO: 6309 - DNA, 186 bp, Oryza sativa
caagccaaagccgtgggatggagaccggcatgagtccgcgcccgtggcatgggcaaagcaagcttattgttatgaggtgatgtgtggtggtaacgaatccaatgacggatagccaccgaagactggaaagacgggggtgaaggcactcaccgccgcttgtttggggaagagatagggaaaggggga

SEQ ID NO: 6310 - DNA, 301 bp, Oryza sativa
  unsure (1)..(301): unsure at all n locations
aacatggtggagaaatgagacatatatattctggctgaggaaagagggaggtgtattataacacaactcataatgaaactgaaagaaaatgcaagatgggtagctatagtgtgattcagcactacagctatgaatacagtccgagctctaatgcaatagataacatcntcacaaaattatatgttacatgggtaagattgcagaagacaagcagtgtgatattataaataacaacagatgtagatcatgctctaataaaaagtcatatgttgtgagaaccaggcaagctacattgtaaatg

SEQ ID NO: 6311 - DNA, 420 bp, Oryza sativa
  unsure (1)..(420): unsure at all n locations
gtcatgaactgacagtcttcagttgcacgcgttacctttnttttttccttctcttttttactctttccgatggcttataaattcgatagatccagggaactcttttcagttttcaccatgcgaccaggtacaacttgtgagttgcanatgattggccctcgcaagttgcatggggcagtcaacctggtgcactttaggcagcttgtagtacttgtggttaattaagatcttcaagtggcaactttgcatgcatgtcaactgagccgcatgactggatcatgtacaaaacatgttatccagtaaattctgacgtggtagctagctggatctatcggnttcgtcttctgaactcgatttcttcaactgaaccatactgatcttgatctccagnctccactccatggctccatgcatggtctt

SEQ ID NO: 6312 - DNA, 285 bp, Oryza sativa
actcaagcttctcctcgtgcttcacatcgtcgagcgatcaagcgaataataaggtatttgaatcatactcttgagtttggaaattggtattctacttcatcttctatatgcttaagcggatattccgatgctgattttggggttgtagaattgatagaaaaagtactagtggaacatgtcattttcttggtacatcattgattgcatggtcttctagaaaacaatctagatgtgctcaatcaactgctgaatctaaatatgttgctgctgctagttgttggtcac

SEQ ID NO: 6313 - DNA, 480 bp, Oryza sativa
  unsure (1)..(480): unsure at all n locations
agcttgtcaactatacagcatacacacgatgatgttctttcaagtgctccaaaccgtacccctcacatggtcgttctcgtgctgggggctcgacataatcagaccaattccaaaaggatgaggcaacaaatgattcttgttntgtgccattgacaaattcacaaagtggatcgaggcagagcccacataagagatcaaagtagagaacgctatcagattcatgaaaggggtattctgtagatacggattacctcatcgtatcatcacagccaatggtcctcagttcatcagcgcagattttcaagactactcgatagaactagggatcaagatttgctatgctttatgttcccaccctcagagtaacggacaagtcgaacaagccaacggtcttgtgctccataggatcaagacccacgtctacgataggcttatgtcttatgatacacaatgggtcgaagagctcacatctcgcttatg

SEQ ID NO: 6314 - DNA, 191 bp, Oryza sativa
  unsure (1)..(191): unsure at all n locations
ctcagcttcaaaaccatccttgagcagntcaaccgatagttttgctcccgcgacagtttgtgtataatcctattctccgcatgatgtgcatcttcgatgagaacgctcttctccatcatcatctacaaatggctctaatcttgggaactcaacttctgatacagatggtccattgacaaccttcatgacta

SEQ ID NO: 6315 - DNA, 286 bp, Oryza sativa
actcagctttggaaagaatggtggaaaccgcaaattgcgtgttttctttatattacattcccctggaaggaatataaaggcaactcaaatatgcccggaagttaaccttagaattgaggaaggtgacttcctatccaaaccgatagtcctagactcgcaaagcttggatatcattctaggggatggatggttggctaagcacaaaggacagatagattgtgccgaaaagtccatcaccttgctaggacctggaggaaagcaagtccgctttacccctaacacccct

SEQ ID NO: 6316 - DNA, 443 bp, Oryza sativa
ttgctcgtctccttcctttcgccgccgccgaagcagaagatgaagaagagagaagaaagaagcattggcgatggctgcggcggagggccccgttctcctcttcccctctacctcgtcgacgtccgcccgggtggaggcggtcgtcgtgttcaacatctgcgacagctacgtgcgccgccccgaccaggcggagcgcgttatcggcaccctcctcggctccgtcctccccgacggcaccgtccatgtccgcaactcctacgtcgtcccccacaacgagtcccccgaccaggtaaactataaatatctctcttctccttccgcccggcatcatcagatctagggttttacttcttcttccattgattccctgaacttgcctttctaatgttaagggtgctctcgacatcgagtaccaccacaacatgtatgcgtcgcaccacaag

SEQ ID NO: 6317 - DNA, 468 bp, Oryza sativa
  unsure (1)..(468): unsure at all n locations
tgcgattggtggaatagttccctctatctaatccgtccaagtatcaaaaatggaggagctcctgctgctgcagctagctagatagcaccatcgaacagtctgtgctcctctctattactagcaactaattagcacacgcaattactacgcaattagcagtagtgctctcttcaaatgcgtttgagcttgttcagaaaggaaaagaagatcgagtgtcattaggtgagcactagctgagtcaggctcaggcatgcaagaagcatttaattttttactagtttagtttgctagttgagctcagcatgaaattatatatattcattcattgtgtgtncgttatcaataaatgtaaaaataaataaataaagacgagcgatggtactgctgcctattgtgacaggagtatatatgctatatagacaggagtncgtccttaattccgggtaatcagcaaaatgatgactttga

SEQ ID NO: 6318 - DNA, 476 bp, Oryza sativa
agcttaccccacagcgaatgtgaatcgtgtatcacgccaactacagacaggaaaacaagcaaatgacaaatgaaatgaatgaaactgactaactgatgcaaactaaaggggaaaaaacagataggtaggagtaagaaacacaagaacaagcatcaagctagcatttcatacgaatattgcagccaataagtaggatctgagagggccgtgccaagattgtgaagtcttttccaaccgtgcaagatccccatatgtatgcaatgttgcaaagcagataagacaaacggataggtaaaattaacaacagcaaatgcatcccaattggcccacatgctctcaagctacaccacacataatgctaaaactaaagcagtgcataacctagttggaaatggtctttgttgggtcattcctaccactaggaatctgaagcacacacttaataaaagtgacgatgtaagaaatgggtcagaact

SEQ ID NO: 6319 - DNA, 366 bp, Oryza sativa
  unsure (1)..(366): unsure at all n locations
ngagagagagaanggggcgcacccgaagcggccggtctttcttacctgttacaccttcctgctgtccccgatgcgggagatactggcgaagtcctcgtcggtgaagacagcgtcgttgtatgcgagcaacgccgggccctgccattgcgcgagggcgggcgcgagcagcgagcctgcgccgtgcgcgcggcggtcgaagcataagcggacgcgggacgcccccgcgtcgtctgcgttctggatgagctcccgcagcgcggtggtgcccttcgcgtagttggcgagcacctctcggatgcgccgcgtgaggtccacccgctggccgaagtcctcgagcagcatcccgtcgggatccatgggcgagga

SEQ ID NO: 6320 - DNA, 473 bp, Oryza sativa
  unsure (1)..(473): unsure at all n locations
gcttgaagtattctgtgtcttggccacatttgtcccttgactgttgggaaggccaaactngtcttaatagtgccaaatacacatatgcagacggattggtgatattgtaaatgggagctcttcattggcctttattagcaacctgacgtccttaaatgtcctgtatgtgtcctgctnttaagttctaacgatagatattattgttttttttattgcaaagtactattggagtagtattttctgagacaacatattctttgtttcagaatattgaggaactgcaagatatccgataatcttggagcagtaaattttactaagctttctcgattaaacttgctgtaagttttgtctttatggcatactgactatntatgttattagttattgggtctcataggttcatgtgaagagtctactcaagtaatattgcttaacatatggcacaaggacttgagttttaacaatatcac

SEQ ID NO: 6321 - DNA, 511 bp, Oryza sativa
  unsure (1)..(511): unsure at all n locations
tatgagataataggtggctcaatacacaatatatctttcaacatctccctctacgtgatgcctattntttttccatanaagaatagcccgaaggagtaccaaggtcagttaaagaaggattagttaatgttggttaatttggtgttaccgaataatacgttttctcttgtttactcacattgaccaaaatttaatggttggttcctactagtgtgcttctactaatcttgcattcgcattccacagaaggccttagttttaattcgtctaatttttagaaaaaaaatccaaaatctgtaaaattaaatatgaagctgtatccattttatactatcaatttagtatttattaatttaatttagaaaatcaaaatgaaaacagaaaatgtagatgccgtctcttttaatctaagccgttatagttcaacccatttaacantgttaaaaatttatactacctctatattttaattntaatgtatgaacgtcggtgacttttgtaaacgttgatc

SEQ ID NO: 6322 - DNA, 426 bp, Oryza sativa
  unsure (1)..(426): unsure at all n locations
agcttcctaacatcccagtattggttaaatgcctctaataacacagcatcagaacaaatttctacatccctacccactctcttgtcccagaaagtcactctaagctcctgcgcactaccacggatgatttcatcatccaagtccttcatcaaatctatcaagcttattgtgtctttatctacaacccacttatgtggagatgatacatgataatcttggctaccattatccatatactcaacataagcaacaaccctaaccacaactctgcatgcagagttcggatccatcctacaatgcaacggcaaatgaagagaaaaaggggatcccaaatcagatccaccaaaccatgcatnctaatgcatcccaatcgaatcaaagagaggaaaaacgaatcaaagagaagaggaatctcaacttaccctt

SEQ ID NO: 6323 - DNA, 303 bp, Oryza sativa
  unsure (1)..(303): unsure at all n locations
ctatacacactcagcttcggagggtgctaagagagattcactaanatctactcagctcttatctctttcttaatctcaaatggggtctcttgactggcacgcgcttgaagaanaatatcatataatccatcccggtcataatggaagactttctagcattggccacattcatatagatatttatgganncccctctcgnctgctcctctcatcaaactatctgacccgggcacgtcttattgcgctgccttctcctcgggggagatttctttcctatttccactccctgataccacaacccct

SEQ ID NO: 6324 - DNA, 414 bp, Oryza sativa
  unsure (1)..(414): unsure at all n locations
ataattccactccccttatcatcgccatggtgcttaccatggctaggtaatcttcacatgacattccatattgcgatggacacataacataatacagctggttattatctgtgattatgagatgtccgcatgacagattgacaatcttggtggttgtagcaagcaaagcacaatcatgttactagaagaatcttcatgctcttttcactggaccttatagtctcctattntgcctcgggcacttgaaatggtgaccatganggaagaaaatattactagagggaatgattattcttctaaggacaaatatgtgtgggctagtgtgctttccgcttaaagacaaatgttgcaattttacttgcataaaatgtgtacttcttttataaaatcaagccatccctgatagttgattct

SEQ ID NO: 6325 - DNA, 393 bp, Oryza sativa
  unsure (1)..(393): unsure at all n locations
tatcttgagcatagaaggaagaataaagtaatgttatacctgagtggattctgtgtcatgaatntcaacaaatgtgactgatctcgaaggccaccagcccatgacaccaggcggcttttcttcanggtcacgcaaacgccacaactcaccttagacagctttctgaaaacaacaagtaactgatcaaactaacctgtagacatctaccccaaaaaaggaatagaacaatattctatttctaacctgaagaataccctcctgtgtgaaatcaaatgcagcacagagtcctccagtgctatccaatccattgataattctctgcctgtgtgtatctgctaaaaaataattgntcagtttatggagaaaaaatatacgccacatgtccatatcaaa

SEQ ID NO: 6326 - DNA, 428 bp, Oryza sativa
  unsure (1)..(428): unsure at all n locations
agctntgattntctttntcatataataatatttccaaaggaaataggatgagtggagacggctcgtcagtggctcggctggaggtcgtcttcaacctcccgactgagcggaagtagcgagggaggatgcggctgggcgcggccgggttggcgcgaggccggcacggcggcggccgatgaaggtgcggcgagctcgagcgacccaccgactgcggcagcggcgcgtggcggatagagggcgagtggcgcatcatggacacgccatggcccgagctcgggttgcaaggggatagggtgctatggctaggatccaacaaaattgatgggagcgtgaacatctacggcgtatggggattcgattcaccagctagatggagaggggagttcccgggatggcttgtcacggcgacctcaccgacggcgcaatgg

SEQ ID NO: 6327 - DNA, 198 bp, Oryza sativa
  unsure (1)..(198): unsure at all n locations
ctcagctttggattgaaggggctcttatgttttaatacagtgctactatccatgttnntaatccttttcatcaccattatggatatattatttatttgtagcttcacgaaaaaagtgtggactccacgaataaattaaatcttaaaaagatatacgctattcccatttcagaatatgcctctttcatgatttgatatg

SEQ ID NO: 6328 - DNA, 416 bp, Oryza sativa
  unsure (1)..(416): unsure at all n locations
atgccacaaacaagatgcagaaccggtacacttattactatctttctttatcatttgagcattagaaagagcatactcatcacattgtttgtctactgctagctcccaaaacacgtgagcggcagaatcatacttaccatcaaaaactggcaagatagattctaccctngcgagatcattatcatgtaccttatatgcgccctgtggatcacctcgcattcgttgtccaagatgaacaagtcgatgaactgtaattccttgcgcaacctgccatggtagtagcaacaaaaaatacacagaatatgcacgctctatcaactactaaggagcggagctgaaatatacacacactcaagctttcaccaagctactacaaggtttactaaacaagcggaatgtgacgttcaccgactcaa

SEQ ID NO: 6329 - DNA, 429 bp, Oryza sativa
  unsure (1)..(429): unsure at all n locations
agcttgacgtcngtaccagctctcctcgttactattgagacagggccatacaaccttatggtctcgagaaagaacatgttgaccaatttcaacttgttgagcatgtctccggtgggcacactcgtcattgcacaccatcctaacctcctttctgagtttctccatccaatgttggtgtgtgctaagcaagaacatggtccaagtgagcaattgcgaggtggtgtcatgcccagcgaagaagaaggtcttgcactcagcgatgatatcgtccatgctgagttgtggctggctcccgccatgctctggcacgcatgcctctaacatcaatccaagcaggtcattcccatatcccatggtttctttgtagtgagtcgactcttgataatgttcatgagcatgctcctcaccttcttgtctagtgaccatgtc

SEQ ID NO: 6330 - DNA, 410 bp, Oryza sativa
acactactaaacaaagtcatgaaggaataaacctcgaccatatattttgccaaggtgcgggcagaacctatgtgcatgaatagttcaagggctctaccaactgtgctcccatagagtatataaggttcatacatgtatcacccagacttagtgcgaacaaagtagcacatgacaggtgaagtgcactaggttttgcctttatcttctcttgcttcaatctctactctattcctccatcctttgaaactgaaaggtacatcgatcaatgtaaatacaacataaaagcaatcattaagcatgaagggatcatcttgtaactatgatactacttgaaaggataatggtgttcttatcaaaaagcacgtcagactttaaggaattgttcaattgtgaaaatacagcatctattt

SEQ ID NO: 6331 - DNA, 184 bp, Oryza sativa
  unsure (1)..(184): unsure at all n locations
ctcagcttattagntccaacacgcatgacaacttgctgtgcttggacttgcatacattatacaactgtatctggcgatcttccaccaacttactaaacttctcataatctctgtcggtgtgctctgcgtcttcaatgtcatgcaacattgtagatagacattgagtgtgcaaatctatggtctc

SEQ ID NO: 6332 - DNA, 294 bp, Oryza sativa
tattaattattaacccaagaggggtgtctctgcgcctaacacgagagcatagtgcccttaacttttcatcaaagaaacgcgtaagattagatggatgaaccccttgctacaaagcaatctaaacgtcagcaactaaatgcgcacatagcagcaaaaagctcaaccttaagaacagacacccggataacagacgatgaacctagaatcaaaatcatgaacgagcgagatattaaactaggaaaaaatagtgactaaaaaaactacaatatggtgtcaaatcatgagtactggtac

SEQ ID NO: 6333 - DNA, 290 bp, Oryza sativa
agctttgattgaggaatgcgggactgactgctggagctacatattttttttgtgttcttgtctgcgaaatgacccattccttgacaattgaagcaacagatatcttgccggactcggcaattttttttctcaactatgattcctctgccctggcactggagttatgctgaaaatgttatcttggcgaggatttgtgtggctttatgcgtctctccgctggaactggcgggttggttggccatcttcttctgcagcagaaaactgaattgacaatcttttggtacatgatc

SEQ ID NO: 6334 - DNA, 464 bp, Oryza sativa
  unsure (1)..(464): unsure at all n locations
caagctttatttggcaagtactcgttatttatcaattnctcatgtccctcaacgcagcaaccgagaagtcgaaccatatttcggtgatgtagtttagcaatcagagtgacttcatttctaaactccactattccttgatcagagtctctacttatccttttcacagcaacctcttgacaaccttgtaacatccccttttgagaaatagcagtgtcatgtttatgcacataaaaagataattagattcttatgctccttgaagaggtataatatcttatagactntctagtgctaatttgtggtaacgagtcctgctcatggactctataaattcttaaaactatatcactggaagtaccttataaactttaccaaaaccgtcctgtccaaccatgaatgatttggagaagttgtttgttgagccacaatatcatcaaattttacaatggaaattctggtcatgg

SEQ ID NO: 6335 - DNA, 452 bp, Oryza sativa
  unsure (1)..(452): unsure at all n locations
agcttcanaatgaaggaggcagatcatcctatgtcacaggccatatatattctacctagtttggaaaagggtagctagataattagataggagagaacaagataagaatttattctgccatgctctagcctggcaagaattggagggggaccaaggtctaaggaccaaagcttaattagcttctcaacaacacatttgcacctaataaaaagcctccaagagcagctggaaggcttgtcaagcatgcagtgagactacttctgaagcaaacctacaaaagactaaagagagagaggcccatagcatcaaggcatgcatgcagaacaggaatagtgcctatatgatcagtgtgctccaccattgtagctcatggccagtattgcagcttgcatgtggnngtgttgtccatgatcacttgataccgtcggatatcgctgtgatcaatcttttac

SEQ ID NO: 6336 - DNA, 464 bp, Oryza sativa
  unsure (1)..(464): unsure at all n locations
tatatntaaacttaaagcatcaagggtaagaaagacattcgctcctaacgttatagtgtaatgaatacaaatgtaacggtaagggcatgaaagagatgatgttgaaattttagaggtattgaaaggaccggtaaatttcacgggcatgaaagggattaagtgagctttcacggatacacagggaatntactctatatctaactacgccctgatcgaatccaatataatataagctatcattttcttagaaactaaacatcacacaaaatacatcatataacctaacattatcccccattctacaaggaaagaatctgcacgtacgtatgcacaacttcctgccaccacttgctacatactaggagtaaatgtgaaagatatacaaatcttctgctataattaaacaattaatggtaagttcgctgtgacccctgctgtcatgcctacgtccaactcaataacca

SEQ ID NO: 6337 - DNA, 472 bp, Oryza sativa
  unsure (1)..(472): unsure at all n locations
agctntctaaaatgcatgggaataccgatatacttaacaggaaaagaacctagcttgcagccaaagatattagaatattgatcattatatttctttgcttgaccaaaacaaaataattcacttttgtgaaaatttattttcaagctagacaacttttcaaacactgataaaatcaatttcaaattcttgacttcttgtaaatcatgctccaaaaatatgatggtatcattagcatattgcaaaatagataaaccatcatccactaaatgaggtattaccccacttaacagaccagcatctttagccctcttaattagtaaagctagcatatcagccacgatattaaaaagaatcggagacagaggatctccttgcctaagccctttataggtttggaagttatttccaacttgatcatttactntaataccaacatgaccaccttgaatgaaagaagctatccattgacacc

SEQ ID NO: 6338 - DNA, 303 bp, Oryza sativa
  unsure (1)..(303): unsure at all n locations
taacattntctgcattcatgataacatgaacttcaggtctgctacatanattggctcttaactcttgcgcatntatgacaactaaacgctagttgtgctatattaaattgtctaacgagattcccttataaggattaaacaaaattttagtgatagaggtttggtcatctctgtaaaggaaagcttaaccttttgtgcattcatgataacctgaacttcaattctgcaacatatactggcttatatcattgccattangaacttagcttgttatgttatagctcctaaaacaacatatgtgca

SEQ ID NO: 6339 - DNA, 447 bp, Oryza sativa
agcttgatatcaagaaatgctttgagatcaatgacatgggaatgatttttctttcccaattctctcacaacctccggcaggtattaacccattctgctgtaaaagaaataatcgcaataccgtgcttccaattgtcttaataacatctcctcatcactgcaaataaacttgtcatattgttcggtcaccgacattgggcttatatccctttcaagcatatgtggcttgcagaacatgaccattgtgcatttagcgggtgttacgcctaatggactgatagctgctcttatggtctgtggtctgagaaaagtgaagcttcatgaagcattcaaatccatggtgccatcacatatgctcaaagttgttgaagcccgtggttgtctcttccagtggattaataaaccctaccaggtattctactatatttcttttctggttataccaagt

SEQ ID NO: 6340 - DNA, 353 bp, Oryza sativa
actaagctgtgtttacaatgtctatataaaaaccctggatattcttaacaaattctggttattcatgtgagataaagaagattcaactccatcgattcaatcaattaatacagagaattattctggactgtgtaccttctgtattttcaacaattgtgctaagtggcgatgtataagagtagtattcatataatttaaatataccattggactatagtctatgtctctatatctactattatattaaaattaaagatgttttcaccagaattctgggatgtcatccgcatttaaattgggtttaattctatggttatgtcacaacaatttcctttttcatacgcaagagtgac

SEQ ID NO: 6341 - DNA, 446 bp, Oryza sativa
agctcttcatcaagtctaagatcactcatatcggaggtggcatgaaagcgctagatccgtttaaagtcggagctgtctccataagccgaactggattccaaaactcattggactttaatatcttgtaaatcctctgttcactcaatgtattctttggccatattgtatagctctcatgcttggatgtatgcatatacttaatggtcacatcacatcacagtgtacatgagatcctaggtactactgttcggatttagctaacgtgatggttgagtcaacgtgaaacccacctaaaccccacgtgtaagcttcctccctcttccctctctccgctccaattgtttctgctcctcgtttgccctctacctctcttcccagcctccaaggcaatgggctggctgtcaatatggaaatgggtagctgacctccatcatcttatcacaact

SEQ ID NO: 6342 - DNA, 457 bp, Oryza sativa
  unsure (1)..(457): unsure at all n locations
tagcttnttgtttactactatagaccatatttttttccactctaactcttgttgagtactactcattatgtgttgctttacttcaaaggtaacctgcggtactctatatcatatgctctccgtggttcataccggtgagtattctttattcttatttgcctgtgcaccgtgattatttgagataatgcccaactccctctgcttatttctttatgatattcgatgaactaactatcaagttttacattcacttccatatctatgatattcctctagatacaacattagtgggataaaaaagtaattatagttagagtaaaaatttctaagcacatatttaggttataatgctacacatttcttttggggttctattcctgcttatatcgggcacatccacaatatcatactaatacatttggagtatatatttaaaggataaatatatatgctaata

SEQ ID NO: 6343 - DNA, 331 bp, Oryza sativa
  unsure (1)..(331): unsure at all n locations
ctcaagcttctgccactatggagctaaaggccgtgcagcccaatccaaattttcatgttttttcctcatatattgatgaagcccttagatcagatgatgtgaataaccaatatgcagcttcatatgtgcccaatacctggagcactgagacgcgtgaacccattcccgattaaccttatagttgacctgcctttctatccttaaacttntggaagaacttgaaatggagttcaaaagagaagctattgagttagctatagcccgtgacaacagaggaggatgaagagaactatcagcatcgtgaggttaattcttattggcatatcgaata

SEQ ID NO: 6344 - DNA, 461 bp, Oryza sativa
  unsure (1)..(461): unsure at all n locations
agctngatcgattccncctctgaaacaagaagttctggaccgggaggtataagatcaatcactnggcgtccatccgatgcatcgactatggatatttcatatccccccttttctttacgcagtatttttcttactacacctgttgacgttgcattatagaccgtattgttactcttgctaccatcaggatagatctgtccccttcctcggtttccccccacatatatgggatattttaagaaatgaacgtctttcttcatagcagggtcgggggaaagaatgggaaagacgatttcactatatttcttaccgggaacagggcctatcacaagaatattttttntattgggacgataactcttgaaagagagatttcctatcttttctttcaactcaggagaaatacggtcgggcggcgctaattcgaatccctcgggcanaataagaacagcacccacatt

SEQ ID NO: 6345 - DNA, 177 bp, Oryza sativa
  unsure (1)..(177): unsure at all n locations
atctacttcaacctatatgctcttatgcacggccatacataacatagaaatcacacgtggaaggggtgggcaattaactagagcaacangtgctgtancgaaactgattgcaaaaaagggaaatcggccactttaagaataccatctggggaggtccggttggtattccaaaactgc

SEQ ID NO: 6346 - DNA, 485 bp, Oryza sativa
ttaagcacctgctgcatcaagcttcattatcgaaaaaaatatgtttttgttcatatgcatgagacttgaggcatctgacttgtgaacaagatgcgacataagtattgctcgtacattctggagcttcacaatgcccttatgcctaaaatttagcagtttattcactgaagcgtctgttcttaaaacaactagagggtcacatttgacaaacattcgcgcaaatgtatcatgtatggcatttgtaacttccaacacacctataaaaactaattttgaccagcaaacttcagtaagtagatttgaattactccaaagatcttgagctccttcctcatggacacaataggtactaaagtggtaaaccaatgacaggataaatgcacaatagttaaatgggaaatccccatagctttcaaaagcaacacaaacataattgttgcaagtatcacaatgtgcacatgagcacataagctctcactcaccca

SEQ ID NO: 6347 - DNA, 251 bp, Oryza sativa
acagagaatccaaacatatcacaaggatgagaactttggtcaatgttaaactataagaaggcaaatatgaggcaagggaaatttgtgtccactgagaaagaagataccttttctttcaccaattctgctatgggagacgcatactgcttcaataatctaaccctggtcagacaatcagatggtgggtgatccataacatcgttgagatctgcagatccttgtgaagtaccacatactggagagcagtgact

SEQ ID NO: 6348 - DNA, 481 bp, Oryza sativa
  unsure (1)..(481): unsure at all n locations
atccttaagcacctgangatgcagcttgattatntaaaagaatgggatcttgatataaggggcaaatttagacgctctagaaccaagaaggaagttaaacggctaatacaggtaagatcggctgaaaccccgatactatctctattagcagcgaaaggagagattagacgaaacgcttcatgataataacctaaccgatgcagcattaagcatgaagagaagcataagatctagtcaaaccgatgaaagctcactcgagatggtagatataccgcataatatagctcaatatcaaggcctaaacctaacggctgttttagatgatagaggctagccgatgaagctcatataacgagatcgatctagattatgcgatatatatgataactcggctacttgcgtagatagaactagagtgtcataaagatgtatgcactaatcctgagaacgcaagccaccatgacaagattaccttttcgtc

SEQ ID NO: 6349 - DNA, 170 bp, Oryza sativa
ctcagctttcgaagaggaagaaggatgaatggaccgctgagaagaagcggaaagatcgttacgctctgtcgctgatccaacctcatctatctaatgatattttgtaagaagtgttgtaagaaaaaactgttgcacaactcttgctcaaactggaatcgatttgcatgttt

SEQ ID NO: 6350 - DNA, 470 bp, Oryza sativa
  unsure (1)..(470): unsure at all n locations
agctgttgctcacagcgatccagtgagctgactagtgtcggtctcggtcaacagtgattgaaatttcggaaccgaaattggtactttcaccctcttccaccggcaagtacacatctcgcctgaaaatttcagttttttcctttttttgaatttgatcaaagtttattcaaaatcgttcaaaattcaacaaattttcaaaaaaaaattcggccaaaaaataccaaaattttggagatttcggttccctctagaataaaaatcacagtttcgagattactaaccaggggtagtcaattcagtggtgttgagagatggcatgatgactggtggcatgtgcccgggatggtaggttgaactagtggtgcatgaatatagcattgtgatcatagntaagacctgtatataatattttaatggtgatattaattagcactacattagtattgatgcatgcattataatattattat

SEQ ID NO: 6351 - DNA, 233 bp, Oryza sativa
gctcatgcacatgtctaattcacaatttacgaagctgctgtagaaaagatttctatatgttcatgggtccttgcgagccacaacccacttataaaatgatcggagatgaggctatatgttatttctaacattaattttgaacacataaaaaatatgctcattatgtattcgtggacgtagcattctcatcagtctttatatcaaatgacatgtgtacctttctctatgtttac

SEQ ID NO: 6352 - DNA, 448 bp, Oryza sativa
  unsure (1)..(448): unsure at all n locations
agcttgaaacgatggttatttaacttttttctaattatagatggagattcacaaatactccctctgtctcgtatagagacaactcctagcttcccaatgcatgattaaagaagaggataaaggaccaaaatacccatcattaatagcaaattagtattggtagataggtagataaggggtattgaaggaatacaatttttcgatttacgaaccgataatggatgagaaggtagaagttaatttattttgggaacaagtttgaattccagaagttgatgtattttgggacagagggagtatacttcaataaatgtgtactccgtatctttggttgggtatttcttttggttcggtggcgttttcaatggttcattaaactacactctctttntattgctagactgtaataattggctatagctcttctgagtaaagcgcaggatgtttg

SEQ ID NO: 6353 - DNA, 341 bp, Oryza sativa
  unsure (1)..(341): unsure at all n locations
cgatcgatcgagccatgtgtcaatgtaccaaaagggtcgatccatccaaccaccggccggntaagaccaagatgagagtttatctggatgatccgggagtaacatgggattatatcagctagtaacatgtacattaattgctagtatcatggcctgctcttacttactgtagccttgtgactaatgagcaagacaacaagtagtgataacaattcatcaggattagtgagataattaattcactagtatgcctgagtatccttgtgataattaactcacttgatcgcctgttagtgagataagcgacaggctaactgcttggaatttcctctgtgttcact

SEQ ID NO: 6354 - DNA, 410 bp, Oryza sativa
  unsure (1)..(410): unsure at all n locations
agctcaagaaccaaagcgagntcatactcttggaggaggcatgaccacaactcactactgcccatctgtgacagntgaaattcaaaggttgatttttccagccaacctcattcttctcgaatccaaggacctagatgtcatacttggaatggattggttggctaggcacacatgagtgattgattgcgccagccgcaccatcaagttgaccaatgcaaaaagagaggtggtaattttccagtctccagcgccgcagaagccagtgattactttaaaccacgctgctggtgaagaacaagacgtagcagcggataaaaccctaaaaaactagaggatattcctataggcagagagcatccagaggctttttctgacgatcttgacacaatgccccataaagggatatccac

SEQ ID NO: 6355 - DNA, 316 bp, Oryza sativa
acacttaaaactcagcttattctgtttctccacaatcattttcctctcattagacctgtgacacattttgtttgtgtttgtatggcagcggcatgaaactcttatcaacttccgttgtctagaactcattgcatgcacgactagtataaatggagctgcacatacaatttcattgttcatgccgcttaaactcttctgcttaaccaagtttgggaaaaatgggcaggtgagttccgccaatttatctatgggtttctcaacaaacatttattccacactgtatcaatggtgatggtgaggcttcccttgctttcta

SEQ ID NO: 6356 - DNA, 467 bp, Oryza sativa
agctaatcctccaggtcatcaccttcgttgagatactccttctctgatgattgaatattgcaagaatgagcatatgacatactcaacaagccacacagcaaatatgcaagtgcacaggataacaaaggatggcataatatagctcatttgcataaacaacatttaataaatattcaagagaatagtaaaacacgtgtataattaatcaatattaaataaacaccatacaacacacccgtgttgcataagcccaacctcatttgaacaactaaccccggttgaacaaacccaacctccacaccaggaatataccattccaaaccaggagtcaaattaattatcacaattaccattgattaataatatgggactaatcacgaaaaacatcgctcaactcacccataaccgcgggtacggctattccaatagattaaactctgatcagaagtgtaccacttgtaccacaa

SEQ ID NO: 6357 - DNA, 291 bp, Oryza sativa
  unsure (1)..(291): unsure at all n locations
gtccatgaagtactcgcacgcccaaatcggagatcgcatgaagtactggctgtcgtcataantaggcgctgccctgcagtgcgaatccatcccgcgcgaatactcttccctttggatcctctccatcggtcctgagtaaaacacgagtgcacgcctcttcgaggtattaagacgaagaatatgaactccagaaagaactcacctgataatttagttgacgtgcacgagcgcgggtaataagaccatcatgctggatatggggggaccgggatgtattcatggtgttgatgt

SEQ ID NO: 6358 - DNA, 308 bp, Oryza sativa
  unsure (1)..(308): unsure at all n locations
tcgagaagcagagccgcctcctcgcctcgcctagctctccggaagcttcgagaagcccccgcgcggcccgagccatggagaagcagaagccggcaggccacgacgcccgcctncttctcgcgctgcgctgctccagggcgtcgctgctcctcttctcgctcccgcatccccgcgcggcgccgccgcggcgggcgacgacaccacggagatcgagctccactggcgcggtaaacccctcctccttccgctgctcatcctcctcacctacgttcgctggttcgtccgcgtgatattagcccttctcgcgt

SEQ ID NO: 6359 - DNA, 411 bp, Oryza sativa
  unsure (1)..(411): unsure at all n locations
aaacatagatgcaatccaatgatccatagtctgccaagctacacgctatctatntccctcttcacatcactttcagcattgcatacatatatgatgggaaatgagatagtggagttacatatagatttcaaccgattccagcagcatatccaaattacagaatcatcagggaaaaaaaaaggattcgagggcctgtcttgctcacaatttccatcataggagcaacttcttctggccacagcatacatcataccctcnttactccatgtttgtcatcctcaccgagctttctgttcatccaccgtggtaaaacatacctctgatctttcacttttcaaacnaatattgttcatgagaacaagaaatgcataattcacactgcctgattaaagttgtcatcagaggagttga

SEQ ID NO: 6360 - DNA, 271 bp, Oryza sativa
acagacaaagacatctgagtttctcattttagaagcaaaaatgacactagcacagggaaatcaaatataaatgaagagctcacaagagaagaagccacctatatatagcttacctgataaaccctgcaagatatgcaactctgctgctctctttacttcctgagaaagacctgcgtctatggtaatggaatgggcagaacatatctaggggctcatagctatttataatcatggcacaagctaagtaaactctcacctaatcctttgtcac

SEQ ID NO: 6361 - DNA, 308 bp, Oryza sativa
tggcatatacccatggacaattcatggcatagtgtccttgttctctacaatcatgacaaaaggtgacatgctcttctggcattggaagctcattgacctgggtggcaaatgctccatcaaacacatacctgattttggtcttgacttccaaccaatggtatctgtgaactcaccatcatgcttggaatggaccaaaggtgtgcccttgtaactttcttgagacagtggtggattgagtttaaacttgatttatttatgctaacccgtgacattctttctttttcttggttacatttgtacaggtttga

SEQ ID NO: 6362 - DNA, 447 bp, Oryza sativa
gcttgaacattcttgctgagacgtaatctatcatactggcttatgacatcttcactttcttaatgtgatgtatgacgtaaaccatcacccttgtttacgtcaagtgtagctgggatgtcctcatcaaatcctatctctcttaagcctatcatttaattgttgtccttagaaaaatcatatctgttggattataaacatacgtttcctgtgattcaatacactcgcaatactctgagatgaaatgctatatcggtttggtgcttgcggatttatctgtggccataacaaatactgacagggatttgattcgtcgagtgtctcttgtgattcatttaatttgctgtctatggcagcctgttatatatggcttttaatacaagttcaaattcaatatctatatcgacaataaaatttgaatcgtggaactatatatgtgaactgttacta

SEQ ID NO: 6363 - DNA, 362 bp, Oryza sativa
  unsure (1)..(362): unsure at all n locations
ctatcttatacctggatcatttctgatatggaaataattaccacccttgcagncatgctgaattttcgtgccaataattttctttgtgagaccaagatctttcatctccaattcatatcntaattgagccttacactgattaatcggtgacttctcataagaagcaatgagcatatcatcagcataaaacaacaaataaatgaaagatccatggggaaatttcattaagtaaacacaattatcataattgcttcatgaatattgttgcgcaatcataaaagactccattattntataccactccctatgagcttgttaagaccataaagagatttcttcaatgacacataaatgttttttct

SEQ ID NO: 6364 - DNA, 461 bp, Oryza sativa
agccagagataaagtcgctaatgccgctactccacttatccaggccatgttctttaataacgccgggtcgagtacacttgatgctgccgaaatctttgacaagctgagagtcgctccagatacttacttcaagaacatcaaagaagctggaagtatgggagcaagtctggcattggcgatgaccaaatccctctatccaagaagtgacattgatgccattgatggctttgcagacgggacgagcaaagaagctgctcttgacctcatcaatgatgcgcagaaagcggctgacaagattgctgctgatgtagttgagagattccaatatgtcgaccttcggccgactgggtctaataagtctgatgatgaaaaaactgatactgattgatataacaatgattttgatgatcaatgacggtggagggctcaattgacaatactgatgaattatgctatgcttg

SEQ ID NO: 6365 - DNA, 403 bp, Oryza sativa
actcaagcttctcctgtgaatgatagcaatatgcagtcctatcacatcatcacagaacctatcttgatgatgcagtcattagaacaatgccagctatatctctccagaatcaaaatgagcagccacctttgtgggtttcaattcgctacttatcattgtgtaatagaaaagttgcagcaatcatgtaataaatcaatatattcatgactattaacagtgagcttgctatgtttatggatgatttctgttgaggatacaatgtaccgatgttaagcacctttcctctttttttaaggcagtgcccttgtttcatgtaatatgggagaaatgtgtaataaaaacaaattctatgaggactctttcacaagatgctgatatgggattatgtgtataatatgttact

SEQ ID NO: 6366 - DNA, 468 bp, Oryza sativa
  unsure (1)..(468): unsure at all n locations
cgtcagtgtaaccatttacaacaagctctttctgtcatccatagactangaacatatccttaggtcttctcaagatcttcaagatattctttacagctatctagagactctcacctgcatctgattggtatcgcgctgttgcactaagtgcatatgagacatctggacgtgtacatagcatagcatacatgatggatccgattgccgaggcatatagaatcacactcatcttgtttcgctcatcagtcgtttgaggacattgattcttgccaagattaatgccatgtgacatcggtaagaaacctttcttaaaatcttgcatgttgaacctcttcaacaccttgtcaatgtatgtactctggcttaatccaattagcctctttgatctatctctatagatccttatgcccagaatatatgctgcttccctatagcctttattgcaaactcattttcacgatgtcttat

SEQ ID NO: 6367 - DNA, 312 bp, Oryza sativa
actcagctttgcttagataccaatatttttatatatgtcatctcaccttacctatattggcttttttttacctatagagaatatttaaccttttgtggaataaaaatgtgaactgtatgtctaacattgaatgtaaatatttgtcttgcctattatatgaagtatttttggccaatgtattcttattattcactaagcctcaatcaaccttgtagggtgatagtgttggaattaatgaatgggccctatcccactctaagaataattctttggaaaatcacaaaagcccacctcatgggatggcatgcatgt

SEQ ID NO: 6368 - DNA, 434 bp, Oryza sativa
aagctcttgttctcctttcttcagaatagatcatatacctaaccagtaaggcaataacagacatttaatatcaccttgcagatggactgataacttaattatttcaaaaacacaaacagatctataccgtccccgcataaaaaaaaaaaaagaagatctataccgaatcttcaacagtgcagataattgctgaagaaccagttcaaactagatcattccaacaaggctgcgtttagttcagcgcacacgttggattttgattgaaattggagatgatgtgactgaaaagttgtgtgtgtataacaggttgatgtgatggaaaatgactgaagtttggatccaaactttggatctaaacacagcccaagtgagatgctattccagggataatgggtaagttacaaggccatgtcactatgttagagtgctacata

SEQ ID NO: 6369 - DNA, 246 bp, Oryza sativa
  unsure (1)..(246): unsure at all n locations
atcttatgacgtacgagagatagacattctttctatcattaagtttgggaccggatttaccgtgctcactgtgacttgaaaaaattacattgtaattntaataattacaatgtgagtttgtaatacacactgtgtaaagattaaaagtaatttattcacaagttggaagaggggcttggcaagatggaaacatgtttacatatagtggatatagtaagcgcattaagaaaaaaagagcttgaattt

SEQ ID NO: 6370 - DNA, 332 bp, Oryza sativa
  unsure (1)..(332): unsure at all n locations
agcttggaagtgtgtgagtgaagtgagggagtgatgtctctatatanaggtaggtatgacgggtggcttaggggaaatgtccgaagtgccctccaacagtcatcaaggatgcatctatgacgtccacgccaaaccccacatccaacggtggagatgatggttcggccgaacctggttcggncgaaccanntgggttcgccgaaccttggctaagaccaatttggcttgcctttaactccattttcccctggacctactctatctatttcntacgatttcgggttgagcctcgggtatttttgataaaatcacaacccattcttgtatggata

SEQ ID NO: 6371 - DNA, 482 bp, Oryza sativa
  unsure (1)..(482): unsure at all n locations
tcgcgccgcgttgcatcttgtgggcttcaatcctgtgcgtgttcacaattgattcatgggtattcagatgcgagattgctaaggggcgatctatcccctagcgatcagattcggatcccctctccctcaccggattacttttctattttagtaaatatatacacctanagtttgtacacctcaagtgtacacatctaatagttagtgacccaaagtttataaatcaaaagttatatatccgatctagatttgaatctgaattcaaatattttatatatagtatttctatacatctaaagttatacaccttaaacgttatagactcaaagtttataagtaaaaagttatatacccgattcaaatgtgaatttaaaatatatccgattcaaattgaagttgaattcaaataattttatatatataagagttctatacatctaaaagttatacacctcaagttatagacccacgccaaagttaca

SEQ ID NO: 6372 - DNA, 436 bp, Oryza sativa
  unsure (1)..(436): unsure at all n locations
agcttgnttctgttgctcatacaaattattatataagaatgcttgccaaaagtattgaataggtaaagcatacgtatatgcttgtatgtttcatttttcatggnttctgttacaatcgttgacttcaaaacatagagaataatgcataagcaatttccaaagcagtgtagattttacgtatgtcagcaatgaactgctagccagtaaacttttgttgtattccttctacaaagactagttcatgctgtacttcctgtttaaacttgtttctagcgttcatccctgacaatatttgaattgcttgtgtagtgcaaattttatagcttagagctcttcactcacttctatcattgtggctatgattatttaataataccatattttattcttatacaatagggcgtgacacatgacatttctatagattcggagaaca

SEQ ID NO: 6373 - DNA, 502 bp, Oryza sativa
  unsure (1)..(502): unsure at all n locations
tgtatacgagaccacacgcttgttcacatctatcattgcatttatacttttttattttcgcaataaatacaaaaatctattagagttatagattaaaatgttctaatggaagttagaataattccatgcttaaacttctataagggcgtattcgattaatccccaatagatagggattggaggggtttgaggtagattaatttcacgcctgaatagggttggtataaatcccttctaaaatcctccttaatccttttgggagagagaataaccggtctaaaggaaaatttctacaagtggctttaaaaaaatcacgtaaaaactaaattctcatgtagaagatacttcatataggcaaaaagttccattaacgctagaaaacantcacacattttgttgacctatgagagaagtacaccaatanacagcanactcaccagtatacttatacatgacttcattatttcttaacatataatgcatactaacatacttatacatg

SEQ ID NO: 6374 - DNA, 242 bp, Oryza sativa
agttgtcggtaatcctctcctattttttttctattaattactctgaattcaatataatattcttcttgagtaattagaattatcttgcgagaattatctctcggttagttcgtaaatagcatacgggattattgtccactttattaataaaatatagtgattgctttggcgggtattaacacttaagtagatattaattgcttagacgtggggtttatgaaattgttatccagtaattgttg

SEQ ID NO: 6375 - DNA, 377 bp, Oryza sativa
cttcgaccggatcttaagcactgggctgcactatgggtgattatccttcttcagagtatagacggctatttggtatgtttttgttcaacagctaaaattggatactgtgctaatacatttggcaggatttaaatgacactgaccattgagaaggatgtcttcagtagacaaattacttattatttgaaaaatatgacctcggctacattgatggactatggtgatgaaattaagagcatgattgtctgaaaacaatggtatgcggccttttgtctataaaatgtttttctatggaagacgctacaaaccacatttggaagaatatacattttgaagagtttgtccatgatatgctactttgtaacaatgaaatttaa

SEQ ID NO: 6376 - DNA, 515 bp, Oryza sativa
  unsure (1)..(515): unsure at all n locations
cactatagatactgcaagctgtggaatatgagcactatggaggaagcacagacacaaacatgcttaggattaatttctctataacgaagagctataatgattagggtgacttgagcattttgatctggcaagagctacaagtgccatgggacctatgcggctggcactttcaaaattttacttgccatcgtcttgcaaacaaataggattcttagaagaggagattgttatgaacccaattgtgctgacaatgggctgtcaccactcttaaagccatgcccaagcaagcacagggagagcactatattagcagcacgagtagcatctgaaaagagaaggttgatcaattggtcaactgaagctctctgcggtggcggcattacttggatgcccgtgcnacccttctcattctcttctgttctcctctcgaccacctggttgtacaacttgattcccttttctctttgtcgccaaatactgagtgtgaacattatggttgtgttgatagaccaagg

SEQ ID NO: 6377 - DNA, 329 bp, Oryza sativa
accagatgacaggcgcagcttatgtctgatcgaagtaagccaagtcgagcctcatgcttccggcaaggagcgagaagaacatgttcagaatcatccttccccgaagatcacgaagagatttcccgaagtagacctaaacccaatctgatccgaagagtattactgtagcttctagatcgagtgttgctcgcttgcgcgtacgggtatggttcgcgtcactaggtgggatacgaccatactaagttgtgtgttaaacaacttgaatcaaacagcctctacgacagacaataggcacgtggttagaccttaattaacaccccttctccact

SEQ ID NO: 6378 - DNA, 448 bp, Oryza sativa
  unsure (1)..(448): unsure at all n locations
taacactgatgtntcatgaggctagggccacaggcacactcattgagcttcttgacagtgacattgccgangaaacgagcatgagagtgatcaagcgggctgcagatctatagagtcaatgcttgggtgttcctgggacgactcggccatcaatgacactagaggcagcggagctccgcccattagcggaagcagatgaagtgaaacgaaacccacagccacccttggtgctcgaggatctgagatttatggatatgggcacgacaaccaacactctctattgataaagcaagaccagtggtgcttatatctttgaaaaaaaagctgtgctgagtatagagtttgcgagataaccagggattacttggatattgattcccttggcgcgttctaaagccggcggattagggtcttcttacttggggggaggaacggctaggtgttttta

SEQ ID NO: 6379 - DNA, 149 bp, Oryza sativa
agcttggggggagtattttctcctcccactactgtaatctatcatccactgcatatctgtcggttctcaatagcagcctcatacaactcgtaaaacacattctaaatttgcatatactgaatatatcattaattaatgatagcgcttga

SEQ ID NO: 6380 - DNA, 429 bp, Oryza sativa
atgttgcactcaggttctttacatggttacggactgtacttcccctgagattagaattacatccttggccaaaggatatatatacaggtatcttctccatttggctgcaaaattatggtgaaattcacgtgagacctgccaattatgccatcagtaataacaagcgtagcatcacccatggtggatgtcggacattctatgaacttttcatgaaataaggacaattctccactagcagcaatgcagcatacatatcaagtgcagtcatatattctgaaaaagcaaaagaaaaatacctgtgacacatgcaaaggtcttatgttattatgtgcagccttgtatatggatcctttatatcactagactatacatcttccttcatgtatttacggaattagaagtaataccatgtcacctttaggaaagtat

SEQ ID NO: 6381 - DNA, 420 bp, Oryza sativa
  unsure (1)..(420): unsure at all n locations
agctntacatatggatgagcaattganagtgagtacagaagtgggtcagccatctgggatgggaggaaagattaaaaatgatggaagagagatgaatgaggtcatggtgaaggataaagagaggaatgacgaagacaaaatggaagaagacatgccaaaaaaacctgttatggcaagagcagtgatagctgatgtcaacacacttgaggagtttacattatcacagtaggagcaattagaggctgagggggaaagagttcagctaataggcagtgaagaaatggaatctcaggagttagggggagataacatcaaaggtaaagaagatcataagagtgaagaggaagctgaatttgaagaaggaaagaagaacatgaggctcagagataaagaagataagaagatattggaaatggcgat

SEQ ID NO: 6382 - DNA, 364 bp, Oryza sativa
  unsure (1)..(364): unsure at all n locations
tatctctaatcatatcctctaaanttcactaaattgcgaatgtttggacaatattatcacaaaacaacatattttcgccataataaactgtggatttagcatataatatattccgatactacagattgaagcccttttggtgcaaaaatataagatttaaccccaattttatcacaaaactatatatattttaagatgtacacacatcaatcatgctaatctgaaggggattcagaacattaaattccataattttagaacaataaattccataattttcattgaccaaattcatcacctgctacacattcatgagtataattatgtggtaacccatggatatggattaaacgaatctgaagtt

SEQ ID NO: 6383 - DNA, 383 bp, Oryza sativa
  unsure (1)..(383): unsure at all n locations
agctntgtagtgcttgtcaagctggcaagcttgttgcatgttctcatcctactaagagtatcatgtccacatctagaccattggagctcttgcatatggatttgtttggcccaacaacctataagagcattggtggtaatagtcattgtcttgtcattgttgatgattattctcgctatacttgggtgttctttctgcatgacaagtctattgttgccgagcttttcaaacagtttgccaaaaaggcccaaaatgaatataattgcactcttgtgaaaattagaagtgacaatggttccgagtttaagaataccaatatcgaggactattgtgatgagtctggcattaaacacgaacttttcgcttcctactaacctcaacaa

SEQ ID NO: 6384 - DNA, 397 bp, Oryza sativa
  unsure (1)..(397): unsure at all n locations
agcttcaatccttngaatcacagggccaaatatgaaatatttcctacaggatttgaatcctataaaattcctacataaatactctgattcatagggggcctcaaaggatttcttccatgaggttctaactcttgttaaaattcctccaaaacttgtatgagaagaggcattccataggaattttataggattccatagggttcattcctttgattcaaagggctttgtaggaaaaaatcctatatgaataaaatcctctaaaattcctatgaatttcctttgaattaaatgggggctattttaaacggtgtactgccactgcatgcaaaaatattccgactggtttgggggaagaagaagagttttggatttagttccgtaaaatactggagaatga

SEQ ID NO: 6385 - DNA, 208 bp, Oryza sativa
  unsure (1)..(208): unsure at all n locations
cgcgcagagatgtagcctatatgtgggggtgaatangctttcctgaaattttctcaacaatcgcagcggtttaattaacacggcccagaacctcctggtgaagaacaccggaactttctggcagagatgagcaacctggaactttcggagttcttgagccacgaacttccgggcaacatagaaaatcactaattggggaagtaaaaca

SEQ ID NO: 6386 - DNA, 186 bp, Oryza sativa
  unsure (1)..(186): unsure at all n locations
atcttcatagactgcgaccaacagtcaagctcacaaatgtgagttctttcaagaatgctctgcangacaacatcttcgcttatttaagccaacagaactcatttatgcatatccaacctgccttgcagctcacgagagtacatgcatcttcacttggagagggtatatatattgatactctcctct

SEQ ID NO: 6387 - DNA, 397 bp, Oryza sativa
agcttgtgctaaggctataaatagacctctatggccatgttatgggggatcccaaaaaattctacgaatcaatacaattacttttaaattccaactactgttaggagaaccacgcctttcgacgtggcatagttgtccatttgacaacaatcctatacgaacaaccatctatttttatactagtaaagtcaaagggatacttaaaattatgcacgcttaaaatattataggagttaatcctatttctattattgacatttagtataactaacaacgatctcttcttctgtgcttcgtgcatatattcagcacccatcttttttgctgcgaacttcactcttcttccaatcactactacaaaacattaaataggtctcgccactatagataccggtag

SEQ ID NO: 6388 - DNA, 393 bp, Oryza sativa
  unsure (1)..(393): unsure at all n locations
agcttcngcgagaggtgtgagcgcaagcccctccgtctagcgtggcgacgatcccctgaggtatctggaaatccagatcctcactgtctccgccatcatcggcgggggccttgttcttggcctcctctcgctggttgccagttgaggtcgcgggggctttgccctcgcgtcgaccctgccgcttctcctcatcagcctttcggaaccgctcggccaaattcctgaccgagcggcagtcggcgagactgtggcggtaggtgttgtgtaccgagcaccacttgtccgccgactggccctcgccagagggaacagtggggctcggcttatcgccgggggcctttcctttgcacggggcccgcgtgggcccgtctgctgcaaggacatggccctcgt

SEQ ID NO: 6389 - DNA, 399 bp, Oryza sativa
  unsure (1)..(399): unsure at all n locations
agcttgcataaataatcttaaattatttttgttttctaatcctttgaataaaaaaaatacatgcagaaaagagttgttaaacactgcacaatggcaagttggcagtacacaaaaggaagtttacgacaagaggtcgcgaccatagatacaaaatcaggacgggaacatcagagaaacgcatttagtatttctgatatcatgtctttgcctttatgtactgccatttctgttcattaaacttcatgagaagacataggtttcagacgactctattcatccgtcattacctctgaactcaagtctaaaggctaaaacagtgcatggcctgcaggcactagtaaagatgatatcatatcactatatatatcagntgagttgatcaccattatctaattacaa

SEQ ID NO: 6390 - DNA, 311 bp, Oryza sativa
  unsure (1)..(311): unsure at all n locations
catcaccacttgctaattggatttcttttcatacactagaccactcgctaattaattgatcaacatcatggcccactgcaacgntcttcttgcaatctggagtcttatgatccgagaatccatgcctgaaaanatattttattagtgtgacgaccgacatggttgaaactattagaatttgatttataaaatgatataattagatttttcgttacaaaatctgtcatacaaatataatctttgatgatctgatgacagttattaaatggatttgcccaagtcgaatgctggaaccacaagaaatacaaaat

SEQ ID NO: 6391 - DNA, 379 bp, Oryza sativa
agctttgcaacatacagaccttgtatcttttattcctaacctttgaacacagcagaactaaattcagtaatccatacatgcttcagttaagaagaaaacaataatacaaccggtatttattgacccaagatgttttgctctgtgttattgttaccaggacttactggactaaccaccaaaaatcacacaatttaacaaagtgatcatttacccaattacctaaactaacattgaactatggcaacatgccaacatcattgtttgacaacactcacaccttcaaggtgtaatcaaggttcaaaatatcggtgttcaccctatgaaatctgagaaccagcccataaccgccaattaccagatcttagtattagcacaaaaa

SEQ ID NO: 6392 - DNA, 171 bp, Oryza sativa
ttaaataaaaaaagaagtgatgttactgtagcactttaaccactgtatgacacgcacaatcacccaatgtaatttaaatttggcaaacattacggttcgaagggcaaagtgctaaatattcccgcaaccaaaaaaactgaatcacctgacgtatgcacggacttctcacac

SEQ ID NO: 6393 - DNA, 390 bp, Oryza sativa
  unsure (1)..(390): unsure at all n locations
agcttgactcganttggtcctttatctgccgtatccagatnttatctgtaattgttggcattttcatttaccattctgaagtgattaatgcgttccaacaacaaaagatgctggctagacgcccatctacatcgcaattagtagtagttgcaacatcactgcacctactacagaatagacctgcgacttgtgagatcattccaatcacagaaataggaccggctatatctagaaatagtacaagaaacagcttatccttgtttcttgtcataacaacgtgccaaggacccttttgatttgcaggaaaacatacgaattttagaagattttaatattgtagaaaaattcctatgaagatacttgaaaaatgattgaatcatatcctatcct

SEQ ID NO: 6394 - DNA, 214 bp, Oryza sativa
gagagagacactattctctaaagtttcgaacttctcttcaagagaaggtatgcacttgtccaaccatccactctctcttgaagttgagcgttcgccacttcaagattatcatgagactctttggtttgcttgtagagccgtaccacagcctcatatttctctcttcttggcatgctcactcttgagttcatgagatcgctctttctcacgaatg

SEQ ID NO: 6395 - DNA, 400 bp, Oryza sativa
agcttctggtaggactcccgaggagtatgaaaagaagggggatttgacaggagtaagctgtccttttagtataaccccctgtattcttatatgtctaactattgaccttcgttacctctcacttttttgaataggcttcaattcttcggcactacaatgaaatattaaggtcttgtaatgctcttgattaccatgattttattaattcatcgataacccttctcacaaagtttcctgaaggtaatttcagtcctgatctcacaatattatctattgtgataaatttttaaataatatgattgtgatatgatatctctcatgcagtatacgacgagtgccgaaatacatggcaggcaataatagttgatgagtttcaggatacaagtgctatgcaatatta

SEQ ID NO: 6396 - DNA, 275 bp, Oryza sativa
  unsure (1)..(275): unsure at all n locations
tgacagcgatgttctaagagtataattactaattatctgtttgatagtgatggcgatcagtagtcacactggctaagtccaatntgtattctccagtaggtgtgcccgcaactttgcgtatatgaagtgccacatagggattacttgtgttgatcccttatcattgtgtgcatgcaatctgccaattttcacacactgntagacagcatatgcaagggaaattatgaatgtggtcccttgattctgggcactccagtcaaataatattagctctg

SEQ ID NO: 6397 - DNA, 400 bp, Oryza sativa
agctggcattaccagagtattttcttgaagcacattatgttcatatatcaaatcaaaatatttaaaaagatcttggtgttcaaagttttaataaagctatggctaagggcattttcactttcctaccattttcaaccttacaagttttggcgttagcatattttggtatagtcaaaaactaaacataacgttaccatttaccctaccaaatattggtaattctagaagtttcctctcactaaatctctctcaatggtaaggtttcataccaaacacaaccaacactatcaaattttggtaacttcaaaagtgctaaattttgacattaccaaattttggtaaggttgattttggtaacaaagtaatgaacaagcagccctaagaaattttctgcatgatg

SEQ ID NO: 6398 - DNA, 401 bp, Oryza sativa
agctttagagtcgaagctgtatcagaaaagtcgtcttgtatgattgacgcttgagtggaatgatgcgaataacatgaatccagagaattgtttacatgttgagattcttgaaggcctcgtgccaccaccacagttggagcacttatcaattagaggttacaaatcgactacctatccaagctggttactcgaaggttcccagcttgagaatctagaatcctttgctctttataactgcagcgctttagaaaggctaccatccaataccaagctctttatgcgttgccgtgaattgagccttaagaatctcccgaatatgaaggaactatcatttcttccagcaggtctcacaacgttgtcaattcgtaggtgcccactgcttctcttcgttaccaatgatg

SEQ ID NO: 6399 - DNA, 115 bp, Oryza sativa
atcttcagtttacaacaacttatactactagtagtagctactccctccatcctattatatattgacctattaccagatgagacactctatagtacaacacatctgaatatgtgtt

SEQ ID NO: 6400 - DNA, 398 bp, Oryza sativa
  unsure (1)..(398): unsure at all n locations
agctnttacatggcagcactgttcctcacacgcgccatgtcgtgggatcaaattactgcttcatgaatgtcttcgaagacaggattcctggaagggccatcatcatctctgttgtatgcgtcttcaaccatctttatgcccattgtcaaactaatttcttcagacttaaagatgcgaaattcttattttcttggtcttcaactccacagatagataatcttgtgaagggagcgtctggtcaggctgtccaaaacctcaatctgatgatgggcctgcctgagaacagagggctgcaatatcagcccctatttccatgatcctttgcatcggtacgtttccatttcatatgaaattctgtcaagatggtgcttctgagttcattgagccatgttatcatc

SEQ ID NO: 6401 - DNA, 354 bp, Oryza sativa
  unsure (1)..(354): unsure at all n locations
ttgacgatattccacttcaaatntaaaaaatcgacgcttctatttatgtggngtttggatttagaaactataataaaccctgtgtaacactaagtcgttctatcatttcccatattcatattgatgtaagtcattctaacatcaatataaatatagaaacgacttacattgttaaacggagggagtgataaaactaattacgtatatggaaactaatttgcgagaatagttgtntaaacctcattaatccataattagcatatgtttattgtgcatacatangctaatggctcaatagattcatctcgtgaattagtccagaatatgaaatgtatgtgtatagttatgttaata

SEQ ID NO: 6402 - DNA, 400 bp, Oryza sativa
agcttctacactagaagttggctttccacattaatatccattcaaataaactcctacattgaactatgctttcttctcctagaaaagttcttggcaaaaagaaaatgagaaaaggaaggaaaggcatggctagaaaaaaaaagaaagaaaagaaagaagatggaaataaagcttgctctcaaaatattgagcaaagaaaatatagccatgccccttccataatcatgccaagagaaccaattagagcgaaagtataggaaaaagggagaatcatttctttattccatcattccacaaaatattttactttttcattttccgccataaataaagacccttgttctaggagtatgattgattatcttcttgagtcaatatttttggctctgcactatatatg

SEQ ID NO: 6403 - DNA, 410 bp, Oryza sativa
  unsure (1)..(410): unsure at all n locations
tcatttggagcaagnaaactagtctaataggatatgcctactttgcactttattttatggtatctggccaaatacattgctacttaattagacttcactctatgccagatatgattacctcataatgcataaccaatgcagactatgcaaggttaaccacttaattatgcttctcgaaatgcagaactaacataatcaaacttctatatcttgtaaagtatgggctatatgaagttcacccaaactgtaacgctatccagttgtcttgtctacagtgccgtcaatggggacacaacagcaatgaatataaaatgtggacactgaccagttctcgaatgtatttatgtaagatggagatcagatcttggattgtaaaaggacatgaccttgttaaattcaatggtactcta

SEQ ID NO: 6404 - DNA, 372 bp, Oryza sativa
  unsure (1)..(372): unsure at all n locations
agctntggagaagaagncttaagtgttgttctttcttataccccagntgagcgcctgtgaagatggagccgtaagcctgctactccgctgctgtttatttttgattgtcatgccttaagtgcctctttaataatgcgaatattatcgatataataaagatgtgtcttttatatcatgtatgtgtggcgtacccccgctttttctgggacggggattaaaacactagcgttcgggaaaatatatttatattggtcgcgacactctgttaccagtgatattcatctgtcccaatgtataggttgataaatgaagccttcctggaaagaatagaccttacctatggacaagaccttaaaggaactaactcttttt

SEQ ID NO: 6405 - DNA, 307 bp, Oryza sativa
  unsure (1)..(307): unsure at all n locations
cctacaattactttggtcggtgagaccctatattttacctgatctcctactgcanactccaagtctcgccttcttgtgtcagcatatctactttgactactctgtgcagccaacatatgttgtccaatttcctgtaccttcttcgatggttgctcaactatctcaagtccaagcaaagccctctcacctatagattcccaacacaacggtgaaacacacttgcgggcatacaatggctcatacggggccatctttatgctatcctgataactgttattataagcgaactccactaaagcgagatgat

SEQ ID NO: 6406 - DNA, 398 bp, Oryza sativa
  unsure (1)..(398): unsure at all n locations
agcttaattaagtttcatcaaatcgtataaagtcacatctggnttttgattgcctttgaagttctacggggcaaattcttggaatctgatgggattccatccccgagtgacaatgcaatcagttacaagttacaacttcaatccaattctaatttttgagtaacaaaaatactctccgtttattgaacggtaattttcatcatagcaatattacagaaatatttaccaagaattagttcaattgctcaaaaagaaaaatcttccaaaaaaaatcctccatttcaaagaagacaacgagtaaggtaagcgcaggtggtatggtggtggagtcgtgagtacatcagcgataattttggtcttactaaaattatgttacaaactagcctgcattgacttca

SEQ ID NO: 6407 - DNA, 250 bp, Oryza sativa
taataaaaagcggattgataatagtacatattcagatcatcaagccgaaattggaatactattatccatctatactccttgctgcattctcctttgcacaggagtgtttcgctaatctctttcgtgtgacaacacgataccatatgcatattggcatattatggttgtgaggaaatgtgatatctcacctttatgagtaaatttctattgtgaaataagggtggctcctggaaaatttatctttatcttt

SEQ ID NO: 6408 - DNA, 394 bp, Oryza sativa
  unsure (1)..(394): unsure at all n locations
agcttcaatgcgtggggaacttatagatggactccttcccaatccaagatgagctttaagatagtagaaccccatccaatcatgccgtgcaaagcccacattcaacaacaattaccactgcttgcacgccacccggtctgcccacataggactacctattttcctttcggatgtggggtccacctttancaaactgctcggtgtcaatccatggcttgaggatggatgtcatgggcgacacctaaccatctaagaggttaccctctagcaacttgacgatgatccacatgtgcttagatcctcctagccatctcacaaacaccaaccctcaccaccaccccaaaattcacactcaaatcaccgtggaaactcaagaacaagatggaagaggcaa

SEQ ID NO: 6409 - DNA, 393 bp, Oryza sativa
agcttgtgaccagcttcttcaaattcaacactcgacataattgtcaaacatatggttcttcgaaggttaatgagattagtctcagtttgatccctaatctccatctgctcttcatcctcttcatcgtcagattcttcttcagcgtcctcatcagaagcatcatcagacccttcttcatcatcagaagattctgctcccaggatgcttctttttaggttctcatacgccttctcatcttcagcaaaattaggatttgccctgaaaacatctgcaggttggaaaaggtaagtgcaatagcacacagaagtcttaagacacatgaaatgcaggaaagtttcgagattcctatgggaattgaactggtgtctgaaacttcaataaaagcgtcgtatt

SEQ ID NO: 6410 - DNA, 387 bp, Oryza sativa
agcttgataatttaaatttcgactgataagcataattataagcgaaaatataagaccgtgtgaaggaaatttttcaagatgttacaactctgactaacttcctttcaaaatctctacatgaatgttccttctataagaattccagagaaaatgagagtgctgtagaattaaaatcctcctatagtataaataaagctactttatgtgcttatatttttttttctaaaagtaaatattaaagaaaatgtcttttgtggccctccaaccccaatgatgcccattgcgagggttttttttttttatatataaataagcgacccaaccattccccgggagtcaaggtggaagagacggacagaggccactacccgtgcaccacgccccctc

SEQ ID NO: 6411 - DNA, 319 bp, Oryza sativa
  unsure (1)..(319): unsure at all n locations
tctagaactcggaagccgacactgactctcagccgatgatgtcttcaggctttaccaaatttcactgttaacaacacgacatcatgacttcacggttttagctgtagaacactacatgaagtgactgtggggagaaaacactctgtaaacatgataattagataatggacaccgcgtccattagaatattaattgtcggtaaattgaagagagaaatcatgtgaattctntgaaataccctaggtccacatgtcaagtcccncatctctctatctctattctctcgcacataggccctgcctctaagtctctaactact

SEQ ID NO: 6412 - DNA, 389 bp, Oryza sativa
agcttgagaaatccaaagaagacaatcttgcttagagcaagcgcaatgaattgttgaagtttctgaatgcaagttatgattgacagtttgttggaagtgctgtcatttgctgccttttggatttgtcttgatactaccgcttagtccaccagagctgttggttatatttacaagttttttgttccctgttattctagttatggcatgaccgtctgtgttcatgccagcacttagatagttgtcgcatcaccgttgtcactaaaaactattacatttgatcctgggctgataatgctttcaattttcatattattactagcatatgcatctgagtgtttcccgatattttttactcaagtattaatttctccctttgctgtttctgtatg

SEQ ID NO: 6413 - DNA, 261 bp, Oryza sativa
  unsure (1)..(261): unsure at all n locations
ctgcatatctcatagatacacgtgcaaggcttgtgtactctctatcagatataataatctttggcacaggggcttacccttacccctgattcccacaagacactacctctccttgacttatgcagtttgaagacagaacatcaatgagagcaccaatcacctaacctttatttaactcttattccggaagttttcaaatgatnttgaaaaagaaaacctagttcctcgaatgattcactctaaggtttaatatgggatctc

SEQ ID NO: 6414 - DNA, 398 bp, Oryza sativa
agcttctcctgtgaatgatagcaatacgcatttcttcttcattatctcagaaccaatcaaggatgcagtcactagaacaatgcgagctatatctctccagaatcaaaatgagcagccacgtttgtgattttcagttcgctacttatcattgtgtcatcgggagtgtgcagcactcatgtaataaataaatacattcatgattataaacaatgagtttgctatgtttatggaagattcatgtggaggatgcaatgtaccgatgttaagcacctttcctttttgtttaaggccaggccttgcattcatgttataagggagacatgtgttataaaaacaagtgctatgaggattatttcggaagacgctgatatgggattatgtgtataacttgttactga

SEQ ID NO: 6415 - DNA, 402 bp, Oryza sativa
  unsure (1)..(402): unsure at all n locations
agctnggaagaattggaagtcgaagctcttcaccgagtatgtcaacccgcccggcaatcatacgccgttcgatgaataccctcaaataaccgaagcggtgtgggaggaattctgctctctcaagaccacccaagagtttagggaatccagcgaggcacatcgcgtactgcaacagcggaatgagcacccgcatcggctgggcaccgcagggtacatcggcaaggaggcaatatgggcccaagaagatgcagccgctgcagcagcgaatgtacctgccccgttttcagacatccctgaacaaagagctcgcaactgggcgcgggcaaggggtaaggtcaacccggacggctctgtcacatttgagaacaaaagtgatgccgtcgtctatcaagaactggtgag

SEQ ID NO: 6416 - DNA, 376 bp, Oryza sativa
atcctaatgtgggatggtttggtccgggggatgccaaaatagtgcttcaggatccattacgcgttcaaggccttttgttcttcttcgcatccgttattttggcacaagtttttttggttctcaaaaagaaacagtttgaaaaggttcaattgtacgaaatgaatttctaggtcccgggatttcttaccatcaagttggtaaaaagccgcgatttattggcgattgctagaattctctatgatccattttggaaatcttttttttgtttaaactattttttgtttgcgagatgtcttgtctgcaattccttatttctatcatctcatgcaaaacgaggagaatgcaaggcaagggcgagaacaataaaaggaacaaa

SEQ ID NO: 6417 - DNA, 206 bp, Oryza sativa
attaaagtatgccgttcgcggttcatttaatactcatgcagggctgctcccgtataatgagcgaggtattgtaatgtagcatgggaatccgccatttcagctactacaatagtgtattccattggcccctcttcatggaaaagagttactacttgagctacggatgatgctctttgaccgatagctacattaacacatattacatc

SEQ ID NO: 6418 - DNA, 275 bp, Oryza sativa
  unsure (1)..(275): unsure at all n locations
ttttttataaataataaaaagaaagagcgtgcctcgaacaaaaaaaacaananaaataaaaaaggggagggagggtttttttgattaaaaaaaaagggaaaagggacaacagaggaaaggatgggggaaaaaagggaagaagagagaaaaaaaggtaaaaaagaggagaaggaaagtgggaagaaaaccggacgaacgaaaaacggaaagaaatatcaaagaggaatcggttgatggggatgatcgggaaaagaggaaaagagctctaaaaaaga

SEQ ID NO: 6419 - DNA, 395 bp, Oryza sativa
agcttatgagtctgatacaccttatgtccccatgcttgcttgaccatctataggtgcaatttcggcattactcattagattgcaatgcttctgggaaattatcttgcgtacccacctaaaaaaactaacataagtctccttttagtttccccattctcgtcaccatctagatggcaccagcgtggcaccaaggggctatgatatgcaaccctctttgcaactttattaagggtaagcacaactcgcccagtgaaaacatccttagcaaagtctttgtcgttgaaaatggcctcaacataggagaattggatttgttccttggagaaggcaaagacatcgttccactttgggttagtactcttttcgaagtgtggagtggtgctctaattgccaaa

SEQ ID NO: 6420 - DNA, 394 bp, Oryza sativa
agcttagggtaatactttcgcatccattgattctcctgtataagctctcatccactatactgcctttgccaaaggcaaataaaccacctcggacgtcagggtgtcctgtagcatttcatattgttttgttgccacggcatataggcctaaaatgctgtccctgatcaagcacagcagtgccactgagaatggattcatctgtgttcactttaaaaagaccagctgctggtggggtcacaactcaccgcttgctttcctgatgcaaatttttcagccttctgttggtcgtgagttgtttgctgcgggctttgcaagttgctgggcccaaatgaatgaaacatcccaggagcaacttgtgagaagtctcaagactgcattctcatctcagaacata

SEQ ID NO: 6421 - DNA, 385 bp, Oryza sativa
agcttgtaaatttttgaagtttatgctaattgtcccgaagcttctcgccacaaaaacagaattttgcaagaggaatttggcgattttaaatttgccgaacccagcaaagctggggagaatcggatgtaactttttttgtagatgtccgtggatatactataagcctaatttcgagtccgtatgaaaaagatattactggtttaaggaaggtcactcgaatcagggttctatttcctttctagtggcggcaggatacaaggcaactcacaaaagctatcggcaacagatcaaacacaaatagaaagtgatttggtgggtgactgcgacggtggtgacggtggtgatgacggcaaaattgatgaatgtggcgatgtgcggtggtggc

SEQ ID NO: 6422 - DNA, 395 bp, Oryza sativa
agcttgagatatcgactctggaggatgagagaaaacattccacatatgagcatgaaagtttctctttcaaaaacccctaggattcatgctcacaaaaggaatcccagaggaccacttccctgtgtgaagaccgcaaccacctttcggtcctcatttctaacatgtatagaggtgtggttgtggacgcttatatttatcacaaatactgcaaatctcgtacttgtttgtggcactaatcttgcagagtgatgtcccaatggtcgagcttgtgaccataaacaaagcactactgggagatagcccggattaatatggtaagtttcctttctaataaaagcaagaaccagttcttaggataatatgcacctttgggtattcttggccgctaaccattt

SEQ ID NO: 6423 - DNA, 398 bp, Oryza sativa
gctttccctaaacactggttctcactagtaaatcctctctatactggcctatcatttgcttggtgtccacacatgttcccttggattcgatacccttggaatactccataggggaagtgctacatcggtatatccgtacgttatggattttatctgtgaccgtatcaaataccaacaagcatccagactacatcattaatcagattcagttttctcatcgtcagaatctttagacccagtcggaccaagattggtctcttgaaatctatctaagacatcagcaacaatcttgtcggcagccttctaggcatcactgatgaggtcgagtgcatcctcctcgcttgttccgtctgcaaagccatcaatggtgtcaatgtcaatcttcagatacaacgatt

SEQ ID NO: 6424 - DNA, 350 bp, Oryza sativa
  unsure (1)..(350): unsure at all n locations
tacgtcagcagtggagacagcaaatagctatatacatacagcagccggctattagcacaagcttcaatggattaatatatcattntttttaatttggcatgtcgcagtacagcctgctcccgtcgccatcgcttcagactgctcttttctattgattctttcgccttggatctcgtgtgcagtcggcgactaattaatcgccggctcatacactctctcctatcctggtcatcgataacgtcagcgtggatgcactatcctagtaaaaatttattggacttgctctaagtagtatggaatatgatataatatatgactacntttaacgatgaatctatactagatagata

SEQ ID NO: 6425 - DNA, 401 bp, Oryza sativa
agcttgctgatgtgaagctgaatatgagctcttcttaccatccccagactgatggacaaacagagcgattaaatcaatgccttgaagcttaccttcgctgtacagtgcatgcttgtccgacaaagtggtccagctggttatctcaagcacaatactggtacaacacctccttccacagcgctttgggcaaaactccatatgaagtcttgtttgctcgaaagcccagccactttggagtagcagatctggggcaaagcactgtacccgatgtgcaagtgtggttataagaaagggcaggtctcaatgaactacttcgtcaacaattgctgcgagctcaacagcgaatgaagcatcaagctgacaaacacaggtctgaacgacaattcgaagttggagatatg

SEQ ID NO: 6426 - DNA, 400 bp, Oryza sativa
agcttgatctgagaccatgtagtgcgaaacttggatagttggattacttcttacttggatcaattagatgcataaactcatcgaaaattgtatgattggattagatacatgctgttcgttgtacatgattgtgcaatttttttttttgtgcagtggagctgggctgcatgttgggcatccccttgggtacacggcaactgacatcctgtcgaggttcaagcgcatgcaaggcttcaatgtgttgcatccgatgggatgggatgcatttggtcttcctgcggagcagtatgctatcgaggtttttactctttcttgtgggacttggtcatttagcctattcttctttatagcgtgctgatgcgttgctatgatctgaccgatttacattttgcacagacgg

SEQ ID NO: 6427 - DNA, 406 bp, Oryza sativa
acctgagctgcagcttcaagactgatcattgaaaagaacgcattatgtttattcaactaaattgttcatcctaacaatgctaactatggttacagcattccatttgaccctgcgtattgcaacccttacgtcagggggtatccttggttaaccgatccttacatgtacggcccaacgggcatgccttatggtggctatccgatgggcccttatggtgtcaattccatcggcaacatgccactgcaatttccatcagcaatgcaaggcaatttggcaaatactcactggtatgtatgttatcagacttgttatctcaccagtactaatatgtaaatgacgacaaaattaactaatagaacacattggtcaagagattcttaaaaagggtgccatttaaattccctat

SEQ ID NO: 6428 - DNA, 186 bp, Oryza sativa
atgtcataactccctcctttcacttgtctttatatgccgcgctacagcctgagtacctgtttggtgttgagggatatgtccaggagttgcgtacgatgtcctctgccatatgatttgggacttgccctttgtatgcctagatttctcatgatcgtcacgaagaatagtgccgagtccaagtcacct

SEQ ID NO: 6429 - DNA, 403 bp, Oryza sativa
agcttatgatacctgcaactttggcatacggacctgaaccagcaggttgcttctcaggtaataacgaaagaaaaaaaaaagtaatcaaacaagtaatcttaatttaattctagaaatttgagaccagattaagtttcatgtatttaacgatgtttcagtgctatctgtctggctcccttattagcattcgctagaaaaaatatacaaatttacagaagatttacttatttaacaggagactgtaatattcccggcaacaccacactcctatacgacatcttcctggttggattttacaagtgagcatatgatgaaaaggaatatgcatgacttgaacagactaggtgcaaacaaggtatggtggtggtattctgaacctgtctgatttttttttcatctgaaa

SEQ ID NO: 6430 - DNA, 181 bp, Oryza sativa
tctcggcttctatcgttgcggtgcttatgcttcgactcgacgagacgatgcagcatcagctatcatcggcgccgaaccgtgtgttgggtgaaatggagttatgcgctgggccaattgcgcgccacaacgcttgtcccggaggagggatatgctttgggttggggatggggatcgagtcacc

SEQ ID NO: 6431 - DNA, 396 bp, Oryza sativa
agcttcccattcttccacaattgttgcacatagatgttccgctgaggttgctcttccatcaaacactctagcattgcgttccttccatatgagccatgtcacaaggatcaccccggcgtcaaatgtctttctgtcttgcttgcgcactgattttcggactgaacaccaccaagaggaaagatcttctgatggcaccgagcacgaaaggctaagccgatctcgaatccttgtccaaacctgctttgtgaagggacaatcatggaagatgtgggagcaggactcgccgtcgtttgcacaaaggtgacagatcgaggccgaaatggttctgattttgcttcagtagaattctggttactaaccgcaaagttttctatgctccctaaatttacacacaac

SEQ ID NO: 6432 - DNA, 56 bp, Oryza sativa
ctttaaaaaaaaaaagaggtgaacgtgcagcaccacaataatgcggagagcgcgaa

SEQ ID NO: 6433 - DNA, 383 bp, Oryza sativa
cagcatgcaactaaccagacaaagcaagcattgtgcttgttataattcttctaccagctagaggtaatgaatgagcgactagctaaccccttctaccattgcaagcaaactagcacaacgatggtgaagcagaggcagcctaccgtttaactcaggagagcaacggtgaaggtgcactactcctgtgcagcgacaggcgtcgccggacccggcggagctgctggaaaaggccgccggggctcctccggcagcggcggggaggacaacagttagacagcactggagcgagcaacgggaggcggtcaccatctggaagaagacgcacggggtcaaacggcacaaggagcaccatgaaccactcccgcgggcgcatcaactaccgc

SEQ ID NO: 6434 - DNA, 365 bp, Oryza sativa
gatattttgttttttcaccttctagataacagtcgacttgaaaatgcttacctcacacacaagaaatgactttccagttaccattaggaatattaaataaccggtgggacacctactacatgagtatttgatggaatttattcgttgatggccacatgacgagagagctatcatatctgcatgtaacttcaagcattggggccaaaatactacctttgttaataaccttggctttgctttgtttttttagctaacactcttgatctctttggttaataaaccaggctatcagcacatatgaattaacttttgtaacccatgtgtcaggaatcacagtatgctcacaacaaacagctgtgttgttt

SEQ ID NO: 6435 - DNA, 255 bp, Oryza sativa
tctggagccgggccgtcattcatcacctatgacacgccagatgatgacacatttgctgtcctgttgaacacttttgtactttaatgcgcggatcaaccattcgaaaagttgacccggtgactgactataagaagtgagctccgaaagactgcgctcgaacacaccataggacttgtcagtgaatgcattgtcgacttggaatcacacaatatattgaccactgacactgattttctcaaagctctacatcccctg

SEQ ID NO: 6436 - DNA, 396 bp, Oryza sativa
agcttaacaactcgcatcctgctgttgagtctactagttggtctattcgaggaagagggaaatggtccttggggcacgccttgttgagatcggtgaagtcgacgcacatcctccacttctcattggccttgcgcaccattattggattggcgagccactcggggtggagaacctccccgatgaagccatctttgagaagtttgtcgagctgttctcgtatggcctgttttcggtcgggtgcgaatctccgttcgctcagcggcaaggacttctcctgagggtttgcgcttcccatttttacgacttctcttcttgcttgattttggtgcatccttgttactcgacctcttctcttcgcccgtcttgctttttccctctttgcatcttaatgcatca

SEQ ID NO: 6437 - DNA, 378 bp, Oryza sativa
tctgtgacactggttcttcctagtaattactctctaccctctgcctacattatcatcgtgtgcttggatgaaccggcgaaatagttgacacacacgttccctttggattcgatactttggaaatacttctaggtgaagtgctacatctacatcggtattctttgtgcgcttgcggattttatctgtgacattaataaataccaagaatgggctgtctctgcgccgtcgtatccacggtcggtcgtgttccacccacatgccccttctcgtgcactcttgacaggcttgctgcagttgtcgcccctcgtatcaatgcgtcggcatcgagatgagttgggaaagagataatgaagagagagagatagatgaaagagatat

SEQ ID NO: 6438 - DNA, 393 bp, Oryza sativa
agcttcaatgcttgggtgattctgttcttctttttggttatctgatgtctaagattttgtgcgtcaaccgccagcaacttgacaaaacaagctcagatatcaaccgccacaaagttagaattactacatgtgagaagttggtgaaaaaattaaccaagggcatcgaggagtctaggaaagaaaaggaaaagcttcttgctgaaaaggagaagatgatgtctattttcaaagagattgagaaggcagcttttactgttcaagaagattataagaaaacacaagaggtagtttagttgtattgccttacaagctgtaaagtgattggattgttttttcatttgttcaatggaaaatgttaatctgtttttttgcagatgatggacaaccataaag

SEQ ID NO: 6439 - DNA, 172 bp, Oryza sativa
tattctgttcatatcttaactagagcaaatgataaatgattcaatgcacaaatgtgtgttcatttaccaaccaataatgttagaccagtgcttgttcatctatcaaccaataaatgagtacatgaattgtacaccagcgtgatccatcatggctcgccggccttcgggatgc

SEQ ID NO: 6440 - DNA, 393 bp, Oryza sativa
agcttggctctgagagctgcgagagtgagtatgaggtgtagtacaatacactgttctcttcatccagctcttcatcaaggaagctagtagaaagatcaaggtagatcagattcgtgaggtggccgataccggcgggtacccggccggcgaaattgtcgtcggagaggtcaaggtgggtgagctcggcgagcagctcgaagccggtggctgggagcatggatgcactgaaatcgttggaggagatgtcaaggtactccagcgaggtcaggctgaacaatgcggtgtcaagaacctcagcttgcagttgatggccacgcaagtcgaggaaggtgatcgcacggccatcgtcgccgccacagcggacgccgtcccagtggcagcagtctgcgccgg

SEQ ID NO: 6441 - DNA, 182 bp, Oryza sativa
ctatggcttgagtgtggatcgggagaggtttgatgctgcaatggaagaaacgaggcacaatgctatgaatgcacgcttcaagggtgtcttttattcttactaagtgtagaagttaatcctgaatcgctttctccgcttgatatctctgataatgtgatatgccgctggtatttcattatatt

SEQ ID NO: 6442 - DNA, 317 bp, Oryza sativa
ccataagtccctatgctgaaaataactcaaatctaatcgttgcatatatcttttccttcttttaccatcctcgcgtggcaaaaatatatactatctactagaatggaatgagcaaatccattcattaacgaaacagaaaaacatatgtttccaaataatgcctccttttttttgtgaattactaataatgccttcttggaaacattatttgttgagagagagagagagagagagaggggttcatacaaaactaactatcgctgatagcgtatatgattggacctctctacaatggttctcacatgaccctatatata

SEQ ID NO: 6443 - DNA, 185 bp, Oryza sativa
taactccttgatgtggtaaccgtgacgctctgctggatttctctttgtgatgcctggccggctgatatgtcgggaaaccaattcttcattacaaatttttgtgtgctgcgtgcaaaatggtgctagattattgcgagcagtgcacatgagagcatgggcatgttctgcatgggtatgataacaca

SEQ ID NO: 6444 - DNA, 208 bp, Oryza sativa
  unsure (1)..(208): unsure at all n locations
caatctaattgtgtgctttccacaaccagagcgagacaagtctcagctcggtcgggaggtgagaagtaacaaatttatgtatcaagatttgcacaactcccagagttggcttcaaatctggttttcccaaaccaaaccaattntccatacttcccgataatagtggtccccaaacgaccaatcactttcatggactcccggtcccact

SEQ ID NO: 6445 - DNA, 404 bp, Oryza sativa
  unsure (1)..(404): unsure at all n locations
agcttaagttggagataaccagaagtctaacatggctcctctatctgttggtccagttcacggaaccaacctgaggccgaaccggaccactagagattccggcacagcagctggctaggggcctgtttgggaaggttttagcaaccgcagcttcccgcacaatcttcaacttccttcccttaaacagntctgattgttatatagattttaaaaattttttgtagttgtaaaatccataaaataaactagaagttacaagctgaaaaatccagcttctctagattctcgcaagataactatcaattcttatagtcttaagtttttcaaatagggtatagggtaattgtcgagcgaagccacctggcacccgtcgccaccgccattaccagggagctgttggaatt

SEQ ID NO: 6446 - DNA, 397 bp, Oryza sativa
tgcaagcttggaaggagagaactattctacgattcatacagcaacactggggacgaaatttcaccttctgaattacatgcactgcttgccatcaggaagccatattcaaaagatatgaataattttacatgaacaatgacattctcattgaaagtgaaacaacgaactaacaacttggagttctatgatatctaccattttctgagctttttcctttgaccagacttgaaaggtcttaacttagcaacagatgaactaaaaaacgctacgctctgaaaaacgaaagaatcaagaaaatcaaaatgcagcaaacttaaccacacaagtaagttgtaacagcaggaggtgaaaagatatatccatgtacatccatgaaactagacaagaaatctcagtc

SEQ ID NO: 6447 - DNA, 395 bp, Oryza sativa
agcttgttaagaatatggccagttgttgatatactatctaaatgataacataacatcactagcaatttttacactattagtacagagctgaatgtgttttgttactcctatatcaaacacataattttaatcaatacaaaaacattgacaaaaaccctgatctcagaaggtatcaggctttagtgataatgcaatattcaggctgatatgccagcaggcaaagccaactcggcagataagatatccacataaaatagaagtacactgacctctgtagcagccgcctattaggctcaggaaatgtctcagatattgccgcacgcatagaatttatccgagattccttgctctccagacctggaaaagtatgaaggaaatgaaaagaatgccaagga

SEQ ID NO: 6448 - DNA, 397 bp, Oryza sativa
agcttcacaagctactaaacaatgtttttttatataaaatctataagaaaatcactttaaaaattatataaatcaaaatttactcaattttcttgtttcttctcatatcaaacatatccataattaattaccatgaaaaacattagtagtgcatgtattttacttatcccatccaagtgagcttcattttcagtactctctccgtactaaaataagtgcagttttatactattcacaattttatactattcacgttcaacgtttgactgttcgtcttatttgaaaaaaaaattatgattagtatttttattgctattagatgataaaacatgaatagtactttatatgtgattaaatatttttaaatttttcataaatctttttaataagacgaatg

SEQ ID NO: 6449 - DNA, 142 bp, Oryza sativa
atatacatgtgtactgatgtgcatgtgtacctacttcatacatcgtatcgatcgtcgcattgctatattaacttctaatatttctatattgaatgaagctcatatgggagcgatatgataaatatatcgaatgggcatctcc

SEQ ID NO: 6450 - DNA, 395 bp, Oryza sativa
agcttcatgaagatcagtaggaattttaattttttgtttggatcattgtctgcaaaatgctggaattgcttgccactgagacttaacttcagaggaatcataggagagaacaaaatcacaggttgcctattacaaaagaagagaggcttatagcagcaagcagaggtgatcatagattgatatgacacaccaagctgtacatgcaaaacttagctttcgtgatgtatcaacatgccatttgctgatcatggtcccaacacaccatgaccttccattttgtgattgattgttcagcatctagccatctagctccagtccaaaaggctctttacagtgattactatgagcctatgacgaacacttgatgaataaagatgctgaagcaaagaaacttt

SEQ ID NO: 6451 - DNA, 398 bp, Oryza sativa
agcttcacaagctactaaacaatgtttttttataaaaaatctataagaaaatcactttaaaaattatataaatcaaaatttactcaattttcttgtttcttctcatatcaaacatatccataattaattaccatgaaaaacattagtagtgcatgtattttacttatcccatccaagtgagcttcattttcagtactctctccgtactaaaataagtgcagttttatactattcacaattttatactattcacgttcaacgtttgactgttcgtcttatttgaaaaaaaaattatgattagtatttttattgctattagatgataaaacatgaatagtactttatatgtgattaaatatttttaaatttttcataaatttttttaataagacgaatgg

SEQ ID NO: 6452 - DNA, 121 bp, Oryza sativa
atgtgcatgtgtactatcttcatccatcgtatcgatcgtcgcattgctaattaagcttctagtagatctatattgaaagaagctaatatgggagcgagaggaagaagagatcgaatgggca

SEQ ID NO: 6453 - DNA, 388 bp, Oryza sativa
agcttttcatgagaaactaaagcaatagactttgcattatggaattaccgcaatagctgttctttttctaagttagcagaaacaattcatcaaaaactcccaccttgttcgtgcgagagcaaattcataggctatgctcaataaataaacagaagcaaatacatatagaattggtaaacaaactgaaataaaatcgttgaaccataaactttagttacgtgaagtatactaaactttcatacttcgattctagccatctggctctagcctttgttgataaattggaggagctcagagacttgaccttggctgagtggaattttagactctttatgaaaagtaaggttcttttgctccttaagtttaaacaagtctattggcaaaaaag

SEQ ID NO: 6454 - DNA, 385 bp, Oryza sativa
agcttgttgcatatctccttactagctaggctatgacaactaccaccatcaatgattactttgcataccttgccatcaacttttgccttggtctgaaataaattgcatcgttgttcatgatcaatcttgggctgaaccgtcaaaacttttggagtaacaacaagtgaaggtccctcttcaaagtcataatacacaacaccattttcctcatcctcctcttgagcatcatcaaaatgcgtcaaatcagcagctagatcatccttatcttcacttgttgattcatattcaccatcctccaaaatcagcattgtcttattatttgggcagtccttctgcatgtgaccacgtccaaggcatttgaagcactgaatattgctactctttg

SEQ ID NO: 6455 - DNA, 393 bp, Oryza sativa
agcttctccttgtgaagggtttacataagcaatgcggccaattctacattgagaaccacgacgaccatcccaatatttgccttgattgtgccatgtccaatgttcagggaattctatatatgtaagttgcctagcagaagggttctccctattagcttctaaccatgcagttagtttggttgtagagctgtttggatcttcaatgacctcttcaagattatcatcttctgtgaaaataacattattctcaaatgggagatggacaagaaggcgttctacggagggatctgtgtggtggatgtcaaattgttgcaatcgccaagcagcatcatttggagtgacacaacgacattctagataattatctatttcattgatagcttcacttgatga

SEQ ID NO: 6456 - DNA, 401 bp, Oryza sativa
agcttggtctcctgatcatcatagtactgttgctactgcttccatcatcttggataaatagagagagatacgtcaagcagctcttgtaatggacaggcaggtcgttgtaccagaacatcaggatttgctgcatgttttcatccagcattaaaccatgtgaatcatgcaggctatcacacaagccctgaagttcttccctgttcctgttaggattggcataaaggacatggaggaatgctctgatgcacatgtcagtggagttggaggcacattttgacagtatggatctaatcacttcatccaggttaccgttgctgggatagttttcaaccagggagacagccttggcatggaagaagtcgatgagatgatccagaggagggaagactctgtcatgtggg

SEQ ID NO: 6457 - DNA, 404 bp, Oryza sativa
  unsure (1)..(404): unsure at all n locations
agcttccaatagatgacaatcacatatntgtagcatcacagaagaagcatggcgggatggtactgaaaaaagaaaactgctagcttgaaattggatttaagttgaagttggtacccggtagatttaaaaattgtaaaactctgaaatattcagtaacaaaggcaaccaacttaagaagaaaacaaaaaaaaagaaggaagttgagatagctataaactatacctgtattacagtcttagagccaacatatgcttcaatctttttccaatcacgatcaaacctgttatagtaaaagcaagtaaagaatgcaaagaataagtaggaaggaaccatttttcagttgtggtaaaaccccactcgtaatgtttgccacaagataagaattcaaagatcataggggggga

SEQ ID NO: 6458 - DNA, 80 bp, Oryza sativa
gagtgtccaactctctttgctgggttcttctatttctgcatggtgatgatctgagctcactgaagacacaacttggtgtg

SEQ ID NO: 6459 - DNA, 400 bp, Oryza sativa
agctttccttcagcatctcagctaaccccactgcatttcatgtacagccccttcggtccacccggaggggaatacaagtcaaggtgcacctagttggttgccgtcgaatcagccaggtctgggggcttcgccttggagtcaaagaccgcaattcgacttcatcaatgcccctcaggcaccaaccgttcggccgcaagcaccaacgccaggcttcggagcaaaccaagcaccaaatcaggtcgccatagcatggtcccagcaaacgttcgacccatccatggcggctcaacaagcatcaccaatcagagccgggtagccgaatgccatggcccatcctcaggcgcaagccgtgatttcacccttcgccacgccatacccgcagcaaggtgccgtgaacagg

SEQ ID NO: 6460 - DNA, 396 bp, Oryza sativa
agctttttccactgatcatgaaatgttaaataaactatactcacgaacataccacataaacgacacaagtcttcataaacatgaatatcatcatggtggtcattatccaactgtttcttatctatgtccgtaaccatattctagggcgggctattagtttgattcaaagtggtggcgaaatcacttgttgctggatcttactcgcctgtttttttctctcttgtgatggccataaatccattcgttcaaactagtaatggagcaagattttcactttttactctccataagaagtgaaggacggatatattttttctgctatcttctttacaattcaaaagacttacattgataaatagtgagtgattgttttatttgatcgcataattaagtacg

SEQ ID NO: 6461 - DNA, 395 bp, Oryza sativa
  unsure (1)..(395): unsure at all n locations
agctntaattgaatgggggggtggttctgaattctatntttttacaacaaatttgattntgaattctgatcgacgcagttcgctgggcacatttttcgccagttgcttcgtgcggcctgaatgactgaatgctcagctaaaattaccatattccctccatttcatttcatattataagtcatttttattttttgtaatgttaaatttcttctggtccccttcctctgtcttgttcagttctgttcatcttgcagggcggttttgctttcctagttctgttcatctgagcttattgtctttacgctgcatatgcgtgtttaccgatcagccccaaaaagtgtcgacgtctttttagcaagtccgttactggaattgcaactgcatgtttggcttgg

SEQ ID NO: 6462 - DNA, 393 bp, Oryza sativa
  unsure (1)..(393): unsure at all n locations
agcttaacaactcgcatcctgctgttgagtctactagttggnctattcgaggaagagggaaatggtccttggggcacgccttgttgagatcggtgaagtcgacgcacatcctccacttctcattggccttgcgcaccattattggattggcgagccactcggggtggagaacctccccgatgaagccatctttgagaagtttgtcgagctgttctcgtatggcctgttttcggtcgggtgcgaatctccgttcgctcagcggcaaggacttctcctgagggtttgcgcttcccatttttacgacttctcttcttgcttgattttggtgcatccttgttactcgacctcttctcttcgcccgtcttggcttttccctctttgcatcttaatgca

SEQ ID NO: 6463 - DNA, 399 bp, Oryza sativa
  unsure (1)..(399): unsure at all n locations
agctntcttgggaactcaagtacacaagtatctgaacctctgaggaaacagtttggaagtaaattagtgcttcaggaaaaataaaaatcaacctcagcatgaagcattagaccttgaaaattgatgaacatgtacttagttacctacccaggttcaaaatcaagtaaatacttctttatttgttgaacccttgatgtgagttgttctcctatagaaacaaggcagagtgtgcagtatgtaagagaaaagattgtgaatcgaatcaaaagaccaaggccaatctttaattagttttggatccgatttcttccaagctagtttcactgtagtactcaccaaagttgactagcaaatctagtctaacggactaaaatgaagctgccatataatgccagatgg

SEQ ID NO: 6464 - DNA, 390 bp, Oryza sativa
agcttacttggccagaataatatctgtcgactgcatgcgtttagttttccatctcgctcaactgatctcatcaggatcgataagaatcaactgtataagtatatggtcgatcgagttaggcaaatttctctatccatctaattctagtacagttactcgatattgagcatatataactttttttatatgttactccctccgttttatattataagtgtttgacttttttcctaatcaaacttatttaagtttatccaaatttataaaaaaatatattcaatgttagatttaatgagactgatttaaaattttagttgttactaattttttataaacatgtttaaatttaataaagttcgactaaaaaaataacgacttataatatgaata

SEQ ID NO: 6465 - DNA, 389 bp, Oryza sativa
agctttcacgttgaacaggttacagtcagtccttggatgtatgcaccattgtgcagggaaggaagaaatttttcagtgtcttgaatatgacttggggtatgccacaagcttggaattagttgatcgaatctgaatgatactttcttggctctcatctcaccatttagggataataataatacatttcaggtttggtggctgatatagatattgagtctgagaagtacaggtggatgggaagtgcacgctttgatttctatgtatgtatgcttttgttttcaacgttttcctttttatttttcaattctttactatatcatatctgtcatcaatggttactcatctacttgcacctttacaccatacatccaatatggcatgtatggtgc

SEQ ID NO: 6466 - DNA, 379 bp, Oryza sativa
tgtcctccgccgtgtggatgggtatcctactgctccgatgtttgtgtggcagtttctgccgtgccgcttcttctgtactgcacgcagcacgccatgtggggtgctttggatcaaccctgagtctgtggcgctatggttattgatttatgatccgctgtttggggtggacttgatggccgaataccgctttttgcttgctatttgtagctgtcgctagcgggaacttttcactgtattgttacatttcatagaaaatatgcccgatgaaattgctctatgtgtgtggacattgattggtttacaggaattggggcaaccatatgataactggaaatggcggctactttaaatattggaatatcgcaaatgggcttcaact

SEQ ID NO: 6467 - DNA, 336 bp, Oryza sativa
  unsure (1)..(336): unsure at all n locations
gctttgagggccaatgggcgccatccgactgttacggatgagaacctgaaggagatagtggcgcacggcgttctccctgccaaggagatcatcgggtggcggccagcgtgcggtgaggcttttccgtcccccgatacacacgaggttgtggtcttctnttatttcttttatggcggcttcgctcttccgacctctaaatttttcccccgcactttacctcgcctggacccacccttcctcaccttcaccccctcttcattttcactcatcgccctttcatacatgttagtgcacacccctcgcggatatactcacactcttcttctgacttcgctc

SEQ ID NO: 6468 - DNA, 389 bp, Oryza sativa
  unsure (1)..(389): unsure at all n locations
tcggagatgggtgctcgctgntcaagcttggacctcagnngggncgctngaaaacttgctaaaccttggtggttgcttattggagactaaacctttattgtggttgattgcttgatgaagcttgggatcaatcgagatccggctccttggagtccctcaacagaaagtaggatcgttgagatccgaatttcggtgaaaaatctgtgtctcctccttgtcttgcttgttatatttgcttccctgcttgatcataattatttactctatctattgcagctgtgtgttgtgaggtttgcgcctatgtttgctcccatggcaaaacaaactaaggagaccggaagtttaggtttttcagactggaacttctggtccgctacttctgttaatta

SEQ ID NO: 6469 - DNA, 395 bp, Oryza sativa
  unsure (1)..(395): unsure at all n locations
agcttggctngactacacgtacacatncacacccttaccatattcagtggttaaacgattccggaggagcaaaggtaacacaggtttgtagggtttcgttttccattggctcatatgcagattctgttgattgcgatgtggttcctatgcaagcttgttcacttttgctggcccgtccttgggaacatgataatgatgctacacaccatggtaggagtaataaatacagttttgtgcataatgggaagaaaattactttgctacctttgacccctgctgaaattgtagaagctgataaagagcgagctgctagtttgaaacttgatgaatctgaaaatcagcaagtggctaaatctgtttttccaactaaaaaggataagctttcacctagttct

SEQ ID NO: 6470 - DNA, 130 bp, Oryza sativa
tgaatgcgaagaagctaaagaattgatgttttatttgggcttaacaaaaaaattcaagacatgcttgattgtcaaagatatacatctctttctcatttgttacagcttgcttgcaatgcttgaagtgaaa

SEQ ID NO: 6471 - DNA, 401 bp, Oryza sativa
agctttaatctgatgatctggtcataaataattgatttgttcttttgcaggtttgaagaattcagaagctttaatttgctgggctctgaaattaagatgcaattaagttcatttgcacctcaaagcctgcatctttcaaagcctggatgcactgcctggtggttctgatgtccggcaagccattgccgagctagagctcccccttgatgctcaggtgcctcgcgttgtcaggatcatacttgtcagtcaggcaccactcgtccatcgcgaacaactttcccggtttcaacactcggaagatctcactgtagacaccgacctgaacgaactcacacaccgagaacgattttcattttaccaaatctgctggagatatgataaattaaagggaaatctttttt

SEQ ID NO: 6472 - DNA, 364 bp, Oryza sativa
  unsure (1)..(364): unsure at all n locations
tttttaattgaggcatgacttatgttctaagatgtttntagatgcggcttactctattacctactctacacatacatacattatggtgtctcttacctactattaccaccttgcacgagcccaccttattactatacgtagttgtgcaatatacattacggatgccctaagaattttgatgcaccgagcatctgatttaaatctgatatatggggtaatagggcaacaatattatattgggagtgtcatatggtgacatatttattatgggagtgtcgattntatttggagctagtgctctatgttgtcaatataacatggcgaatggtataagtttgaaccatataaaatgcctaacatcata

SEQ ID NO: 6473 - DNA, 394 bp, Oryza sativa
  unsure (1)..(394): unsure at all n locations
gcttcagccccgtgggtggagatggatccaccaatgatgtcttgaactccacaggctatccatgagtgggaatgcaagcacaacttgttcagtgccccgtttgacgccggagccagacatcgaacacttaacctgcgtcaccttggggtggtcaagattgttgatgtaagtggcaccgattgcgttcccaacagttaccaactccatagaggccactacagtggtggcggacgttaccactgcagccacagagagatcaggctcgacagtaggaccggagcatttcgttgaacacatggtgggcgtgacctcgggtgagtccttggtgacgacgcatgangcgcggtccttgtgcttgatggttcctaactcccacacagctgttggagcaata

SEQ ID NO: 6474 - DNA, 387 bp, Oryza sativa
agcttattcattcctgcatactattgtaatgaaaggtatctccaagatacagtgtgccatcaactcagtacaaaacttggcctaagattacattattggttcatcggttggaaggggctataaaaacaaagaaatgaaagaatacacaggtggtaacattgccaatgtcaccggtatgtttatgttatgacagtaggcttatctcttccagtgaagtccttcaactttgaaacagacagagctaggtctgcagaaattcaaaatagtttatgagtagcttatatatacacataatttcaggaaatgtatgcaaagaaagctcatctgagggcagatgataattacctattaaaggcttcaaagctatttgtgcatacagatcatgct

SEQ ID NO: 6475 - DNA, 280 bp, Oryza sativa
  unsure (1)..(280): unsure at all n locations
gaatggcgtgccgttgacttgactccgctgtcttacctacttatatttttggaatgtattacggaccgctcggtccgatgatctaatactacgcctgcgggcttgtgatgtaataattcgcactatactttcgcgtatgtgcatntggtatttcagttatgaactcgtgttaccagactacttgatccatggaaatggtactgtttacacgattgattcctgttataaaaacggtggtacacagtaatgtggtgcatactcttctaaaagattggagttc

SEQ ID NO: 6476 - DNA, 394 bp, Oryza sativa
  unsure (1)..(394): unsure at all n locations
agcttggattgactgcgactgaagttgtcaatgctgcacctgctttggtaaaagcgccggctcacatgagtatgcttatcgctctttcagagtctctcaggagggagtacgtactgaaaatacttgctggtaattcacttgatcaatcttgtagtgttgcaactgcaacaggcaacatatcactttattttgtgatcattaattgtaagcatattgctctttaccacttagcatttcatatatgcattcatattatttgccttgcactagtataatgcatcaatggacccagctgtccatctcaatcccatagtaatatcatattcacttctaactggagtatgtgcttggnctcttgcttacttgcttacacctaactgggagtttttgtact

SEQ ID NO: 6477 - DNA, 393 bp, Oryza sativa
agcttatacctcagttgagttttgcctgtggactgaagctgaagtcccgctaggatcgcccttttctgttgatgctttcttttccgtgtgaggactaaatgtctcttctgtaagtatttacgttttatttacattcggattgatatattagtttgtcgttttgtgtatcctagcatgattcctagacatggatttatacaaaaaatagtctagctaaatttctaggtgtgacggatagtttgtctcctgaagacataaagggagatctttgctattgcttttattaaaaacattgccatgagatgatttgataattttcattatgtgccttctagaggggcttctggaggaatcttggttctgtggattagtattgttttcttgggcaaccta

SEQ ID NO: 6478 - DNA, 355 bp, Oryza sativa
atgcaagcagtgtacacatctagtctctgattaatgatattaagaatagcttcagttctactaagttacattacctattgtgtcattgtccaattgttgcattaatcgtatcaaataccataacctttgtgcttgatgaaatatatatcttctctatatcatttaagatccattataatgattagatgatcttcctttctccaacacagttaggcttgatcattgttttcaaccataatttgcatatgtctcttgtcacactgcttaatacttcctaaagtagcactataactatctcgccttcatttgcagccatatctccttacgtactatactgcttatttgtgaacttatt

SEQ ID NO: 6479 - DNA, 396 bp, Oryza sativa
  unsure (1)..(396): unsure at all n locations
agctttntcatttcggttaaaaacaacgcactcacatgtgccaatatcggcattaattgacaaaagttcgccgcgcgagccacgaagtgagtttttgccacgaacgcacccaatacactccaatatgtccaaaaatcatgtttttggtgcttttctaactttttcattccgttatataacgtcgcaccaacgtgtgccaatatcagcattaattgacaaaagttcgccgcacgagtcacgaagtgagtttttgtcacgaacacacgcaataccctccaatatgtcaaaaaatcaagtttttctccttttagaactttttcattccggttaaaaacaacgcacgcgcgtgtgccaatatcggcattaattgacaaaagttcgctgcgcgagtcatga

(The sequence listing continues in the following parts.)
